United States Patent Application Publication US 2005/0108791 A1 - sequence listing, part 5

SEQ ID NO: 18008 - protein, 338 aa, Homo sapiens
MADQAPFDTDVNTLTRFVMEEGRKARGTGELTQLLNSLCTAVKAISSAVRKAGIAHLYGIAGSTNVTGDQVKKLDVLSNDLVMNMLKSSFATCVLVSEEDKHAIIVEPEKRGKYVVCFDPLDGSSNIDCLVSVGTIFGIYRKKSTDEPSEKDALQPGRNLVAAGYALYGSATMLVLAMDCGVNCFMLDPAIGEFILVDKDVKIKKKGKIYSLNEGYAKDFDPAVTEYIQRKKFPQIIQLLMGPGMWAPWWLMFIALWSTEGYFCTPLTRRAPMERLRLLYECNPMAYVMEKAGGMATTGKEAVLDVIPTDIHQRAPVILGSPDDVLEFLKVYEKHSAQ

SEQ ID NO: 18009 - protein, 337 aa, Sus scrofa
TDQAAFDTNIVTLTRFVMEEGRKARGTGEMTQLLNSLCTAVKAISTAVRKAGIAHLYGIAGSTNVTGDQVKKLDVLSNDLVINVLKSSFATCVLVSEEDKNAIIVEPEKRGKYVVCFDPLDGSSNIDCLVSIGTIFGIYRKNSTDEPSEKDALQPGRNLVAAGYALYGSATMLVLAMVNGVNCFMLDPAIGEFILVDRDVKIKKKGSIYSINEGYAKEFDPAITEYIQRKKFPPDNSAPYGARYVGSMVADVHRTLVYGGIFMYPANKKSPKGKLRLLYECNPMAYVMEKAGGLGTIGKEAVLDIVPTDIHQRAPIILGSPEDVTELLEIYQKHAAK

SEQ ID NO: 18010 - protein, 335 aa, Sus scrofa
TDQAAFDTNIVTLTRFVMEQGRKARGTGEMTQLLNSLCTAVKAISTAVRKAGIAHLYGIAGATNVTGDQVKKLDVLSNDLVINVLKSSFATCVLVTEEDKNAIIVEPEKRGKYVVCFDPLDGSSNIDCLVSIGTIFGIYRKNSTDEPSEKDALQPGRNLVAAGYALYGSATMLVLAMVNGVNCFMLDPAIGEFILVDRNVKIKKKGSIYSINEGYAKEFDPAITEYIQRKKFPPDNSAPYGARYVGSMVADVHRTLVYGGIFMYPANKKSPKGKLRLLYECNPMAYVMEKAGGLATTGKEAVLDIVPTDIHQRAPIILGSPEDVTELLEIYQKHA

SEQ ID NO: 18011 - protein, 337 aa, Sus scrofa
TDQAAFDTNIVTLTRFVMEQGRKARGTGEMTQLLNSLCTAVKAISTAVRKAGIAHLYGIAGSTNVTGDQVKKLDVLSNDLVINVLKSSFATCVLVTEEDKNAIIVEPEKRGKYVVCFDPLDGSSNIDCLVSIGTIFGIYRKNSTDEPSEKDALQPGRNLVAAGYALYGSATMLVLAMVNGVNCFMLDPAIGEFILVDRNVKIKKKGSIYSINEGYAKEFDPAITEYIQRKKFPPDNSAPYGARYVGSMVADVHRTLVYGGIFMYPANKKSPKGKLRLLYECNPMAYVMEKAGGLATTGKEAVLDIVPTDIHQRAPIILGSPEDVTELLEIYQKHAAK

SEQ ID NO: 18012 - protein, 335 aa, Sus scrofa
TDQAAFDTNIVTLTRFVMEQGRKARGTGEMTQLLNSLCTAVKAISTAVRKAGIAHLYGIAGSTNVTGDQVKKLDVLSNDLVINVLKSSFATCVLVTEEDKNAIIVEPEKRGKYVVCFDPLDGSSNIDCLVSIGTIFGIYRKNSTDEPSEKDALQPGRNLVAAGYALYGSATMLVLAMVNGVNCFMLDPAIGEFILVDRNVKIKKKGSIYSINEGYAKEFDPAITEYIQRKKFPPDNSAPYGARYVGSMVADVHRTLVYGGIFMYPANKKSPKGKLRLLYECNPMAYVMEKAGGLATTGKEAVLDIVPTDIHQRAPIILGSPEDVTELLEIYQKHA

SEQ ID NO: 18013 - protein, 337 aa, Sus scrofa
TDQAAFDTNIVTLTRFVMEEGRKARGTGEMTQLLNSLCTAVKAISTAVRKAGIAHLWGIAGSTNVTGDQVKKLDVLSNDLVINVLKSSFATCVLVSEEDKNAIIVEPEKRGKYVVCFDPLDGSSNIDCLVSIGTIFGIYRKNSTDEPSEKDALQPGRNLVAAGYALYGSATMLVLAMVNGVNCFMLDPAIGEFILVDRDVKIKKKGSIYSINEGYAKEFDPAITEYIQRKKFPPDNSAPYGARYVGSMVADVHRTLVYGGIFMYPANKKSPKGKLRLLYECNPMAYVMEKAGGLATTGKEAVLDIVPTDIHQRAPIILGSPEDVTELLEIYQKHAAK

SEQ ID NO: 18014 - protein, 338 aa, Sus scrofa
MTDQAAFDTNIVTLTRFVMEEGRKARGTGEMTQLLNSLCTAVKAISTAVRKAGIAHLYGIAGSTNVTGDQVKKLDVLSNDLVINVLKSSFATCVLVSEEDKNAIIVEPEKRGKYVVCFDPLDGSSNIDCLVSIGTIFGIYRKNSTDEPSEKDALQPGRNLVAAGYALYGSATMLVLAMVNGVNCFMLDPAIGEFILVDRDVKIKKKGSIYSINEGYAKEFDPAITEYIQRKKFPPDNSAPYGARYVGSMVADVHRTLVYGGIFMYPANKKSPKGKLRLLYECNPMAYVMEKAGGLATTGKEAVLDIVPTDIHQRAPIILGSPEDVTELLEIYQKHAAK

SEQ ID NO: 18015 - protein, 337 aa, Sus scrofa
TDQAAFDTNIVTLTRFVMEEGRKARGTGEMTQLLNSLCTAVKAISTAVRKAGIAHLYGIAGSTNVTGDQVKKLDVLSNDLVINVLKSSFATCVLVTEEDKNAIIVEPEKRGKYVVCFDPLDGSSNIDCLVSIGTIFGIYRKNSTDEPSEKDALQPGRNLVAAGYALYGSATMLVLAMVNGVNCFMLDPAIGEFILVDRDVKIKKKGSIYSINEGYAKEFDPAITEYIQRKKFPPDNSAPYGARYVGSMVADVHRTLVYGGIFMYPANKKSPKGKLRLLYECNPMAYVMEKAGGLATTGKEAVLDIVPTDIHQRAPIILGSPEDVTELLEIYQKHAAK

SEQ ID NO: 18016 - protein, 337 aa, Sus scrofa
TDQAAFDTNIVTLTRFVMEQGRKARGTGEMTQLLNSLCTAVAAISTAVRKAGIAHLYGIAGSTNVTGDQVKKLDVLSNDLVINVLKSSFATCVLVTEEDKNAIIVEPEKRGKYVVCFDPLDGSSNIDCLVSIGTIFGIYRKNSTDEPSEKDALQPGRNLVAAGYALYGSATMLVLAMVNGVNCFMLDPAIGEFILVDRNVKIKKKGSIYSINEGYAKEFDPAITEYIQRKKFPPDNSAPYGARYVGSMVADVHRTLVYGGIFMYPANKKSPKGKLRLLYECNPMAYVMEKAGGLATTGKEAVLDIVPTDIHQRAPIILGSPEDVTELLEIYQKHAAK

SEQ ID NO: 18017 - protein, 337 aa, Sus scrofa
TDQAAFDTNIVTLTRFVMEQGRKARGTGEMTQLLNSLCTAVKAISTAVRKAGIAHLYGIAGSTNVTGDQVKKLDVLSNDLVINVLKSSFATCVLVTEEDKNAIIVEPEKRGKYVVCFDPLDGSSNIDCLVSIGTIFGIYRKNSTDEPSEKDALQPGRNLVAAGYALYGSATMLVLAMVNGVNCFMLDPAIGEFILVDRNVKIKKKGSIYSINEGYAKEFDPAITEYIQRKKFPPDNSAPYGAAYVGSMVADVHRTLVYGGIFMYPANKKSPKGKLRLLYECNPMAYVMEKAGGLATTGKEAVLDIVPTDIHQRAPIILGSPEDVTELLEIYQKHAAK

SEQ ID NO: 18018 - protein, 337 aa, Sus scrofa domestica
TDQAAFDTNIVTLTRFVMEEGRKARGTGEMTQLLNSLCTAVKAISTAVRKAGIAHLYGIAGSTNVTGDQVKKLDVLSNDLVINVLKSSFATCVLVSEEDKNAIIVEPEKRGKYVVCFDPLDGSSNIDCLVSIGTIFGIYRKNSTDEPSEKDALQPGRNLVAAGYALYGSATMLVLAMVNGVNCFMLDPAIGEFILVDRDVKIKKKGSIYSINEGYAKEFDPAITEYIQRKKFPPDNSAPYGARYVGSMVADVHRTLVYGGIFMYPANKKSPKGKLRLLYECNPMAYVMEKAGGLATTGKEAVLDIVPTDIHQRAPIILGSPEDVTELLEIYQKHAAK

SEQ ID NO: 18019 - protein, 346 aa, Cytophaga hutchinsonii
MERNLSTVKTLVQFITESQKHVFGASGDLSKILNDIAVAAKIINREVNKAGLLDILGMEGGMNVQNEEVKKLDVYANDQFISALRSGGQCCAIASEENTDIIPIENNGHSKSNYVVLIDPLDGSSNIDVNVAIGSIFSIYRRVSESGPGETVDCMQVGNKQVAAGYIIYGSSTMMVYTTGDGVNGFTLDPSIGEFCLSHPNLKIPEDGFIYSVNEGNYADFPREIQEYIYYCKTPDFETSRPYSSRYIGSMVADFHRNLIKGGIFMYPATAKYPLGKLRLMYECNPLAFIVEQAGGKAIDGEGRILDIEPTNIHQRTGIIIGSKNMVEKVEAFIQMNVGLNVYRLK

SEQ ID NO: 18020 - protein, 332 aa, Salmonella typhimurium LT2
MKTLGEFIVEKQHEFSQATGELTALLSAIKLGAKIIHRDINKAGLVDILGASGAENVQGEVQQKLDLFANEKLKAALKARDIVAGIASEEEDEIVVFEGCEHAKYVVLMDPLDGSSNIDVNVSVGTIFSIYRRVTPVGTPVTEEDFLQPGNKQVAAGYVVYGSSTMLVYTTGCGVHAFTYDPSLGVFCLCQERMRFPEKGKTYSINEGNYIKFPNGVKKYIKFCQEEDSSTSRPYTSRYIGSLVADFHRNLLKGGIYLYPSTASHPQGKLRLLYECNPMAFLAEQAGGKASDGKERILDIIPESLHQRRSFFVGNRHMVDDVERFIREYPDA

SEQ ID NO: 18021 - protein, 337 aa, Ovis aries
MTDEAPFDTNIVTVTRFVMEEGRKARGTGEMTQLLNSLCTAVKAISTAVRKAGIAHLYGIAGTTNVTGDQVKKLDVLSNDLVVNVLKSSFATCVLVSEEDKHAIIVEPEKRGKYVVCFDPLDGSSNIDCLVSIGTIFGIYKKISKDDPSEKDALQPGRNLVAAGYALYGSATMLVLAMVNGVNCFMLDPAIGEFILVDRDVKIKKKGSIYSLNEGYAKDFDPALTEYVQRKKFPPDNSAPYGSRYVGSMVADVHRTLVYGGIFMYPADKKSPSGKLRLLYECDPMAYVIEKAGGMATTGKEAVLDIVPTDIHQKVPIILGSPEDVTEFLEIKKYTAK

SEQ ID NO: 18022 - protein, 337 aa, Oryctolagus cuniculus
ADKAPFDTDISTMTRFVMEEGRKAGGTGEMTQLLNSLCTAVKAISTAVRKAGIAHLYGIAGSTNVTGDQVKKLDVLSNDLVMNMLKSSFATCVLVSEEDKNAIIVEPEKRGKYVVCFDPLDGSSNIDCLVSIGTIFGIYRKKSTDEPSTKDALQPGRNLVAAGYALYGSATMLVLAGGSGVNSFMLDPAIGEFILVDKNVKIKKKGNIYSLNEGYAKDFDPAVTEYIQKKKFPPDNSSPYGARYVGSMVADVHRTLVYGGIFLYPANKKSPDGKLRLLYECNPMAFIMEKAGGMATTGKEAILDIVPTDIHQRAPVILGSPDDVQEFLEIYKKHAVK

SEQ ID NO: 18023 - protein, 339 aa, Oryctolagus cuniculus
MTDRSPFETDMLTLTRYVMEKGRQAKGTGELTQLLNSMLTAIKAISSAVRKAGLAHLYGIAGTVNVTGDEVKKLDVLSNALVINMLQSSYSTCVLVSEENKEAIITAKERRGKYVVCFDPLDGSSNIDCLASIGTIFAIYRKTTEDEPSDKDALQPGRNIVAAGYALYGSATLVALSTGQGVDLFMLDPALGEFVLVEKDVKIKKKGKIFSLNEGYAKYFDAATTEYVQKKKFPEDGSAPYGARYVGSMVADVHRTLVYGGIFLYPANQKSPKGKLRLLYECNPVAYIIEQAGGLATTGTQPVLDVKPESIHQRVPLILGSPDDVQEYLACVQKNQAGR

SEQ ID NO: 18024 - protein, 91 aa, Oryctolagus cuniculus
LQPGRNLVAAGYALYGSATMLVLATDSGVNCFMLDPAIGEFILVDKNVKIKKKGNIYSLNEGYAKDFDPAVTEYIQKKKFPPDNSSPYGAR

SEQ ID NO: 18025 - protein, 229 aa, Oryctolagus cuniculus
ADKAPFDTDISTMTRFVMEEGRKAGGTGEMTQLLNSLCTAVKAISTAVRKAGIAHLYGIAGSTNVTGBZVKKLDVLDMLKSAFATSVLVSEEDKNAIIVEPEKRGKYVSNFDPLVPIFGIYYRKKSTDALQGRSTDETSKSLVAAGYDTMVADVHRTLVYGGIFLYPADKKSPDGKLRLLYQCNMAFIMATTGKQAILDIVQTPDHRAPVILGSPDDVQQFLYKKHAVK

SEQ ID NO: 18026 - protein, 366 aa, Chlamydomonas sp. W80
MMATAGSSAAGARVSMRAASGIRASSSSRRAAVVVKAANVNIGDSLAEFLAVATPDTKLRQLMTSMSEATRTIAHKVRTASCGGTACVNSFGDEQLAVDMVADGILFEALKYSHVCSYACSEEVPEPVAMGGSGYSVAFDPLDGSSIVDTNFSVGTIFGVWPGDKLTGITGRDQAAAGMGVYGPRTVFVIAINGFPGTHEFLLQDDGKWLLVKSTEEIGEGKLFAPGNLRAIFDNPEYSKLVSYYLEEQYTLRYTGGMVPDVFQILVKEKGVFTNVTSPSTKAKLRLLFEVAPLALLIENAGGASSCDGLVCRALDVEVTAHEQRTQICYGSKGEVARFEKYMLGESSASLTLSRPSKRPCAERAR

SEQ ID NO: 18027 - protein, 389 aa, Chlamydomonas reinhardtii
MAAMMMRQKVAGAIAGERRSAVAPKMGRAATAPVVVASANASAFKGAAVTARVKASTRAARVQSRRTAVLTQAKIGDSLAEFLVEATPDPKLRHVMMSMAEATRTIAHKVRTASCAGTACVNSFGDEQLAVDMVADKLLFEALKYSHVCKLACSEEVPEPVDMGGEGFCVAFDPLDGSSSSDTNFAVGTIFGVWPGDKLTNITGREQVAAGMGIYGPRTVFCIALKDAPGCHEFLLMDDGKWMHVKETTHIGEGKMFAPGNLRATFDNPAYERLINFYLGEKYTLRYTGGIVPDLFQIIVKEKGVFTNLTSPTTKAKLRILFEVAPLALLIEKAGGASSCDGKAVSALDIPILVCDQRTQICYGSIGEVRRFEEYMYGTSPRFSEKVVA

SEQ ID NO: 18028 - protein, 341 aa, Spinacia oleracea
MDHAGDAMRTDLMTITRYVLNEQSKRPESRGDFTILLSHIVLGCKFVCSAVNKAGLAKLIGLAGETNIQGEEQKKLDVLSNEVFVKALTSSGRTCILVSEEDEEATFIEPSLRGKYCVVFDPLDGSSNIDCGVSIGTIFGIYMVKDFETATLEDVLQPGKNMVAAGYCMYGSSCTLVLSTGSGVNGFTLDPSLGEYILTHPDIKIPNKGKIYSVNEGNAKNWDGPTTKYVEKCKFPTDGSSPKSLRYIGSMVADVHRTLLYGGIFLYPGDKKSPNGKLRVLYEVFPMSFLMEQAGGQAFTGKQRALDLIPTKIHERSPVFLGSYDDVEDIKALYAAQEKTA

SEQ ID NO: 18029 - protein, 387 aa, Spinacia oleracea
METSMACCSRSIVLPRVSPQHSSALVPSSINLKSLKSSSLFGESLRMTTKSSVRVNKAKNSSLVTKCELGDSLEEFLAKATTDKGLIRLMMCMGEALRTIGFKVRTASCGGTQCVNTFGDEQLAIDVLADKLLFEALNYSHFCKYACSEELPELQDMGGPVDGGFSVAFDPLDGSSIVDTNFSVGTIFGVWPGDKLTGVTGRDQVAAAMGIYGPRTTYVLALKDYPGTHEFLLLDEGKWQHVKETTEINEGKLFCPGNLRATSDNADYAKLIQYYIKEKYTLRYTGGMVPDVNQIIVKEKGIFTNVISPTAKAKLRLLFEVAPLGFLIEKAGGHSSEGTKSVLDIEVKNLDDRTQVAYGSLNEIIRFEKTLYGSSRLEEPVPVGAAA

SEQ ID NO: 18030 - protein, 341 aa, Arabidopsis thaliana
MDHAADAHRTDLMTITRFVLNEQSKYPESRGDFTILLSHIVLGCKFVCSAVNKAGLAKLIGLAGETNIQGEEQKKLDVLSNDVFVNALVSSGRTSVLVSEEDEEATFVEPSKRGKYCVVFDPLDGSSNIDCGVSIGTIFGIYTLDHTDEPTTADVLKPGNEMVAAGYCMYGSSCMLVLSTGTGVHGFTLDPSLGEFILTHPDIKIPNKGNIYSVNEGNAQNWDGPTTKYVEKCKFPKDGSPAKSLRYVGSMVADVHRTLLYGGIFLYPADKKSPNGKLRVLYEVFPMSFLMEQAGGQAFTGKKRALDLVPEKIHERSPIFLGSYDDVEEIKALYAEEEKKN

SEQ ID NO: 18031 - protein, 404 aa, Arabidopsis thaliana
MQSLTLTRYPTPISPPRLNLYPLRQIAASVLSAPTAGINRRDMASRHQSTSFKPLAVGRNLTGDDDDGYCTLIDFAGSGGGEGKNVGEDLVVLLYHLQHACKRIASLVASPFNSSLGKLSVNSSSGSDRDAPKPLDIVSNDIVLSSLRNSGKVAVMASEENDSPTWIKDDGPYVVVVDPLDGSRNIDASIPTGTIFGIYNRLVELDHLPVEEKAELNSLQRGSRLVASGYVLYSSATIFCVTLGSGTHAFTLDHSTGEFVLTHQNIKIPTRGQIYSVNDARYFDWPEGLRKYIDTVRQGKGQNPKKYSARYICSLVADLHRTLLYGGVAMNPRDHLRLVYEGNPLAFLVEQAGGKSSDGKRGILSIQPVKLHQRLPLFLGSLEDVAELESYGDVQQTVNPGYEV

SEQ ID NO: 18032 - protein, 393 aa, Arabidopsis thaliana
METSIACYSRGILPPSVSSQRSSTLVSPPSYSTSSSFKRLKSSSIFGDSLRLAPKSQLKATKAKSNGASTVTKCEIGQSLEEFLAQATPDKGLRTLLMCMGEALRTIAFKVRTASCGGTACVNSFGDEQLAVDMLADKLLFEALRYSHVCKYACSEEVPELQDMGGPVEGGFSVAFDPLDGSSIVDTNFTVGTIFGVWPGDKLTGITGGDQVAAAMGIYGPRTTYVLAVKGFPGTHEFLLLDEGKWQHVKETTEIAEGKMFSPGNLRATFDNSEYSKLIDYYVKEKYTLRYTGGMVPDVNQIIVKEKGIFTNVTSPTAKAKLRLLFEVAPLGLLIENAGGFSSDGHKSVLDKTIINLDDRTQVAYGSKNEIIRFEETLYGTSRLKNVPIGVTA

SEQ ID NO: 18033 - protein, 393 aa, Arabidopsis thaliana
METSIACYSRGILPPSVSSQRSSTLVSPPSYSTSSSFKRLKSSSIFGDSLRLAPKSQLKATKAKSNGASTVTKCEIGQSLEEFLAQATPDKGLRTLLMCMGEALRTIAFKVRTASCGGTACVNSFGDEQLAVDMLADKLLFEALQYSHVCKYACSEEVPELQDMGGPVEGGFSVAFDPLDGSSIVDTNFTVGTIFGVWPGDKLTGITGGDQVAAAMGIYGPRTTYVLAVKGFPGTHEFLLLDEGKWQHVKETTEIAEGKMFSPGNLRATFDNSEYSKLIDYYVKEKYTLRYTGGMVPDVNQIIVKEKGIFTNVTSPTAKAKLRLLFEVAPLGLLIENAGGFSSDGHKSVLDKTIINLDDRTQVAYGSKNEIIRFEETLYGTSRLKNVPIGVTA

SEQ ID NO: 18034 - protein, 339 aa, Brassica napus
MDHEADAFRDLMTITRFVLNEQSKYPESRGDFTILLSNIVLGCKFVCSAVNKAGLAKLIGLAGDTNIQGEEQKKLDVLSNDVFVKALVSSGRTSVLVSEEDEEATFVESSKCGKYCVVFDPLDGSSNIDCGVSIGTIFGIYTMEHSDEPTTKDVLKPGNEMVAAGYCMYGSSCMLVLSTGTGVHGFTLDPSLGEFILTHPDIKIPKKGNIYSVNEGNAQNWDGPTTKYVERCKYPKDGSPAKSLRYVGSMVADVHRTLLYGGIFLYPADKKSPNGKLRVLYEVFPMAFLMEQAGGQAFTGKKRALDLVPKKIHERSPIFLGSYDDVEEIKALYAEEEKN

SEQ ID NO: 18035 - protein, 356 aa, Glycine max
  unsure (1)..(356): unsure at all Xaa locations
MDHSADAHRTDLMTITRFVLNEQSKHPESRGDFTILLSHIVLGCKFVCSAVSKAGLAKLIGLAGETNVQGEEQKKLDVLSNDVFIKALVSSGRTCILVSEEDEEATFVEASKRGKYCVVFDPLDGSSNIDCGVSIGTIFGIYLIKEDHEPTIEDVLQPGKNMLAAGYCMYGSSCTLVLSTGSGVNGFTLDPSLGEFILTHPDIKIPKKGKIYSVNEGNAKNWDDPTTKYVENCKYPRDGSSPKSLRYIGSMVADVHRTLLYGGIFLYPADKKSPNGKLRVLYEVFPMSFLMEQAGGQAFTGNQRALDLVPKKLHERSPIFLGSYEDVEEIKALYAAEEXSWKKAFFVFRYLQAIVI

SEQ ID NO: 18036 - protein, 356 aa, Glycine max
  unsure (1)..(356): unsure at all Xaa locations
MDHSADAQRTDLMTITRFVLNQQSNHPESRGDFSILLSHIVLGCKFLCSAVNKAGLAKLIGLAGETNVQGEEQKKLDVLSNDVFIKALVSSGRTCILVSEEDEEATFVEASKRGKYCVVFDPLDGSSNIDCGVSIGTIFGIYLIKEDHEPTIEDVLQPGKNMLAAGYCMYGSSCTLVLSTGSGVNGFTLDPSLGEFILTHPDIKIPKKGKIYSVNEGNAKNWDDPTTKYVENCKYPRDGSSPKSLRYIGSMVADVHRTLLYGGIFLYPADKKSPNGKLRVLYEVFPMSFLMEQAGGQAFTGNQRALDLVPKKLHERSPIFLGSYEDVEEIKALYAAEEXSWKKAFFVFRYLQAIVI

SEQ ID NO: 18037 - protein, 359 aa, Glycine max
  unsure (1)..(359): unsure at all Xaa locations
FGSRDHSADAQRTDLMTITRFVLNQQSNHPESRGDFSILLSHIVLGCKFLCSAVNKAGLAKLIGLAGETNVQGEEQKKLDVLSNDVFIKALVSSGRTCILVSEEDEEATFVEASKRGKYCVVFDPLDGSSNIDCGVSIGTIFGIYLIKEDHEPTIEDVLQPGKNMLAAGYCMYGSSCTLVLSTGSGVNGFTLDPSLGEFILTHPDIKIPKKGKIYSVNEGNAKNWDDPTTKYVENCKYPRDGSSPKSLRYIGSMVADVHRTLLYGGIFLYPADKKSPNGKLRVLYEVFPMSFLMEQAGGQAFTGNQRALDLVPKKLHERSPIFLGSYEDVEEIKALYAAEEXSWKKAFFVFRYLQAIVI

SEQ ID NO: 18038 - protein, 356 aa, Glycine max
  unsure (1)..(356): unsure at all Xaa locations
MDHSADAQRTDLMTITRFVLNEQSKHPESRGDFSILLSHIVLGCKFVCSAVNKAGLAKLIGLAGETNVQGEEQKKLDVLSNDVFIKALISSGRTCILVSEEDEEATFVEPSKRGKYCVVFDPLDGSSNIDCGVSIGTIFGIYLIKEDHEPTVEDVLQPGKNMLAAGYCMYGSSCTLVLSTGSGVNGFTLDPSLGEFILTHPDIKIPKKGKIYSVNEGNAKNWDDPTTKYVENCKYPRDGSSPKSLRYIGSMVADVHRTLLYGGIFLYPADKKSPNGKLRVLYEVFPMSFLMEQAGGQAFTGNQRALDLVPKKLHERSPIFLGSYEDVEEIKALYAAEEXSWKKAFFVFRYLQAIVI

SEQ ID NO: 18039 - protein, 341 aa, Glycine max
  unsure (1)..(341): unsure at all Xaa locations
MDHSADAQRTDLMTITRFVLNEQSKHPESRGDFSILLSHIVLGCKFVCSAVNKAGLAKLIGLAGETNVQGEEQKKLDVLSNDVFIKALVSSGRTCILVSEEDEEATFVEASKRGKYCVVFDPLDGSSNIDCGVSIGTIFGIYLIKEDHEPTIEDVLQPGKNMLAAGYCMYGSSCTLVLSTGSGVNGFTLDPSLGEFILTHPDIKIPKKGKIYSVNEGNAKNWDDPTTKYVENCKYPRDGSSPKSLRYIGSMVADVHRTLLYGGIFLYPADKKSPNGKLRVLYEVFPMSFLMEQAGGQAFTGNQRALDLVPKKLHERFPIFLGSYEDVEEIKALYSADEKXE

SEQ ID NO: 18040 - protein, 341 aa, Glycine max
  unsure (1)..(341): unsure at all Xaa locations
MDHSADAQRTDLMTITRFVLNEQSKHPESRGDFSILLSHIVLGCKFVCSAVNKAGLAKLIGLAGETNVQGEEQKKLDVLSNDVFIKALISSGRTCILVSEEDEEATFVEPSKRGKYCVVFDPLDGSSNIDCGVSIGTIFGIYLIKEDHEPTVEDVLQPGKNMLAAGYCMYGSSCTLVLSTGSGVNGFTLDPSLGEFILTHPDIKIPKKGKIYSVNEGNAKNWDGPTTMYVENCKYPKDGSSPKSLRYIGSMVADVHRTLLYGGIFLYPADKKSPNGKLRVLYEVFPMSFLMEQAGGQAFTGNQRALDLVPKKLHERSPIFLGSYEDVEEIKALYSADEKXE

SEQ ID NO: 18041 - protein, 330 aa, Glycine max
  unsure (1)..(330): unsure at all Xaa locations
MTITRFVLNIQDSQPESRGDFSILLSHIVLGCKFFCSAVSKAGLAKLIGLAGETNVQGEEXKKLDVLSNDVFIKALMSSGRTCILVSEEDEEATIVESSKRGKYCVVFDPLDGSSNIDCGVSIGTIFGVYAIKENHEPTIEDVLLPGKNMVAAGYCMYGSSCTLVLSTGAGVNGFTLDPSLGEFILTHPNIKIPKKGKIYSVNEGNAKNWDRPTATYVEKCKFPEDGSSPKSLRYIGSMVADVHRTLLYGGIFLYPADKKSPNGKLRVLYEVFPMSFLMEQAGGQSFTGKERALDLVPTKLHERSPIFLGSYDDVEEIKALYAAAEGEQE

SEQ ID NO: 18042 - protein, 266 aa, Glycine max
  unsure (1)..(266): unsure at all Xaa locations
XYIVCAFVDDGEIYFSXCILVSEEDEEATFVEASKRGKYCVVFDPLDGSSNIDCGVSIGTIFGIYLIKEDHEPTIEDVLQPGKNMLAAGYCMYGSSCTLVLSTGSGVNGFTLDPSLGEFILTHPDIKIPKKXGKIYSVNEGNAKNWDRPTATYVEKCKFPEDGSSPKSLRYIGSMVADVHRTLLYGGIFLYPADKXSPNGKLRVLYEVFPMSFLMEQAGGQSFTGKERALDLVPTKLHERSPIFLGSYDDVEEIKALYAAAEGEQE

SEQ ID NO: 18043 - protein, 245 aa, Glycine max
  unsure (1)..(245): unsure at all Xaa locations
XYIVCAFVDDGEIYFSXCILVSEEDEEATFVEASKRGKYCVVFDPLDGSSNIDCGVSIGTIFGIYLIKEDHEPTIEDVLQPGKNMLAAGYCMYGSSCTLVLSTGSGVNGFTLDPALGEFILTHPDIKIPKKGKIYSVNEGNAKNWDGPTTMYVENCKYPKDGSSPKSLRYIGSMVADVHRTLLYGGIFLYPADKKSPNGKLRVLYEVFPMSFLMEQAGGQAFTGNQRALDLVPKKLHERSPIFLX

SEQ ID NO: 18044 - protein, 356 aa, Glycine max
  unsure (1)..(356): unsure at all Xaa locations
XPETPGFEPNASVKNLSASSDDGFVTLTEYVGKEGMNVKDDLVVLLDHIQYACKKIAALVASPFNYSLGKQTALGSVGSDRDAPKPLDIVSNEIILSSLRKSGRVAVMASEENDAPTWISDDGPYVVVTDPLDGSRNIDASIPTGTIFGIYKRLEELDDLPTEDKAMLNSLQSGSRLIAAAYVLYSSATILCITFGSGTQAFTLDHSTGDFILTNPSIKIPPRGQIYSVNDARYFDWPEGLRQYIDTVRQGKGRYPKKYSARYICSLVADLHRTLLYGGVAMNPRDHLRLVYEANPLSFIVEQAGGRGSDGKNRILSLQPVKLHQRLPLFLGSLEDMEELESYGDIQQKVNPGYEV

SEQ ID NO: 18045 - protein, 400 aa, Glycine max
MQAAATTPLYQLVSFKPKLQTFPSKSQLCPLGTPFCRLGMASVSGFRLRPLRAVGGSSSSSASGDDGFVTLIEYVAKEGMNVKDDLVVLLDHIQYACKRIAALVASPFNYSLGKQTGHGSVGSDRDAPKPLDIVSNEIILSSLRKSRKVAVMASEENDAPTWISDDGPYVVVTDPLDGSRNIDASIPTGTIFGIYKRLEELDNLPTEEKAMLNSLQSGSKLIAAAYVLYSSATILCITFGSGTQAFTLDHSTGDFILTNPSIKIPPRGQIYSVNDARYFDWPEGLRQYIDTVRQGKGRYPKKYSARYICSLVADLHRTLLYGGVTMNPRDHLRLVYEANPLSFIVEQAGGRGSDGKNRILSLQPVKLHQRLPLFLGSLEDMEELESYGDIQQKVNPGYEV

SEQ ID NO: 18046 - protein, 400 aa, Glycine max
  unsure (1)..(400): unsure at all Xaa locations
MQAAATTPLYQLVSFKPKLQTFPSKSQLCPLGTPFCRLGMASVSGFRLRPLRAVGGSSSSSASGDDGFVTLIEYVAKEGMNVKDDLVVLLDHIQYACKRIAALVASPFNYSLGKQTALGSVGSDRDAPKPLDIVSNEIILSSLRKSGRVAVMASEENXAPTWISDDGPYVVVTDPLDGSRNIDASIPTGTIFGIYKRLEELDDLPTEDKAMLNSLQSGSRLIAAAYVLYSSATILCITFGSGTQAFTLDHSTGDFILTNPSIKIPPRGQIYSVNDARYFDWPEGLRQYIDTVRQGKGRYPKKYSARYICSLVADLHRTLLYGGVAMNPRDHLRLVYEANPLSFIVEQAGGRGSDGKNRILSLQPVKLHQRLPLFLGSLEDMEELESYGDIQQKVNPGYEV

SEQ ID NO: 18047 - protein, 257 aa, Glycine max
  unsure (1)..(257): unsure at all Xaa locations
MDHSADAHRTDLMTITRFVLNEQSKHPESRXGDFTILLSHIVLGCKFVCSAVSKAGLAKLIGLAGETNVQGEEQKKLDVLSNEVFIKALISSGRTCILVSEEDEEAIIVEPSKRGKYCVCFDPLDGSSNIDCGVSIGTIFGVYALYDVHEPTIEDVLLPGKNMVAAGYCMYGSSCTLVLSTGAGVNGFTLDPSLGEFILTHPNIKIPKKGKIYSVNEGNAKNWDRPTATYVEKCKFPEDGSSPKSLRYIGSHLKTLX

SEQ ID NO: 18048 - protein, 293 aa, Glycine max
  unsure (1)..(293): unsure at all Xaa locations
MEKEYLIIQYSPFMPSFAEIEINPCIITSEGSSMKKSRKVAVMASEENDAPTWISDNGPYVVVTDPLDGSRNIDASIPTGTIFGIYKRLEELDNLPTEEKAMLNSLQSGSKLIAAAYVLYSSATILCITFGSETQAFTLDHSTGDFILTNPSIKIPPXRGQIYSVNDARYFDWPEGLRQYIDPVRQGKGRYPKKYSARYICSLVXADLHRTLLYGGVTMNPRDHLRLVYEANPLSFIVEQAGGRGSDGKNRILSLQPVKLHQRLPLFLGSLEDMEELESYGDIQQKVNPGYEV

SEQ ID NO: 18049 - protein, 149 aa, Glycine max
  unsure (1)..(149): unsure at all Xaa locations
MDHQADTNRTDLMTITRFVLNEQSKYPESRGDFTILLSHIVLGCKFVCSAVNKAGLAKLIGLAGETNVQGEEQKKLDVLSNEVFVKALISSGRTCLLVSEEVEEAIFVPSSHRGKYIVVFDPLDGSSNIDXRVSIGTIFGIYMVKNEAE

SEQ ID NO: 18050 - protein, 387 aa, Glycine max
METGIACYTRGPFLPSVSSKHSPPSISPSFGLRSLKSSSLFGESLRVASKSTLKVSKTKNTSLVTRCEIGDSLEEFLTKATPDKGLIRLLVSMGEALRTISFKVKTASCGGTQCVNTFGDEQLAVDLLANQLLFEALNYSHFCKYACSEENPELLDMGGPVEGGFSVAFDPLDGSSIVDTNFTVGTIFGVWPGDKLTGITGRDQVAAAMGVLGPRTTYVLALKDFPGTHEFLLLDEGKWQHVKETTEIGEGKLFSPGNLRATSDNPDYAKLIDYYVNEKYTLRYTGGMVPDVNQIIVKEKGIFTNVSSPSAKAKLRLLFEVAPLGFLIEKAGGYSSDGHQSVLDKVISNIDDRTQVAYGSKNEIIRFEETLYGKSRLKGGVAVGAAA

SEQ ID NO: 18051 - protein, 97 aa, Glycine max
RYIESMVADIHRTWLNGGIFMYPADAKSPNGKLRLLYEVFPMSYLMEQAGGQAFTGKQRALDLIPKKIHERSPVFLGSYDDIEQMKELYAASKEDDA

SEQ ID NO: 18052 - protein, 398 aa, Glycine max
METGIACYTRGPFLPSVSSKHSPPSISPSFGLRSLKSSSLFGESLRVASKSTLKVSKTKNTSLVTRCEIGDSLEEFLTKATPDKGLIRLLVSMGEALRTISFKVKTASCGGTQCVNTFGDEQLAVDLLANQLLFEALNYSHFCKYACSEENPELLDMGGPVEGGFSVAFDPLDGSSIVDTNFTVGTIFGVWPGDKLTGITGRDQVAAAMGVLGPRTTYVLALKDFPGTHEFLLLDEGKWQHVKETTEIGEGKLFSPGNLRATSDNPDYAKLIDYYVNEKYTLRYTGGMVPDVNQIIVKEKGIFTKVTSPSAKAKLRLLFEVAPLGFLIEKAGGYSSDGHQSVLDKVINNIDDRTQVAYGSKNEIIRFEETLYGKSRLKDGVAVGASAPCVRPAIQNKL

SEQ ID NO: 18053 - protein, 387 aa, Glycine max; identical to SEQ ID NO: 18050

SEQ ID NO: 18054 - protein, 387 aa, Glycine max
  unsure (1)..(387): unsure at all Xaa locations
METGIACYTRGPFLPSVSSKHSPPSISPSFGLRSLKSSSLFGESLRVASKSTIKVSKTKNTSLVTRCEIGDSLEEFLTKATPDKGLIRLLVSMGEALRTISFKVKTASCGGTQCVNTFGDEQLAVDLLANQLLFEALNYSHFCKYACSEXXPELLDMGGSVEGGFSVAFDPLDGSSIVDTNFTVGTIFGVWPGDKLTGITGRDQVAAAMGVLGPRTTYVLALKDFPGTHEFLLLDEGKWQHVKETTEIGEGKLFSPGNLRATSDNPDYAKLIDYYVNEKYTLRYTGGMVPDVNQIIVKEKGIFTNVSSPSAKAKLRLLFEVAPLGFLIEKAGGYSSDGHQSVLDKVISNIDDRTQVAYGSKNEIIRFEETLYGKSRLKGGVAVGAAA

SEQ ID NO: 18055 - protein, 163 aa, Glycine max
  unsure (1)..(163): unsure at all Xaa locations
SAFAQRTDLMTITRFVLNQQSNHPESRGDFSILLSHIXVLGCKILCSVVNKAGLVKLIALAGETNVQGLFQKKLYVLCNDVFIKALVNRGRTCILVSEEYEEATFVEASMRGKYXVDLDPLNGSSNIDXCGDSIVTVFLLHICFSKSILHGDYVFPLNSPAIX

SEQ ID NO: 18056 - protein, 115 aa, Glycine max
  unsure (1)..(115): unsure at all Xaa locations
MDHAAEAQRTDLMTITRHALNEQGRHPESRGDFTILLSHIVLGCKFVASAVNKAGLAKLIGLAGETNVQGEEQKKLDVLSNEVFVKALVSSGRTCVLVSEENEXAIFVDAPSAGS

SEQ ID NO: 18057 - protein, 329 aa, Pisum sativum
MTITRFVLNEQSKRPESRGDFTILLSHIVLGCKFVCSAVNKAGLAKLIGLAGETNIQGEEQKKLDVLSNDVFIKALISSGRTCILVSEEDEEATFVEPSLRGKYCVVFDPLDGSSNIDCGVSIGTIFGIYMVKDNHAPTLDDVLQPGKNMLAAGYCMYGSSCTLVLSTGSGVNGFTLDPSLGEFILTHPDIKIPKKGKIYSVNEGNAKNWDGPTTKYVEKCKFPTDGSSPKSLRYIGSMVADVHRTLLYGGIFLYPADKKSPNGKLRVLYEVFPMSFLMEQAGGQSFTGKQRALDLIPTKIHERSPIFLGSYDDVEEIKALYAAEQKNA

SEQ ID NO: 18058 - protein, 341 aa, Pisum sativum
MDHAGDAMRTDLMTITRYVLNEQSKRPESRGDFTILLSHIVLGCKFVCSAVNKAGLAKLIGLAGETNIQGEEQKKLDVLSNEVFVKALTSSGRTCILVSEEDEEATFIEPSLRGKYCVVFDPLDGSFNIDCGVSIGTIFGIYMVKDFETATLEDVLQPGKNMVAAGYCMYGSSCTLVLSTGSGVNGFTLDPSLGEYILTHPDIKIPNKGKIYSVNEGNAKNWDGPTTKYVEKCKFPTDGSSPKSLRYIESMVANVHRTLLYGGIFLYPGDKKSPNGKLRVLYEVFPMSFLMEQAGGQAFTGKQRALDLIPTKIHERSPVFLGSYDDVEDIKALYAAQEKTA

SEQ ID NO: 18059 - protein, 392 aa, Oryza sativa (indica cultivar-group); identical to SEQ ID NO: 623

SEQ ID NO: 18060 - protein, 340 aa, Solanum tuberosum
MDHAADRHRTDLMTITRFVLNEQTKHPESRGDFSILLSHIVLGCKFVCTAVNKAGLAKLLGLAGETNVQGEDQKKLDVLSNEVFIKALVSSNRTCILVSEEDEEATFVRPANRGKYCVVFDPLDGSSNIDCGVSIGTIFGIYMIKDGHEPTLDDVLQPGMNMLAAGYCMYGSSCTLVLSTGSGVNGFTLDPSLGEFILTHPDIKIPKKGKIYSVNEGNAKNWDSPTSKYVQSCKYPADGSSPKSLRYIGSMVADVHRTLLYGGIFLYPGDKKSPNGKLRVLYEVFPMSFLMEQAGGQAFTGKQRALDLVPEKIHERSPIFLGSYDDVEEIKKLYAAEEQN

SEQ ID NO: 18061 - protein, 339 aa, Oryza sativa; identical to SEQ ID NO: 624

SEQ ID NO: 18062 - protein, 339 aa, Oryza sativa; identical to SEQ ID NO: 624

SEQ ID NO: 18063 - protein, 340 aa, Oryza sativa
  unsure (1)..(340): unsure at all Xaa locations
MDHEADAYRTDLMTITRYVLNEQSRNPEARGDLTILLSHIVLGCKFVASAVNKAGLAKLIGLAGETNVQGEEQKKLDVLSNEVFVKALVSSGXRTCVLVSEEDEEATFVDPALRGKYCVCFDPLDGSSNIDCGVSIGTIFGIYMIKDKENVTLEDVLQPGKNMVAAGYCMYGSSCTLVLSTGNGVNGFTLDPSLGEFILTHPDIKIPKKGKIYSVNEGNAKNWDEPTAKFVEKCKFPKDGSSPKSLRYIGSMVADVHRTLLYGGVFLYPADKKSPNGKLRVLYEVFPMSFLMEQAGGQSFTGKERALDLVPTKIHERSPIFLGSFEDVEEIKGLYAAQAK

SEQ ID NO: 18064 - protein, 406 aa, Oryza sativa; identical to SEQ ID NO: 460

SEQ ID NO: 18065 - protein, 407 aa, Oryza sativa
MAAAATTSSHLLLLSRQQAAASLQCGLSFRRQPGRLAGGSSAPSVRCMAAVDTASAPAATEASKKSSYEITTLTTWLLKQEQAGTIDGEMTIVLASISTACKQIASLVQRAPISNLTGVQGAVNVQGEDQKKLDVVSNEVFSNCLKSSGRTGVIASEEEDVPVAVEESYSGNYIVVFDPLDGSSNIDAAVSTGSIFGIYSPNDECLADIADDQNVLDQVEQRCIVSVCQPGSNLLAAGYCMYSSSVIFVLTIGTGVYVFTLDPMYGEFVLTQEKVQIPKAGKIYAFNEGNYALWDDKLKSYMDSLKEPGPSGKPYSARYIGSLVGDFHRTLLYGGIYGYPRDQKSKNGKLRLLYECAPMSFIVEQAGGKGSDGHQRILDIMPTEIHQRVPLYIGSVEEVEKVEKFLA

SEQ ID NO: 18066 - protein, 389 aa, Oryza sativa
MAAAATTSSHLLLLSRQQAAASLQCGLSFRRQPGRLAGGSSAPSVRCMAAVDTASAPAATEASKKSSYEITTLTTWLLKQEQAGTIDGEMTIVLASISTACKQIASLVQRAPISNLTGVQGAVFSNCLKSSGRTGVIASEEEDVPVAVEESYSGNYIVVFDPLDGSSNIDAAVSTGSIFGIYSPNDECLADIADDQNLDQVEQRCIVSVCQPGSNLLAAGYCMYSSSVIFVLTIGTGVYVFTLDPMYGEFVLTQEKVQIPKAGKIYAFNEGNYALWDDKLKSYMDSLKEPGPSGKPYSARYIGSLVGDFHRTLLYGGIYGYPRDQKSKNGKLRLLYECAPMSFIVEQAGGKGSDGHQRILDIMPTEIHQRVPLYIGSVEEVEKVEKFLA

SEQ ID NO: 18067 - protein, 374 aa, Oryza sativa
MAAAATTSSHLLLLSRQQAAASLQCGLSFRRQPGRLAGGSSAPSVRCMAAVDTASAPAATEASKKSSYEITTLTTWLLKQEQAGTIDGEMTIVLASISTACKQIASLVFSNCLKSSGRTGVIASEEEDVPVAVEESYSGNYIVVFDPLDGSSNIDAAVSTGSIFGIYSPNDECLADIADDQNLDQVEQRCIVSVCQPGSNLLAAGYCMYSSSVIFVLTIGTGVYVFTLDPMYGEFVLTQEKVQIPKAGKIYAFNEGNYALWDDKLKSYMDSLKEPGPSGKPYSARYIGSLVGDFHRTLLYGGIYGYPRDQKSKNGKLRLLYECAPMSFIVEQAGGKGSDGHQRILDIMPTEIHQRVPLYIGSVEEVEKVEKFLA

SEQ ID NO: 18068 - protein, 401 aa, Oryza sativa
  unsure (1)..(401): unsure at all Xaa locations
LSSLSLLPLHRAPLPPTSNYPPXRRLPLAPSSSPSSATRRSRAAXARLPGACRSSRRHGRGDRGGGDAAXTLLEYMGQAGAADDLVVLVAHVQSACKRIAALVASPGNAELSRGKAGGGVAVAAGRDAPKPLDELSNEIILSSLRRSGKVAVMASEENHLPIWVSNDSPYVVVTDPLDGSRNIEVSIPTGTIFGIYNRLAELDHLPEEERAQLNSLQSGTHLVASGYVLYSSATIFCISFGAGTHGFTLDHLTGEFVLTHPSIQIPPRGQIYSVNDARYFDWPEGLRKYIDTIRQGKGQHPKKYSARYVCSLVADFHRTLIYGGVAMNPRDHLRLVYEANPLSFLAEQAGGRGSDGKSRILSIQPVKLHQRLPLFLGGMEDMLELESYGDVQQKVNPGYEV

SEQ ID NO: 18069 - protein, 213 aa, Oryza sativa
IDCGVSIGTIFGIYMIKDKDNVTLDDVLQPGTDMLAAGYCMYGSSCTLVLSTGNGVNGFTLDPSLGEFILTHPNIKIPNRGKIYSVNEGSAKNWDAPTAKFVEKCKFPQDGSPSKSLRYIGSMVADVHRTLLYGGIFLYPADQKSPNGKLRVLYEVFPMSFLMEQAGGQAFTGKQRALELVPRKIHDRSPIFLGSYDDVEDIKALYASESIIG

SEQ ID NO: 18070 - protein, 331 aa, Oryza sativa
  unsure (1)..(331): unsure at all Xaa locations
XGRGDRGGGDAAXTLLEYMGQAGAADDLVVLVAHVQSACKRIAALVASPGNAELSRGKAGGGVAVAAGRDAPKPLDELSNEIILSSLRRSGKVAVMASEENHLPIWVSNDSPYVVVTDPLDGSRNIEVSIPTGTIFGIYNRLAELDHLPEEERAQLNSLQSGTHLVASGFGAGTHGFTLDHLTGEFVLTHPSIQIPPRGQIYSVNDARYFDWPEGLRKYIDTIRQGKGQHPKKYSARYVCSLVADFHRTLIYGGVAMNPRDHLRLVYEANPLSFLAEQAGGRGSDGKSRILSIQPVKLHQRLPLFLGGMEDMLELESYGDVQQKVNPGYEV

SEQ ID NO: 18071 - protein, 1141 aa, Oryza sativa
MAAATAAAETPPTLLEYMGQAGAADDLVVLVAHVQSACKRIAALVASPGNAELSRGKAGGGVAVAAGRDAPKPLDELSNEIILSSLRRSGKVAVMASEENHLPIWVSNDSPYVVVTDPLDGSRNIEVSIPTGTIFGIYNRLAELDHLPEEERAQLNSLQSGTHLVASGFGAGTHGFTLDHLTGEFVLTHPSIQIPPRGQIYSVNDARYFDWPEGLRKYIDTIRQGKGQHPKKYSARYVCSLVADFHRTLIYGGVAMNPRDHLRLVYEANPLSFLAEQAGGRGSDGKSRILSIQPVKLHQRLPLFLGGMEDMLELESYGDVQQKVNPGYEIMRSEDNVACEKRTGGPTGELCICKTDVFTCQVFCFCLRDYAVSLCNIAEKLGCISPVCTLLCNVVRLVRFKSSNKSNFYYEPCNFVKPLLTIELGWLTEQSKLEGISGRVIAMRRVAISRPVARRVNFNLMKPAAAAALLLPPPPPSSREGSAPQTRAEPRSTMSADSAAAGRDALLDELRALMAAHSPSLHALVVPSEDAHQSEYVSERDKRRQFVSGFTGSAGLALITMKEALLWTDGRYFLQAEQQLTNRWKLMRMGEDPPVEVWIADNLSDEAVIGINPWCISVDTAQRYEHAFSKKHQTLFQLSSDLVDEIWKDRPPVNALPVFVQPVEYAGCSVTEKLKELREKLQHEKARGIIIAALDEVAWLYNIRGNDVHYSPVVHSYSIVTLHSAFFYVDKRKVSVEVQNYMTENGIDIKDYNMVQSDASLLASGQLKGSAVNGSSHGENDMNENSKVWIDSNSCCLALYSKLDQYQVLMLQSPIALPKAVKNPVELDGLRKAHIRDGAAVVQYLAWLDKQMQENYGASGYFTEAKGSQKKEHMNVKLTEVSVSDKLEGFRASKEHFKGLSFPTISSVGPNAAVIHYKPEASSCAELDADKIYLCDSGAQYLDGTTDITRTVHFGKPSEHEKSCYTAVLKGHIALDTAVFPNGTTGHAIDILARTPLWRSGLDYRHGTGHGIGSYLNVHEGPHLISFRPSARNVPLQASMTVTDEPGYYEDGSFGIRLENVLIVKEANTKFNFGDKGYLAFEHITWTPYQTKLIDTTLLTPAEIEWVNAYHSDCRKILQPYLNEQEKEWLRKATEPIAASC

SEQ ID NO: 18072 - protein, 153 aa, Oryza sativa
IDCGVSIGTIFGIYMIKDKDNVTLDDVLQPGTDMLAAGYCMYGSSCTLVLSTGNGVNGFTLDPSLGEFILTHPNIKIPNRGKIYSVNEGSAKNWDAPTAKFVEKCKFPQDGSPSKSLRYIGSMVADVHRTLLYGGIFLYPADQKSPNGKLRVL

SEQ ID NO: 18073 - protein, 169 aa, Oryza sativa
  unsure (1)..(169): unsure at all Xaa locations
RTRAHIIGXSRNHSFTLDHLTGEFVLTHPSIQIPPRGQIYSVNDARYFDWPEGLRKYIDTIRQGKGQHPKKYSARYVCSLVADFHRTLIYGGVAMNPRDHLRLVYEANPLSFLAEQAGGRGSDGKSRILSIQPVKLHQRLPLFLGGMEDMLELESYGDVQQKVNPGYEV

SEQ ID NO: 18074 - protein, 131 aa, Oryza sativa
  unsure (1)..(131): unsure at all Xaa locations
XYSVNEGHAXNWDGPTTKYVKKCRFPKDGSFAKSLRYVGSMVADVHRTLLYGGIFLYPADKKSPNGKLRVLYEVFPMSFLMEQAGGQAFTGKKRALDLVPEKIHERSPIFLGSYEDVEEIKALYAAEEXKK

SEQ ID NO: 18075 - protein, 213 aa, Oryza sativa
  unsure (1)..(213): unsure at all Xaa locations
GRGDRGGGDAAHAARVHGPGWRGRRPRRPRGARPERVQAHRRARGVARERRAVAGEGGGWCGGGGRAGRAQAARRIVXGRGEIYSVNDARYFDWPEGLRKYIDTIRQGKGQHPKKYSARYVCSLVADFHRTLIYGGVAMNPRDHLRLVYEANPLSFLAEQAGGRGSDGKSRILSIQPVKLHQRLPLFLGGMEDMLELESYGDVQQKVNPGYEV

SEQ ID NO: 18076 - protein, 392 aa, Oryza sativa; identical to SEQ ID NO: 623

SEQ ID NO: 18077 - protein, 455 aa, Oryza sativa
MVRIELVSDGLLLAELADGCVGGSPHGFTPSHDLSGPVPVSSQIREPGLGAPRSSFAWQPRPAMETVAAASYTRGAATRSPACCAAMSFSQSYRPKAARPPSTFYGESLRVNTARSLPSGRQSKAASRAALSTRCEIGDSLEEFLTKATPDKNLIRLLICMGEAMRTISFKVRTASCGGTACVNSFGDEQLAVDMLADKLLFEALEYSHVCKYACSEEVPELQDMGGPVDGGFSVAFDPLDGSSIVDTNFTVGTIFGVWPGDKLTGVTGGDQVAAAMGIYGPRTTYIIALKDCPGTHEFLLLDEGKWQHVKDTTTIGEGKMFSPGNLRATFDNPEYDKLINYYVKEKYTLRYTGGMVPDVNQIIVKEKGIFTNVTSPTAKAKLRLLFEVAPLGFLIEKAGGYSSDGKQSVLDKVINNLDERTQVAYGSKNEIIRFEETLYGSSRLTAGATVGAAA

SEQ ID NO: 18078 - protein, 120 aa, Oryza sativa
  unsure (1)..(120): unsure at all Xaa locations
XRVRGRVGGRVGGRVGRTLLYGGVFLYPADKKSPNGKLRVLYEVFPMSFLMEQAGGQSFTGKERALGLVPTKVTERSPIFLGSFEDVEEIKGLYAAQAKXARFDRSGTIKGVRMDSLALL

SEQ ID NO: 18079 - protein, 356 aa, Triticum aestivum
  unsure (1)..(356): unsure at all Xaa locations
MDHAADTFRTDLMTITRHVLNEQSRHPESRGDLTILLSHIVLGCKFVASAVNKAGLAKLTGLAGETNVQGEEQKKLDVLSNEVFVNALVSSGRTCVLVSEEDEKATFVDAPLRGKYCVCFDPLDGSSNIDCGVSIGTIFGIYMIKDKDNATLEDVLQPGTDMIAAGYRMYRSSCTLVLSTGNGVNGFTLDPSLGEFILTHPNIKIPNKGKIYSVNEGNARNWDAPTAKYVERCKFPQDGSSPKSLRYIGSLVADVHRTLLYGGIFLYPADKKSPNGKLRVLYEVFPMSFLMEQAGGQSFTGKQRALEIVPAEIHQRSPIFLGSYDDVEEIKSLYALESSTAXSEYPKTHTHALHRV

SEQ ID NO: 18080 - protein, 347 aa, Triticum aestivum
  unsure (1)..(347): unsure at all Xaa locations
MDHAADTFRTDLMTITRHVLNEQSRHPESRGDLTILLSHIVLGCKFVASAVNKAGLAKLTGLAGETNVQGEEQKKLDVLSNEVFVNALVSSGRTCVLVSEEDEKATFVDPKLRGKYCVCFDPLDGSSNIDCGVSIGTIFGIYMIKNQDTVTLEDXVLQPGKDMIAAXGYCMYGRSCTLVLSTGXNGVNGFTLDPSLGEFIMTHPDIKIPPKGKIYSVNEGNAKNWDTPTAKYVEKCKYPTDGSSPKSFRYIGSMVADVHRTLLYGGIFLYPADKKSPSGKLRVMYEVFPMSFLMEEAGGQSFTGKGRSLDLIPTDIHERSPIFLGSSDDVEEIKALYAEEAKKEGSA

SEQ ID NO: 18081 - protein, 345 aa, Triticum aestivum
  unsure (1)..(345): unsure at all Xaa locations
MDHAADAQRTDLMTITRHALNEQGRHPESRGDFTILLSHIVLGCKFVASAVNKAGLAKLIGLAGETNVQCVLVSEENEAAIFVDAPLRGKYCVCFDPLDGSSNIDCGVSIGTIFGIYMIKDKDNATLEDVLQPGTDMIAAGYCMYGSSCTLVLSTGNGVNGFTLDPSLGEFILTHPNIKIPNKGKIYSVNEGNARNWDAPTAKYVERCKFPQDGSSPKSLRYIGSMVADVHRTLXYGGIFLYPADKKSPNGKLRALYEVFPMSFLMEQAGGQSFTGKHRALEIVPXEIHQRSPIFLGSYDDVEEIKXLYAAESSXAXXEYLKTHTHVPHRVAKRKGYVPRCDKTP

SEQ ID NO: 18082 - protein, 277 aa, Triticum aestivum
  unsure (1)..(277): unsure at all Xaa locations
RPVSGHHNDFVLVFPSRRLNLHSLFLSLFQNQSQCLPPTADKXSEKVNTNIVTLTRFLTEEQAKHPEATGDFTLLCHALQFSFKSIAYYIRRATLVNLTGLAGSSNITGDDQKKLDVISNDLFIEAMRSSGKCALLVSEEEDEIIYFKDASDARYAVACDPIDGSSNLDAGVSVGTIFAIHKLPEGSKGCKEDILKPGTELLAAGFTMYGASAQLVITMRGGTVNGFTLDNGVGEFILSHPNMRLPKSRDIYSCNEGNSLYWGXQTINYFNSLKXGS

SEQ ID NO: 18083 - protein, 186 aa, Triticum aestivum
  unsure (1)..(186): unsure at all Xaa locations
XQXGSRLVAAXYVLYSSATIFCISFGAGTHGFTLDRSTGEFVLTHPSMQIPPRGQIYSVNDARYFDWPEGLKKYIDTIRQGKGQHPKKYSARYVCSLVADFHRTIIYGGVAMNPRDHLRLVYEANPLSFLAEQAGGRGSDGKTRILSIQPVKLHQRLPLFLGSMEDMLELESYGDVQQKVNPGYDV

SEQ ID NO: 18084 - protein, 170 aa, Triticum aestivum
MDHAAEAQRTDLMTITRHALNEQGRHPESRGDFTILLSHIVLGCKFVASAVNKAGLAKLIGLAGETNVQGEEQKKLDVLSNEVFVKALVSSGRTCVLVSEENEAAIFVDAPLRGKYCVCFDPLDGSSNIDCGVSIGTIFGIYMIKDKDNATLEDVLQPGTDMIAAGYCMY

SEQ ID NO: 18085 - protein, 395 aa, Triticum aestivum
  unsure (1)..(395): unsure at all Xaa locations
METVAAAGYAHGAATRSPACCAAMSFSQSYRPKAARPATSFYGESLRANTARTSFPAGRQSKAASRAALTTRCAIGDSLEEFLTKATPDKNLIRLLICMGEAMRTIAFKVRTASCGGTACVNSFGDEQLAVDMLADKLLFEALEYSHVCKYACSEEVPELQDMGGPVEGGFSVAFDPLDGSSIVDTNFTVGTIFGVWPGDKLTXGVTXGGDQVAAAMGIYGPRTTFVVALKDCPGTHEFLLLDEGKWQHVKDTTSIGEGKMFSPGNLRATFDNPDYDKLVNYYVKEKYTLRYTGGMVPDVNQIIVKEKGIFTNVTSPTAKAKLRLLFEVAPLGFLIEKAGGHSSDGKQSVLDKVISVLDERTQVAYGSKNEIIRFEETLYGSSRLAASATVGATA

SEQ ID NO: 18086 - protein, 393 aa, Triticum aestivum
METVAAAGYAHGAATRSPACCAAMSFSQSYRPKAARPATSFYGESLRANTARTSFPAGRQSKAASRAALTTRCAIGDSLEEFLTKATPDKNLIRLLICMGEAMRTIAFKVRTASCGGTACVNSFGDEQLAVDMLADKLLFEALEYSHVCKYACSEEVPELQDMGGPVEGGFSVAFDPLDGSSIVDTNFTVGTIFGVWPGDKLTGVTGGDQVAAAMGIYGPRTTFVVALKDCPGTHEFLLLDEGKWQHVKDTTSIGEGKMFSPGNLRATFDNPDYDKLVNYYVKEKYTLRYTGGMVPDVNQIIVKEKGIFTNVTSPTAKAKLRLLFEVAPLGFLIEKAGGHSSDGKQSVLDKVISVLDERTQVAYGSKNEIIRFEETLYGSSRLAASATVGATA

SEQ ID NO: 18087 - protein, 393 aa, Triticum aestivum
METVAAAGYARGAATRSPACCAAMSFSQSYRPKAARPATSFYGESLRANTARTSFPAGRQSKAASRAALTTRCAIGDSLEEFLTKATPDKNLIRLLICMGEAMRTIAFKVRTASCGGTACVNSFGDEQLAVDMLADKLLFEALEYSHVCKYACSEEVPELQDMGGPVEGGFSVAFDPLDGSSIVDTNFTVGTIFGVWPGDKLTGVTGGDQVAAAMGIYGPRTTFVVALKDCPGTHEFLLLDEGKWQHVKDTTTIGEGKMFSPGNLRATFDNPDYDKLVNYYVKEKYTLRYTGGMVPDVNQIIVKEKGIFTNVTSPTAKAKLRLLFEVAPLGFLIEKAGGHSSDGKQSVLDKVISVLDERTQVAYGSKNEIIRFEETLYGSSRLAASATVGATA

SEQ ID NO: 18088 - protein, 77 aa, Triticum aestivum
  unsure (1)..(77): unsure at all Xaa locations
XHEKKSPSGKLRVMYEVFPMSFLMEEAGGQSFTGKGRSLDLIPTDIHERSPIFLGSSDDVEEIKALYAEEAKKAGSA

SEQ ID NO: 18089 - protein, 110 aa, Triticum aestivum
  unsure (1)..(110): unsure at all Xaa locations
MDHAADAQRTDLMTITRHALNEQGRHPESRGDFTILLSHIVLGCKFVASAVNKAGLAKLIGLAGETNVQGEEQKKLDVLSNEVFVKALVSSGRTCVLVSEENEAAIFVDX

SEQ ID NO: 18090 - protein, 383 aa, Triticum aestivum
  unsure (1)..(383): unsure at all Xaa locations
METVAAAGYARGAATRSPACCAAMSFSQSYRPKAARPATSFYGESLRANTARTSFPAGRQSKAASRAALTTRCAIGDSLEEFLTKATPDKNLIRLLICMGEAMRTIAFKVRTASCGGTACVNSFGDEQLAVDMLAVKLLLDSVEYSHVXKYACSEEGPELQDMAAPVEGAFMXXDTHLPGGTILGVCPGDKLTGVTGADQAAAAMGIYGPRTPFVVALKDCPDTQEFILIDEGKWQHVKDTRTIGERKEYSHGDKRATFDNHDYDNPVNYYVNEKYTLRYTGGMVPDVNQIIVKEKGIFTNVTSPTAKAKLRLLFEVAPLGFLIEKAGGHSSDGKQSVLDKVISVLDERTQVAYGSKNEIIRFEETLYGSSRLAASATVGATA

SEQ ID NO: 18091 - protein, 345 aa, Zea mays
MDHAADAHRTDLMTITRHVLNEQSRNPESRGDFTILLSHIVLGCKFVASAVNKAGLAQLIGLAGETNVQGEEQKKLDVLSNEVFVKALVSSGRTCVLVSEEDEEATFVDPKLRGRYCVCFDPLDGSSNIDCGVSIGTIFGIYIIKDKDNVTLEDVLQPGKNMLAAGYCMYGSSCTLVLSTGTGVNGFTLDPSLGEFILTHPDIKIPKKGKIYSVNEGNAKNWDAPVAKFVEKCKYPKDGSPPRSLRYIGSMVADVHRTLLYGGVFLYPADEKNPNGKLRILYEVFPMSFLMEQAGGQSFTGKERALDLVPTKIHDRSPIFLGSYDDVEEIKALYAEQAKSSSASS

SEQ ID NO: 18092 - protein, 362 aa, Zea mays
  unsure (1)..(362): unsure at all Xaa locations
MDHAAEAQRTDLMTITRHALNEQGRHPESRGDFTILLSHIVLGCKFVASAVNKAGLAKLIGLAGETNVQGEEQKKLHALSHEVFGEALVSSGRTCVLVSEENEAAIFVDAPLRGKYCVCFDPLDGSSNIDCGVSIGTIFGIYMVKDKDNVTLEDVLQPGTNMLAAGYCMYGSSCTLVLSTGNGVNGFTLDPSLGEFILTHPNIKIPKKGKIYSVNEGNAKNWDGPTAKFVEKCKYPEDGSPPRSLRYIGSMVADVHRTLLYGGIFLYPADQKSPNGKLRVLYEVFPMSFLMEQAGGQAFTGKQRALELAPAKLHDRSPVFLGSYDDVEEIKALYASMSNSGXPFCLRKRARSKAPYASESTA

SEQ ID NO: 18093 - protein, 366 aa, Zea mays
  unsure (1)..(366): unsure at all Xaa locations
MDHAADAHRTDLMTITRHVLNEQSRNPESRGDFTILLSHIVLGCKFVASAVNKAGLAQLIGLAGETNVQGEEQKKLDVLSNEVFVKALVSSGRTCVLVSEEDEEATFVDPKLRGRYCVCFDPLDGSSNIDCGVSIGTIFGIYMVKDKDNVTLEDVLQPGTNMLAAGYCMYGSSCTLVLSTGNGVNGFTLDPSLGEFILTHPHIKIPRKGKIYSVNEGNAKNWDGPTAKFVQKRKYPEDGSPPRSLRYIGSMVADVHRTLLYGGIFLYPADQKSPNGKLRYNKXVLYEVFPMSFLMEQAGGQAFTGKQRALELAPAKLHDRSPVFLGSYDDVEEIKALYASMSNSGXPFCLRKRARSKAPYASESTA

SEQ ID NO: 18094 - protein, 334 aa, Zea mays
  unsure (1)..(334): unsure at all Xaa locations
MDHAADAHRTDLMTITRHVLNEQSRNPESRGDFTILLSHIVLGCKFVASAVNKAGLAQLIGLAGETNVQGEEQKKLDVLSNEVFVKALVSSGRTCVLVSEEDEEATFVDPKLRGRYCVCFDPLDGSSNIDCGVSIGTIFGIYIIKDKDNVTLEDVLQPGKNMLAAGYCMYGSSCTLVLSTGTGVNGFTLDPSLGEFILTHPDIKIPKKGKIYSVNEGNAKNWDAPVAKFVEKCKYPKDGSPPRSLRYIGSMVADVHRTLLYGGVFLYPADEKNPNGKLRILYEVFPMSFLMEQAGGQSFTGKEXXSPIFLGSYDDVEEIKALYAEQAKSSSASS

SEQ ID NO: 18095 - protein, 243 aa, Zea mays
  unsure (1)..(243): unsure at all Xaa locations
MDHAAEAQRTDLMTITRHALNEQSRHPESRGDFTILLSHIVLGCKFVASAVNKAGLAKLIGLAGETNVQGEEQKKLDVLSNEVFVKALVSSGRTCVLVSEENEAAIFVDAPLRGKYCVCFDPLDGSSNIDCGVSIGTIFGIYMIKDKDNATLEDVLQPGTHMIAAGYCMYGSSCTLVLSTGNGVNGFTLDPSLGEFILTHPNIKIXNKGKIYSVNERNARNWDAPTAKYVERCKFPQDGSSPX

SEQ ID NO: 18096 - protein, 280 aa, Zea mays
  unsure (1)..(280): unsure at all Xaa locations
MDHAADAHRTDLMTITRHVLNEQSRNPESRGDFTILLSHIVLGCKFVASAVNKAGLAQLIGLAGETNVQGEEQKKLDVLSNEVFVKALVSSGRTCVLVSEEDEEXXVRDPSCVEVTDXXCELVLSTGTGVNGFTLDPSLGEFILTHPDIKIPKKGKIYSVNEGNAKNWDAPVAKFVEKCKYPKDGSPPRSLRYIGSMVADVHRTLLYGGVFLYPADEKNPNGKLRILYEVFPMSFLMEQAGGQSFTGKEXXSPIFLGSYDDVEEIKALYAEQAKSSSASS

SEQ ID NO: 18097 - protein, 193 aa, Zea mays
  unsure (1)..(193): unsure at all Xaa locations
XEAIFVDPALRGKYCVCFDPLDGSSNIDCGVSIGTIFGIYMVKDKDNVTLEDVLQPGTNMLAAGYCMYGSSCTLVLSTGNGVNGFTLDPSLGEFILTHPNIKIPRKGKIYSVNEGNAKNWDGPTAKFVEKCKYPEDGSPPRSLRYIGXVIHCSFSTVYTGVSQFAFFCGHELNVSEVLLRIIVLAQAKKKKKX

SEQ ID NO: 18098 - protein, 152 aa, Zea mays
  unsure (1)..(152): unsure at all Xaa locations
ADAHRTDLMTITRFVLNEQSKYPESRGDFTILLSHIVLGCKFVCSAVNKAGLAKLIGLAGETNIQGEEQKKLDVLSNDVFVNALVSSGRTSVLVSEEDEEATFVEPSKRGKYCVVFDPLDGSSNIDCGVSIGTIFGIYTLDHTDEPTTADVX

SEQ ID NO: 18099 - protein, 200 aa, Zea mays
TSSRRAGASFNLGADLTVLVAHIQSACKRIAALVASPGNAELSRAKARGGAMAAGRDAPKPLDELSNDIILSALQSSGKVAALASEENDLPIWISDGGPYVVVTDPLDGSRNIEVSIPTGTIFGIYNRLVEVDHLPLEERAQLNSLQSGTRLVAAGYVLYSSATILCITFGAGTHAFTLDWSTGEFILTHPSIQIPPRGN

SEQ ID NO: 18100 - protein, 152 aa, Zea mays
  unsure (1)..(152): unsure at all Xaa locations
MDHAADTFRTDLMTITRHVLNEQSRHPESRGDLTILLSHIVLGCKFVASAVNKAGLAKLTGLAGETNVQGEEQKKLDVLSNEVFVNALVSSGRTCVLVSEEDEKATFVDPKLRGKYCVCFDPLDGSSNIDCGVSIGTIFGIYMIXDPDTVTX

SEQ ID NO: 18101 - protein, 146 aa, Zea mays
  unsure (1)..(146): unsure at all Xaa locations
XALAVQVSLILIPGQIYAVNNARYSDWPEVLTXFIDTLRQRXGQHPKKYSARYVCSLVADFHRTLIYGGVAMNPRDHLRLVYEANPLSFLAEQAGGRGSDGKNRILTIQPVKLHQRLPLFLGSMDDMLELESYGDVQQKVNPGYEV

SEQ ID NO: 18102 - protein, 403 aa, Zea mays
  unsure (1)..(403): unsure at all Xaa locations
ALLPSSSARATAHLKAMEIVATRSPACCAAVSFSQSYRPKASRPPTTFYGESVRVNTARXXLSARRQSKAASRAALSARCEIGDSLEEFLTKATPDKNLIRLLICMGEAMRTIAFKVRTASCGGTACVNSFGDEQLAVDMLANKLLFEALEYSHVCKYACSEEVPELQDMGGPVEGGFSVAFDPLDGSSIVDTNFTVGTIXFGVWPGDKLTGVTGGDQVAAAMGIYGPRTTYIVALKDCPGTHEFLLLDEGKWQHVKDTTTIGEGKMFSPGNLRATFDNPEYDKLINYYVKEKYTLRYTGGMVPDVNQIIVKEKGIFTNVTSPTAKAKLRLLFEVAPLGFLMEKAGGYSSDGKQSVLDRVINELDERTQVAYGSKNEIIRFEETLYGSSRLAASATATARALI

SEQ ID NO: 18103 - protein, 130 aa, Zea mays
  unsure (1)..(130): unsure at all Xaa locations
RLKHSIITRGPLSVPEPQIVISSXXSHAEFYAVXRFVDKCKYPEDGSPPRSLRYIGSMVADVHRTLLDGGIFLYPADQKSPDGKLRVLYEVFPMSFLMEQAGGQAFTGKQRVCFSFPFSDPNPQLKNLDX

SEQ ID NO: 18104 - protein, 78 aa, Zea mays
  unsure (1)..(78): unsure at all Xaa locations
XTRXXGIYGYPRDKKSKNGKLRLLYECAPMSFIVEQAGGKGSDGHQRILDITPTEIHQRVPLYIGSVEEVDKVEKFLA

SEQ ID NO: 18105 - protein, 77 aa, Zea mays
RNAKNWDGPTAKFVEKCKYPEDGSPPRSLRYIGSMVADVHRTLLYGGIFLYPADQKSPNGKLRVLYEVFPMSFLMEQ

SEQ ID NO: 18106 - protein, 148 aa, Zea mays
  unsure (1)..(148): unsure at all Xaa locations
XHACARGVAVITGHHXSAIRAXXSLYPADDEEPNGKLRXILXEGEAMNLLMQQAGGQSFTGKERALDLVPTKIHDRSPIFLGSYHDVEEIKALYAGPAKSSSPSSLVRGEIDFSCLNLLLVTGARLSVSVSLGVPVSVNDIQCTMYSP

SEQ ID NO: 18107 - protein, 121 aa, Zea mays
  unsure (1)..(121): unsure at all Xaa locations
MDHAAEAQRTDLMTITRHVLNEQSRHPESRGDFTILLSHIVLGCKFVAAAVNKAGLAKLIGLAGETNVQGEEQKKLDVLSNEVFVKALVSSGRTVRISLLVHCDYILSVXVPRVFCFLTRX

SEQ ID NO: 18108 - protein, 343 aa, Streptomyces coelicolor A3(2)
MTEHHLPSELDVPSEAPDRNLAMELVRVTEAAAMAAGRWVGRGDKNGADGAAVRAMRTLVHTVSMNGVVVIGEGEKDEAPMLFNGERVGDGTGAEVDIAVDPIDGTTLTANGMTNAIAVLAAAERGSMFDPSAVFYMDKLVTGPEAADFVDINAPVAVNIRRIAKAKRRTPEDVTVVILDRPRHQGLIKEVRETGARIKLISDGDVAGSILALREGTGIDLLLGIGGTPEGIISACAVKCLGGTIQGKLWPKDAEERQRAVDAGHDLDRVLTTDDLVSGDNVFFVATGITDGELLRGVRYRSETATTDSIVMRSKSGTVRRIDSEHRLSKLRAYSAVDFDRAK

SEQ ID NO: 18109 - protein, 345 aa, Nostoc sp. PCC 7120
MENTLGLEIIEVVEQAAIASAKWMGKGEKNTADQVAVEAMRERMNKIYMRGRIVIGEGERDDAPMLYIGEEVGICTQPNADQLCNPDELVEIDIAVDPCEGTNLVAYGQPGSMAVLAISEKGGLFAAPDFYMKKLAAPPAAKGKVDINKSATENLKILSECLDRSIDELVVVVMKRDRHQGLIKEIRDAGARVQLISDGDVGAAISCGFAGTNVHALMGIGAAPEGVISAAAMRALGGHFQGQLIYDPEVVKTGLIGESKQANLDRLSSMGINDPDKVYDAHELASGENVLFAGCGITSGNLMQGVRFFHGGARTQSLVISSQSQTARFVDTIHMAGQPKTVQLH

SEQ ID NO: 18110 - protein, 321 aa, Rhodobacter sphaeroides
MADAAQFHDRMLSLGLARVSEAAALASARLIGRGDEKAADQAAVNAMRDQLNLLDIAGVVVIGEGERDEAPMLFIGEEVGTGHGPAVDIALDPLEGTTLTAKDMPNALTVIAMAPRGTLLHAPDVYMEKLAIGPGYAPDTVTLKMTPAERVHALAKAKDGTPEDVTVCILERPRHEELIAEVRSTGAAIRLITDGDVAGVIHCAEAHLTGIDMYMGSGGAPEGVLAAAALKCMGGQMYGQLLFRNDDERSRARRAGIQDLDRIYTRDELVTADVIFAATGVTNGSILAGIKREPGWVTTETILMRSKTGSVRRMSYRSPVK

SEQ ID NO: 18111 - protein, 334 aa, Rhodopseudomonas palustris
MSTTISVPPQLLLERILTLEIVRVTERAAVSAARLRGHGNEKGADQAAVDAMRRELNKMPIEGTIVIGEGERDEAPMLFIGEKVGAGINAGPKVDIAVDPLEGTTLCAKNMPGSIATMAMAEGGTLLHAPDVYMQKIAIGPGYEKNLIDIDAPPEDNILRLAQAKGVPTSGVTVLVLDRPRHAELIAKIRATGAGVQLITDGDVAGVIHCADPDNTGVDIYMGTGGAPEGVLAAAALRCIGGQMQCRLLLDTHSKRNRAESMGIEDPNFVYQIEDMVKGDCLFAATGVTDGSLLSGVKFRKGVIQTETVVMRSVTGTVRYIKADHRQLEKFHLD

SEQ ID NO: 18112 - protein, 351 aa, Rhodospirillum rubrum
MALTARPGVPLSGVRPLSSVASFSADPVLSAALDRNLALDVARVTEAAAIAAARYMGRGDERAADLAATAAMREALTTVPMAGTITLGALADPDDGLFRLGEGVGNGTGLLIDVGVTPLEGATICAMGAPNATACMALARKGELLAVPPVYMEKIAVGPGVPEGCLSLDADPAENIRALAKVRGVPAEALLICVLDRPRNEALVDRVRSTGARITLISDGDVSGAVAVGLPETGVDMYMGSGGAAEGVLAAAGLRCLGGVLQGRLMVRGDSEKAAVRAAGITDPDRILTMADMVPGETMFAATGVTDGALLRGVRLHAGSARSSTLVMRSRTGTLRFIDTRHDLSKLSADR

SEQ ID NO: 18113 - protein, 325 aa, Chloroflexus aurantiacus
MERNLGMDLVRATEAAALRSGRWMGRGDKNSADQAAVDAMRMALNSVPMNGIVVIGEGEKDEAPMLYIGERVGNGEGEEIDVAVDPVEGTTLLAEGMPGAIAIVAVAERHSFYNWRGIPYMDKLAVGERAKGVIDINAPVAYNIRAVARTLNKQVEDVTVVVLDRPRHKDLIRQIREIGARIKLIPHGDVSAGIMTSIENPPADILMGIGGAPEAVLTAAALKCLGGEIQCKVWPRNDEERARLAELGLDPKQVLTTRDLVRGENVVVAATGITSGEFLRGVEYFGGGARTHSVVMRSRSGTVRYIEATHRWDKLMRISDMPYAR

SEQ ID NO: 18114 - protein, 388 aa, Synechocystis sp.; identical to SEQ ID NO: 462

SEQ ID NO: 18115 - protein, 356 aa, uncultured cyanobacterium
MEKTIGLEIIEVVEQAAIASARLMGKGEKNEADRVAVEAMRVRMNQVEMLGRIVIGEGERDEAPMLYIGEEVGIYRDADKRAGVPAGKLVEIDIAVDPCEGTNLCAYGQPGSMAVLAISEKGGLFAAPDFYMKKLAAPPAAKGKETSIKSATENLKILSECLDRAIDELVVVVMDRPRHKELIQEIRQAGARVRLISDGDVSAAISCGFAGTNTHALMGIGAAPEGVISAAAMRCLGGHFQGQLIYDPEVVKTGLIGESRESNIARLQEMGITDPDRVYDANELASGQEVLFAACGITPGLLMEGVRFFKGGARTQSLVISSQSRTARFVDTVHMFDDVKTVSLPLIPDPKWRPER

SEQ ID NO: 18116 - protein, 268 aa, Deinococcus radiodurans
MTKRTPDSADISFEHALVLETARVTEGAALAASRFMGLGDKNAVDGAGTEAMRSLLNSLDIRGTVVIGEGEMDEAPMLYIGEKVGNGQYEVDIAVDPVEGTNVTAKGLPNGLAVIALSERGGLMHAPDCYMEKLIVPPPAAGRVNLDWPVEANLSVIAQSLERDVEDLMITILDRERHADLIQRVRATGARVKLIGDGDVVAGLAVGVRGTGVHALMGSGGAPEGVLSAAACKCLGAEIRGRGHRRGRRHARALRRNGRERTPHLQYR

SEQ ID NO: 18117 - protein, 89 aa, Carboxydothermus hydrogenoformans
  unsure (1)..(89): unsure at all Xaa locations
DHXEGTNLVAKGLNGAXXVLDAAPKGCLLDAPDMYMEKIAVGPAAAGKIHLDAPVKDNLRIVAESLKKSVTDITVVILDRPRHEXXCPD

SEQ ID NO: 18118 - protein, 324 aa, Clostridium acetobutylicum
MFDNDISMSLVRVTEAAALQSSKYMGRGDKIGADQAAVDGMEKAFSFMPVRGQVVIGEGELDEAPMLYIGQKLGMGKDYMPEMDIAVDPLDGTILISKGLPNAIAVIAMGPKGSLLHAPDMYMKKIVVGPGAKGAIDINKSPEENILNVAKALNKDISELTVIVQERERHDYIVKAAIEVGARVKLFGEGDVAAALACGFEDTGIDILMGIGGAPEGVIAAAAIKCMGGEMQAQLIPHTQEEIDRCHKMGIDDVNKIFMIDDLVKSDNVFFAATAITECDLLKGIVFSKNERAKTHSILMRSKTGTIRFVEAIHDLNKSKLVVE

SEQ ID NO: 18119 - protein, 336 aa, Escherichia coli O157:H7 EDL933
MRRELAIEFSRVTESAALAGYKWLGRGDKNTADGAAVNAMRIMLNQVNIDGTIVIGEGEIDEAPMLYIGEKVGTGRGDAVDIAVDPIEGTRMTAMGQANSLAVLAVGDKGCFLNAPDMYMEKLIVGPGAKGTIDLNLPLADNLRNVAAALGKPLSELTVTILAKPRHDAVIAEMQQLGVRVFAIPDGDVAASILTCMPDSEVDVLYGIGGAPEGVVSAAVIRALDGDMNGRLLARHDVKGDNEENRRIGEQELARCKAMGIESGKVLRLGDMARSDNVIFSATGITKGDLLEGISRKGNIATTETLLIRGKSRTIRRIQSIHYLDRKDPEMQVHIL

SEQ ID NO: 18120 - protein, 321 aa, Escherichia coli O157:H7 EDL933
MMSLAWPLFRVTEQAALAAWPQTGCGDKNKIDGLAVTAMRQALNDVAFRGRVVIGEGEIDHAPMLWIGEEVGKGDGPEVDIAVDPIEGTRMVAMGQSNALAVMAFAPRDSLLHAPDMYMKKLVVNRLAAGAIDLSLPLADNLRDVARALGKPLDKLRMVTLDKPRLSAAIEEATQLGVKVFALPDGDVAASVLTCWQDNPYDVMYTIGGAPEGVISACAVKALGGNMQAELIDFCQAKGDYTENRQIAEQERKRCKAMGVDVNRVYSLDVLVRGNDILFSATGVTGGELVNGIQQTANGVRTQTLLIGGADQTCNIIDSLY

SEQ ID NO: 18121 - protein, 355 aa, Mycobacterium leprae
MTAEGDGSFKPGPPTERRGEAPDRNLAMELVRVTEAGAMAAGRWVGRGNKEGGDGAAVDTIRELVNTVSMRGVVVIGEGEKDHAPMLYNGEEVGNGDGPDCDFAVDPIDGTTLMSKGMPNAISVLAVADRGAMFDPSAVFYMNKITVGPDAAHVLDITAPIGENIRAVAKVKDLSVRDMTVCILDRPRHAQLIDDVRATGARIRLITDGDVAGAISACRPQSGTDMLAGIGGTPEGIIAAAAIRCMGGAIQAQLAPRDDVERRKALDAGYNLDRILTTEDLVSGENVFFCATGVTDGDLLKGVRYYAGGCTTQSIVMRSKSGTVRMIEAYHRLSKLNEYSAIDFTGDNNAAYPLP

SEQ ID NO: 18122 - protein, 328 aa, Mycobacterium leprae
MELVRVTEAGAMAAGRWVGRGNKEGGDGAAVDTIRELVNTVSMRGVVVIGEGEKDHAPMLYNGEEVGNGDGPDCDFAVDPIDGTTLMSKGMPNAISVLAVADRGAMFDPSAVFYMNKITVGPDAAHVLDITAPIGENIRAVAKVKDLSVRDMTVCILDRPRHAQLIDDVRATGARIRLITDGDVAGAISACRPQSGTDMLAGIGGTPEGIIAAAAIRCMGGAIQAQLAPRDDVERRKALDAGYNLDRILTTEDLVSGENVFFCATGVTDGDLLKGVRYYAGGCTTQSIVMRSKSGTVRMIEAYHRLSKLNEYSAIDFTGDNNAAYPLP

SEQ ID NO: 18123 - protein, 372 aa, Yersinia pestis KIM
MRVKRVQLTPLRLQVRKVIEFLPIFSFSIPQSTGLTMKRELAIEFSRVTEAAALAGYKWLGRGDKNAADGAAVQAMRIMLNQVNIDGRIVIGEGEIDEAPMLFIGEHVGTGQGDAVDIAVDPIEGTRMTAMGQANALAVLAVGDQGTFLHAPDMYMEKLVVGPAAKGAIDLNLPLEQNLCNIATALNKPLADLTVITLAKPRHDGIIAAMQQLGVKVFAIPDGDVAASILTCMPESEVDVMYCIGGAPEGVISAAVIRALDGDMQGRLLPRHQVKGDSEDNRRIGEQELLRCKSMGIEAGNVLQLGDMARNDNVIFSATGITKGDLLEGIYRKGNMATTETLLIRGKSRTIRRIRSTHFLDRKDPALHEFLL

SEQ ID NO: 18124 - protein, 367 aa, Magnetospirillum magnetotacticum
MTSGLVPGSQCRLPEAGRDERHRPEQVGPGDEDRAAMSVANTGIFSDPTARGLTLELVRVTEAAAIAAARLRGQGREKEADQAAVDAMRAELMVLPIEGSVVIGEGERDEAPMLYIGERVGTGNGPSVDIAVDPLEGTTLCAKDMPGAIAVMALAERGTLLAAPDVYMQKIAIGPGYPPGTVDLDWSPAKNIASLARAKGVEPSGITAIILDRPRHMDLIAAVRDTGAGIRLISDGDIAAIIHCTRPDETGVDIYMGTGAAPEGVIAASVLRCIGGQMQGRLILDSADRRARAAKMGITDPGRKYDMHDLARGDVIVAATGVTTGALLSGVRFRPGIIETETVVYRSNTGTIRRIACEHRQPGNAPG

SEQ ID NO: 18125 - protein, 318 aa, Magnetospirillum magnetotacticum
MSERSKTVGAYELRRATEAAARAAYAWIGRGDKALADDAAVAAMQTELDGLDLNGLMLIGEGPKDEIGMLYHGQRFGAATAEPAWDLVVDPLEGTSFLAKGMTNAMAVVAMAPHGTLFDPAPARYMEKLAAPPAAKGKIDPKAPVAERLAQLSAALNKPIEDITVYVIEKPRHKALVNAIHNAGARVALYPAGDVAGALMAAIPGSGIDALMGTGGTPEGLLSAMAIRAMGGEFLGRIDPQLATEAAAVEEAGMDLNHWYQLDEMVRSDKVVFCATGITTGLLLDGVERTRDQEKTQTLMIGGAAGPRQMLTSWHRRA

SEQ ID NO: 18126 - protein, 330 aa, Magnetospirillum magnetotacticum
MSIHTATLPVLDRNLALEVVRVTEASALAAARQTGRGDERAADEAACSAMRHALNGLSMDGVIVNGEGDDSTQPLHTGEKVGNGKGPKVDIVLTALEGRSICARGAHNALSVVAMTEEGSFLKVPQHSYMEKIVVGAGMPSSIIDLDSTPEENLSRIAKAKGVTLSELTVSVLDRPRHGELIERLYAAGVRVMLFDDGDVSGALAAGLPDSGVDVYMGSGGAAQGVLAAAGLKCLGAQMQCRLLCRSDQDHAAARRVGIADTRRKWNIEDMVRGEVMFAATGITDGHVLKGARLAPNNRAESHSLVMRSVTGTIRYLSVQHDLSRSHLPA

SEQ ID NO: 18127 - protein, 362 aa, Methanosarcina acetivorans C2A
MPHPKTVEEMFESAGPIEYRLLPRLIHVTEAAAIAAAYQMGRGDKHFADQVAVASMRRMLNKLDMKGIIKIGEGERDEAPMLYIGEEVGTENGDLEVDIAVDPLEGTNLTADGCPGSVAVMAMAERGGIFHGPDIYMDKIVVGPDVVRYEEEHPGERIDLDAPVSHNLEIVAKALGRKVEELVVVILDRPRHAQKITEIREAGARVRLVTDGDLMPGVATAVRGSGIHVVMGAGGSGEAVLTAAAIKILGGKILARLVLPTVANGKTKEKIDEEIEEKMPRLEAMGITLENINDILDIDKLVPGKDVIFSATAVTPGHFLREVNLFGGGDARVHTVSMGASGAVRFTDSIYIKDKRETPLYL

SEQ ID NO: 18128 - protein, 346 aa, Fusobacterium nucleatum subsp. nucleatum ATCC 25586
MKRELALEFARVTEAAALAAHKWVGRGKKESADQAGVDAMRTMLNRLAIDGEIVIGEGEIDEAPMLYIGEKVGQIYNEEEKDSVTYVDPVDIAVDPVEGTRMTAQGQPNAITVLAVGKKGSFLKAPDMYMEKLIVGPEAKGKIDLSKPLEDNIHAVAKALKKELKDLMIVILDKPRHKELIKDLQAMGVKVYALPDGDVAGSILTCMIDSDVDMLYGIGGAPEGVISAAVIRALGGDMQARLKLRSEVKGASLENDKISKFEKLRCEEQGLKVGEILKLEDLAKDDEIIFSATGITGGDLLEGVKRKGNIARTQTLVVRGLSKTVRYINSIHNLDFKDEKITHLVK

SEQ ID NO: 18129 - protein, 317 aa, Caulobacter crescentus CB15
MSSNTLDRALVLDAVRVTEAAAIASWTMLGRGDEMAADQAAVDAMRNALNELDIDGEIVIGEGERDEAPMLYIGEKVGTGKGPRIDIALDPLEGTTLAAKSQPNALTVMAWAPKGTLLNAPDTYMDKIACGPGLPAGVIDLDRSPAENIQAVADAKGVALSEITVCVLDRPRHAEIIASVRAVGARIHLITDGDVAGVINTTDPLTGIDLYLGSGGAPEGVLACAALKCVGGQFQGRLLFRNADERARAARWGVTDLDKKYDLHEIVRDEAIFAATGVTRGGLLDGVVYRDGCVHTHTLVMNSSTGTVREVRMKRKV

SEQ ID NO: 18130 - protein, 217 aa, Bacillus anthracis str. A2012
  unsure (1)..(217): unsure at all Xaa locations
MERSLSMELVRVTEAAALSSARWMGRGKKDEADGAATSAMRDVFDTIPMKGTVVIGEGEMDEAPMLYIGEKLGTGYGPRVDVAVDPLEGTNIVAAGGWNALAVIAIADHGNLLHAPDMYMDKIAVGPEAVGAVDIDAPIIDNLRAVAKAKNKDIEDVVATVLNRPRHQAIIEEIRKAGARIKLINDGDVAGAINTAFDRTGVDILFGXGGAXEGVLA

SEQ ID NO: 18131 - protein, 186 aa, Bacillus anthracis str. A2012
MERELALEIVRVTEAAALASAQWMGRGKKNEADDAATTAMRDMFDSVNMAGTVVIGEGELDEAPMLYIGEELGTGNGPEVDIAVDPLEGTNIVAKGLANAMAVIAIADKGNLLHAPDMYMEKIAVGPKAAGKISLDDPIEKTIEIVAEANNKKIRDLTVIVQERERHQDIIDRVRAKGARVKLFGD

SEQ ID NO: 18132 - protein, 362 aa, Methanosarcina mazei Goe1
MPHPKTVEKMFECAGPIEYKLLPRLIHVTEAAAIAAAYQMGRGDKHFADQVAVASMRRMLNKLDMQGIIKIGEGERDEAPMLYIGEEVGTGVGDLEVDIAVDPLEGTNLCADGCPGSVAVMAMAERGGIFHGPDIYMDKIVVGPDVVRYEKEHPDERIDLDAPVRQNLEIVAKALGRNVEELVVVILDRPRHAQKITEIREAGARVRLVTDGDLMPGVATAIRGSGIHMVMGAGGSGEAVLTAAAIKILGGKILARLVLPSVANGKSKEKIQEEIEEKMPRLEKMGITLEKLNDVLDTERLVPGKDVIFSSTAVTPGHFLRETRLFGGGDARVHTISMGASGAVRFTDSIYIKDKQETPLYL

SEQ ID NO: 18133 - protein, 387 aa, Corynebacterium efficiens YS-314
MGSVPHNRGVPTPGMRSPAFPTPVSRPGPGCSLRYRRYRQKIFNVFHRLQEAPTMNALHPEQPDRNLAMELVRVTEAAALAAGRWVGRGMKNEGDGAAVDAMRQLINSVSMKGVIVIGEGEKDEAPMLYNGEEVGTGFGPEVDIAVDPVDGTTLMAEGRPNAITVLAASERGSMYDPSAVFYMKKLAVGREAAGKVDIEAPVAHNINAVAKAKGISASDVTVVVLDRPRHTDLIADIRRAGAKVRLISDGDVAGAVAAAQDTNSVDIMMGTGGTPEGIITACAMKCMGGEIQGILAPMNDFERRKALDAGLELDRVLHTNDLVTSDNCYFVATGLTNGDMLRGVSYRANGATTRSLVMRSKSGTIRHIESVHQLSKLQEYSVVDYTV

SEQ ID NO: 18134 - protein, 335 aa, Corynebacterium glutamicum ATCC 13032
MNLKNPETPDRNLAMELVRVTEAAALASGRWVGRGMKNEGDGAAVDAMRQLINSVTMKGVVVIGEGEKDEAPMLYNGEEVGTGFGPEVDIAVDPVDGTTLMAEGRPNAISILAAAERGTMYDPSSVFYMKKIAVGPEAAGKIDIEAPVAHNINAVAKSKGINPSDVTVVVLDRPRHIELIADIRRAGAKVRLISDGDVAGAVAAAQDSNSVDIMMGTGGTPEGIITACAMKCMGGEIQGILAPMNDFERQKAHDAGLVLDQVLHTNDLVSSDNCYFVATGVTNGDMLRGVSYRANGATTRSLVMRAKSGTIRHIESVHQLSKLQEYSVVDYTTAT

SEQ ID NO: 18135 - protein, 321 aa, Corynebacterium glutamicum ATCC 13032
MELVRVTEAAALASGRWVGRGMKNEGDGAAVDAMRQLINSVTMKGVVVIGEGEKDEAPMLYNGEEVGTGFGPEVDIAVDPVDGTTLMAEGRPNAISILAAAERGTMYDPSSVFYMKKIAVGPEAAGKIDIEAPVAHNINAVAKSKGINPSDVTVVVLDRPRHIELIADIRRAGAKVRLISDGDVAGAVAAAQDSNSVDIMMGTGGTPEGIITACAMKCMGGEIQGILAPMNDFERQKAHDAGLVLDQVLHTNDLVSSDNCYFVATGVTNGDMLRGVSYRANGATTRSLVMRAKSGTIRHIESVHQLSKLQEYSVVDYTTAT

SEQ ID NO: 18136 - protein, 347 aa, Thermosynechococcus elongatus BP-1
MDNVIGLEIIEVVEQAAIASARWMGKGDKNMADQAAVDAMRNRMNQIHMRGRIVIGEGERDEAPMLYIGEEVGICTRPDAAQYCNPEELIEIDIAVDPCEGTNLCAYGQPGSMAVLAISEKGGLFAAPDFYMKKLAAPPAAKGKVDIRNSATENLKILSECLDRAIDELVVVVMKRDRHNDLIQEIRDAGARVQLISDGDVSAALACAFSGTNIHALMGIGAAPEGVISAAAMRALGGHFQGQLVYDPAVVMTKEWANRTREGNLEELKKAGITDPDKVYEAEELASGETVLFAACGITPGMLMKGVRFFKGGARTQSLVISTQSKTARFVDTIHMFDQQLKSLQLY

SEQ ID NO: 18137 - protein, 258 aa, Shigella flexneri 2a str. 301
MLWIGEEVGKGDGPEVDIAVDPIEGTRMVAMGQSNALAVMAFAPRDSLLHAPDMYMKKLVVNRLAAGAIDLSLPLADNLRNVARALGKPLDKLRMVTLDKPRLSAAIEEATQLGVKVFALPDGDVAASVLTCWQDNPYDVMYTIGGAPEGVISACAVKALGGDMQAELIDFCQAKGDYTENRQIAEQERKRCKAMGVDVNRVYSLDELVRGNDILFSATGVTGGELVNGIQQTANGVRTQTLLIGGADQTCNIIDSLH

SEQ ID NO: 18138 - protein, 321 aa, Shigella flexneri 2a str. 2457T
MMSLAWPLFRVTEQAALAAWPQTGCGDKNKIDGLAVTAMRQALNDVAFRGRVVIGEGEIDHAPMLWIGEEVGKGDGPEVDIAVDPIEGTRMVAMGQSNALAVMAFAPRDSLLHAPDMYMKKLVVNRLAAGAIDLSLPLADNLRNVARALGKPLDKLRMVTLDKPRLSAAIEEATQLGVKVFALPDGDVAASVLTCWQDNPYDVMYTIGGAPEGVISACAVKALGGDMQAELIDFCQAKGDYTENRQIAEQERKRCKAMGVDVNRVYSLDELVRGNDILFSATGVTGGELVNGIQQTANGVRTQTLLIGGADQTCNIIDSLH

SEQ ID NO: 18139 - protein, 366 aa, Thermobifida fusca
MLEAERIQRALRTVRAEELIRKGLAMTTANAPVPIPHDAPDRNLALELVRVTEAAALAAARWVGRGDKNGADDAAVRGMRHLISTVSMKGTVVIGEGEKDNAPMLYNGEQVGDGNGAECDVAVDPIDGTRLTAMGMPNAISVIAVSPRGSMFDPSAVFYMEKLVTGPDAANVVDINAPVADNIRAVAKAKGGDPRDITVVILDRPRHERLVHEVRETGARIKFISDGDVAGAIMAARAGTGVDLLLGIGGTPEGIIAACAIKCLGGVIQGKLWPRDDEERRKAEAAGHDLSRVLTTDDLVSSEDVFFAATGITGGELLSGVKYVDGGAFTDSLVMRGRSGTIRRISSEHRLRKLSSYRGVDVSGAR

SEQ ID NO: 18140 - protein, 345 aa, Trichodesmium erythraeum IMS101
MDNVIGLEIIEVVEQAAIASARWMGKGEKNTADEVAVEAMRERMNKIHMRGRIVIGEGERDEAPMLYIGEEVGICTQPDAKKMCEVEQLIEIDIAVDPCEGTNLVAYGQNGSMAVLAISEKGGLLAAPDVYMKKLAAPAVAKNHVDINKSATENLKIISECMDRAVEELVVVVMDRPRHKQLISEIRQAGARVRLISDGDVSAAISCAFAGTNIHALMGIGAAPEGVISAAAMRALGGHFQGQLIYDPAIVKTGLIGESKEDNMKRLKDMGIEDPDKVYNAEELASGETVLFAACGITPGTLMEGVRFFPNGARTQSLVISSQSKTARFVDTVHMFGETKTLQLK

SEQ ID NO: 18141 - protein, 328 aa, Brucella suis 1330
MAKTAEQHPHGLDRILTLELVRVAERAAVAAARLRGRGDEMAADQAAVDAMRQELNRLPITGTVVIGEGERDEAPMLYIGEEVGTKQGPAVDIALDPLEGTTICAKNLPNSLAVIAIAEKGNLLYAPDVYMEKIAVGPGYPKGVVDLDATPTDNIMSIAKAKGVKPNEITACIMDRPRHARLIEEVRATGAAIRLIGDGDVAGVMHTTDPDETGIDIYIGIGGAPEGVLAAAALRCIGGQMQGRLQLNTEEKVARAAKMGISDPKKIYTLEEMAKGDVLFAATGVTDGNMLSGVKFARDYIQTHTIVMRSSSQTVREIKARHQDLSKF

SEQ ID NO: 18142 - protein, 327 aa, Desulfovibrio desulfuricans G20
MEAPQKNLALDLVRVTEAAALASARWLGKGNQDAGDQAAVDAMRLCFNSLNISGVVVIGEGEKDNAPMLFNGEKVGAGNGPALDVAVDPVEGTKLLAYGRPNAISVIGVAPAGTMYNPGPSFYMQKLVVPGAAKNVVDLDAPVAENLHKIAKALDKDVDDLVVFVLDKPRHASLIEQVRAAGARIQLHTDGDVSGALMAVDPRSEVDVMMGTGGTPEGVLAACAIKGIGGEMFARLDPQSYVEKEAILEAGIDLREIHTVDTLVRSDEVFFSATGISGGTFLKGVQYTGTGAVTHSMVIRGRTGTLRYIESINNWDKLMKISSVKYD

SEQ ID NO: 18143 - protein, 346 aa, Fusobacterium nucleatum subsp. vincentii ATCC 49256
MKRELALEFARVTEAAALAAYKWVGRGKKESADQAGVDAMRTMLNRLAIDGEIVIGEGEIDEAPMLYIGEKVGQIYNEEEKDSVTYVDPVDIAVDPVEGTRMTAQGQPNAITVLAVGKKGSFLKAPDMYMEKLIVGPEAKGKIDLSKPLEDNIHAVAKALNKELKDLMIVVLDKPRHKELIKDLQAMGIKVYALPDGDVAGSILTCMIDSDVDMLYGVGGAPEGVISAAVIRALGGDMQARLKLRSEVKGATLENDKISKFEKLRCEEQGLKVGEILKLDDLAKDDEIIFSATGITGGDLLEGVKRKGNIARTQTLVVRGLSKTIRYINSIHNLDFKDEKITHLVK

SEQ ID NO: 18144 - protein, 323 aa, Clostridium tetani E88
MIKQDIAMGLVRVTEAAALCSSKYMGRGDKIAADQAAVDGMEKAFSMLPIKGTVVIGEGEMDEAPMLYIGQKLGIGTDGMEEMDIAVDPLDGTVLIAKGLPNAVSVMAMGPKGSLLNAPDMYMKKIAVGASAKGVIDINKTNKENIINVAMALNKDVTELTIMVQERERHNDIIKDAREVGARVKLFSEGDVAAVLACGFESTGVDMMMGTGGAPEGVIAAAAIKCMGGDMQAKLVPQNEEEIRRCKSMGIENVEATLYINDLVKSDDIYFAATAVTDSDLLKGVVYSKNNWATTQSIVMRSKTGTIRFVDAQHHLSRSNLVL

SEQ ID NO: 18145 - protein, 335 aa, Vibrio vulnificus CMCP6
MKRDLAMAFSRVTEGAALAGYKWLGRGDKNAADGAAVEVMRTLLNKTDISGEIVIGEGEIDDAPMLYIGENVGLGGDEVDIAVDPIEGTRMTAMGQSNALAVLAAGEKGSFLKAPDMYMEKLVVGPGAKGVIDLNKPLKENLVNIAQALGKTLDTLVVITLAKPRHDEVIAEMQRMGVRVFAVPDGDVAASILTCMPDSEVDVMYCIGGAPEGVVSAAVIRALDGDMHGRLLPRNEVKGDNEENRKFADFELERCAEMGVEANKVLKLEDMARSDNVIFSATGITKGDLLEGISRQGNIATTETLLIRGRCRTIRRIKSIHYLERKDDEVKAIIL

SEQ ID NO: 18146 - protein, 353 aa, Methanosarcina barkeri
MIDCSGPIECDLLPRLIHVTEAAAIAAAYQMGRGNKSFADQVAVAAMRRMLNKLDMKGIIQIGEGERDEAPMLYIGEHVGTGKGDLEVDIAVDPLEGTNLTADGGPGSVAVMAMAERGGIFHGPDIYMDKIVVGPDVVRYEEEHPDERIDLDAPVKRNLEIVAKALDRSVDELVVVVLDRPRHAQKITEIREAGARVKLISDGDLMPGVSTAIRGSGVHMVMGSGGSGEAVLTAAAIKILGGKVLARLLLPTVANGKSQDKVDKEIEEKMPRLEKMGITLQNINDVLDTDRLVPGNDVIFSASAVTPGHFLREVNLFGSGDARVHTISMGASGSVRFTDSIYIKDKRETPLYL

SEQ ID NO: 18147 - protein, 325 aa, Oceanobacillus iheyensis HTE831
MFEMERSLSMELVRVTEAAALQSARWMGRGVKDEADDAATTAMRTVFDTIPMEGTVVIGEGEMDEAPMLYIGEKLGTGDGPGVDVAVDPLEGTEIVAQGTWNALAVIAIADRGTLLHAPDMYMEKIAVGPDAIGKIDINAPVVDNLKAVAKAKNKSIEDVVATVLDRPRHQKLIDKIRASGARIKLIPNGDVAAAINTAFDDTGVDILLGSGGAPEGVLAAAALKCLGGELQGKLVPSNDDEIKRCHDMGITDLNKVFYMNDFCSGDDAIFAATGVTDGELLKGVQFKGKKATTSTLVMRARSGTVRFIDGTHSLQKKPDLVIKP

SEQ ID NO: 18148 - protein, 335 aa, Vibrio parahaemolyticus RIMD 2210633
MKRDLAMAFSRVTEGAALAGYKWLGRGDKNAADGAAVEVMRTLLNKTDISGEIVIGEGEIDDAPMLYIGEKVGLGGDEVDIAVDPIEGTRMTAMGQSNALAVLAAGEKGSFLKAPDMYMEKLVVGPGAKGVIDLEKPLKENLENVASALNKTLDTLVVITLAKPRHDDVIAEMQAMGVRVFAVPDGDVAASILTCMPDSEVDLMYCIGGAPEGVVSAAVIRALDGDMHGRLLPRHEVKGDTEENRIYGAAELQRCEEMGVKANVVLKMEDMARSDNVVFSATGITKGDLLEGISRQGNIATTETLLVRGRCRTIRRIKSTHYLERKDPEVRDIIL

SEQ ID NO: 18149 - protein, 321 aa, Bacillus subtilis subsp. subtilis str. 168
MERSLSMELVRVTEAAALASARWMGRGKKDEADEAATSAMRDVFDTVPMKGTVVIGEGEMDEAPMLYIGEKLGNGYGPRVDVAVDPLEGTNILASGGWNALTVIAVADHGTLLNAPDMYMQKIAVGPEAVGCIDIEAPVIDNLKAVAKAKNKDVEDVVATILNRERHAKIISELREAGARIKLINDGDVAGAINTAFDHTGVDILFGSGGAPEGVLSAVALKALGGEIIGKLLPQSEEEITRCHKMGLDLSKVLRMEDLVKGDDAIFAATGVTDGELLKGVQFKGSVGTTESLVIRAKSGTVRFVDGRHSLKKKPNLVIRP

SEQ ID NO: 18150 - protein, 333 aa, Bradyrhizobium japonicum USDA 110
MSTHISVPPHALLERILTLEIVRVTERAAVSSARLRGHGNEKAADQAAVDAMRRELNKLPIEGTIVIGEGERDEAPMLFIGEKVGMNAGPQVDIAVDPLEGTTLCAKNMPGSIATMAMADGGTLLHAPDVYMQKLAIGPGYDKGVVDLDASPADNVRRLAKAKGVQPDGITVLVLDRPRHASIIESVRSTGAAVRLITDGDVAGVIHCADPDNTGVDMYLGTGGAPEGVLAAVALRCIGGQMQCRLILDSDEKRERAAKMGVNDPKMIYGIEDMARGDCLFAATGVTTGSLLSGVKFRKDGVIETETVVMRSVTGTVRYIKAEHRELAKFHLD

SEQ ID NO: 18151 - protein, 328 aa, Brucella melitensis 16M
MAKTAEQHPHGLDRILTLELVRVAERAAVAAARLRGRGDEMAADQAAVDAMRQELNRLPITGTVVIGEGERDEAPMLYIGEEVGTKQGAAVDIALDPLEGTTICAKNLPNSLAVIAIAEKGNLLYAPDVYMEKIAVGPGYPKGVVDLDATPTDNIMSIAKAKGVKPNEITACIMDRPRHARLIEEVRATGAAIRLIGDGDVAGVMHTTDPDETGIDIYIGIGGAPEGVLAAAALRCIGGQMQGRLQLNTEEKVARAAKMGISDPKKIYTLEEMAKGDVLFAATGVTDGNMLSGVKFARDYIQTHTIVMRSSSQTVREIKARHQDLSKF

SEQ ID NO: 18152 - protein, 321 aa, Bacillus cereus ATCC 14579
MERSLSMELVRVTEAAALSSARWMGRGKKDEADGAATSAMRDVFDTIPMKGTVVIGEGEMDEAPMLYIGEKLGTGYGPRVDVAVDPLEGTNIVAAGGWNALAVIAIADHGNLLHAPDMYMNKIAVGPEAVGAVDIDAPIIDNLRAVAKAKNKDIEDVVATVLNRPRHQEIIEEIRKAGARIKLINDGDVAGAINTAFDRTGVDILFGSGGAPEGVLAAVALKCLGGEIHGKLLPQNEAELARCKKMGIEDINRILRMEDLVKGDDAIFAATGVTDGELLRGVQFKGSVGTTQSLVMRAKSGTVRFVDGRHSLNKKPNLVIK

SEQ ID NO: 18153 - protein, 323 aa, Bacillus cereus ATCC 14579
MERELALEIVRVTEAAALASAQWMGRGKKNEADDAATTAMRDMFDSVNMAGTVVIGEGELDEAPMLYIGEELGTGNGPEVDIAVDPLEGTNIVAKGLANAMAVIAIADKGNLLHAPDMYMEKIAVGPKAAGKISLDDPIEKTIEIVAEANNKKIRDLTVIVQERERHQDIIDRVRAKGARVKLFGDGDVGASIATALPGTGIDLFVGIGGAPEGVISAAALKCLEGEMQARLVPMNEEEEARCREMGLEDPRQLLMLDDLVSGDDAIFSATGVSAGELLDGVKFLGGDLAETYSIVMRYKTRTVRFIKTHHHLDHKPHLNLDI

SEQ ID NO: 18154 - protein, 344 aa, Streptomyces avermitilis MA-4680
MTENHQLPSELEVPSEAPDRNLALELVRVTEAAAMAAGRWVGRGDKNGADGAAVRAMRTLVSTVSMNGVVVIGEGEKDEAPMLFNGERVGDGTGPECDIAVDPIDGTTLTAKGMTNAIAVLAAADRGTMFDPSAVFYMDKLVTGPEAADFVDINAPVSVNIRRVAKAKRSMPEDVTVVILDRPRHDGIIKEIRETGARIKLISDGDVAGSILALREGTGIDLLLGIGGTPEGIISACAVKCLGGTIQGKLWPKDDEERQRAVDAGHDLDRVLFTDDLVSGENVFFVATGITDGELLRGVRYRAETATTESIVMRSKSGTVRQIRSEHRLSKLRAYSQIDFDRAK

SEQ ID NO: 18155 - protein, 336 aa, Klebsiella aerogenes
MKRELAIEFSRVTEAAALAGYKWLGRGDKNTADGAAVNAMRIMLNLVNIDGTIVIGEGEIDEAPMLYIGEKVGTGKGDAVDIAVDPIEGTRMTAMGQANALAVMAVGDKGCFLNAPDMYMEKLIVGPGAKGAIDLNLPLEENLHNIARALNKPLGELTVTVLAKPRHDAVIAQLQQLGVRVFAIPDGDVAASILTCMPDSEVDVLYGIGGAPEGVVSAAVIRALDGDMQGRLLARHHVKGDNEENRRIGENELARCKTMGIEAGKVLRLDEMARSDNVVFSATGITKGDLLDGITRKGNMATTETLLIRGKSRTIRRIQSIHYLDRKDPDIQQHIL

SEQ ID NO: 18156 - protein, 327 aa, Mesorhizobium loti
MNVAQNIVAGLDRILTMELVRVTERAAVAAARLRGRGDEKAADQVAVDAMRQELNRLAIKGTVVIGEGERDEAPMLYIGEEVGTGKGPAVDIALDPLEGTTICAKNLPNALAVIAIAEKGSLLFAPDVYMDKIAIGPGYAEGVIDIDASPAENIASLARAKGVAVSDITTCILDRPRHAKLIDAVRATGAAIRLIGDGDVAGVIHTTDPEETGIDLYLGTGGAPEGVLAAAALRCTGGQMQGRLILDTPEKVARAAKMGISDPKRIYHAEDMARGDVLFAATGVTDGNMLAGVKFGRTYITTHTIVLRSSSRTVREIKARHQDLDKF

SEQ ID NO: 18157 - protein, 198 aa, Novosphingobium aromaticivorans
MTDKPTNPAASHVLDRVLVLEMVRVTEAAAIGASRLIGRGDEKAADAAAVEAMRAAFNELWMDGTVVIGEGERDEAPMLYIGEKVGAAPGTGPKIDIALDPLEGTTITAKAGPNALAVLAVAEEGGLLNAPDVYMDKLAVGPGYPEGIIDLDKTPSENVRAVAAARACSRATSSSACSIAPAIRISSRNCAASAAASR

SEQ ID NO: 18158 - protein, 163 aa, Novosphingobium aromaticivorans
MQPGDIIVCVLDRPRHSDLIAELRSLGCGISLIPDGDVAGVIAVTNEETGVDMYMGTGGAPEGVLAAAALRCVGGQFKGRLLFRNEDEKSRARKWGIEDLNKQYDLIELAKGDCIFAATGVTDGSLLAGVKVHKNGTMTTESVVMRASSGTVRWVKGEHRKVR

SEQ ID NO: 18159 - protein, 330 aa, Desulfitobacterium hafniense
MNNEMAMERELTMEFARVTEAAALASARWVGRGNKEAADDAAVQAMRSVFDTIRMQGTVVIGEGEMDEAPMLYIGEKVGSGEAPELDVAVDPLEGTNSVAKGLAGAIAVVAIARKGGLLHAPDMYMDKIAVGPLAKGKIHLDAPVQENLANVARALGKSMDDLTVVILDRPRHEKIIHDVREAGARIRLITDGDVSPAVACAIEGTGVDVMMGIGGAPEGVWLQLRMRSLGGEMQGRLWPENEEDVLRAQKLGVSDVAKLYTMDDLVCSDDVFFAATGITEGPLLKGVHFTSQGALTHTVVMRGKTGTVRFIEARHRFDKKPAYAMKGAV

SEQ ID NO: 18160 - protein, 333 aa, Prochlorococcus marinus subsp. pastoris str. CCMP1378
MNQTLIQEILEVVEQAAIASAKLTGLGQKDEADAAAVEAMRLRMGKIEMKGKIVIGEGERDEAPMLYIGEEVGSGNGPGVDFAVDPCEGTNLCANNQRGSMAVLAASDTGGLFNAPDFYMNKLAAPPAAKGKVDIRNSATENLKILSNCLDLAIDELTVVVMDRARHKGLIKEIRECGAKIQPISDGDVQAAIACGFAGTGTHCLMGIGAAPEGVISAAAMRALGGHFQGQLVYDPAIAQTSEWADYTKEGNIKRLNEMGITDIDKIYEANELASGENVIFAGSGITDGLLFDGVKFEKDCTRTSSLVISTLDSTCRFTNTIHMKDGAKSISL

SEQ ID NO: 18161 - protein, 336 aa, Shigella flexneri
MRRELAIEFSRVTESAALAGYKWLGRGDKNTADGAAVNAMRIMLNQVNIDGTIVIGEGEIDEAPMLYIGEKVGTGRGDAVDIAVDPIEGTRMTAMGQANALAVLAVGDKGCFLNAPDMYMEKLIVGPGAKGTIDLNLPLADNLRNVAAALGKPLSELTVTILAKPRHDAVIAEMQQLGVRVFAIPDGDVAASILTCMPDSEVDVLYGIGGAPEGGVSAAVIRALDGDMNGRLLARHDVKGDNEENRRIGEQELARCKAMGIEAGKVLRLGDMARSDNVIFSATGITKGDLLEGISRKGNIATTETLLIRGKSRTIRRIQSIHYLDRKDPEMQVHIL

SEQ ID NO: 18162 - protein, 345 aa, Nostoc punctiforme
MENTLGLEIIEVVEQAAIASAKWMGKGEKNIADQVAVEAMRERMNKIYMRGRIVIGEGERDDAPMLYIGEEVGICTQPNAEALCNPDELIEIDIAVDPCEGTNLVAYGQPGSMAVLAISEKGGLFAAPDFYMKKLAAPPAAKGKVDINKSATENLKILSECLERSIEELVIVVMKRERHNDLIKEIREAGARVALISDGDVGAAISCGFAGTNIHALMGIGAAPEGVISAAAMRALGGHFQGQLIYDPAIVKTGLIGESREANIDRLKSMNINDPDKVYDAHELASGETVLFAASGITSGNLMNGVRFFNGGARTQSLVISNQSKTARFVDTIHMFGEPKTLQLN

SEQ ID NO: 18163 - protein, 335 aa, Vibrio cholerae
MKRDLAMAFSRVTEGAALAGYKWLGRGDKNAADGAAVEVMRILLNQTEISGEIVIGEGEIDEAPMLYIGEQVGLGGDAVDIAVDPIEGTRMTAMGQSNALAVLAAGEKGSFLKAPDMYMEKLVVGPGAKGCIDLNLPLKDNLNHVAKALGKPLTDLVVITLAKPRHDQVIAQMQQMGVRVFAVPDGDVAASILTCMPDSEVDMMYCIGGAPEGVVSAAVIRALDGDMQGRLLPRHQVKGDSEDNRIWGAKELERCQQMGVEAGKVLKMEDMARSDNVIFAATGITKGDLLDGISRKGNIATTETLLIRGRCRTIRRIRSIHYLERKDQQVRDIIL

SEQ ID NO: 18164 - protein, 333 aa, Haemophilus influenzae Rd
MNRALAIEFSRVTEAAALAAYTWLGRGDKNAADDAAVKAMRYMLNLIHMDAEIVIGEGEIDEAPMLYVGEKVGSGLGELVSIAVDPIDGTHMTAMGQSNAISVLAAGGKNTFLKAPDMYMEKLVVGSNVKGIIDLNLPLEQNLRRIASKLGKSLSDLTVMVLAKPRHDAVIKQIHNLGAKVLAIPDGDVAGSVLCCLPDAEVDLLYGIGGAPEGVAAAAAIRALGGDMQARLIPRNEVKSDTEENKKIAANEIQRCAALGVKVNEVLKLEDLVRDDNLVFTATGITNGDLLKGISRKGNLASTETILIRGKSRTIRKIQSIHYLDDLYKILNI

SEQ ID NO: 18165 - protein, 334 aa, Prochlorococcus marinus str. MIT 9313
MDRTLIQEILEVVEQAAIASAHLTGLGKKDEADAAAVEAMRKRMGQIQMQGRIVIGEGERDEAPMLYIGEEVGSGSGPGVDFAVDPCEGTNLCANNQRGSMAVLAASDRGGLFNAPDFYMKKLAAPPSAKGKVDIRKSATENINILSQCLGLAVSELTIVVMDRARHKGLISEIRATGARVQPISDGDVQAAIACGFAGTGTHCLMGIGAAPEGVISAAAMRALGGHFQGQLVYDPAIAQTSEWADYTKEGNIARLNEMGITDVDKIYEAEELASGKNVVFAGSGITDGLLFHGVKFEPDCTRTSSLVISTLDNTARFTNTVHIKDGAKSIALS

SEQ ID NO: 18166 - protein, 337 aa, Pasteurella multocida
MNRALAIEFSRVTEAAALAGFAWLGRGDKEAADNAAVQAMRLMLNQVEMDAEVVIGEGEIDEAPMLYIGEKVGNGKGEQISIAVDPIEGTRMTAMGQANALSVLAAGGKETFLKAPDMYMEKLVVGPEVKGMVDLNLPLEQNLRRVASKMGKLLSQLTVITLDKPRHHEMIKRMQQLGVKVLAIPDGDVAASILCCLPDGGVDMLYGIGGAPEGVIAAAAVRALGGDMQARLLPRDHVKGDTPENQALAAEEIRRCQEMGIEVNQVLKLEDLVRDDNLVFSATGITNGDLLKGIHRKGNLATTETLLIRGRSRTIRRIQSVHYLDRKDTALYRIIGA

SEQ ID NO: 18167 - protein, 308 aa, uncultured bacterium
MRRELAIEFSRVTEAAALAGYKWLGRGDKNTADGAAVNAMRIMLNQVNIDGTIVIGEGEIDEAPMLFIGEKVGTGLGDAVDIAVDPIEGTRMTAMGQANALAVLAVGDKGCFLNAPDMYMEKLIVGPGAKGAIDLNLPLETNLRNIAAALNKPLSELTVTILAKPRHDDVIAEMAKLGVRVFAIPDGDVAASILTCMPGSEVDVLYGIGGAPEGVVSAAVIRALDGDMQGRLLARHDVKGDSEENRRIGEQELARCQVMGIEAGKALRLDEMARSDNVIFSATGITKGDLLDGISRKGNIATTETLLI

SEQ ID NO: 18168 - protein, 328 aa, Mycobacterium tuberculosis H37Rv
MELVRVTEAGAMAAGRWVGRGDKEGGDGAAVDAMRELVNSVSMRGVVVIGEGEKDHAPMLYNGEEVGNGDGPECDFAVDPIDGTTLMSKGMTNAISVLAVADRGTMFDPSAVFYMNKIAVGPDAAHVLDITAPISENIRAVAKVKDLSVRDMTVCILDRPRHAQLIHDVRATGARIRLITDGDVAGAISACRPHSGTDLLAGIGGTPEGIIAAAAIRCMGGAIQAQLAPRDDAERRKALEAGYDLNQVLTTEDLVSGENVFFCATGVTDGDLLKGVRYYPGGCTTHSIVMRSKSGTVRMIEAYHRLSKLNEYSAIDFTGDSSAVYPLP

SEQ ID NO: 18169 - protein, 336 aa, Escherichia coli K12
MRRELAIEFSRVTESAALAGYKWLGRGDKNTADGAAVNAMRIMLNQVNIDGTIVIGEGEIDEAPMLYIGEKVGTGRGDAVDIAVDPIEGTRMTAMGQANALAVLAVGDKGCFLNAPDMYMEKLIVGPGAKGTIDLNLPLADNLRNVAAALGKPLSELTVTILAKPRHDAVIAEMQQLGVRVFAIPDGDVAASILTCMPDSEVDVLYGIGGAPEGVVSAAVIRALDGDMNGRLLARHDVKGDNEENRRIGEQELARCKAMGIEAGKVLRLGDMARSDNVIFSATGITKGDLLEGISRKGNIATTETLLIRGKSRTIRRIQSIHYLDRKDPEMQVHIL

SEQ ID NO: 18170 - protein, 321 aa, Escherichia coli K12
MMSLAWPLFRVTEQAALAAWPQTGCGDKNKIDGLAVTAMRQALNDVAFRGRVVIGEGEIDHAPMLWIGEEVGKGDGPEVDIAVDPIEGTRMVAMGQSNALAVMAFAPRDSLLHAPDMYMKKLVVNRLAAGAIDLSLPLTDNLRNVAKALGKPLDKLRMVTLDKPRLSAAIEEATQLGVKVFALPDGDVAASVLTCWQDNPYDVMYTIGGAPEGVISACAVKALGGDMQAELIDFCQAKGDYTENRQIAEQERKRCKAMGVDVNRVYSLDELVRGNDILFSATGVTGGELVNGIQQTANGVRTQTLLIGGADQTCNIIDSLH

SEQ ID NO: 18171 - protein, 334 aa, SYNECHOCOCCUS SP. WH 8102
MDQTLIQEILEVVEQAAIASAKLSGKGLKNEADAAAVEAMRKRMGQIQMQGRIVIGEGERDEAPMLYIGEEVGSGTGPGVDFAVDPCEGTNLCAFNQRGSMAVLAASDRGGLFNAPDFYMKKLAAPPAAKGKVDIRKSATENIKILSECLGLAVDELTIVVMDRARHKDLIAEIRATGARIQPISDGDVQAAIACGFAGTGTHCLMGIGAAPEGVISAAAMRALGGHFQGQLVYDPAVAQTSEWADMTKEGNLARLAEMGITDPDKVYEAEELACGEHVCFAGSGITDGLLFHGVKFERDCTRTSSLVISNLDNTCRFTNTVHIKDGAQSIALS

SEQ ID NO: 18172 - protein, 321 aa, Bacillus halodurans
MERSLSMELVRVTEAAALASARWMGRGNKEEADRAATEAMRDVFDTIPMKGTVVIGEGEMDEAPMLYIGEKLGNGYGPRVDVAVDPLEGTNIVASGLWNALAVIAVADHGNLLHAPDMYMEKIAVGPEAVGTVDIDAPVIDNLRAVAKAKNKDVEDLVVVTLNRKRHDKLIDEIRQAGARIKLIPDGDVAAAINTAFDDTGVDLLLGSGGAPEGVLAAVGLKCLGGELQGKLLPQTDEELARCKAMGIEDVNKVFSLDELVKGDDCIFAATGVTDGELLKGVHYKGSTATTQSLVMRAKSGTVRFVDGKHSMKKKPDLVIK

SEQ ID NO: 18173 - protein, 323 aa, Bacillus halodurans
MDRELALEIVRVTEAAALSSAQWLGRGMKNEADDAATTAMRTMFDSVNCKGTVVIGEGELDEAPMLYIGEEVGSGHGPEVDIAVDPLEGTNIVAKGHPNAMAVIAVADKGTLLHAPDMYMEKIAVGPKAAGLIRLDDPIEKTIDIVAKMTNKRVRDVTVIIQERERHDELIERIRNKGARVKLFGDGDVGAAIATALPQTGIDLFIGTGGAPEGVISAAAIKALGGDMQARLVPMNDEEFERCKRMGLEDPRQVLSLDDLVRGDDAIFAATGVSSGELLEGVRFLGGDLVETDSIVMRAKTRTVRYIKAHHRLDHKPHLIIND

SEQ ID NO: 18174 - protein, 366 aa, Salmonella enterica subsp. enterica serovar Typhi
MCGGNSAHTSIIPSLPCATLRATPFCYEFVMRRELAIEFSRVTEAAALAGYKWLGRGDKNTADGAAVNAMRIMLNQVNIDGTIVIGEGEIDEAPMLYIGEKVGTGHGDAVDIAVDPIEGTRMTAMGQANALAVLAVGDKGCFLNAPDMYMEKLIVGPGAKGAIDLNLPLADNLRNIADALGKPLGDLTVTILAKPRHDEVIAEMAKLGVRVFAIPDGDVAASILTCMPDSEVDVLYGIGGAPEGVVSAAVIRALDGDMQGRLLARHDVKGDSEENRRIGEQELARCKAMGIEAGKALCLGDMARSDNVIFSATGITKGDLLEGISRKGHIATTETLLIRGKSRTIRRIQSIHYLDRKDPDVQAHIL

SEQ ID NO: 18175 - protein, 336 aa, Salmonella typhimurium LT2
MRRELAIEFSRVTEAAALAGYKWLGRGDKNTADGAAVNAMRIMLNQVNIDGTIVIGEGEIDEAPMLYIGEKVGTGHGDAVDIAVDPIEGTRMTAMGQANALAVLAVGDKGCFLNAPDMYMEKLIVGPGAKGAIDLNLPLADNLRNIADALGKPLGDLTVTILAKPRHDEVIAEMAKLGVRVFAIPDGDVAASILTCMPDSEVDVLYGIGGAPEGVVSAAVIRALDGDMQGRLLARHDVKGNSEENRRIGEQELARCKAMGIEAGKALCLGDMARSDNVIFSATGITKGDLLEGISRKGHIATTETLLIRGKSRTIRRIQSIHYLDRKDPDVQAHIL

SEQ ID NO: 18176 - protein, 63 aa, Mus musculus
LRLLYECNPIAYVMEKAGGLATTGDKDILDIVPTEIHQKAPVVMGSSEDVQEFLEIYRKHKAK

SEQ ID NO: 18177 - protein, 56 aa, Mus musculus
LRLLYECNPIAYVMEKAGGLATTGDKDILDIVPTEIHQKAPVVMGSSEDVQEFLEI

SEQ ID NO: 18178 - protein, 120 aa, Glycine max
MMSVLLTLVMTPHSIIFVLTLGNGVFVFTLDPMYGEFVLTQENLQIPRAGKIYAFNEGNYQLWDDKLKKYIDDLKDPGPSGKPYSARLLYECAPMSFIVEQAGGKGSDGHQRILDIQPTE

SEQ ID NO: 18179 - protein, 225 aa, Glycine max
  unsure (1)..(225): unsure at all Xaa locations
XGFIVAFDPLDGFSIVDTNFTVGTIFGVXPGNKLAVVTGRDHVAAAMGVMGPRTTNVLALKDFPGTHEFLLIDEDHIRSIKSRKQVVTHYPLCLFKMELVNDFPDHSKLINYYAREKYTLRYTGXMVPDVNQILFKRKGIFTNVSSPSAKAKLRLLFEVAPLGFLIEKAGGYSSDGHQSVLDKVISNIDDRTQVAYGSKNEIIRFEETLYGKSRLKGGVAVGAAA

SEQ ID NO: 18180 - protein, 89 aa, Glycine max
  unsure (1)..(89): unsure at all Xaa locations
XGSPGYCMYGSSCTFVLSTENGVNGFTLDPSLGEFILTHPNIKIPSKGKIYFVNEGNARNWDEPTXXXVWGILFSQCFEIYLSVKXLIX

SEQ ID NO: 18181 - protein, 120 aa, Glycine max
  unsure (1)..(120): unsure at all Xaa locations
XKLVNYYVKEKYTLRYTGGMVPDVNQIIVKEKGIFTNVTSPTAKAKLRLLFEVAPLGFLIEKAGGHXSSDGKQSVLDKVISQLDERTQVAYGSKNEIIRFEETLYGSSRLAASATVGATX

SEQ ID NO: 18182 - protein, 141 aa, Triticum aestivum
  unsure (1)..(141): unsure at all Xaa locations
XIGEGKMFSPGNLRATFDNPDYDKLVNYYVKEKYTLRYTGGMVPDVNQIIVKEKGIFTNVTSPTAKAKLRLLFEVAPLGFLIEKAGGHSSDGKQSVLDKVISQLDERTQVAYGSKNEIIRFEETLYGSSRLAASATVGATA

SEQ ID NO: 18183 - protein, 57 aa, Triticum aestivum
  unsure (1)..(57): unsure at all Xaa locations
XYEWGPMSFFAKQAGGKGSDGPQRGLDIMPPKVHQRVPLYFGSVEEVEKVEKFLFSE

SEQ ID NO: 18184 - protein, 133 aa, Zea mays
  unsure (1)..(133): unsure at all Xaa locations
XPRVGRLVGGSVGSTWKWRLLVATVVGEGHVCANGSTHSSLRFXIATRDAAMHXRSLPIGRVFWHPADDTTPSRKLSILYKLFPISFVMNQAGGQSFTGKQRPLDVVPAKIDDRSPIFLGSYNDVEEIIALYX

SEQ ID NO: 18185 - protein, 102 aa, Zea mays
  unsure (1)..(102): unsure at all Xaa locations
XGPGASGKPYSGGYMGSLVGDFPRPFFLGGVSGSPRAKKSKKGKLGFFXGGAPMSFFVEQAGGKGFSGPQRIFAFPPPGIPQRGPLSFGGVGEVAKGEKFRA

SEQ ID NO: 18186 - protein, 332 aa, Trypanosoma brucei
MMRQNLTSDSLITDTLRKAGVPCDVVGIVETVAGACRAIAAGLRNDGVTAAKSKNNFGDDVLSVDVMADKIISEALNSCQHVASYVSEESPSLASTAHSGKATHSVSYDPLDGSSIITSNFTVGSIFAVWPGNTPIGLTVRDMVASVVAVYGPRVVLFVGQEELGVAEFFCGADGEWKLAKRVWAGVCTPRTATVTAAGRGVKLKATVFSPGNLRAARHLPWYKQLITMYMQEGATLRYTGGMVPDVCQIIVKGDGIYMTPASPQHKMKLRLLFEAAPMAFLIHCAGGRSTTGLTNMMNVRVVSMEQTTPIALGCARDVERYERMCRGCSKL

SEQ ID NO: 18187 - protein, 442 aa, Mus musculus
MQEMNLLPTPESPVTRQEKMATVWDEAEQDGIGEEVLKMSTEEIVQRTRLLDSEIKIMKSEVLRVTHELQAMKDKIKENSEKIKVNKTLPYLVSNVIELLDVDPNDQEEDGANIDLDSQRKGKCAVIKTSTRQTYFLPVIGLVDAEKLKPGDLVGVNKDSYLILETLPTEYDSRVKAMEVDERPTEQYSDIGGLDKQIQELVEAIVLPMNHKEKFENLGIQPPKGVLMYGPPGTGKTLLARACAAQTKATFLKLAGPQLVQMFIGDGAKLVRDAFALAKEKAPSIIFIDELDAIGTKRFDSEKAGDREVQRTMLELLNQLDGFQPNTQVKVIAATNRVDILDPALLRSGRLDRKIEFPMPNEEARARIMQIHSRKMNVSPDVNYEELARCTDDFNGAQCKAVCVEAGMIALRRGATELTHEDYMEGILEVQAKKKANLQYYA

SEQ ID NO: 18188 - protein, 442 aa, Mus musculus
MQEMNLLPTPESPVTRQEKMATVWDEAEQDGIGEEVLKMSTEEIVQRTRLLDSEIKIMKSEVLRVTHELQAMKDKIKENSEKIKVNKTLPYLVSNVIELLDVDPNDQEEDGANIDLDSQRKGKCAVIKTSTRQTYFLPVIGLVDAEKLKPGDLVGVNKDSYLILETLPTDYDSRVKAMEVDERPTEQYSDIGGLDKQIQELVEAIVLPMNHKEKFENLGIQPPKGVLMYGPPGTGKTLLARACAAQTKATFLKLAGPQLVQMFIGDGAKLVRDAFALAKEKAPSIIFIDELDAIGTKRFDSEKAGDREVQRTMLELLNQLDGFQPNTQVKVIAATNRVDILDPALLRSGRLDRKIEFPMPNEEARARIMQIHSRKMNVSPDVNYEELARCTDDFNGAQSKAVCVEAGMIALRRGATELTHEDHMEGILEVQAKKKANLQYYA

SEQ ID NO: 18189 - protein, 451 aa, Mus musculus
MQEMNLLPTPESPVTRQEKMGTVWDEAEQDGIGEEVLKMSTEEIVQRTRLLDSEIKIMKSEVLRVTHELQAMKDKIKENSEKIKVNKTLPYLVSNVIELLDVDPNDQEEDGANIDLDSQRKGKCAVIKTSTRQTYFLPVIGLVDAEKLKPGDLVGVNKDSYLILETLPTEYDSRVKAMEVDERPTEQYSDIGGLDKQIQELVEAIVLPMNHKEKFENLGIQPPKGVLMYGPPGTGKTLLARACAAQTKATFLKLAGPQLVQMFIGDGAKLVRDAFALAKEKAPSIIFIDELDAIGTKRFDSEKAGDREVQRTMLELLNQLDGFQPNTQVKVIAATNRVDILDPALLRSGRLDRKIEFPMPNEEARARIMQIHSRKMNVSPDVNYEELARCTDDFNGAQCKAVCVEAMCWAAFTAHRDTCDPKLRVGHAWCRPTPPAAGAETRCPGVHLRQS

SEQ ID NO: 18190 - protein, 439 aa, Rattus norvegicus
MNLLPTPESPVTRQEKMATVWDEAEQDGIGEEVLKMSTEEIVQRTRLLDSEIKIMKSEVLRVTHELQAMKDKIKENSEKIKVNKTLPYLVSNVIELLDVDPNDQEEDGANIDLDSQRKGKCAVIKTSTRQTYFLPVIGLVDAEKLKPGDLVGVNKDSYLILETLPTEYDSRVKAMEVDERPTEQYSDIGGLDKQIQELVEAIVLPMNHKEKFENLGIQPPKGVLMYGPPGTGKTLLARACAAQTKATFLKLAGPQLVQMFIGDGAKLVRDAFALAKEKAPSIIFIDELDAIGTKRFDSEKAGDREVQRTMLELLNQLDGFQPNTQVKVIAATNRVDILDPALLRSGRLDRKIEFPMPNEEARARIMQIHSRKMNVSPDVNYEELARCTDDFNGAQCKAVCVEAGMIALRRGATELTHEDYMEGILEVQAKKKANLQYYA

SEQ ID NO: 18191 - protein, 442 aa, Rattus norvegicus
MQEMNLLPTPESPVTRQEKMATVWDEAEQDGIGEEVLKMSTEEIVQRTRLLDSEIKIMKSEVLRVTHELQAMKDKIKENSEKIKVNNTLPYLVSNVIELLDVDPNDQEEDGANIDLDSQRKGKCAVIKTSTRQTYFLPVIGLVDAEKLKPGDLVGVNKDSYLILETLPTEYDSRVKAMEVDERPTEQYSDIGGLDKQIQELVEAIVLPMNHKEKFENLGIQPPKGVLMYGPPGTGKTLLARACAAQTKATFLKLAGPQLVQMFIGDGAKLVRDAFALAKEKAPSIIFIDELDAIGTKRFDSEKAGDREVQRTMLELLNQMDGFQPNTQVKVIAATNRVDILDPALLRSGRLDRKIEFPMPNEEARARIMQIHSRKMNVSPDVNYEELARCTDDFNGAQCKAVCVEAGMIALRRGATELTHEDYMEGILEVQAKKKANLQYYA

SEQ ID NO: 18192 - protein, 427 aa, Anopheles gambiae str. PEST
MAGNLEDREIWEDSEELGEEVLRMSTDELVSRTRLMDNEIKIMKSEVVRINHELQTQNEKIKDNTEKIKVNKTLPYLVSNVIELLDVDPQEEEDDGAVVVLDSQRKGKCAVIKTSTRQTYFLPVIGLVDSDKLKPGDLVGVNKDSYLILETLPAEYDARVKAMEVDERPTEQYSDIGGLDKQIQELIEAVVLPMTHKDKFKNLGIHPPKGVLLYGPPGTGKTLLARACAAQTKSTFLKLAGPQLVQMFIGDGAKLVRDAFALAKEKSPAIIFIDELDAIGTKRFDSEKAGDREVQRTMLELLNQLDGFSSTADIKVIAATNRVDILDPALLRSGRLDRKIEFPHPNEEARARIMQIHSRKMNVSPDVNFEELARSTDDFNGAQCKAVCVEAGMIALRRSAVSVIHEDFMDAIMEVQSKKKANLNYFA

SEQ ID NO: 18193 - protein, 431 aa, Anopheles gambiae str. PEST
MAENQIESQLREDTIEKAVEETFLGWSTEELIRRTNGLNNEIKALKDLLVSPVLDLKTLTGKVKANAEHIKLQKRLPYLVATVMEVLDMDPLEEEKEQEDAMLLQDSQRKCKSAIIKTSTRQTFFLPMIGLVEPEALRPGDLVGLNKDAYLIMDKLPPELDPRVKAMEVIERPTEQYIDIGGLDTQIAELMEAIVLPLTHKAKFERIGIQPPKGVLMYGPPGTGKTLLARACAAQTKATFIKLAGPQLVQMFIGDGAKLVRDAFALAREKAPTILFIDELDAIGTKRFDSTKAGDREVQRTMLELLNQLDGFSSSADVKVIGATNRVDILDPAMLRSGRLDRKIEFPHPNDVARARIMQIHSRRMNVSGEVNYEELARSTDGFNGAQCKAVCVEAGMIALRRSAVEVAHEDFMEAILEVQAKKKAALNYFA

SEQ ID NO: 18194 - protein, 591 aa, Rhodococcus erythropolis
MSSTENPDSVAAAEELHALRVEAQVLRRQLAQSPEQVRELESKVDSLSIRNSKLMDTLKEARQQLIALREEVDRLGQPPSGYGVLLSVHEDKTVDVFTSGRKMRLTCSPNIDTDTLALGQTVRLNEALTIVEAGTYEQVGEISTLREVLDDGLRALVVGHADEERIVWLAAPLAAVFADPEADIIAYDADSPTRKLRPGDSLLVDTKAGYAFERIPKAEVEDLVLEEVPDVHYDDIGGLGRQIEQIRDAVELPFLHKDLFHEYSLRPPKGVLLYGPPGCGKTLIAKAVANSLAKKIAEARGQDSKDAKSYFLNIKGPELLNKFVGETERHIRMIFQRAREKASEGTPVIVFFDEMDSIFRTRGSGVSSDVETTVVPQLLSEIDGVEGLENVIVIGASNREDMIDPAILRPGRLDVKIKIERPDAESAQDIFSKYLVDGLPINADDLAEFGGDRTACLKAMIVRVVDRMYAESEENRFLEVTYANGDKEVLFFKDFNSGAMIQNIVDRAKKYAIKSVLDTGAPGLRVQHLFDSIVDEFAENEDLPNTTNPDDWARISGKKGERIVYIRTLVTGKNASASRAIDTESNTGQYL

SEQ ID NO: 18195 - protein, 501 aa, Giardia lamblia ATCC 50803
MSQDFPEIPIDPEIQSFDDAMLSQRIEAIKSEAMFLRREHERYQSIIREATGLLEKNRRDLENSKRLPLLVATVSEFVEISEDHLNLNYEVTATTKKTYERQLKSLIDRDSESTAKNTDSSLEAMLKEEEFADSDRATLGLDGEVTQALRSKPSSTVTEGVIIKTSSKTYVFLASTGAVPRKMLRPTDLVAVNKDTYFIYEKLPSAVDARVKTMEVTERPMDKFEDLGGIDQQISQIKESFLLPLQRPDLLKKIGIKPSKGVLLYGVPGTGKTALARALAHEANCSFLQLTATQLVQLYIGDGSAMVIETFNLAKSLIEKERTLKGNMDAGCIIYIDEIDAIGGRRSDTGGYDRDSTRTMLTLLNCLDGFDCDERIKVLASTNRVDILDPALTRSGRFDRKIEFTYPNEKGRYDILCIHSKKIKLIGRSDDPETCDRPGAVGLQEIAKSTNEYSGAMLKAVCMEAGLVCLRRHGEAVVHEDFVEAINIVSGKREGEMSYFI

SEQ ID NO: 18196 - protein, 441 aa, Methanosarcina acetivorans C2A
MNLNIIRSSMTEITKSKDESMRSHLVKPGSVYDGIEPGELGESTESVQDRVRQLESRNSFLEEQCSQIESEKRYLENQKIKYEREIRKLQSELDRMKTSPLIIGTVIDVIKNDRIIVRSSNGPQFLVNVSQYIDEKKLLPGAKVALNQHTLAIAEVIPSTEEPFVAAMEVIESIEVDYDQIGGLDEQIQELQEAVELPLIEPERFARIGIEPPKGVLLYGLPGTGKTLLAKAVAHRTNATFIRVVGSELVQKYIGDGSKLVREIFEMARKKAPSIIFIDELDSIAARRLNETTGADREVQRTLMQLLAEMDGFDKRKNIRIIAATNRPDVLDPAILRPGRFDRLVHVPMPGIEARGKILKIHCGKMTLAGDIDFKKLAKVTEGMSGADLKAIATEAGMFAVRKDKALVEMEDFLEAVEKVSMAADTQKMMPGNLPETTMFV

SEQ ID NO: 18197 - protein, 340 aa, Methanosarcina acetivorans C2A
MEQLTEPPLFIATILEVNGEIALIRQHGNNQEVLTQIPEECLGKIEPGMRVAVNGAYSIISIVSRAADVRAQVMELINSPGVDYSMIGGLDDVLQEVRESVELPLTEPELFEDLGIEPPSGVLLHGAPGTGKTLIAKAIASQAKATFIRMSGSDLVQKFVGEGSRLVKDIFQLARDKSPSILFIDEIDAVGSMRTYDGTSGSAEVNRTMLQLLAEMDGFDPKGNVKVVAATNRIDLLDPALLRPGRFDRSIEVPLPDEKGRVEILKIHTRKMKLADDVDFEKLAKVLTGKSGAEISVIVKEAGIFVLRRRGKEITMADFMKAYEKVVNVQEPTIPQAMFV

SEQ ID NO: 18198 - protein, 440 aa, Methanosarcina mazei Goe1
MNLNNIRSSMTESTKSKDESMRSHLVKPGSVYDGIEPGELGETTESVQDRVRQLESRNSFLEEQCSQIESEKRYLENQKIKYEREIRKLQSELDRMKTSPLIIGTVIDVIKNDRIIVRSSNGPQFLVNVSQYIDEKKLLPGAKVALNQHTLAIAEVIPSTEEPFVAAMEVIESVEVDYDQIGGLDEQIQELQEAVELPLTSPERFARIGIEPPKGVLLYGLPGTGKTLLAKAVAHRTNATFIRVVGSELVQKYIGDGSKLVREIFEMARKKAPSIIFIDELDSIAARRLNETTGADREVQRTLMQLLAEMDGFDKRKNIRIIAATNRPDVLDPAILRPGRFDRLVHVPMPGIEARGKILKIHCEKMTLAEDIDFKKLAKATEGMSGADLKAIATEAGMFAVRRDKELVEMEEFLEAVEKVSMAADTQKMMPSNLPETMFV

SEQ ID NO: 18199 - protein, 334 aa, Leuconostoc mesenteroides subsp. mesenteroides ATCC 8293
  unsure (1)..(334): unsure at all Xaa locations
SLVPVLLIVAVFYLMMNQAGGGKGGQGGMMSFGKSKAKPSDPKDNKVRFADVAGAEEEKQELVEVVEFLKAPKKFVNLGARIPKGVLLEGPPGTGKTLLAKAVAGEASVPFFSMSGSDFVEMFVGVGASRVRDLFENAKKSAPAIIFIDEIDAVGRRRGTGMGGGNDEREQTLNQILIEMDGFEGSEGVIILASTNRSDVLDPALLRSGRFDRKILVGAPDVKGREAILNVHAKNKPLADNVDLKAIAQQTPXXXXXXXXXXXXXXXXXXXXXXXXXXXXXXXXXXXXXXXXXXXXXXXXXXXXXXXXXXXXXXXXXXXXXXXXXXLERIWKTC

SEQ ID NO: 18200 - protein, 440 aa, Methanosarcina barkeri
MNLNIIRSSMTESTKSKDESMRSHLGKPGPVYDGIEPGELGEVTESVQDRMRQLESRNSYLEEQCSQIESEKRYLENQKIKYEREIRKLQSELDRMKTSPLIIGTVIDVIKNDRIIVRSSNGPQFLVNVSQYIDEKKLLPGAKVALNQHTLAIAEVIPSTEEPFVAAMEVLESVEVDYDQIGGLDEQIQELQEAVELPLIEPERFARIGIDPPKGVLLYGLPGTGKTLLAKAVAHRTNATFIRVVGSELVQKYIGDGSKLVREIFEMARKKAPSIIFIDELDSIAARRLNETTGADREVQRTLMQLLAEMDGFDKRKNIRIIAATNRPDVLDPAILRPGRFDRLVHVPMPGVEARGKILKIHCGKMTLAGDIDFKRLAKATEGMSGADLKAIATEAGMFAVRKNKELIEMEDFLEAVDKVSMAADTQKMMPTSLPETMFV

SEQ ID NO: 18201 - protein, 292 aa, Methanosarcina barkeri
MRVAVNGAYSIISVVSRAADVRAQVMELINSPGVDYSMIGGLDDVLQEVRESVELPLTEPQLFEEIGIEPPSGVLLHGAPGTGKTLIAKAIASHAKATFIRMSGSDLVQKFVGEGSRLVKDIFQLARDKSPSILFIDEIDAVGSMRTYDGTSGSAEVNRTMLQLLAEMDGFDPKGNVKIVAATNRIDLLDPALLRPGRFDRSIEVPLPDEKGRAEILKIHTRKMNLADDVDFEKLARVMTGMSGAEISVIVKEAGIFVLRRRGKQITMADFLKAHEKVVSTEEPKIPQAMFV

SEQ ID NO: 18202 - protein, 420 aa, Methanosarcina mazei
MRSHLVKPGSVYDGIEPGELGETTESVQDRVRQLESRNSFLEEQCSQIESEKRYLENQKIKYEREIRKLQSELDRMKTSPLIIGTVIDVIKNDRIIVRSSNGPQFLVNVSQYIDEKKLLPGAKVALNQHTLAIAEVIPSTEEPFVAAMEVIESVEVDYDQIGGLDEQIQELQEAVELPLTSPERFARIGIEPPKGVLLYGLPGTGKTLLAKAVAHRTNATFIRVVGSELVQKYIGDGSKLVREIFEMARKKAPSIIFIDELDSIAARRLNETTGADREVQRTLMQLLAEMDGFDKRKNIRIIAATNRPDVLDPAILRPGRFDRLVHVPMPGIEARGKILKIHCEKMTLAEDIDFKKLAKATEGMSGADLKAIATEAGMFAVRRDKELVEMEEFLEAVEKVSMAADTQKMMPSNLPETMFV

SEQ ID NO: 18203 - protein, 421 aa, Methanosarcina acetivorans
MRSHLVKPGSVYDGIEPGELGESTESVQDRVRQLESRNSFLEEQCSQIESEKRYLENQKIKYEREIRKLQSELDRMKTSPLIIGTVIDVIKNDRIIVRSSNGPQFLVNVSQYIDEKKLLPGAKVALNQHTLAIAEVIPSTEEPFVAAMEVIESIEVDYDQIGGLDEQIQELQEAVELPLIEPERFARIGIEPPKGVLLYGLPGTGKTLLAKAVAHRTNATFIRVVGSELVQKYIGDGSKLVREIFEMARKKAPSIIFIDELDSIAARRLNETTGADREVQRTLMQLLAEMDGFDKRKNIRIIAATNRPDVLDPAILRPGRFDRLVHVPMPGIEARGKILKIHCGKMTLAGDIDFKKLAKVTEGMSGADLKAIATEAGMFAVRKDKALVEMEDFLEAVEKVSMAADTQKMMPGNLPETTMFV

SEQ ID NO: 18204 - protein, 418 aa, Fagus sylvatica
MAIETKHPEAVPADETCSAKCSKQGEGLKQYYLQHIHEHQLQVRQKTHNLNRLEAQRNEFNSRVRMLREELQLLQEPGSYVGEVVKVMGKNKVLVKVHSEGKYVVDIDKNIDITKITPSTRVALRNDSYVLHLILPSKVDPLVNLMKVEKVPDSTYDMIGGLDQQIKEIKEVIELPIKHPELFLESLGIAQPKGVLLYGPPGTGKTLLARAVAHHTDCTFIRVSGSELVQKYIGEGSRMVRELFVMAREHAPSIIFMDEIDSIGSARMESGSGNGDSEVQDHMLELLNQLDGFESIKQIKVLMRTNRIDILDQALLRPGRIDRKIEFPNPNRESRFDILKIHSRRMNLMRGIDLKKIAEKMNGASGAELKAVCTEAGMFALTAERRVRLVTQEDFEMAVAKVMKKETEKNMSLRKLWK

SEQ ID NO: 18205 - protein, 548 aa, Fugu rubripes
MSSKKNKSKSKRSSEGDGSVLSKEDSSLHTSGHEGGGCKSLNSNSFTVIDFIDKADDKTPKSCRSSLVQLSLNSMKAAGVCIGRPVLLTSTVGHQEVCLGWPVATFPGGKVGLQKCVQSVLKVKTGDRVTVQPLTGAMLRAEEVLLQNRSGKIILPGNIISLTYFGRSCGLMVETIKGEDGMTLQRAPPPLVPDTEESSMLESTSGDLSLQFGSLTIDNDDTDGAPSTPGGPDPAASTPHRPAALPRLFSPPSSCSSPNPAADSAEEAVSPGVSTSSEPAEKAATAPSGGRQCCDTFYSLCSNTKVTFKDKRAAGGSANSKRSKVTYSMIGGLSSQLDVIRETIELPLKHPELFSNYGIPPPRGVLLYGPPGTGKTMIGRAIANEVGAHMTVINGPEIMSKFYGETEARLRQIFAEASQRQPAIVFIDELDALCPKREGAQNEVEKRVVASLLTLMDGIGSEGHSGQVLVLGATNRPHALDPALRRPGRFDKELEVGVPSAAERADILQKQLRLAPCGASREELTQLADATHGYVGADLAAVCKEAGK

SEQ ID NO: 18206 - protein, 175 aa, Picea mariana
ELFVMAREHAPSIIFMDEIDSIGSARMESGTGNGDSEVQRTMLELLNQLDGFEASNKIKVLMATNRIDILDQALLRPGRIDRKIEFPNPNEESRFDILKIHSRKMNLMRGIDLKKIAEKMSGASGAELKAVCTEAGMFALRERRVHVTQEDFEMAVAKVMKKETEKNMSLRKLWK

SEQ ID NO: 18207 - protein, 439 aa, Plasmodium falciparum 3D7
MNVENIFGNEEVNVEEIEKLSNSEIKTRVSLIDTEIKILKNEHARLKNEYKNLQEKIKDNVEKIHLNKMLPYLVANVVESLDLEDEEEENEIKDEYDLYDNNLKLSHEGFRDIDDEKRGKCMVIKTSTRQTIFLPVPGLIDASELKPGDLVGVNKDSYLIIDKLPQEYDNRVKAMEVIEKPSEDYSDIGGLDKQIEDLVEAIVLPMLHKEKFEKIGIKPPKGVLMHGPPGTGKTLLARACASQTNATFLKLAGPQLVQMFIGDGAKMVRDAFNLAKEKAPAIIFIDELDAIGTKRFDSELSGDREVQRTMLELLNQLDGFSTDDTVKVIAATNRPDTLDPALLRSGRLDRKIELPHPNEESRARILQIHSRKMNVHKDVNFEELARSTDDFNGAQLKAVCVEAGMIALRRGATEIDHEDFVEGITSVLSKKKSTLNYFT

SEQ ID NO: 18208 - protein, 143 aa, Cricetinae gen. sp.
AVIGVHMDDTDPLVTVMKVEKAPQETYADIGGLDNQIQEIKESVELPLTHPEYYEEMGIKPPKVILYGPPGTGKTLLAKAVANQTSATFLRVVGSELIQKYLGDGPKLVRELFRVAEEHAPSIVFIDEIDAIGTKRYDSNSGG

SEQ ID NO: 18209 - protein, 424 aa, Arabidopsis thaliana
MATPMVEDTSSFEEDQLASMSTEDITRATRLLDNEIRILKEDAQRTNLECDSYKEKIKENQEKIKLNKQLPYLVGNIVEILEMNPEDDAEEDGANIDLDSQRKGKCVVLKTSTRQTIFLPVVGLVDPDSLKPGDLVGVNKDSYLILDTLPSEYDSRVKAMEVDEKPTEDYNDIGGLEKQIQELVEAIVLPMTHKERFEKLGVRPPKGVLLYGPPGTGKTLMARACAAQTNATFLKLAGPQLVQMFIGDGAKLVRDAFQLAKEKAPCIIFIDEIDAIGTKRFDSEVSGDREVQRTMLELLNQLDGFSSDERIKVIAATNRADILDPALMRSGRLDRKIEFPHPTEEARARILQIHSRKMNVHPDVNFEELARSTDDFNGAQLKAVCVEAGMLALRRDATEVNHEDFNEGIIQVQAKKKASLNYYA

SEQ ID NO: 18210 - protein, 424 aa, Arabidopsis thaliana
MATPMVEDTSSFEEDQLASMSTEDITRATRLLDNEIRILKEDAQRTNLECDSYKEKIKENQEKIKLNKQLPYLVGNIVEILEMNPEDDAEEDGANIDLDSQRKGKCVVLKTSTRQTIFLPVVGLVDPDSLKPGDLVGVNKDSYLILDTLPSEYDSRVKAMEVDEKPTEDYNDIGGLEKQIQELVEAIVLPMTHKERFEKLGVRPPKGVLLYGPPGTGKTLMARACAAQTNATFLKLAGPQLVQMFIGDGAKLVRDAFQLAKEKAPCIIFIYEIDAIGTKRFDSEVSGDREVQRTMLELLNQLDGFSSDERIKVIAATNRADILDPALMRSGRLDRKIEFPHPTEEARARILQIHSRKMNVHPDVNFEELARSTDDFNGAQLKAVCVEAGMLALRRDATEVNHEDFNEGIIQVQAKKKASLNYYA

SEQ ID NO: 18211 - protein, 424 aa, Arabidopsis thaliana
MATPMVEDTSSFEEDQLASMSTEDITRATRLLDNEIRILKEDAQRTNLECDSYKEKIKENQEKIKLNKQLPYLVGNIVEILEMNPEDDAEEDGANIDLDSQRKGKCVVLKTSTRQTIFLPVVGLVDPDSLKPGDLVGVNKDSYLILDTLPSEYDSRVKAMEVDEKPTEDYNDIGGLEKQIQELVEAIVLPMTHKERFEKLGVRPPKGVLLYGPPGTGKTLMARACAAQTNATFLKLAGPQLVQMFIGDGAKLVRDAFQLAKEKAPCIIFIDEIDAIGTKRFDSEVSGDREVQRTMLELLNQLDGFSSDERIKVIAATNRADILDPALMRSGRLDRKIEFPHPTEEARARILQIHSRKMNVHPDVHFEELARSTDDFHGAQLKAVCVEAGMLALRRDATEVNHEDFNEGIIQVQAKKKASLNYYA

SEQ ID NO: 18212 - protein, 419 aa, Arabidopsis thaliana
MAEDTSFEGDQLASMTTDDIGRASRLLANEIRILKEESQRTNLDLESVKEKIKENQEKIKLNKQLPYLVGNIVEILEMSPEDDAEEDGANIDLDSQRKGKCVVLKTSTRQTIFLPVVGLVDPDTLKPGDLVGVNKDSYLILDTLPSEYDSRVKAMEVDEKPTEDYNDIGGLEKQIQELVEAIVLPMTHKEQFEKLGIRPPKGVLLYGPPGTGKTLMARACAAQTNATFLKLAGPQLVQMFIGDGAKLVRDAFLLAKEKSPCIIFIDEIDAIGTKRFDSEVSGDREVQRTMLELLNQLDGFSSDDRIKVIAATNRADILDPALMRSGRLDRKIEFPHPTEEARGRILQIHSRKMNVNADVNFEELARSTDDFNGAQLKAVCVEAGMLALRRDATEVNHEDFNEGIIQVQAKKKASLNYYA

SEQ ID NO: 18213 - protein, 423 aa, Arabidopsis thaliana
MATAMAEDTSFEGDQLASMTTDDIGRASRLLANEIRILKEESQRTNLDLESVKEKIKENQEKIKLNKQLPYLVGNIVEILEMSPEDDAEEDGANIDLDSQRKGKCVVLKTSTRQTIFLPVVGLVDPDTLKPGDLVGVNKDSYLILDTLPSEYDSRVKAMEVDEKPTEDYNDIGGLEKQIQELVEAIVLPMTHKEQFEKLGIRPPKGVLLYGPPGTGKTLMARACAAQTNATFLKLAGPQLVQMFIGDGAKLVRDAFLLAKEKSPCIIFIDEIDAIGTKRFDSEVSGDREVQRTMLELLNQLDGFSSDDRIKVIAATNRADILDPALMRSGRLDRKIEFPHPTEEARGRILQIHSRKMNVNADVNFEELARSTDDFNGAQLKAVCVEAGMLALRRDATEVNHEDFNEGIIQVQAKKKASLNYYA

SEQ ID NO: 18214 - protein, 424 aa, Brassica rapa
MATPMVEDTSSFEEDQLASMSTEDIVRATRLLDNEIRILKEDAQRTNLECDSYKEKIKENQEKIKLNKQLPYLVGNIVEILEMNPEDDAEEDGANIDLDSQRKGKCVVLKTSTRQTIFLPVVGLVDPDSLKPGDLVGVNKDSYLILDTLPSEYDSRVKAMEVDEKPTEDYNDIGGLEKQIQELVEAIVLPMTHKERFEKLGVRPPKGVLLYGPPGTGKTLMARACAAQTNATFLKLAGPQLVQMFIGDGAKLVRDAFQLAKEKAPCIIFIDEIDAIGTKRFDSEVSGDREVQRTMLELLNQLDGFSSDERIKVIAATNRADILDPALMRSGRLDRKIEFPHPTEEARARILQIHSRKMNVHPDVNFEELARSTDDFNGAQLKAVCVEAGMLALRRDATEVNHEDFNEGIIQVQAKKKASLNYYA

SEQ ID NO: 18215 - protein, 424 aa, Brassica rapa
MATPMVEDTSSFEEDQLASMSTEDIVRATRLLENEIRILKEDAQRTNLECDSYKEKIKENQEKIKLNKQLPYLVGNIVEILEMNPEDDAEEDGANIDLDSQRKGKCVVLKTSTRQTIFLPVVGLVDPDSLKPGDLVGVNKDSYLILDTLPSEYDSRVKAMEVDEKPTEDYNDIGGLEKQIQELVEAIVLPMTHKERFEKLGVRPPKGVLLYGPPGTGKTLMARACAAQTNATFLKLAGPQLVQMFIGDGAKLVRDAFQLAKEKAPCIIFIDEIDAIGTKRFDSEVSGDREVQRTMLELLNQLDGFSSDERIKVIAATNRADILDPALMRSGRLDRKIEFPHPTEEARARILQIHSRKMNVHPDVNFEELARSTDDFNGAQLKAVCVEAGMLALRRDATEVNHEDFNEGIIQVQAKKKASLNYYA

SEQ ID NO: 18216 - protein, 177 aa, Cicer arietinum
EGPRMVRDVFRLAKENAPAIIFIDEVDAIATARFDAQTGADREVQRILMELLNQMDGFDQTVNVKVIMATNRADTLDPALLRPGRLDRKIEFPLPDRRQKRLVFQVCTAKMNLSDEVDLEDYVSRPDKISAAEISAICQEAGMHAVRKNRYVILPKDFEKGYRTNVKKPDTDFEFYK

SEQ ID NO: 18217 - protein, 423 aa, Glycine max
MASAMVEDANFEDDQLANMTTDDIVRASRLLDNEIRILKEELQRTNLELESYKDKIKENQEKIKLNKQLPYLVGNIVEILEMNPEDEAEEDGANIDLDSQRKGKCVVLKTSTRQTIFLPVVGLVDPDKLKPGDLVGVNKDSYLILDTLPSEYDSRVKAMEVDEKPTEDYNDIGGLEKQIQELVEAIVLPMTHKERFQKLGVRPPKGVLLYGPPGTGKTLMARACAAQTNATFLKLAGPQLVQMFIGDGAKLVRDAFQLAKEKSPCIIFIDEIDAIGTKRFDSEVSGDREVQRTMLELLNQLDGFSSDDRIKVIAATNRADILDPALMRSGRLDRKIEFPHPSEEARARILQIHSRKMNVHPDVNFEELARSTDDFNGAQLKAVCVEAGMLALRRDATEVNHEDFNEGIIQVQAKKKASLNYYA

SEQ ID NO: 18218 - protein, 431 aa, Glycine max
  unsure (1)..(431): unsure at all Xaa locations
MASAMVEDANFEDDQLANMTTDDVVRASRLLDNEIRILXKEELQRTNLELESYKDKIKENQEKIKLNKQLPYLVGNIVEILEMNPEDEAEEDGANIDLDSQRKGKCVVLKTSTRQTIFLPVVGLVDPDKXLKPGDLXVGVNKXDSYXLILDTLPSEYDSRVKAHEVDEKPTEDYNDIGGLEKQIQELVEAIXVLPMTHKERFQKLGVRPPKGVLLYGPPGTGKTLMXARACAAQTNATFLKLAGPQLVQMFIGDGAKLVXRDAFQLAKEKSPCIIFIDEIDAIGTKRFDSEVSGDREVQRTMLELLNQLDGFSSDDRIKVIAATNRADILDPALMRSGRLDRKIEFPHPSEEARARILQIHSRKMNVHPDVNFEELARSTDDFNGAQLKAVCVEAGMLALRRDATEVNHEDFNEGIIQVQAKKKASLNYYA

SEQ ID NO: 18219 - protein, 414 aa, Glycine max
  unsure (1)..(414): unsure at all Xaa locations
MASAMLGDATTSFEDGKLASMTTDDVVRASRILENDIRILKEEVQRSNREWESYKEKIXKDNEEKVKLNKQLPYLVGNIVEILEINPEDEAEEDGSNIDLDSQRKGKCVVLKTSTRQTIFLPVVGLVDPAKLKPGDLVGVNKDSYLILDALPSEYDSRVKAMEVDEKPTEDYNDIGGLEKQIQELVEAIVLPMTCKERFQKLGVRPPKGVLLYGPPGTGKTLIARACAAQTNATFLKLAGPQLVQMFIGDGAKLVQDAFQLAKEKSPCIIFIDEIDAIGTKRFDSEVSGDREVQRTMLELLNQLDGFSSDDRVKVIAATNRADILDPALMCSGRLDXKIEFPHPTLTVFTLMLXIHSRKMNVHPDVNAAQLKAVCVEAGMLALCRDATEVNHEDFDEGIIQVQAKKKASLDYYA

SEQ ID NO: 18220 - protein, 413 aa, Glycine max
  unsure (1)..(413): unsure at all Xaa locations
GIRLEXTPFSIGNXSDGERQLASMTTDDVVRDSXASRMLENGIRILKEEVQRSNREWESYKEKIKNNEEKVKLHKQLPYLVANIVEILDMNPEDEAEEDGANIDLDSQRKGKCVVLKTSTRQTIFLLVVGLVDPDKLKPGYLAGVNQDSYLILDTLPSEYDSXFKAMEVDEKPTEDYNDIGGLEKQIQEWVETIVLPITHKERFQKFGVGPPKGVLLYGPPGTGKTLIARACAAQTNATFLKLAGPQLVKAXLFHFSKLVRDAFQLAKEKSPCIIFMDEIDAIGTKRFDSEVSGDRELQRTMLELLNQLDGFSSDDRVKVIAATNRADILDPALMCSGRLDXKIEFPHPTLTXIHSRKMNVHPDVNAAQLKAVCVEAGMLALCRDATEVNHEDFDEGIIQVQAKKKASLDYYA

SEQ ID NO: 18221 - protein, 273 aa, Glycine max
NSARARAESVEERPTEEFTDIGGLEKQIEELREAIVLPIAHKDKFKSLGIRPPKGVLMHGPPGVGKTMMARACAAQTSATFLKLAGPQLVQMFIGDGAKIIRDAFALAKEKAPAVIFIDELDAIGTKRFDSDTSGDREVQRTMLELLNQLDGFSSAEDIKIIAATNRPDILDPALLRSGRLDRKIEFPLPNEEARSQIMKIHSRKMNVSKKDVNFQELARSTDEFNGAQLKAVCVEAGMSALRRGATFLTHEDFLEGIAQVQAKKKNELDYFA

SEQ ID NO: 18222 - protein, 810 aa, Pisum sativum
MIFSRIGRALSRSSRVKNLLHGDSRLGALSGVPRIDVYSEGVEGGLGFFRGYVSSSVARNNGFVSNLSGFKSVAGNPRFLRLFSSEAPKKKNYENFYPKGQKEVPKGGDKKNESKEDSKSNTEDQGGFQEAFMKQFQSFLTPLLVMGLFLSSFSFGPREQQQISFQEFKNKLLEPGLVDHIVVSNKSVAKIYVRNSPRDQADSEVLQGNLPAKGSSGHYKYYFNIGSVESFEEKLEEVQETLGVDPHDNVPVTYSSELVWYQELMRFAPTLLLLGTLLYMGRRMQGGFGVGGGGGGKGARGIFNIGKAHVTKVDKNAKNKVYFKDVAGCDEAKQEIMEFVHFLKNPKKYEELGAKIPKGALLVGPPGTGKTLLAKATAGESGVPFLSISGSDFMEMFVGVGPSRVRNLFQEARQCAPSIIFIDEIDAIGRKRGRGGFSGSNDERESTLNQLLVEMDGFGTTAGVVVLAGTNRPDILDNALLRPGRFDRQITIDVPDIKGRDQIFQIYLKTIKLDHEPSYYSQRLAALTPGFAGADIANVCNEAALIAARTDEAQVTMDHFEAAIDRIIGGLEKKNKVISKLERRTVAYHEAGHAVTGWFLEHTDPLLKVTIVPRGTAALGFAQYVPNENLLKTKEQLFDMTCMTLGGRAAEKVLIGTISTGAQNDLEKVTKMTYAQVAVYGFSEKVGLLSFPQREDSMEMTKPYSSKTGAIIDTEVREWVNKAYERTIQLIEEHKAKVAEIAELLLEKEVLHQEDLLRVLGERPFQSAEPTHYDRFKLGFQDEEKVVETTVNEAKDDGGSSPLEPEVVPT

SEQ ID NO: 18223 - protein, 429 aa, Oryza sativa (japonica cultivar-group); identical to SEQ ID NO: 558

SEQ ID NO: 18224 - protein, 423 aa, Lycopersicon esculentum
MATPMAEDSNFEDDQLHAMSTEDIIRASRLLDNEIRIIKEELQRTNLELDSFKEKIKENQEKIKLNKQLPYLVGNIVEILEMNPEEEAEEDGANIDLDSQRKGKCVVLKTSTRQTIFLPVVGLVDPDNLKPGDLVGVNKDSYLILDTLPSEYDSRVKAMEVDEKPTEDYHDIGGLEKQIQELVEAIVLPMTHQERFQKLGVRPPKGVLLYGPPGTGKTLMARACAAQTNATFLKLAGPQLVQMFIGDGAKLVRDAFQLAKEKSPCIIFIDEIDAIGTKRFDSEVSGDREVQRTMLELLNQLDGFSSDDRIKVIAATNRADILDPALMRSGRLDRKIEFPHPTEEARARILQIHSRKMNVNPDVNFEELARSTDDFNGAQLKAVCVEAGMLALRRDATEVTHEDFNEGIIQVQAKKKASLNYYA

SEQ ID NO: 18225 - protein, 908 aa, Helianthus annuus
IFAESSMVGRRKPLVLSSTKSLINSVLNSSNKLNTNGIDGAPINKHSSGDVDGSETTALQLRAGILRLSDEKLGLSRQKAISLDEAALIGLSTSLLKRLSITSGSLVIVKNVDSQIQRISQIVALDPPNVHDVSANNELLSYNASNAMVVFPSVTYPLIHHVPLASEVAYVSPLLAFNLGLHTSCLKLLLHHGEDKLASLFEVKGDNESDLETNEGFSVNLDIKPLTKLPSLKIVNKKIDIALNEYFTIDRYLSRGDVFSIRVNWSCKSAMCIACSQNNQNSRDTNLYFKVVAAEPSEEPVLRINRTETALVLSASTPSAIPPNLLVNKKKGFSPLHQDTVKTLASIITPTLCPSALSSKFRVAVLLFGLPGCGKRTVVKHVAHQLGLHVVEYSCHDLVASSEMENFCHVDSSFHCCSYSPTILLLRHFDAFSNLSSNDGSPNDQIGVNSEVASVIREFTEPFTQDEDDYEDEDEAEHMNSTRAIYTHPVLLVASADNSEGLPPTIRRCFSHEMKMGPLTEDQRVELLSQSLQRIPELLPDMSPEDLAKDMVGQTSGFMPRDIRALIADASSSLVPTNGISFENKESQKDIQPPSKEFMSKALERSKKRNASALGTPKVPNVKWEDVGGLEDVKKSILDTVQLPLLHKDLFSSGLRRSSGVLLYGPPGTGKTLLAKAVATECFLNFLSVKGPELINMYIGESEKNVRDIFQKARAARPCVIFFDELDSLAPARGASGDSGGVMDRVVSQMLAEIDGLNDSSQDLFIIGASNRPDLIDAALLRPGRFDKLLYVGVTTDPSYRERVLKALTRKFKLHEDVSLYSIAKKCPPNFTGADMYALCADAWFHAAKRKVLAADADPTNMKDDVDSVVVEYEDFVTVLRELSPSLSLAELKKYEMLRDQFEGASSK

SEQ ID NO: 18226 - protein, 429 aa, Oryza sativa
MTSSGAPPPAAMAVDDAEDDQLASMSTEDIVRASRLLDNEIRVLKDELQRTNLELESFKEKIKENQEKIKLNKQLPYLVGNIVEILEMNPEDEAEEDGANIDLDSQRKGKCVVLKTSTRQTIFLPVVGLVDPDKLKPGDLVGVNKDSYLILDTLPSEYDSRVKAMEVDEKPTEDYNDIGGLEKQIQELVEAIVLPMTHKDRFQKLGIRPPKGVLLYGPPGTGKTLMARACAAQTNATFLKLAGPQLVQMFIGDGAKLVRDAFQLAKEKAPCIIFIDEIDAIGTKRFDSEVSGDREVQRTMLELLNQLDGFSSDERIKVIAATNRADILDPALMRSGRLDRKIEFPHPSEEARARILQIHSRKMNVNPDVNFEELARSTDDFNGAQLKAVCVEAGMLALRRDATEVTHEDFNEGIIQVQAKKKSSLNYYA

SEQ ID NO: 18227 - protein, 429 aa, Oryza sativa; identical to SEQ ID NO: 558

SEQ ID NO: 18228 - protein, 429 aa, Oryza sativa
MSSPPPAAAAAMAVDDADDDQLASMSTENIVRATRLLDNETRVLKDELQRTNLEVESYKEKIKENQEKIKLNKQLPYLVGNIVEILEMNPEDEAEEDGANIDLDSQRKGKCVVLKTSTRQTIFLPVIGLVDPEKLKPGDLVGVNKDSYLILDTLPSEYDSRVKAMEVDEKPTEDYNDIGGLEKQIQELVEAIVLPMTHKDRFQKLGIRPPKGVLLYGPPGTGKTLMARACAAQTNATFLKLAGPQLVQMFIGDGAKLVRDAFQLAKEKSPCIIFIDEIDAIGTKRFDSEVSGDREVQRTMLELLNQLDGFSSDERIKVIAATNRADILDPALMRSGRLDRKIEFPHPSEEARARILQIHSRKMNVNPDVNFEELARSTDDFNGAQLKAVCVEAGMLALRRDATEVTHEDFNEGIIQVQAKKKSSLNYYA

SEQ ID NO: 18229 - protein, 433 aa, Triticum aestivum
MSSSPTPAPDAGAAAMAVDDSSDDQLDSMSTEDIVRATRLLDNEVRVLKDELQRNNLELENVKDKIKENQEKIKLNKQLPYLVGNIVEILEMNPEDEAEEDGANIDLDSQRKGKCVVLKTSTRQTIFLPVIGLVDPDNLKPGDLVGVNKDSYLILDTLPSEYDSRVKAMEVDEKPTEDYNDIGGLEKEIQELVEAIVLPMTHKEQFQKLGIRPPKGVLLYGPPGTGKTLMARACAAQTNATFLKLAGPQLVQMFIGDGAKLVRDAFELAKEKAPCIIFIDEIDAIGTKRFDSEVSGDREVQRTMLELLNQLDGFSSDERIKVIAATNRADILDPALLRSGRLDRKIEFPHPTEEARARILQIHSRKMNVHPDVNFEELARSTDDFNGAQLKAVCVEAGMLALRRDATEVIHEDFNEGIIQVQAKKKSSLNYYA

SEQ ID NO: 18230 - protein, 430 aa, Zea mays
MSSSGAPAPAAAMAVDDAEDDQLASMSTEDIIRASRLLDNEIRVLKDELQRTNLELESFKEKIKENQEKIKLNKQLPYLVGNIVEILEMNPEDEAEEDGANIDLDSQRKGKCVVLKTSTRQTIFLPVVGLVDPDKLKPGDLVGVNKDSYLILDTLPSEYDSRVKAMEVDEKPTEDYNDIGGLEKQIQELVEAIVLPMTHKDRFQKLGIRPPKGVLLYGPPGTGKTLMARACAAQTNATFLKLAGPQLVQMFIGDGAKLVRDAFQLAKEKAPCIIFIDEIDAIGTKRFDSEVSGDREVQRTMLELLNQLDGFSSDERIKVIAATNRADILDPALMRSGRLDRKIEFPHPSEEARARILQIHSRKMNVNPDVNFEELARSTDDFNGAQLKAVCVEAGMLALRRDATEVTHEDFNEGIVQVQAKKKSSLNYYA

SEQ ID NO: 18231 - protein, 429 aa, Zea mays
  unsure (1)..(429): unsure at all Xaa locations
MSSSAPAXXAAMAVDDAEDDQLASMSTEEITRASRLLDNEIRVHKDELQRSNLELESIKEKTKENQEKIKLNKQLPYLVGNIVEILEMNPEDEAEEDGANIDLDSQRKGKCVVLKTSTRQTIFLPVIGLVDPDKLKPGDLVGVNKDSYLILDTLPSEYDSRVKAMEVDEKPTEDYNDIGGLEKQIQELVEAIVLPMTHKDRFQKLGIRPPKGVLLYGPPGTGKTLMARACAAQTNATFLKLAGPQLVQMFIGDGAKLVRDAFQLAKEKAPCIIFIDEIDAIGTKRFDSEVSGDREVQRTMLELLNQLDGFSSDERIKVIAATNRADILDPALMRSGRLDRKIEFPHPSEEARARILQIHSRKMNVNPDVNFEELARSTDDFNGAQLKAVCVEAGMLALRRDATEVTHEDFNEGIIQVQAKKKSSLNYYA

SEQ ID NO: 18232 - protein, 431 aa, Zea mays
  unsure (1)..(431): unsure at all Xaa locations
MSSSAPAXXAAMAVDDAEDDQLASMSTEEITRASRLLDNEIRVHKDELQRSNLELESIKEKTKENQEKIKLNKQLPYLVGNIVEILEMNPEDEAEEDGANIDLDSQRKGKCVVLKTSTRQTIFLPVIGLVDPDKLKPGDLVGVNKDSYLILDTLPSEYDSRVKAMEVDEKPTEDYNDIGGLEKQIQELVEAIVLPMTHKDRFQKLGIRPPXKGVLLYGPPXGTGKTLMARACAAQTNATFLKLAGPQLVQMFIGDGAKLVRDAFQLAKEKAPCIIFIDEIDAIGTKRFDSEVSGDREVQRTMLELLNQLDGFSSDERIKVIAATNRADILDPALMRSGRLDRKIEFPHPSEEARARILQIHSRKMNVNPDVNFEELARSTDDFNGAQLKAVCVEAGMLALRRDATEVTHEDFNEGIIQVQAKKKSSLNYYA

SEQ ID NO: 18233 - protein, 401 aa, Zea mays
  unsure (1)..(401): unsure at all Xaa locations
MSSSGAPAPAAAMAVDDAEDDQLASMSTEDIIRASRLLDNEIRVLKDELQRTNLELESFKEKIKENQEKIKLNKQLPYLVGNIVEILEMNPEDEAEEDGANIDLDSQRKGKCVVLKTSTRQIQELVEAIVLPMTHKDRFQKLGIRPPKGVLLYGPPGTGKTLMARACAAQTNATFLKLAGPQLVQMFIGDGAKLVRDAFQLAKEKAPCIIFIDEIDAIGTXRFDSEVTXXDREVQRTMXLELLNQLDGFSSDGEXIKVIAATNRADILDPALMRSGRLARKIEFPPPSEEARARILQIHSRKMNVNPDVTFEELARSTDDFNGAQLKPVCVKAGMLPLRRDATKVTPEDFNEGFVQVQAKKKSSLNYYAPPVCQNIWPIRGLYPSGMNNRSYVFNARFFRH

SEQ ID NO: 18234 - protein, 438 aa, Schizosaccharomyces pombe
MSTLEELDALDQSQQGGSSNNEGLDGIEQEILAAGIDELNSRTRLLENDIKVMKSEFQRLTHEKSTMLEKIKENQEKISNNKMLPYLVGNVVEILDMQPDEVDVQESANQNSEATRVGKSAVIKTSTRQTIFLPLIGLVEPEELHPGDLIGVNKDSYLIIDKLPSEYDSRVKAMEVDEKPTERYSDIGGLSKQIEELFEAIVLPMQQADKFRKLGVKPPKGCLMFGPPGTGKTLLARACAAQSNATFLKLAAPQLVQMFIGDGAKLVRDAFALAKEKSPAIIFIDELDAIGTKRFDSEKAGDREVQRTMLELLNQLDGFSSDDRVKVIAATNRVDTLDPALLRSGRLDRKLEFPLPNEEARVGILRIHSRKMAIDDDINWEELARSTDEYNGAMLKSVCVEAGMIALRQGDTKINHEHFMDGILEVQMRKSKTLQYFA

SEQ ID NO: 18235 - protein, 819 aa, Aspergillus fumigatus
MSAEPDHAHDKKRVHLHDASGAEKKEELDTSTAILKKKKKPNSLIVTDAVNDDNSVIALSNNTMETLQLFRGDTVLVKGKKRKDTVLIVLADDDLDDGSARINRVVRHNLRVKHGDIITVHPCPDIKYAKRIAVLPIADTVEGLTGSLFDVYLAPYFREAYRPVKQGDLFTVRGGMRQVEFKVVEVDPPEYGIVAQDTIIHCEGEPIQREDEEGNLNEVGYDDIGGCRKQMAQIRELVELPLRHPQLFKSIGIKPPRGILMYGPPGTGKTLMARAVANETGAFFFLINGPEIMSKMAGESESNLRKAFEEAEKNSPAIIFIDEIDSIAPKREKTNGEVERRVVSQLLTLMDGMKARSNVVVMAATNRPNSIDPALRRFGRFDREVDIGIPDPTGRLEILSIHTKNMKLAEDVDLETIAAETHGYVGSDLASLCSEAAMQQIREKMDLIDLDEDTIDAEVLDSLGVTMENFRYALGVSNPSALREVAVVEVPNVRWEDIGGLEEVKRELIESVQYPVDHPEKFQKFGLSPSRGVLFYGPPGTGKTMLAKAVANECAANFISVKGPELLSMWFGESESNIRDIFDKARAAAPCVVFLDELDSIAKSRGGSVGDAGGASDRVVNQLLTEMDGMTSKKNVFVIGATNRPEQLDAALVRPGRLDTLVYVPLPDQASRESILRAQLRKTPVAPDVDIPFIASKTHGFSGADLGFVTQRAVKLAIKESIAAEIERQKQREAAGEDIKMDDEGEEEDPVPQLTRAHFEEAMKSARRSVSDVEIRRYEAFAQSLKNSGGSSFFRFPSSGEIQNNDTFGDAGNDDSLYD

SEQ ID NO: 18236 - protein, 462 aa, Neurospora crassa
MSTLEELDDLDRREREDKKKDQDKDKNNKKEGDGDAEMKDAEPEADDILDEEILSLSTEDILMRKRLLENDARIMKSEYQRLSHERATMKDKIKENQEKIANNRQLPYLVGNVVELLDLDPTAESSEEGANIDLDATRVGKSAVIKTSTRQTIFLPLIGLVDPEKLKPGDLIGVNKDSYLILDTLPAEYDSRVKAMEVDEKPQEKYTDVGGLDKQIDELVEAIVWPMKEAERFKKIGIKAPKGIGALMYGPPGTGKTLLARACAAQTDATFLKLAGPQLVQMFIGDGAKLVRDCFALAKEKAPSIIFIDELDAVGTKRFDSEKSGDREVQRTMLELLNQLDGFASDDRIKVLAATNRIDVLDPALLRSGRLDRKIEFPLPNEEARAQILKIHSRKMKVNPGVNWGELARSTDEFGGAMLKAVCVEAGMIALRMGKNQIGHEHYVDAISEVQAKKKETVNFYA

SEQ ID NO: 18237 - protein, 1388 aa, Colletotrichum lagenarium
MTTSELVPPPPARRSPRTRRRRQDKPALSARLVLDDHEINGDVGVLSEDLFTDLFPHLRNVPSREDGSEDIHHVAIAPWEPSPSPTETAWTVVPVLKSSALKPSTVQFSPSSLSLQSFATILQQVAPSKLSSHSRSGIEVQILDVVALSLDTVFVSLESELTKRLEQGEGTFFRDRPNKGKGKAPAQPDTPEDRLISALRVALGSLKVLHSGDLFSLPLPPHPVTHVPPNPGKIMLCEPVSREYLSDDTKIVLMRGRVHAKRGQSAPAIPPNRSLNGVPEDDEDDTANDQFYSAAEDRYKTDAATTEMDTVTETEESDLSGVDHDDDLSDDFMDDMISLQAPTLPTTASGVSTMQPGTPMTIGRGRKTNGIATPASVFSNFTATTARPDRPRGRLFKAQGLIRPILIDLLHPKPAPEDDEEARIFVDIASLSKIGCFSGDWVRVEAAEEPPANGFGAFGLGSFTSLEPTESNWRPVRVYGLPEGYSQRPVTRIPSAKHGERRMSFFESQLQKPTSPTAYISPVLLANLESPSYLRLSPIKRGTYQGKGTLPKFTSASRPPYARDITIQHVRSPVTAERAYQSAVLGGLKRYFAQKIRLVRTGDLIAVPIDTQLGKALQEQPSANGSEVDDVMALAKDESCRFDQVAWFKVGHIQTQKTDADHDQTEDLWGGVACIDSSSVAMHGSGFATSRTPATKASTWPYYLGVKKMPMKSNGASALMVPEQDQRFVSPLRRRLRELLAAATSPRAIHLKMPPVAILLTSTHRNIGKATLASEACSDIGLHTYAIDAYDILSEAGTSGGDVKTEGLLRTRSERAMSCGPDTTALLIKHVEALTADRMVSTMKEILQDTRVLVATTSDVDKVPDGVRGLFSHELEVGAPDEAEREGILRTIVEDRGINLDPEVDLNGIALKTAALVAGDLVDVVDRALVAQRLRLEQISSKTGQAVTVRDLQVAGGAMARCVTKGDFDVAVEAARKNFAGAIGAPKIPNVTWDDVGGLNNVKDAVTETIQLPLERPELFAKGMKKRSGILFYGPPGTGKTLLAKAIATEYSLNFFSVKGPELLNMYIGESEANVRRVFQRARDARPCVVFFDELDSVAPKRGNQGDSGGVMDRIVSQLLAELDGMSGGDDTSGGVFVIGATNRPDLLDPALLRPGRFDKMLYLGVSDTHDKQLKILEALTRKFTLHPSVSLHSVAQQLPFTYTGADFYALCSDAMLKAVTRQAASVDAKIRELEAQPRSRTGPISTAYFFDHHATPEDIAVMVTEEDFLAANRELVPSVSAGELSHYEQVRAMFEGPPEKDRQQQQQQQQRPSGLRAVSGSSVVSKGKGKAIAGGSGKGKGKAVATGSDDEYGSEGEVAVVNGKGKGKGKAVAGFQDGTASDDEGLY

SEQ ID NO: 18238 - protein, 397 aa, Guillardia theta
MPNYKYKSKLRNELEKKLEIIELENKNIRISNSNNNYEKIKLKDMKKELQEKIKSSSTLPHLVATISEIIYNQNRKIDGIILKTSNRLNIFLSNEGLIDKKNLNLNSIYGVNKDSYYLISRLPPEYDFRVRAMEVDENPNQTYQDIGGLDNQIQELIEAIVLPLTQIIKFNKIGIIAPKGVLLYGPPGMGKTLLARACASQTNAKFFKIGGPNLVQMYIGEGASLVRETFKYAKETQPSIIFIDEIDAIGMKRSISDSNGDHEVQRTMLELLNQLDGFSLNSNVKIIAATNRIDILDPALLRSGRLDRKIEFPYPTLGSRLKILKIHCRKIRISEYLELLEIAKITENFNGAQLKALCVEAGIIAIRKHKKIVIYDDFMEAFLKIKYRKDVQLKYII

SEQ ID NO: 18239 - protein, 598 aa, Leishmania donovani
MDPLQREASKNGEEGAAGAERPSYFRGFFDAEKRRKVVNHDPTVGQAIGGAVVMALPVALIIVLVMRRHARLATQEASGAAPKEGGFFSEMQKMMRQTMNPMGEKNFKVSVKDTKFSDVIGVPEALAEVQQYVNFLKTPQVFTRLGGRLPKGCILTGEPGTGKTLLAKAVAGEASVPFYSCSGADFIEVYAGSGPKRVRELFAAAKKDAPSVIFIDEIDAVGSRSSGNGAMGLSSEENRTINQLLAELDGLQPNEAVVVFAATNFVDSLDKALLREGRFDRKVEIPMPDRQARQDLFNHYLSRIACEDAGSLSKKLAELTPGVSPATIAAIVNEGALSAAIKDKAVVAAVDLLPAIDDVLVGKKHRSRMSDDAARRVALHESGHALVAWLLPEQTDVVKISITPRGPAGGFTQQVGREVLDMATEFSLFTDICVMLGGRLAEMTQHESLTTGAQDDYQRATQTAIREFLAFGMSRQVGLLSYEPQRLSEGRMHQKHSEAAHKMAEEEAARLVAAASDHVKMLLRSHDALLQKLAASLFERKELLREDIEAIVGPRPGTSSAVSEQTRAALRRFVDASEAAALQRQTAREAMCATLSTA

SEQ ID NO: 18240 - protein, 409 aa, Aeropyrum pernix
MTLSSAGGSRSHRHNGGHSERDVEIRILKDKVRSLTKEKISLQKELEYYKNEITKLLSPPYIEAVVLEVIDDNRVVVKSSTGPNLIVNVAAGVDARSLKPGAIVALNNRGSTIVDVLPGRYDPLVKAMEVEERPKVFFKDVGGLEEQIREIYEAVVLPIKNPHLFRELGIDPPKGVLLHGPPGTGKTLLAKAVAGETEATFIRVVGSELVNKFIGEGARLVREIFRLAREKAPSILFIDEIDAIASKRVDIGTSGDREVQRTMLQLLAELDGFDPLDNVKVIAATNRLDLIDPAVLRPGRFDRIIEVPLPSLRGRLEILGIHTRKAKMAPDVDLEAIAKLTEGFSGADLKAVVVEAGYNAIRRGSRVITMDDMIKAVEKVKAALDKRGGGDPFIRAQQKSGDDTIATVI

SEQ ID NO: 18241 - protein, 445 aa, Trypanosoma brucei
MTQDTARATGGAAEGDRGGTSDASAAAQLSPEELENIDSLTNQAPRNRSTQLQREIHQLKNEERTMSSELAGLRREVEESQKRVRDSNKLPYLVASIAEVLDLEADDQDVEELNVGKKKSRHPQKSAIIKTSSRQTVFLPVVGLVDANKLSPQDLVGVNKDTFLVLEELPPEYDSRVKAMEIVEKPKEKYTDVGGLDKQINEMIEAVVLPITEKEKYVRIGIKPPKGVLLYGSPGTGKTMLARACAASTDACFLRLAGPQLVQMYIGEGARILRDAFALAKKRAPTIIFIDELDAIGSRRSDEGSKHGSREVQRRMLELLSLLDGFGSTDDVKVIAATNRIDVLDPALLRRGRIDRKVEFTLPDEEARAHILQIHSRRMALHGDVNFEEISRMTEDMNGAQLKAVCVEAGMLALRNERVYVAHEDFAEGVTAVQARKKSSLNYYA

SEQ ID NO: 18242 - protein, 247 aa, Giardia intestinalis
  unsure (1)..(247): unsure at all Xaa locations
AIKELEETIQLPLTNPEYFVDLGIEPPRSCILHGPSGTGKSLLARACANETSACYMKMAGSELIQXYSGEGPRLVRELFKAAKANQPTIIFIDEVDAVGRKRYDADSGGAREIQRTMLELLNQLDGFDRTEGVKVIMATNLIESLDSALIRAGRIDRKIYVGLPDLTARRQIFKIHTRRMMLDKDIVEDEILNCKDDLSGADIKAITLEAGLLALRDRRIRVCMSDFRKARDKVLYKKIQEVGDLYT

SEQ ID NO: 18243 - protein, 435 aa, Plasmodium falciparum
MAAVDFDVRSKNLSEGIKNEISEKNMENNNNNDNNKNSSALNEEQVQSGIKRYYELKIEEYESIINKKLQNKKRLEAQRNELNARVRELCDEIQYLLEAASYVGEIVKPMGKNKVLVKINPEGKYVVDIARHINISHCTPNTRVALYNDSYKLHKILPSKVDPLVSLMKVEKVPDSTYEMVGGLDQQVKEVKEVIELPVKHPEIFESLGISQPKGVLLYGPPGTGKTLLARAVAHHTDCTFIRVSGSELVQKYIGEGSRMVRELFVMAREHAPSIIFMDEIDSIGSQRIEGEHGDSEVQRTMMELLNQLDGFESTQNIKVIMCTNRIDILDEALLRPGRIDRKIEFPNPNVEARMEILKIHSRKINLMRGIDMLKIATHMNNCSGAEVKAVCTEAGMFALRERRVHVTQEDFEMAVAKVMKQDAEKNFTLRKLWK

SEQ ID NO: 18244 - protein, 401 aa, Encephalitozoon cuniculi
MSLEELEAMDQSNPGEFLERVREKIRMLNSETRILQSRVNTIKHDISTKNASIAENMERIRLNKQLPYLVGNVVEVLDEHSGVVNASTRMSSYLPITGLIPNSELRPGDLVALHKDTNIVFEKLPPDYDMKVGGMVLKSDAKPDETYEDIGGLERQIEELNEAIVLSLTHPERFEKLNIKPPKGVLMYGPPGTGKTLMARACASKTNATFLKLAGPQLVQMYIGDGARLVRDAFALAKERKPTIIFIDEIDAIGAKRSDSDQTGDREVQRTMLELLNQLDGFSSSEEVKIIAATNRVDILDPALLRSGRLDRKIEFPLPNTLGRKRILQIHARKMSVRDDVNFDELARSTEGFNGAQCKAVCVEAGMAALRKEKTEISQNDFMDGIQEVLSRKKSKLLYFT

SEQ ID NO: 18245 - protein, 662 aa, Schistosoma mansoni
MIVSPCCRIIRTCCVSNRGTFHSRLAALYPSYIKIPNNHARIFVTKSRKINRPSSSFIIDTKEARQRNSDSSTVSSDLDEILKDQTPSAQLRLVDAYRRGFQSSTDSGKSSNKMQMWRTIIIKTILFGVVSCFTIVFLKKTLVGTFPKFLDQNIGSFAENTDVSFSDVQGCDEVKKELVDVVEFLRNPEKFNQIGAKLPKGVLLVGPPGVGKTLLAKAVSGEAQVPFLYASGSSFDEVLVGLGASRIRQLFTTAKQNSPCLVFIDEIDSVGGNRTFSPHHPFANQTINQLLAEMDGFQSKEGIIVLGATNQAEVLDKALLRPGRFDVQIHVSPPTYEGRIALLNLYLKKVKTGSNIDIEKLAHGTVGYTGADIQNLVNQAAIAAALRNDPFVEMHHLWDARDRLIMGPAKRRPLDDQTNRVSAFHEAGHALVALLTADSIPLHKVTIIPRGEAGGLTSFLQEKDISFMTRAQLLAQLDVLMGGRVGEELVFGADKVTNGAADDFRKATILAQNMVKRFGFSSKIGPRVIPDTQDEQLGEATRDLIDKEVDQLLNDSLTRVRTLLSSQSKQHKLLAEALLHFETLTKDEVLAVLAGKMKPPKTQSVTSKSTTLLPQLGPSTSTEIPRMIVSLIIVHVVDFISFFCPFKDTLHTYTHTHKLLFS

SEQ ID NO: 18246 - protein, 430 aa, Caenorhabditis elegans
MSQTPPPKDGKNPEAMEVEDAIDEEILKMSTEDLKSRTHLLDNEIRIMRSEVQRINHSATTLKERIKENTERIKVNKTLPYLVSNVVELLDLEDNTEEEGANVDLDAQKTKCAVIKTSTRATYFLPVVGLVDPDELKPGDLVGVNKDSYLILEKLPAEYDSRVKAMEVDERPTEQYSDIGGCDKQIQELIEAVVLPMTHKDRFVNLGIHPPKGVLMYGPPGTGKTMMARAVAAQTKSTFLKLAGPQLVQMFIGDGAKLVRDAFALAKEKAPAIIFIDELDAIGTKRFDSEKAGDREVQRTMLELLNQLDGFQPNDDIKVIAATNRIDVLDPALLRSGRLDRKIELPHPNEDARARIMQIHSRKMNVNKDVNFEELARCTDDFNGAQCKAVCVEAGMIALRRDATEILHEDFMDAILEVQAKKKASLNYYA

SEQ ID NO: 18247 - protein, 411 aa, Halobacterium sp. NRC-1
MSRSPSLPDRPTLDVDPESTPAERLNALQDHYVDIVAVNGELQAQLDDVEARREELREEVNRLQRENETLKTASLYLATVEDLPEDGSAVIKQHGNNQEVLTELSPRLADTLEVGDRVAINDSFSVQRVLDDETDARAQAMEVDESPSVTYADIGGLDDQLREVREAVEDPLVNPEKFDAVGVEPPSGVLLHGPPGTGKTMLAKAVANQTDASFIKMAGSELVRKFIGEGSRLVRDLFELAEQKDPAIIFIDEIDAVAAKRTDSKTSGDAEVQRTMMQLLSEMDGFDERGDIRIIAATNRFDMLDSAILRPGRFDRLIEVPNPNPDARERILEIHAGEMNVADSVDFSDLAADTAEFSGAQLASLATEAGMFAIRDDRDEVHRQDFDDAYEKLVAEGDTESSGPRYPSYIQ

SEQ ID NO: 18248 - protein, 407 aa, Halobacterium sp. NRC-1
MVMTDTVEDVELPYDDSASQQDKLEALEEQLSTLEEENEERDRLLDANAENNKYQQKLERLSHENKKLKQSPLFIATVQELTDEGAVIKQHGNNQEALTEVTDELRATLEPGSRVAVNNSLSVVRQLDDEADVRARVMEVDDSPDVGYEDIGGLDDQLREVRETVELPMKDPGLFETVGINPPSGVLLHGPPGTGKTLMAKAVASQTDASFIKMAGSELVHKFIGEGAKLVRDLFQVARDHEPAVVFIDEIDAIASKRTDSKTSGDAEVQRTMMQLLSEMDGFDERGDIRIIAATNRFDMLDRAILRPGRFDRLIEVPHPNVGGREKIFRIHTRAMNVADSVDFGELAADTGDLSGADVKAICTEAGMFAIRDDRTEVRMQDFQSAREKLDQDSEPAAATDVSRTFA

SEQ ID NO: 18249 - protein, 368 aa, Halobacterium sp. NRC-1
MRDRLLDANAENNKYQQKLERLSHENKKLKQSPLFIATVQELTDEGAVIKQHGNNQEALTEVTDELRATLEPGSRVAVNNSLSVVRQLDDEADVRARVMEVDDSPDVGYEDIGGLDDQLREVRETVELPMKDPGLFETVGINPPSGVLLHGPPGTGKTLMAKAVASQTDASFIKMAGSELVHKFIGEGAKLVRDLFQVARDHEPAVVFIDEIDAIASKRTDSKTSGDAEVQRTMMQLLSEMDGFDERGDIRIIAATNRFDMLDRAILRPGRFDRLIEVPHPNVGGREKIFRIHTRAMNVADSVDFGELAADTGDLSGADVKAICTEAGMFAIRDDRTEVRMQDFQSAREKLDQDSEPAAATDVSRTFA

SEQ ID NO: 18250 - protein, 217 aa, Amblyomma americanum
GTGKTLLARAVAHHTDCTFIRVSGSELVQKFIGEGSRMVRELFVMAREHAPSIIFMDEIDSIGSSRIDAGSGGDSEVQRTMLELLNQLDGFEATKNIKVIMATNRIDILDPALLRPGRIDRKIEFPPPNEEARLDILRIHSRKMNLTRGINLRRIAEMMPGASGAEVKGVCTEAGMYALRERRVHVTQEDFEMAVAKVMQKDAEKNMSIKKLVEVRS

SEQ ID NO: 18251 - protein, 801 aa, Drosophila erecta
MADSKGEDLATAILKRKDRPNRLIVEEAQNDDNSVVSLSQAKMDELQLFRGDTVILKGKRRKETVCIVLSDDTCSDEKIRMNRVVRNNLCVHLSDVVSVQSCPDVKYGKRVRILPIDDTTEGITGNLFEIYLKPYFLEAYRPIHMGDNFIVRAAMRPVEFKVVLTDPEPYCIVAPETVIFCDGDPIKREEEEESLNAVGYDDIGGCRKQLAQIKEMVELPLRHPSLFKAIGVKPPRGILMYGPPGTGKTLIARAVANETGAFFFLINGPEIMSKLAGESESNLRKAFEEAEKNSPAIIFIDEIDAIAPKRDKTHGEVERRIVSQLLTLMDGMKKSSHLIVMAATNRPNSIDPALRRFGRFDREIDIGIPDATGRLEVLRIHTKNMKLHDDVDLEQIAAESHGHVGADLASLCSEAALQQIREKMDLIDLDDDKIDAEVLASLAVTMENFRYAMTKSSPSALRETVVEVPNTTWTDIGGLESVKKELQELVQYPVEHPDKFLKFGMQPSRGVLFYGPPGCGKTLLAKAIANECQANFISVKGPELLTMWFGESEANVRDIFDKARSAAPCVLFFDELDSIAKARGGNVGDAGGAADRVINQILTEMDGMGAKKNVFIIGATNRPDIIDPAILRPGRLDQLIYIPLPDDKSREAILKANLRKSPLAKEVDLSYIAKVTQGFSGADLTEICQRACKLAIRQAIEAEIRREKERAENQNSAMDMDEDDPVPEITSAHFEEAMKFARRSVSDNDIRKYEMFAQTLQQSRGFGQNFRFPGQTGNTSGSGNNLPVNSPGDNGDDDLYS

SEQ ID NO: 18252 - protein, 428 aa, Drosophila melanogaster
MAQTLEDKSIWEDGEESLGEEVMRMSTDEIVSRTRLMDNEIKIMKSEVIRITHEIQAQNEKIKDNTEKIKVNKTLPYLVSNVIELLDVDPQEEEDDGSVTVLDNQRKGKCAVIKTSTRQAYFLPVIGLVDAEKLKPGDLVGVNKDSYLILETLPAEYDARVKAMEVDERPTEQYSDIGGLDKQIQELIEAVVLPMTHKEKFKNLGIHPPKGVLLYGPPGTGKTLLARACAAQTKSTFLKLAGPQLVQMFIGDGAKLVRDAFALAKEKAPAIIFIDELDAIGTKRFDSEKAGDREVQRTMLELLNQLDGFSSTADIKVIAATNRVDILDPALLRSGRLDRKIEFPHPNEEARARIMQIHSRKMNVSNDVNFEELSRSTDDFNGAQCKAVCVEAGMIALRRSANSVTHEDFMDAIMEVQAKKKANLNYYA

SEQ ID NO: 18253 - protein, 431 aa, Drosophila melanogaster
MVLDMAQTLEDKSIWEDGEESLGEKVMRMSTDEIVSRTRLMDNEIKIMKSEVIRITHEIQAQNEKIKDNTEKIKVNKTLPYLVSNVIELLDVDPQEEEDDGSVTVLDNQRKGKCAVIKTSTRQAYFLPVIGLVDAEKLKPGDLAGVNKDFYLILETLPAEYDARVKAMEVDERPTEQFSDIGGLDKQIQELIEAVVLPMTHKEKFKNLGIHPPKGVILYGPPGTGKTLLARACAAQTKSTFLKLAGPQLVQMFIGDGAKLVRDAFALAKEKAPAIIFIDELDAIGTKRFDSEKAGDREVQRTMLELLNQLNGFSSTADIKVIAATNRVDILPALLRSGRLDRKIEFPHPNEEARARIMQIHSRKMNVSNDVNFEELSRSTDDFNGAQCKAVCVEAGMIALRRSANSVTHEDFMDAIMEVQAKKKANLNYYA

SEQ ID NO: 18254 - protein, 450 aa, Plasmodium yoelii yoelii
MNVENIFENEQVNIEEIEVLSNSEIRTRISLIDTEIKILKNEHTRLKNEYKNIQEKIKDNVEKIHLNKMLPYLVANVVESLDLQDEEDEQEPKDEYDLYDNPNNNNNSYGNISKNAPEEGFRDIDDEKKGKCMVIKTSTRQTIFLPVPGLIEASELKPGDLVGVNKDSYLIIDKLPPEYDNRVKAMEVIEKPTEDYSDIGGLDKQIEDLVEAIVLPMLHKEKFEKIGIKPPKGVLMHGPPGTGKTLLARACASQTNATFLKLAGPQLVQMFIGDGAKMVRDAFNLAKEKAPAIIFIDELDAIGTKRFDSELSGDREVQRTMLELLNQLDGFSTDETVKVIAATNRPDTLDPALLRSGRLDRKIELPHPNEESRARILQIHSRKMNVHKDVNFEELARSTDDFNGAQLKAVCVEAGMIALRRGATEIDHEDFIEGITSVLSKKKSTLNYFT

SEQ ID NO: 18255 - protein, 194 aa, Oncorhynchus mykiss
  unsure (1)..(194): unsure at all Xaa locations
PYWXRAXAAQTKATFLKLAGPQLVQMFIGDGAKLVRDAFALAKEKAPSIIFIDELDAIGTKRFDSEKAGDREVQRTMLELLNQLDGFQPNMQVKVIAATNRVDILDPALLRSGRLDRKIEFPMPNEEARARIMQIHSRKMNVSPDVNYEELARCTDDFNGAQCKAVCVEAGMIALRRGATELNHEDYMEGILEV

SEQ ID NO: 18256 - protein, 423 aa, Xenopus laevis
MASIWDETEADGLGEDVLKMSTEEIIQRTRLLDSEIKIMKSEVLRVTHELQAMRDKIKENSEKIKVNKTLPYLVSNVIELLDVDPNDQEEDGANIDLDSQRKGKCAVIKTSTRQTYFLPVIGLVDAEKLKPGDLVGVNKDSYLILETLPTEYDSRVKAMEVDERPTEQYSDIGGLDKQIQELVEAIVLPMNHKEKFENLGIQPPKGVLMYGPPGTGKTLLARACAAQTKATFLKLAGPQLVQMFIGDGAKLVRDAFSLAKEKAPSIIFIDELDAIGTKRFDSEKAGDREVQRTMLELLNQLDGFQPTTQVKVIAATNRVDILDPALLRSGRLDRKIEFPMPNEEARARIMQIHSRKMNVSPDVNYEELARCTDDFNGAQCKAVCVEAGMIALRRGATELTHEDYMEGILEVQAKKKANLQYYA

SEQ ID NO: 18257 - protein, 404 aa, Xenopus laevis
MSTEEIIQRTRLLDSEIKIMKSEVLRVTHELQAMRDKIKENSEKIKVNKTLPYLVSNVIELLDVDPNDQEEDGANIDLDSQRKGKCAVIKTSTRQTYFLPVIGLVDAEKLKPGDLVGVNKDSYLILETLPTEYDSRVKAMEVDERPTEQYSDIGGLDKQIQELVEAIVLPMNHKEKFENLGIQPPKGVLMYGPPGTGKTLLARACAAQTKATFLKLAGPQLVQMFIGDGAKLVRDAFSLAKEKAPSIIFIDELDAIGNKRFDSEKAGDREVQRTMLELLNQLDGFQPTTQVKVIAATNRVDILDPALLRSGRLDRKIEFPMPNEEARARIMQIHSRKMNVSPDVNYEELARCTDDFNGAQCKAVCVEAGIIALRRGATELTHEDYMEGILEVQAKKKANLQYYA

SEQ ID NO: 18258 - protein, 405 aa, Xenopus laevis
MASIWEETEADGLGEEVLKMSTEEIIQRTRLLDSEIKIMKSEVLRVTHELQAMRDKIKENSEKIKVNKTLPYLVSNVIELLDVDPNDQEEDGANIDLDSQRKGKCAVIKTSTRQTYFLPVIGLVDAEKLKPGDLVGVNKDSYLILETLPTEYDSRVKAMEVDERPTEQYSDIGGLDKQIQELVEAIVLPMNHKEKFENLGIQPPKGVLMYGPPGTGKTLLARACAAQTKATFLKLAGPQLVQMFIGDGAKLVRDAFALAKEKAPSIIFIDELDAIGTKRFDSEKAGDREVQRTMLELLNQLDGFQPNMQVKVIAATNRVDILDPALLRSGRLDRKIEFPMPNEEARARIMQIHSRKMNVSPDVNYEELARCPTISMALSAKQFGVEAGMIALRRGATEFGLNFNV

SEQ ID NO: 18259 - protein, 439 aa, Homo sapiens
MNLLPNIESPVTRQEKMATVWDEAEQDGIGEEVLKMSTEEIIQRTRLLDSEIKIMKSEVLRVTHELQAMKDKIKENSEKIKVNKTLPYLVSNVIELLDVDPNDQEEDGANIDLDSQRKGKCAVIKTSTRQTYFLPVIGLVDAEKLKPGDLVGVNKDSYLILETLPTEYDSRVKAMEVDERPTEQYSDIGGLDKQIQELVEAIVLPMNHKEKFENLGIQPPKGVLMYGPPGTGKTLLARACAAQTKATFLKLAGPQLVQMFIGDGAKLVRDAFALAKEKAPSIIFIDELDAIGTKRFDSEKAGDREVQRTMLELLNQLDGFQPNTQVKVIAATNRVDILDPALLRSGRLDRKIEFPMPNEEARARIMQIHSRKMNVSPDVNYEELARCTDDFNGAQCKAVCVEAGMIALRRGATELTHEDYMEGILEVQAKKKANLQYYA

SEQ ID NO: 18260 - protein, 439 aa, Homo sapiens [sequence omitted]

SEQ ID NO: 18261 - protein, 404 aa, Homo sapiens
MSTEEIIQRTRLLDSEIKIMKSEVLRVTHELQAMKDKIKENSEKIKVNKTLPYLVSNVIELLDVDPNDQEEDGANIDLDSQRKGKCAVIKTSTRQTYFLPVIGLVDAEKLKPGDLVGVNKDSYLILETLPTEYDSRVKAMEVDERPTEQYSDIGGLDKQIQELVEAIVLPMNHKEKFENLGIQPPKGVLMYGPPGTGKTLLARACAAQTKATFLKLAGPQLVQMFIGDGAKLVRDAFALAKEKAPSIIFIDELDAIGTKRFDSEKAGDREVQRTMLELLNQLDGFQPNTQVKVIAATNRVDILDPALLRSGRLDRKIEFPMPNEEARARIMQIHSRKMNVSPDVNYEELARCTDDFNGAQCKAVCVEAGMIALARGATELTHEDYMEGILEVQAKKKANLQYYA

SEQ ID NO: 18262 - protein, 197 aa, Vitis riparia
MEAVDKEKLTAGTRVVLDMTTLTIMRALPREVDPVVYNMLHEDPGNVSYAAVGGLSDQIRELRESIELPLMNPELFIRVGIKPPKGVLLYGPPGTGKTLLARAIASNIDANFLKVVSSAIIDKYIGESARLIREMFGYARDHQPCIIFMDEIDAIGGRRFSEGTSVDREIQRTLMELLNQLDGFDQLGESQNDYGNQ

SEQ ID NO: 18263 - protein, 502 aa, Streptomyces coelicolor A3(2)
MTSSTETTATTPQVAVNDIGNEEAFLAAIDETIKYFNDGDIVDGVIVKVDRDEVLLDIGYKTEGVIPSRELSIKHDVDPNEVVAVGDEIEALVLQKEDKEGRLILSKKRAQYERAWGTIEKIKEEDGIVTGTVIEVVKGGLILDIGLRGFLPASLVEMRRVRDLQPYVGKELEAKIIELDKNRNNVVLSRRAWLEQTQSEVRQTFLTTLQKGQVRSGVVSSIVNFGAFVDLGGVDGLVHVSELSWKHIDHPSEVVEVGQEVTVEVLDVDMDRERVSLSLKATQEDPWQQFARTHQIGQVVPGKVTKLVPFGAFVRVDEGIEGLVHISELAERHVEIPEQVVQVNDEIFVKVIDIDLERRRISLSLKQANEAFGADPSTVEFDPTLYGMAASYDDQGNYIYPEGFDPETNDWLEGYETQREAWETQYAEAQTRFEQHQAQVIKSREADEKAAAEGVDTAGAAPAASGGGGGGSYSSEGGDNSGALASDEALAALREKLAGGQS

SEQ ID NO: 18264 - protein, 276 aa, Mus musculus
MDPGRQPESADDFDRLVLSSPNSSILWLQYMAFHLQATEIEKARAVAERALKTISFREEQEKLNVWVALLNLENMYGSQESLTKVFERAVQYNEPLKVFLHLADIYTKSEKYKEAGELYNRMLKRFRQEKAVWIKYGAFVLGRSQAGASHRVLQRALECLPAKEHVDVIVKFAQLEFQLGDVERAKAIFENTLSTYPKRTDVWSVYIDMTIKHGSQTAVRDIFERVIHLSLAPKRMKFFFKRYLDYEKQHGTEKDVQAVKAKALEYVEAKSSALED

SEQ ID NO: 18265 - protein, 229 aa, Mus musculus
MNSCSTHPLREEQEKLNVWVALLNLENMYGSQESLTKVFERAVQYNEPLKVFLHLADIYTKSEKYKEAGELYNRMLKRFRQEKAVWIKYGAFVLGRSQAGASHRVLQRALECLPAKEHVDVIVKFAQLEFQLGDVERAKAIFENTLSTYPKRTDVWSVYIDMTIKHGSQTAVRDIFERVIHLSLAPKRMKFFFKRYLDYEKQHGTEKDVQAVKAKALEYVEAKSSALED

SEQ ID NO: 18266 - protein, 768 aa, Mus musculus
  unsure (1)..(768): unsure at all Xaa locations
TPGSAIFXILRKHSTWAFKPGSTHKCXIIDYSQMDELALLFLRKSIIAAPFLRYHDIKIGTVVKGTVLAIKPFGILVKVGEQIKGLVPSMHLADIMMKNPEKKYSPGDEVKCRVLLCDPEAKKLIMTLKKTLVTSKLPFITWYEGAKLGLQTHGVIIRVKDYGCIVKFYNDLQGLVPKHELSNPAIPDPETVFYTGQVVKVAVLSCEPSKERMLLSFRLLSDSRPKDPGVESSQKKTGAVRIGQLVDVKVLEKTKTGLEVAILPHNTPAFLPTPHLSDHAANGPLLHHWLQTGDTLHRVLCLSQSERHILLCRKPALVSTVEGGQDPKSLSEIQPGMLLIGFVKCIKEYGVFVQFPSGLSGLSPKTIMSDKFVTTPSEHFVEGQTVVAKVTNVDESKQRMLLSLRLSDCSLGDSASTSFLLLCQCLEELQGIRSLMSNQDSVLIQTLADMTPGMVLDAVVHEVLEDGSVVFSSDPVPDLVLRASRYHRAGQEVEPGQKKKVVVLHVDMLKLEVHVSLHQDLVNRKPRKLRKSSRHQGIVQHLEESFAVASLVETGHLVAFSLISHLNDTFHFDSEKLRVGQGVCLTLKTTEPGVTGLILAVEGPVFKRTRMPVQRDSETVDDKGEEKEEEEEEKEEENLTVKSKKRHSLAIGDKVTGTIKAVKATHVVVTLADGFVGCFHASRILDDVPVGTSPTTTLKAGKKVTARVIGGRDVKTSKFLPISHPRFVLTILELSVRPSELKGSYSPEFLQPGGSTILERPXRRGVQX

SEQ ID NO: 18267 - protein, 1824 aa, Rattus norvegicus
MANLEESFPRGGTRKPHKSEKSSQPVVEQDNLFDISTEEGSVKRKKSQKGPAKTKKLKIEKRKSNKSMKEKFEILSLESLCEGMRILGCVKEVNELELVVSLPNGLQGFVQVTEICDAYTQKLNEQVAQEEPLEDLLRLPELFSPGMLVRCVVSSLDVTESGKKSVKLSVNPKRVNKVLSAEALRPGMLLTGTVSSLEDHGYLVDIGVDGTRAFLSLQKAQEYIRQKNKGAKFKVGQYLTCVVEELKSNGGVVSLSVEHSQVSSAFATEEQSWNLNNLLPGLVVRAQVQKVTQFGLQLNFLTFFTGLVDFMHLEPKKMGSYSSKQTVKACILCVHPRTRVVRLSLRPIFLHPGRPLTRISYQQLGTVLDDASVEGFFEKAGAIFRLRDGVLAYARLSHLSDSKKAFSAEAFKLGSTHRCRIIDYSQMDELALLSLRKSIIAAPFLRYQDIKTGTIVKGKVLALKPFGMLVKVGEQMRGLVPSMHLADIMMKNPEKKFNTGDEVKCRVLLCDPEAKKLIMTLKKTLVTSKLPAITCYEDAKPGLQTHGVIIRVKDYGCLVKFYNDVQGLVPKHELSAQHIPDPERVFYTGQVLKLLREMQTHVISHQVVKVAVLNCEPSKERMLLSFKLLSGSEPKDESVKNSKKKGSTVNTGQLVDVKVLEKTKNGLEVAILPHNIPAFLPTPHLSDHVANGPLLHHWLQTVEGGQDPKSLSEIQPGMLLIGFVKSIKDYGVFVQFPSGLSGLSPKTIMSDKFVTTPSEHFVEGQTVVAKVTNVDESKQRMLLSLRLSDCSLGDSASTSFLLLCQCLEELQGIRSLMSNQDSVLIQTLADMTPGMVLDAMVQEVLENGSVVFGGGPVPDLILRASRYHRAGQELEPGQKKKVVVLHVDALKLEVHVSLHQDLVNRKARKLRKNSRHQGIVQHLEESFAVASLVETGHLVAFSLISHLNDTFHFDSEKLRVGQGVCLTLKTTEPGVTDDGFIGCIHVSRILDDVPEGVSPTTTLKAGKKVTARVIGGRDVKTSKFLPISHPRFVLTILELSVRPSELKGDYRALNTHSVSPMEKIRQYQAGQTVTCFLKKYNVMKKWLEVDIEPDIRGRIPLLLTSLSFKVLKHPDKKFQIGQAIKATVVGPDIPRAFLCLSLIGPYKLEEGDVAMGRVLKVLPNKGLTVSFPFGRIGKVSVFHLSDSYSEEPLTDFCPQKIVRCYILSTAHRMLALSLRSSSCQTRSPGPAGWTLDYSLLGAETKSYAVGYCGVLGESSSGSGMRMTNKETKSKIEDPEVNSIEDIQAGQLLRGYVKSILPSSVVIGLGPSVMGLVKHSHVSQCVSREKELYDKCLPEGKLVTARVLCVNPKKNLIELSLLPSDTGKPDVFSASPEPPLPKQEGREGGTEKGLKGESKRSQRRREKNQKMREESGLYSQEKKEPRKSQRGGQSKRERQESESEQELVNKRPKKSGAPEDDDSGVEVYYREGEDEVEEPKVPPGGKQSKPTEVPRLQLSKGFIWDVGLDSLTPALPLRGESSDSEEDEQPHQAKVLYFLQKLLIPNSDALFCAGPESADDFDRLVLSSPNSSILWLQYMAFHLQATEIEKARAVAERALKTISFREEQEKLNVWVALLNLENMYGSQESLAKVFERAVQYNEPLKVFLHLADIYTKSEKFKEAGELYNRMLKRFRQEKAVWIKYGAFVLGRSQAGASHRVLQRALECLPTKEHVDVIVKFAQLEFQLGDVERAKAIFENTLTTYPKRTDVWSVYIDMTIKHGSQKEVRDIFERVIHLSLAPKRMKFFFKRYLDYEKQHGTEKDVQAVKAKALEYVEAKSSALEDQ

SEQ ID NO: 18268 - protein, 343 aa, Nostoc sp. PCC 7120
MVNQNLTATEIGFTHEDFAALLDKYDYHFSPGDVVPGTVFSIEPRGALIDIGAKTAAYIPIQEMSINRVDAPEEVLQSNETREFFILTDENEDGQLTLSIRRIEYMRAWERVRQLQAEDATVRSGVFATNRGGALVRIEGLRGFIPGSHISTRKPKEELVGEELPLKFLEVDEERNRLVLSHRRALVERKMNRLEVGEVVIGTVRGIKPYGAFIDIGGVSGLLHISEISHEHIDTPHSVFNVNDEVKVMIIDLDAERGRISLSTKQLEPEPGDMIKNRDLVYDKAEEMAAKYREQLLAKQQGITLPAEGAEDLIEEEIPPATEDAVAEEEIVAVEEIPAAIEE

SEQ ID NO: 18269 - protein, 568 aa, Rhodobacter sphaeroides
MKRITDCMCAKATMEEFEALLNESLQIDTPQEGSVVKGKVIAVEAGQAIIDVGYKMEGRVDLKEFADMSGSVDISVGDEVEVYLDRVENARGEAVISRDKAKREEAWDRLEKAYANETRVEGAIFGRVKGGFTVDLGGAVAFLPGSQVDVRPVRDAGPLMGMKQPFQILKMDRRRGNIVVSRRAILEESRAEQRAEVISNLFEGQTVDGVVKNITEYGAFVDLGGVDGLLHVTDMAWRRVNHPSEILSIGETVKVQVIKINKETHRISLGMKQLQSDPWDAVEKAYPIGSVHKGRVTNITDYGAFVELEAGVEGLVHVSEMSWTKKNVHPGKIVSTSQEVDVMVLEIDSAKRRVSLGLKQTMRNPWEVFAETHPVGTPIEGEVKNITEFGLFVGLEHDIDGMVHLSDLSWDQRGEEAIQNYRKGDVVKAVVTEVDTDKERISLSIKALGDDTFSEAIEGVKRGSVITVTVTAIEDGGIEVEYNSMKSFIRRSDLSRDRADQRPERFQVGDKVDVRVTNVDAKTRRLGLSIKAREIAEEKEAVEQYGSSDSGASLGDILGAALRNSDRG

SEQ ID NO: 18270 - protein, 561 aa, Rhodobacter sphaeroides
MCAKATMEEFEALLNESLQIDTPQEGSVVKGKVIAVEAGQAIIDVGYKMEGRVDLKEFADMSGSVDISVGDEVEVYLDRVENARGEAVISRDKAKREEAWDRLEKAYANETRVEGAIFGRVKGGFTVDLGGAVAFLPGSQVDVRPVRDAGPLMGMKQPFQILKMDRRRGNIVVSRRAILEESRAEQRAEVISNLFEGQTVDGVVKNITEYGAFVDLGGVDGLLHVTDMAWRRVNHPSEILSIGETVKVQVIKINKETHRISLGMKQLQSDPWDAVEKAYPIGSVHKGRVTNITDYGAFVELEAGVEGLVHVSEMSWTKKNVHPGKIVSTSQEVDVMVLEIDSAKRRVSLGLKQTMRNPWEVFAETHPVGTPIEGEVKNITEFGLFVGLEHDIDGMVHLSDLSWDQRGEEAIQNYRKGDVVKAVVTEVDTDKERISLSIKALGDDTFSEAIEGVKRGSVITVTVTAIEDGGIEVEYNSMKSFIRRSDLSRDRADQRPERFQVGDKVDVRVTNVDAKTRRLGLSIKAREIAEEKEAVEQYGSSDSGASLGDILGAALRNSDRG

SEQ ID NO: 18271 - protein, 584 aa, Rhodopseudomonas palustris
MRARRPSTELPATSASGEQMASTDTYNPTRDDFAAMLDESFAGGNLQESSVIKGKVVAIEKDMAVIDVGLKTEGRVPLREFAGPGRDNEIKVGDTVEVFLDRIENALGEAVLSRDKARREESWGKLEKAFQNNEKVFGVIFNQVKGGFTVDLDGAVAFLPRSQVDIRPIRDVAPLMNNSQPFQILKMDRRRGNIVVSRRTVLEETRAEQRQELVQNLEEGQVIDGVVKNITDYGAFVDLGGIDGLLHVTDIAWRRVNHPTEVLTIGQTVKVKIIKINHETHRISLGMKQLLDDPWQGIEAKYPLNARFTGRVTNITDYGAFVELEPGIEGLIHVSEMSWTKKNMHPGKIVSTSQEVEVQVLEVDSVKRRISLGLKQTMRNPWEVFVEKHPVGSTVEGEVKNKTEFGLFLGLDGDVDGMVHLSDLDWKLPGEQVIDNFKKGDMVKAVVLDVDVEKERISLGVKQLEGDPFAEPGDVKKGAVVTCEVLDVKESGIDVQIVGTDFNTFIKRSELARDRNDQRSDRFAVGEKVDARVIQFDKKARKVQVSIKALEVAEEKEAIAQYGSSDSGATLGDILGTALKQRDK

SEQ ID NO: 18272 - protein, 558 aa, Buchnera aphidicola str. APS (Acyrthosiphon pisum)
MNESFAQLFEESLKEIKTRPGSIIRGTIVSIEKDMVLVDAGLKSESAIPVEQFQNSQGLLDIQVGDQIDVALDAIEDGFGETLLSREKAKRHEAWLILEKAHEKSETVIGIINGKVKGGFTVELNDIRAFLPGSLVDVRPVRDTIHLEGKELEFKVIKLDQKRNNVVVSRRAVIESENSAERDQLLENLQEGMHVKGIVKNLTDYGAFVDLGGVDGLLHITDMAWKRVKHPSEIVNVGDEINIKILKFDRERTRVSLGLKQLGEDPWIAISKRYPEETKLSGRVTNLTDYGCFVEIEEGVEGLVHVSEMDWTNKNIHPSKVVTVNDVVEVMVLDIDEERRRISLGLKQCKINPWKEFSETHKKGVHVLGKIKSITDFGIFIGLNGGIDGLVHLSDISWTIPGEEAVVKYKKNDEISAVVLQVDAERERISLGIKQLEEDPFNTYIANHKKGAIITGIIKSLDKKNIIVKLPENLEGVIKLTEITRVYSETMINKLKIEDKILVKLSSFDRKNRIIYLTIHMIDEDEKKDLTAPSNNKTNDDSFSNVMTEAFKAAKNTE

SEQ ID NO: 18273 - protein, 573 aa, Rhodospirillum rubrum
MADSAQDLAFTAENFESLLNEQLGESGGLEGSVLTGTVIGVSGDFAVVDVGLKSEGRVPLKEFSRGGDDAEIKIGDTVDVFVERYEDKDGLIVLSRDKARREEAWNELEKAFNDNQRVRGLIHSRVKGGFTVDLSGAIAFLPGSQVDIRPVRDIGPLLGQPQVFQILKMDRARGNIVVSRRAVLEETRAEERSKLMETLREGEILEGVVKNITDYGAFVDLGGVDGLLHVTDISWKRINHPTEALSIGQTVKVQVIRFNAETQRISLGMKQLEADPWEGVAAKYPVGTKFVGRVTNITDYGAFVELEPGVEGLVHVSEMSWTKKNVHPGKIVSTSQEVEVMILDVDPDKRRISLGLKQTMANPWSEFLEGHPIGTEVEGEIKNITEFGLFIGLTGDIDGMIHLSDLDWNRSGDEAVKDYKKGDVVQAKVLDVDVEKERISLGVKQLGEDPYREATADLRKNQIVTCVITMVQENGIEVDVNGAIGFIRKSDLARERADQRPERFAVGEKVDAKVINMDKSNRRMTLSIKAREMDEEKQAMAEYGSADSGASLGDILGAALKQAQEKARTGDDE

SEQ ID NO: 18274 - protein, 399 aa, Chloroflexus aurantiacus
MEELNHAGNNTNEDIRQPDLNDLLDRGDQALMEQILRDPTHAYRNLKHGDTVDGRIMQINRDEILVDIGAKAEGVIPSREMQTLSEEDRAALKVGDTILVFVVQSEDKEGRAILSIDKARQEKSWRALQECYERGDIIYARVKNYNKGGLLVDLDGVRGFVPASQVSSISRVSETQKQSEMARLVNVELPLKVIEINRNRNRLILSERQALVETRESKKDELLTSLREGDVRDGVVSSVCDFGVFVDIGGADGLVHLSEISWSRVKHPGEVLKVGDKVKVAILNIDHERKRIALSIKRTQSEPWTRVAERYQLGQIVEGTITQLASFGAFARIEDGVEGLIHISEMGDERIQHPREVLSEGQVVQARIIRIDPARKRMGLSLRLHAEPTESSEKEENPD

SEQ ID NO: 18275 - protein, 359 aa, Chloroflexus aurantiacus
GVLREGLIMHIEESGVLVSIGTKREGIIPAQDLRQMGEDFINSLKVGDTVQVYVQEPENRDGDLILSLSMVQVAKDWEVAEQLFHDGGITRCKVIGFNKGGLLVQFNRIRGFVPSSQVAQLHGRTAADERQQALQKMVNQEIPLKVIEVDRERNRLVLSERAATQEWRKAQKHRLLTELQPGDVLVGRVNQLTNFGAFIDLGGADGLAHISELSWQRVNHPREVLQPGQEVKVVVVEIDRERERIGLSIRQLQNNPWETIDQRYTLGQLVTGPVTNVTPFGAFVQVEEAVEGLIHASELDADPQAQPRDILQPGQIVTARVISLDRQRQRMGLSLRRIGENENEPAPAPADEADQPAQA

SEQ ID NO: 18276 - protein, 554 aa, Chloroflexus aurantiacus
MTDLDDYEGDPYRDRDRLSELLTDQLEELARAIHSPDQLARARAASRLVTLDVDPELALPALHHRRAMVREVAAEAIGYSSKPLSPTVIDALLSAIDDPKPFVAAAAIRTLGRRQVALAHAQIAACLDDPEPPIVAAAITALARLGDHTLTVTLPEFLNRQHLIIRIAAAEAAGILRSVNAVPGLLRLLEDCIDAWHERQQHIPSRAASVAMQALARLQARAAIPLLVEIARYVVGLRTLAVRTLIQLQAIEAAPALLPLLNEEGRHLLNEVIRFFHMTGYRAAAPELRAFLERAVVRHRPLIKKVLNILVEWQDKEALPIISNLATNDQSAEVRAYAAQCAVLLQSQSASPASSFNNGIVPETVLSETYNERIRQRRQRLAGLTIGQIVNGSVLRVLRYGAVIELGGIEGFVHVGEIDWRWIGDARHALHPGQEIQAVITGIDEQRLRANLSMRRVHPDPWLAVAQQLNAGMQVQGTVAGITDFGIFIELLPGVQGLAHISQIPPDQQPLKQAFSLGRRVQTTILSIDHERRRIALSLYTKLQQKPCSVNAAR

SEQ ID NO: 18277 - protein, 580 aa, Chlamydophila pneumoniae CWL029
MPKQAEYTWGSKKILDNIECLTEDVAEFKDLLYTAHRITSSEEESDNEIQPGAILKGTVVDINKDFVVVDVGLKSEGVIPMSEFIDSSEGLVLGAEVEVYLDQAEDEEGKVVLSREKATRQRQWEYILAHCEEGSIVKGQITRKVKGGLIVDIGMEAFLPGSQIDNKKIKNLDDYVGKVCEFKILKINVERRNIVVSRRELLEAERISKKAELIEQISIGEYRKGVVKNITDFGVFLDLDGIDGLLHITDMTWKRIRHPSEMVELNQELEVIILSVDKEKGRVALGLKQKEHNPWEDIEKKYPPGKRVLGKIVKLLPYGAFIEIEEGIEGLIHISEMSWVKNIVDPSEVVNKGDEVEAIVLSIQKDEGKISLGLKQTERNPWDNIEEKYPIGLHVNAEIKNLTNYGAFVELEPGIEGLIHISDMSWIKKVSHPSELFKKGNSVEAVILSVDKESKKITLGVKQLSSNPWNEIEAMFPAGTVISGVVTKITAFGAFVELQNGIEGLIHVSELSDKPFAKIEDIISIGENVSAKVIKLDPDHKKVSLSVKEYLADNAYDQDSRTELDFKDSQGPKERKKKGK

SEQ ID NO: 18278 - protein, 367 aa, Thermoanaerobacter tengcongensis
MRMNDFLEGYVFRPIKAGDIVKGKVVKVLEDGVVADIGYKGEAFVPKEELSLNPEFDVLSNFHEGEELDLYIVMVENEEGSVVASKIKAEEKLGEEKIEKAYKNREIVKGEVVKVVKGGVIAYSLGKRLFIPASHLSTKRVENLEEYLGKILELLIIEYVPGKKIIASRKEVIKLEEEKMKAELLERLEEGDVIEGKVSRIIPKGAFVNLGGMDGFIPISELGHGRIKSPEEVIKPGHKVSAYVLKVDKKEGKITLSLKKLLPNPWENVKEKYHEGDILKAKITRIMPFGVFAELEPGVEGLVHKNNLEKSIKSYSPEDIITVEVLEVSSDRISLKEVPPFEGEDDIKQTEYQELTINLGEILKKKF

SEQ ID NO: 18279 - protein, 564 aa, Ralstonia metallidurans
MSDLQTNESFAALFEESIARSNMKAGEVISAEVVRIDHNFVVVNAGLKSEAFVPVEEFLNDQGELEVQAGDYVSVAIDALENGYGDTILSRDKAKRLASWLNLEKALEDGEIISGTVTGKVKGGLTVMVNGIRAFLPGSLVDVRPIKDTTPYEGKTLEFKVIKLDRKRNNVVLSRRAVVEATLGEERQKLMETLKEGAIVNGIVKNITDYGAFVDLGGIDGLLHITDLAWRRVRHPSEVLSVGQEITAKILKFDQEKNRVSLGVKQLGEDPWVGISRRYPQGTRLFGKVTNLTDYGAFVEIEAGIEGLVHVSEMDWTNKNVAPSKVVQLGDEVEVMVLDIDEDKRRISLGMKQCKANPWDDFSRNHKKGDKLTGQIKSITDFGVFIGLPGGIDGLVHLSDLSWQESGEEAVRKYKKGDEVEAVVLGIDVDKERISLGIKQLSGDPFNNFISANDKGSLVNGTIKAVDAKGAVVQLADDVEGYLRASEISADRVEDARNVLKEGEQITALVVNVDRKSRNINLSIKAKDSAEQQEAMQKFQADTGTAGTTNLGALLKAKLGQDNQ

SEQ ID NO: 18280 - protein, 561 aa, Neisseria meningitidis MC58
MSMENFAQLLEESFTLQEMNPGEVITAEVVAIDQNFVTVNAGLKSESLIDVAEFKNAQGEIEVKVGDFVTVTIESVENGFGETKLSREKAKRAADWIALEEAMENGDILSGIINGKVKGGLTVMISSIRAFLPGSLVDVRPVKDTSHFEGKEIEFKVIKLDKKRNNVVVSRRAVLEATLGEERKALLENLQEGSVIKGIVKNITDYGAFVDLGGIDGLLHITDLAWRRVKHPSEVLEVGQEVEAKVLKFDQEKQRVSLGMKQLGEDPWSGLTRRYPQGTRLFGKVSNLTDYGAFVEIEQGIEGLVHVSEMDWTNKNVHPSKVVQLGDEVEVMILEIDEGRRRISLGMKQCQANPWEEFAANHNKGDKISGAVKSITDFGVFVGLPGGIDGLVHLSDLSWTESGEEAVRKYKKGEEVEAVVLAIDVEKERISLGIKQLEGDPFGNFISVNDKGSLVKGSVKSVDAKGAVIALSDEVEGYLPASEFAADRVEDLTTKLKEGDEVEAVIVTVDRKNRSIKLSVKAKDAKESREALNSVNAAANANAGTTSLGDLLKAKLSGEQE

SEQ ID NO: 18281 - protein, 561 aa, Neisseria meningitidis Z2491
MSMENFAQLLEESFTLQEMNPGEVITAEVVAIDQNFVTVNAGLKSESLIDVAEFKNAQGEIEVKVGDFVTVTIESVENGFGETKLSREKAKRAADWIALEEAMENGNILSGIINGKVKGGLTVMISSIRAFLPGSLVDVRPVKDTSHFEGKEIEFKVIKLDKKRNNVVVSRRAVLEATLGEERKALLENLQEGSVIKGIVKNITDYGAFVDLGGIDGLLHITDLAWRRVKHPSEVLEVGQEVEAKVLKFDQEKQRVSLGMKQLGEDPWSGLTRRYPQDTRLFGKVSNLTDYGAFVEIEQGIEGLVHVSEMDWTNKNVHPSKVVQLGDEVEVMILEIDEGRRRISLGMKQCQANPWEEFAANHNKGDKISGAVKSITDFGVFVGLPGGIDGLVHLSDLSWTESGEEAVRKYKKGEEVEAVVLAIDVEKERISLGIKQLEGDPFGNFISVNDKGSLVKGSVKSVDAKGAVIALSDEVEGYLPASEFAADRVEDLTTKLKEGDEVEAVIVTVDRKNRSIKLSVKAKDAKESREALNSVNAAANANAGTTSLGDLLKAKLSGEQE

SEQ ID NO: 18282 - protein, 429 aa, Leuconostoc lactis
MAHALKRILYATWYPDILVNYTHSVNCRRTLDVMSETNNEFLAALESAADQIKVGDVVTGELLAIDNDNQAVVGLSTGEEGVVPAREYSDDRNINLADELKIGDTIEAVVISNVTSDKEGVAYLLSKKRLDARKAWENLSFAEGDTVDAKVINAVRGGLIVDVNGVRGFVPASMVAERFVSDLNQFKNKDIKAQVIEIDPANARLILSRKAVAAQELAAQLAEVFSKLSVGEVVEGTVARLTDFGAFVDLGGVDGLVHVSEISHDRVKNPADVLTKGDKVDVKILALDTEKGRISLSIKATQRGPWDEAADQIAAGSVLEGTVKRVKDFGAFVEILPGIEGLVHVSQISNKRIENPSEVLKSGDKVQVKVLDIKPAEERISLSMKALEEKPEREDRRGNDGSASRADIAAYKQQDDSAATLGDIFGDKL

SEQ ID NO: 18283 - protein, 629 aa, Deinococcus radiodurans
MQHRYQARPGAFQREGFRPGGQEFMEDNTQTPAVNGGTQPTTGDTSTQQAEGTQLDQETQSHQGALNAQTEQAQTEVSQGEQARQQEQAAKTQAQEERDYPEMTMEDILAAEAQEPQSVTRGDIVDGTVVFIGQEGIAVDIGAKVEGVIPLNQLGEEPVTLEQAQEMYKPGDAIEAYVVRVDLPNSQIVLSKKRAEQDKGWRVLERMQEADEAFEVEVLEKVRGGLVAQVEGIRAFLPASQVDTRRVNDLDPYVGKPLMVKLIELNRKRNRVIISHRAIMEAEKAKAREATVGQLEPGAVFEGEVVEITDFGVFVNLGGIDGLVHRSELTYGRFNHPRDVVKVGDKVQVQVIDVDEGRERINLSMKALTQDPWEGATERYHIGQRVKGKVTNLTNFGAFIELEPGLEGLVHVSEMSWTKRVRHPNEVMKEGDEVEAVILRIDPRERRISLGIRQTTDDPWSALPDRYPPGTPVKGKITGMTDFGVFMEIEEGIEGLIHISELDTQRVNNPADLFKKGDEIEAVILNIDPVEQRASLSRRRFLGGGPVPQRGEGGQRDYVSQGGGSRRDSTFGGGQRGGRGGRGGADYAYNAKDAQQGGKISTKLGDVYADLFAQFGLGNDKKDEGSSEE

SEQ ID NO: 18284 - protein, 577 aa, Burkholderia fungorum
MQILIFMSDLQTSTPNTESFAALFEESLTKQDMRAGEVISAEVVRVDHNFVVVNAGLKSEAYIPLEEFLNDAGEVEVQAGDFVSVAIDALENGYGDTILSRDKAKRLASWLSLEKALDNNELVTGTITGKVKGGMTVMVNGIRAFLPGSLVDTRPVKDTTPYEGKTLEFRVIKLDRKRNNVVLSRRAVIEATQGEERAKLLETLKEGAIVEGVVKNITDYGAFVDLGGIDGLLHITDIAWRRVRHPSEVLSVGQEVTAKILKFDQEKNRVSLGIKQLGDDPWEGISRRYPSGTRLFGKVTNITDYGAFVEVESGIEGLVHVSEMDWTNKNVAPSKVVQLGDEVEVMVLEIDEDRRRISLGMKQCKPNPWDDFSRNFKKGDKLQGAIKSITDFGVFIGLPGGIDGLVHLSDLSWSETGEEAVRKYKKGDEVEAIVLGIDVEKERISLGIKQLEGDPFSNFVAMNDKGSIVDGVVKTVDAKGAVVQLSAEVEGYLRASEIAQDRVEDARNVLKDGDKVNAMIINIDRKSRGINLSIKAKDSAEQQEAIRGLASSDSSSAATGTTNLGALLKAKLDGQNQ

SEQ ID NO: 18285 - protein, 408 aa, Lactococcus lactis subsp. lactis
MNEFETLLNSVEDVKVRDVVKGEILSVENGQATVAIVGTGVEGVLTLREITNDKDADINTFVKPGDVLDLLVIKQIVGKEAEGANVYLLSLKRLEARKAWTQLEGKEGEIVTVKVTKDVKGGLSVDYNGVRGFIPASMIDTYFVKDTKKFVGEEIEAKIIEVNASENRFILSRRAVVEAEAIEMRKEAFAQLQEGDIVEGTVSRVTNFGAFVDLGGIDGLVHVSELSHSRIKRPSDAVKPGDVVNVKILKLDPEAGRLSLSLKATQPGPWEQVEEKAPVGSTVEGTVKRLTDFGAFVELYPGVEGLVHVSQISWERVENPKDVLKVGQVVNVKVLDVKPAEERISLSIKALEEAPARPARNNDNDGEKRDRKPRAPRKAAKPSYDLPETQEGFSLADFLGEDFDINDL

SEQ ID NO: 18286 - protein, 382 aa, Bacillus cereus
MVEKMNEEVMDSKELQVGDVVTGSVTKVEEKQVLVNVGYKTDGVIPISELANVHIEKASDVVELDQILELKIIKLEENDLVLSKRAVDAEKAWIELQEKFTSGHVFDVTVKDIVNGGLVVDLGVRGFIPASLVEVHYVEDFTDYKGKTLAVKIVELDREKNRVILSHKAVVELELDSKKKEAISSLKEGDVVEGTVQRLTDFGAFVNVGGVDGLVHISQISHERVEQPSEVLEQGQKVKVKVLSVDADTQRISLSIKAAQPGPWENIAGEVKAGDIREGIVKRLVTFGAFVEILPGVEGLVHVSQIANRHVKNPNEVLEMGQEVKVKVLEVHVAEKRISLSIKEAFEENNVTEDYSQYEPNADSATFQLSDIIGEQLKKLKK

SEQ ID NO: 18287 - protein, 642 aa, Clostridium acetobutylicum
MRKVMLAEKAGFCFGVKRAVDMALLTQKEYNKKIYTLGELIHNNDVVDKLKDNNVYPIGIEDIDNLKENDVILIRSHGISEEIYKILLSKGLTVINATCPFVTKIQEKVKKYNELGYDIVIVGDKYHPEVIGINGWCDNKAIISKQGENLENITSESKVCIVSQTTEKLENWEKVLKEVKNRAIEVISFNTICNATSERQKIAKDLSNKVDFMVVIGGKQSSNTTKLYEICKSNCNETIHVENSGEIPENILKNKNCVIGVTAGASTPDWIIEEAISKMSENQISNETNNEMADAMKFIAENEGKIYVGASVTGEIIQVSEKEVFLNINYKRDGVIPKSEIDDDGKDLKELFTVGDKIVAKIIKLKDADNYVVLSVKELQREQGYKEIKEAFENKTTLNVVVKEDVKGGIIASYKGIRIFIPASHVELFHVDNLKEYIGKSFDVAIIEYSTKKRQTKIVASRRALLSKEKEKVEETVWNKLEEGQVVEGEVKRLTDFGAFVEIEGVDGLLHVSEISWGRVEKPADVLKIGDKIKVYVLSVDKENKKLSLSVKKLTENPWNNVEEKYPVGSVVLGKVIRFADFGAFVKLEPGVDGLVHISEISHKRIAKPSDALNVGEEIKAKILEVSSEEKKIGLSIREVEE

SEQ ID NO: 18288 - protein, 557 aa, Escherichia coli O157:H7 EDL933
MTESFAQLFEESLKEIETRPGSIVRGVVVAIDKDVVLVDAGLKSESAIPAEQFKNAQGELEIQVGDEVDVALDAVEDGFGETLLSREKAKRHEAWITLEKAYEDAETVTGVINGKVKGGFTVELNGIRAFLPGSLVDVRPVRDTLHLEGKELEFKVIKLDQKRNNVVVSRRAVIESENSAERDQLLENLQEGMEVKGIVKNLTDYGAFVDLGGVDGLLHITDMAWKRVKHPSEIVNVGDEITVKVLKFDRERTRVSLGLKQLGEDPWVAIAKRYPEGTKLTGRVTNLTDYGCFVEIEEGVEGLVHVSEMDWTNKNIHPSKVVNVGDVVEVMVLDIDEERRRISLGLKQCKANPWQQFAETHNKGDRVEGKIKSITDFGIFIGLDGGIDGLVHLSDISWNVAGEEAVREYKKGDEIAAVVLQVDAERERISLGVKQLAEDPFNNWVALNKKGAIVTGKVTAVDAKGATVELADGVEGYLRASEASRDRVEDATLVLSVGDEVEAKFTGVDRKNRAISLSVRAKDEADEKDAIATVNKQEDANFSNNAMAEAFKAAKGE

SEQ ID NO: 18289 - protein, 565 aa, Xylella fastidiosa Dixon
MFNRVNQMTESFAELFEASQANLAKLKPGAIVTGTVVDVRGDVVVINAGLKSEGIVPIEQFRNDAGEIDVGVGDQVKVALDAIENGFGETILSREKAKRSMVWDELEEALEKNETISGRINGKVKGGFTVDIKDVRAFLPASLVDVRPVRDPAYLEGKELEFKLIKLDRKRNNVVVSRRAVVESEHSEEREQLLDKLQEGAVLTGTVKNMTDYGAFVDLGGVDGLLHITDMAWKRVRHPCEVVNIGDEVEVRVLKFDRERNRVSLGLKQLGEDPWDNISRRYPANCRVFGKVSNVTDYGAFVEIEAGVEGLVHVSEMDWTNKNVNPSKVVQVGDEVEVMILDVDEERRRISLGMKQVAANPWETFALTHKKGDKVSGQVKSITDFGIFIGLDGGIDGLLHLSDISWNTTGEDIVRNFKKGDTLETVVLAVDPERERISLGVKQLEQDPFGQYMATHPKGSKVIGTVKEVDAKGALIELDEGIEGYVSARDIANERVDDATQYLKVGDSVEAKFIGMDRKGRTLQLSIKAKDDAEMREVLEEYQSSSGGTTKLGTLLREQLGNKPE

SEQ ID NO: 18290 - protein, 570 aa, Magnetococcus sp. MC-1
MTDDLILDDIADEDFEALLEESFSKGVGREGSVVTGTIIQREGDEFIIDVGLKSEGRLTIREFYDADGQLTIGVGDSVDVFVERCEDQNGLAVLSREKAKREEAWVLLEEAFNDGKTVDGRIMGKVKGGYTVDLGGLAAFLPGSQVDVRPVHDISRLQEETQPFDILKMDRRRGNIVVSRRTVIEKHRENARSALLETLHEGMVLDGIVKNITDYGAFVDLGGLDGLLHITDMSWKRVKHPSAVVNVGDTVTVQVIKFNSDTQRISLGMKQLLIDPWEGIGAKYPAGAKFSGHVTNITDYGSFVELEPGVEGLAHVSELTWTKKNIHPSKILEVNQIVEVMVLDVDADRRRISLGIKQCQENPWEAFATSHPVGAMVKGEIKNITEFGLFVGLEGDIDGLVHLSDITWDTNAGEEVLKDFQKGQEVEAMVLSLDPDKERISLGLKQAQPDAWGQWVDANPKGNVVMGKVKEVLSSGVLVQLADEVDGHIRKAEFSQDDREGTNLTLETEVECRVMQVDRQKRKISLSIKAMEVQQERDAIKEYASDSSSAATSSLGEALSQALEKANAAE

SEQ ID NO: 18291 - protein, 391 aa, Staphylococcus aureus subsp. aureus Mu50
MTEEFNESMINDIKEGDKVTGEVQQVEDKQVVVHINGGKFNGIIPISQLSTHHIDSPSEVVKEGDEVEAYVTKVEFDEENETGAYILSRRQLETEKSYSYLQEKLDNNEIIEAKVTEVVKGGLVVDVGQRGFVPASLISTDFIEDFSVFDGQTIRIKVEELDPENNRVILSRKAVEQEENDAKKDQLLQSLNEGDVIHGKVARLTQFGAFIDIGGVDGLVHVSELSHEHVQTPEEVVSIGQDVKVKIKSIDRDTERISLSIKDTLPTPFENIKGQFHENDVIEGVVVRLANFGAFVEIAPGVQGLVHISEIAHKHIGTPGEVLEPGQQVNVKILGIDEENERVSLSIKATLPNEDVVESDPSTTKAYLENEEEDNPTIGDMIGDKLKNLKL

SEQ ID NO: 18292 - protein, 863 aa, Treponema pallidum
MHGGGERERSFVHPRTRCVAVRARTVLQCRPMGTVIIALDGPAGSGKSSVCRLLASRLGAQCLNTGSFYRAFTLAALRRVSELAVQACSPSPDPDAAVGCAAVPHATNLDTSYAPLTAQKKVALFDEAYWVSFARTVALSYRAGVMYVGEENVESLLRSDEVESAVSYFAAMPAIRAIMTGKIRSAVCGARVVCEGRDLTTVVFVDADLKCYLDASIEARVARRWAQGTSRLSKQELEQRMRARDAHDRARTVGGLRCAPDALYVDTSCLTIEEVCERIAREAHRRALWGGERSVENQEGKGTPLVPRQLQERYSFEAPEPGSVRMGTVVQVNAGTVFVDIGGKSEGRVPVEEFEAPPKAGDGVRVYVERVTPYGPELSKTKADRLGLKVKLRDAERDGTPVEGRIVRLTEKKSGFEVDLGAGMMAFLPISQSDCQKVDAPESLIGLTSKFYIERISQSKQHRGNDNIVINRRRYLEERARQAREEFFNSVHIEDSVSGVVKSFTSFGAFIDLGGFDGLLHVNDMSWGHVARPREFVKKGQTIELKVIRLDQAEKRINLSLKHFQPDPWLEFENKFGVNDVVKGRVTKIADFGAFIELAEGIEGLAHISEFSWVKKTSKPSDMVKIGDEVECMILGYDIQAGRVSLGLKQVTANPWEEIEARYPVGARFTRRIVKVTNAGAFIEMEEGIDGFLHVDDLSWVKRTRPADHELEVGKEIECMVIECDPQARRIRLGVKQLSDNPWQVFANAYGVGSTVEGEVSSVTDFGIFVRVPGGVEGLVRKQHLVENRDGDPGEALRKYAVGDRVKAVIVDMNVKDRKVAFSVRDYQRKVQRDELSRYMSAPRGEDEGSFTLGDLMRQTSGK

SEQ ID NO: 18293 - protein, 576 aa, Pseudomonas putida KT2440
MSGMWLWASVSPESTGIKMSESFAELFEESLKTLNLQPGAIITGIVVDIDGDWVTVHAGLKSEGVIPLEQFYNEAGELTIKVGDEVHVALDAVEDGFGETKLSREKAKRAECWIVLEAAFAAEEVVKGVINGKVKGGFTVDVNGIRAFLPGSLVDVRPVRDTTHLEGKELEFKVIKLDQKRNNVVVSRRSVLEAENSAEREALLETLQEGQQVKGIVKNLTDYGAFVDLGGIDGLLHITDMAWKRIKHPSEIVNVGDEVDVRVLKFDRERNRVSLGLKQMGEDPWVAITARYPEGTRVQARVTNLTDYGCFAELEEGVEGLVHVSEMDWTNKNIHPSKVVQVGDEVEVMVLDIDEERRRISLGIKQCKSNPWEDFSGQFNKGDKITGTIKSITDFGIFIGLDGGIDGLVHLSDISWNETGEEAVRRFKKGDELETVILSVDPERERISLGIKQLEDDPFSNFVAVNDKGAIVKGIVKEVDAKGAIVTLADDIEATLKASEISRDRVEDARNVLKEGEEIEAKIISVDRKSRVISLSIKSKDDAEEREAIQSLKNAPEAAADTTMAALLREAMAKQN

SEQ ID NO: 18294 - protein, 401 aa, Streptococcus pyogenes M1 GAS
MNEFEDLLNSVSEVNPGDVVTAEVLTVDNGQANVVIEGTGVEGVLTLRELTNDRDADINDFVKAGDTVEVLVLRQVVGKDTDTVTFLVSKKRLEARKAWDKLVGREGEVVTVKGTRAVKGGLSVEFEGLRGFIPASMIDTRFVRNTEKFVGQEFDAKIKEVDAAENRFILSRREVIEEAAKEARAEVFSKISEGAVVTGTVARLTSFGAFIDLGGVDGLVHVTELSHERNVSPKSVVSVGEEVEVKVLSIDEEAGRVSLSLKATTPGPWDGVEQKLAQGDVVEGKVKRLTDFGAFVEVLPGIDGLVHISQISHKRVENPKDVLSVGQEVTVKVLEVNAADERVSLSIKALEERPAQAEGDNKEEKRQSRPRRPKRESRRDYELPETQTGFSMADLFGDIEL

SEQ ID NO: 18295 - protein, 569 aa, Xylella fastidiosa 9a5c
MAVLVFNRVNQMTESFAELFEASQANLAKLKPGAIVTGTVVDVRGDVVVINAGLKSEGIVPIEQFRNDAGEIDVGVGDQVKVALDAIENGFGETILSREKAKRSMVWDELEEALEKNETISGRINGKVKGGFTVDIKDVRAFLPASLVDVRPVRDPAYLEGKELEFKLIKLDRKRNNVVVSRRAVVESEHSEEREQLLDKLQEGAVLTGTVKNMTDYGAFVDLGGVDGLLHITDMAWKRVRHPCEVVNIGDEVEVRVLKFDRERNRVSLGLKQLGEDPWDNISRRYPANCRVFGKVSNVTDYGAFVEIEAGVEGLVHVSEMDWTNKNVNPSKVVQVGDEVEVMILDVDEERRRISLGMKQVAANPWETFALTHKKGDKVSGQVKSITDFGIFIGLDGGIDGLLHLSDISWNTTGEDIVRNFKKGDTLETVVLAVDPERERISLGVKQLEQDPFGQYMATHPKGSKVIGTVKEVDAKGALIELDEGIEGYVSARDIANERVDDATQYLKVGDSVEAKFIGMDRKGRTLQLSIKAKDDAEMREVLEEYQSSSGGTTKLGTLLREQLGNKPE

SEQ ID NO: 18296 - protein, 381 aa, Listeria innocua
MSEDLFDVEVRNFEEGDKVTGTVTSVEDKQVYVGIPDSKLDGVVPISELSNIHVETASDVVSVGDTLDLIVTKVEDDVLVLSKRKVDAEKASDDIKAKFESGEVFEAVVSDVVKGGLVVDLGVRAFVPASLVEDHFVEDFADYKGTTLTFKVVEFEPENNRVILSHRAVVENEKANQKQALLNEIKEGDVIEGTVQRLANFGAFVDIGGVDGLVHISQISYKHIATPQEALEEGQKVKVKVIGIDPENERISLSIKATLPGPWDGISEKAPVGSVLEGKVVRLVTFGAFVEIFPGVEGLVHISQISHEHIGTPQEVLSEGQTVEVKVLEVNEDDKRLSLSIKDLQDAPVEEADYELPEESTGFQMSDLIGDKLKGLQNDDK

SEQ ID NO: 18297 - protein, 489 aa, Corynebacterium ammoniagenes
MPTSNTPQVAINDIGTAEDFLAAVDATIKYFNDGDIVEGTVVKVDHDEVLLDIGYKTEGVIPSRELSIKHDVDPDEVVEVGDQIDALVLTKEDKEGRLILSKKRAQYERAWGAIEELQAKEEPVTGTVIEVVKGGLIIDIGLRGFLPASLVEMRRVRDLEPYIGQELEAKIIELDKQRNNVVLSRRAFLEQTQSEVRSEFLHQLQKGQVRKGVVSSIVNFGAFVDLGGVDGLVHVSELSWKHIDHPSEVVTVGDEVTVEVLDVDLDRERVSLSLKATQEDPWRVFARTHAVGQIVPGKVTKLVPFGAFVRVEEGIEGLVHISELAQRHVEVPDQVVNVGEDVMVKVIDIDLERRRISLSVKQADEDYTEEFDPSKYGMADSYDEQGNYVFPEGFDSETNEWKEGFDEQRQAWEARYAESERRFQLHTAQIERHRAAAAEAAETEAASANYSSESNDAAPASEAPAESAGSLASDEQLAALREKLAGGEN

SEQ ID NO: 18298 - protein, 381 aa, Listeria monocytogenes EGD-e
MSEDLFDVEVRNFEEGDKVTGTVTSVEDKQVYVGIPGSKLDGVVPISELSNIHVETASDVVSVGDTLDLIVTKVEDDILVLSKRKVDAEKASDDIKAKFESGEVFEAVVSDVVKGGLVVDLGVRAFVPASLVEDHFVEDFADYKGTTLTFKVVEFEPENNRVILSHRAVVETEKASQKQALLSEIKEGDVIEGTVQRLANFGAFVDIGGVDGLVHISQISYKHIATPQEVLEEGQKVTVKVIGIDPENERISLSIKATLPGPWDGITEKAQVGSVLEGKVVRLVTFGAFVEIFPGVEGLVHISQISHEHIGTPQEVLSEGQTVEVKVLEVNEADKRLSLSIKELQDAPVEEADYELPEENTGFQMSDLIGDKLKGLQNDDK

SEQ ID NO: 18299 - protein, 400 aa, Streptococcus pneumoniae TIGR4
MNEFEDLLNSVSQVETGDVVSAEVLTVDATQANVAISGTGVEGVLTLRELTNDRDADINDFVKVGEVLDVLVLRQVVGKDTDTVTYLVSKKRLEARKAWDKLVGREEEVVTVKGTRAVKGGLSVEFEGVRGFIPASMLDTRFVRNAERFVGQEFDTKIKEVNAKENRFILSRREVVEAATAAARAEVFGKLAVGDVVTGKVARITSFGAFVDLGGVDGLVHLTELSHERNVSPKSVVTVGEEIEVKILDLNEEEGRVSLSLKATVPGPWDGVEQKLAKGDVVEGTVKRLTDFGAFVEVLPGIDGLVHVSQISHKRIENPKEALKVGQEVQVKVLEVNADAERVSLSIKALEERPAQEEGQKEEKRAARPRRPRRQEKRDFELPETQTGFSMADLFGDIEL

SEQ ID NO: 18300 - protein, 400 aa, Streptococcus pneumoniae R6
MNEFEDLLNSVSQVETGDVVSAEVLTVDATQANVAISGTGVEGVLTLRELTNDRDADINDFVKVGEVLDVLVLRQVVGKDTDTVTYLVSKKRLEARKAWDKLVGREEEVVTVKGTRAVKGGLSVEFEGVRGFIPASMLDTRFVRNAERFVGQEFDTKIKEVNAKENRFILSRREVVEAATAAARAEVFGKLAVGDVVTGKVARITSFGAFIDLGGVDGLVHLTELSHERNVSPKSVVTVGEEIEVKILDLNEEEGRVSLSLKATVPGPWDGVEQKLAKGDVVEGTVKRLTDFGAFVEVLPGIDGLVHVSQISHKRIENPKEALKVGQEVQVKVLEVNADAERVSLSIKALEERPAQEEGQKEEKRAARPRRPRRQEKRDFELPETQTGFSMADLFGDIEL

SEQ ID NO: 18301 - protein, 482 aa, Mycobacterium leprae
MSIPAVPSPQIAVNDVGSSEDFLAAIDKTIKYFNDGDIVEGTIVKVDRDEVLLDIGYKTEGVIPARELSIKHDVDPNEVVSVGDEVEALVLTKEDKEGRLILSKKRAQYERAWGTIEALKEKDEAVKGIVIEVVKGGLILDIGLRGFLPASLVEMRRVRDLQPYIGKEIEAKIIELDKNRNNVVLSRRAWLEQTQSEVRSEFLNQLQKGAIRKGVVSSIVNFGCVCRSGGVDGLVHVSELSWKHIDHPSEVVQVGNEVTVEVLDVDMDRERVSLSLKATQEDPWRHFARTHAIGQIVPGKVTKLVPFGAFVRVEEGIEGLVHISELAERHVEVPDQVVAVGDDAMVKVIDIDLERRRISLSLKADQRGLHRGVRPGKVRYGPTATTSRATTSSLEGFDPDSNEWLEGFDTQRAEWEARYAEAERRYKMHTIQMEKFAATEEAGHGSSEQPPASSTPSAKATGGSLASDAQLAALREKLAGSA

SEQ ID NO: 18302 - protein, 481 aa, Mycobacterium leprae
MSIPAVPSPQIAVNDVGSSEDFLAAIDKTIKYFNDGDIVEGTIVKVDRDEVLLDIGYKTEGVIPARELSIKHDVDPNEVVSVGDEVEALVLTKEDKEGRLILSKKRAQYERAWGTIEALKEKDEAVKGIVIEVVKGGLILDIGLRGFLPASLVEMRRVRDLQPYIGKEIEAKIIELDKNRNNVVLSRRAWLEQTQSEVRSEFLNQLQKGAIRKGVVSSIVNFGAFVDLGGVDGLVHVSELSWKHIDHPSEVVQVGNEVTVEVLDVDMDRERVSLSLKATQEDPWRHFARTHAIGQIVPGKVTKLVPFGAFVRVEEGIEGLVHISELAERHVEVPDQVVAVGDDAMVKVIDIDLERRRISLSLKQANEDYIEEFDPAKYGMADSYDEQGNYIFPEGFDPDSNEWLEGFDTQRAEWEARYAEAERRYKMHTIQMEKFAATEEAGHGSSEQPPASSTPSAKATGGSLASDAQLAALREKLAGSA

SEQ ID NO: 18303 - protein, 1330 aa, Anopheles gambiae str. PEST
SQQNTCVFCVRASENYWIKTKLNMVYVEPALPRGPSRPVVKHNRVKKHKTPKSHFGAKTLPAEQKAQRLRPKERWQAMQSEKEMEEEQLQQCFKGSNLVFGKVRAGMLLLGCVKQIRATELLISLPGRLNGIVQITNISEAYSKRLEHMYNTRSTDCPTLGDLYTVGDLVYMKVLRKVKDRRQVYLTLDPSKLHSDFKPAQLVEGLVLAATITVKEDHGYTMDIGVHNVRAFLPQEHLNGNRDDEGRNLFCSIHSVTQSGSGAVVVLKAFRPDEPRVLNVEEVAVETIVPGCQLTFTVGEPVEYGLRGMLFEDSITAYVNRNMLTKVTSNPEKYSMFKTLPATLLYVMPVTNEVFVSLRPYPNNRADCGQAHMVGSIVEKARVKSTDGGGVWLEFGNKCRALLPMGVIRKTAEAAAGGNVDESVMLSNFQVGTTHRVGVVYFDPLESTYIVSNSPDHAETMIQDSFDVEIGKTYKCRVLQLLSTGALVGVGRVTGIVKYEFFNRDSKLKVRDVVPMRAVCRGLDNDFLMFTNQPMLLNEKAPILMHWSQLDRNRKDQKFVGAVSQIQKSYVWVRFFNNLSGRINASVTVAGQDEAEVAKLRQGSIRLFTVLDFDEGANIIDLALKQTSDQPVRTAQLARVTVSYVHATGAEVLTENGEQGTIPAECFSEFGEHNSLYMRLLRGGETLTAVKTNPETYSARLTQYYQENPISLQSVRAGMVLKGSCVTVNGKPYVTPLLSDFHGRFPVSIPPKWHKIEDGSIIKLRVAHLNPTPTKGLLPAMKVETEMVEVCEDIFTEIGSFMGEYLQDVNRLIERFRELDHTFAHYSIGDRVECVIESTVAECNKMAVEVQAVGKRAKYPTKGIVTTVLPERPASSYKVGQQVPGRIVWIDVERKLVHVCVDEPLFSRIVLQQEDEEEPDMDVQRQCWVLFSNHYLNVCCVQSDPPCPLLDGCSDIVFHQLDGTEDTQTTGKKAVKRRNQESTTAHGKGLPGATNFWDTTPVFKRAQSDSSDDDDSDAEDQAETVPKKRATASERFEAMKQEEARLRKIEEELADPSLDPHTPDQFDRLVLAQPNNSMLWIRYMAFHMESAELDKARAVGRKALKAIHFRENAERLNVWIALLNLELRYETIDSFKEVLQEAIQYNDAFKVYTRALDILIDCQKPEEVQKILEQLLKKFRKQNDMWYLVADAWYRIGQGSKVKPLLSQALKSLPTRDHIPLILKFAFLHNRNENRDEAHLLFEQILTSYPKRTDIWSQYVDMLVKDNLVENARQILERAIMQRLPMKNMKTLYTKFVNFEEKHGDRESVRRVKHLAAEYVQAQLNSAGVK

SEQ ID NO: 18304 - protein, 566 aa, Agrobacterium tumefaciens str. C58 (U. Washington)
MSVSTPTRDDFAALLEESFASNDLAEGYVAKGIVTAIEKDVAIVDVGLKVEGRVPLKEFGAKSKDGTLKVGDEVEVYVERIENALGEAVLSREKARREESWVKLEAKFEAGERVEGVIFNQVKGGFTVDLDGAVAFLPRSQVDIRPIRDVTPLMHNPQPFEILKMDKRRGNIVVSRRTVLEESRAEQRSEIVQNLEEGQVVDGVVKNITDYGAFVDLGGIDGLLHVTDMAWRRVNHPSEILNIGQQVKVQIIRINQETHRISLGMKQLESDPWDGISAKYPVGKKISGTVTNITDYGAFVELEPGIEGLIHISEMSWTKKNVHPGKILSTSQEVDVVVLEVDPSKRRISLGLKQTLENPWQAFAFSHPAGTEVEGEVKNKTEFGLFIGLEGDVDGMVHLSDLDWNRPGEQVIEEFNKGDVVKAVVLDVDVEKERISLGIKQLGKDAVGEAATSGDLRKNAVVSCEVIAVNDGGVEVKLVNHEDITSFIRRNDLARDRDDQRPERFAVGQVFDARVVNFSKKDRKVMLSIKALEIAEEKEAVAQFGSSDSGASLGDILGAALKNRGE

SEQ ID NO: 18305 - protein, 572 aa, Agrobacterium tumefaciens str. C58 (Cereon)
MHSGDFMSVSTPTRDDFAALLEESFASNDLAEGYVAKGIVTAIEKDVAIVDVGLKVEGRVPLKEFGAKSKDGTLKVGDEVEVYVERIENALGEAVLSREKARREESWVKLEAKFEAGERVEGVIFNQVKGGFTVDLDGAVAFLPRSQVDIRPIRDVTPLMHNPQPFEILKMDKRRGNIVVSRRTVLEESRAEQRSEIVQNLEEGQVVDGVVKNITDYGAFVDLGGIDGLLHVTDMAWRRVNHPSEILNIGQQVKVQIIRINQETHRISLGMKQLESDPWDGISAKYPVGKKISGTVTNITDYGAFVELEPGIEGLIHISEMSWTKKNVHPGKILSTSQEVDVVVLEVDPSKRRISLGLKQTLENPWQAFAFSHPAGTEVEGEVKNKTEFGLFIGLEGDVDGMVHLSDLDWNRPGEQVIEEFNKGDVVKAVVLDVDVEKERISLGIKQLGKDAVGEAATSGDLRKNAVVSCEVIAVNDGGVEVKLVNHEDITSFIRRNDLARDRDDQRPERFAVGQVFDARVVNFSKKDRKVMLSIKALEIAEEKEAVAQFGSSDSGASLGDILGAALKNRGE

SEQ ID NO: 18306 - protein, 558 aa, Xylella fastidiosa Temecula1
MTESFAELFEASQANLAKLKPGAIVTGTVVDVRGDVVVINAGLKSEGIVPIEQFRNDAGEIDVGVGDQVKVALDAIENGFGETILSREKAKRSMVWDELEEALEKNETISGRINGKVKGGFTVDIKDVRAFLPASLVDVRPVRDPAYLEGKELEFKLIKLDRKRNNVVVSRRAVVESEHSEEREQLLDKLQEGAVLTGTVKNMTDYGAFVDLGGVDGLLHITDMAWKRVRHPCEVVNIGDEVEVRVLKFDRERNRVSLGLKQLGEDPWDNISRRYPANCRVFGKVSNVTDYGAFVEIEAGVEGLVHVSEMDWTNKNVNPSKVVQVGDEVEVMILDVDEERRRISLGMKQVAANPWETFALTHKKGDKVSGQVKSITDFGIFIGLDGGIDGLLHLSDISWNTTGEDIVRNFKKGDTLETVVLAVDPERERISLGVKQLEQDPFGQYMATHPKGSKVIGTVKEVDAKGALIELDEGIEGYVSARDIANERVDDATQYLKVGDSVEAKFIGMDRKGRTLQLSIKAKDDAEMREVLEEYQSSSGGTTKLGTLLREQLGNKPE

SEQ ID NO: 18307 - protein, 1842 aa, Giardia lamblia ATCC 50803
MSSDYQLLTTARPAASQLHRGTMVLAIVANVRPEYMLVNLPFGILGNVSDVNAIDSERVRPLTELYKAGDYVLGVVVGQDATGKPILGLKPSLFHQRDFSRKSLVVCQIETVEDHGWIAEVKDARETSCFLSKSRVPEELHSRLKPGLVVQCAVVDLNASGTLLQVSLQKLDLTAAAAFDGYNQVVPGQIIKAEVVHNASTHSVVRLISTGGKSSQKGMRSAKLYGYVLSEHFRRPADPSSGYATYTGFQGKFKVIYLDLNPQSTDVDGPLIYLSNMDSVLDHAAPTQIYSVGQVLQEGKLTMVQTVKGAVYASLDSDLSSFVYIPVESTHHGAAAEAQIGEPINLKTKIIGYRQFDDLYIGTANPGDIVSSTEAEYHSGMIIDKKIPVKVTKVLDTGVHVSIEVSPARSLHGMINQPHYGSHLKGHNIPVGLNINRHHGTLRVIAYDEPRQVYYLSLANLGSDPLFSSKDTVKPGMVSRGVVTSFIDNAKCSAVIQFTNLYNGICANANGMEIGQVYEFICVRNDEKYTTVDRLSESQRGDDAAKLRSSYADGLMRVLNYRHFIKFELPYSFTVDGDCSNKIPLGTILSRENATVEIRSIALGGFKLGVKLSGAQEESIHVFLPHGCIAFPGKSAELVRLYLGANDSEEEQDVFSILPCIRLLTILSTRDRVSVYIGASSSFLANKEHVLPAETDVMTRGQTYQAVVTHMSVSGLTARLSANTEIFYPDFGNHELDNICPLTLIQVRVVKVGERRANRDRKVDVSISGYCHNGVFKAPLGAQKIESMVDSSIATRYTRLVLPQTQQLNDGISSAGDCQNGSILKGSYLFSNTSPDAYCAIYDLGSGIVGRMTLEAVLLSRLVAKLVETSTKPAQLSSLITAFSEEIIKFVAGGELTLTAYFEKHGHHSASDSIVDVCVRSLVTLHGDQELSTICADTDSAAGEQSCEIVDLYPASLSMAGLRALRSALSKSGCTSIGMVRYVTEHYMLLRDLFDNCLVFVHAVDVFETPAAVRPLRELYKEGSLITITSFTSKEVPNPVIVAGINRIGTLDPLEENMLSSPVGLCSIAMTKPTNTLTGLQHTICQVLPSGALRLNGHTSMCFLTATSPVEFCSRRGLFLAPVLSVTRLFNDPQDFSNHADAFVHDILGYHKCIRIGPDNISLRPIDFQVSSMSRHSFISVGQERLFLPQTAEDLSIHDTYVGFIRPYSKIGAGLQVVVSESITIHVKMKEISEEFISPEEVQEKYPSNTMVRVRYLDTSTFNDMPQYNGTIKPTVVNNPNIKHPSVIIKAGACLIGRVDNVMDDRGVFITVEDCYPLTRVRARISDSIDVSGHGPMNSEKIVLNNANRCSNSYYKGQRLYFIVLEPTAKGASVGLKAAHFLAAGIDITNLPVLKQDRTRRNKQDKSRAIHHEELLNQATTSSEAQGLKPPAVEADQSRFEPVRKRTRSYDLFAGELDDDHNQSQGSEKQEEDDKQEENTESDSSETEGPVINFLNFGTLKRPVADDSSYSDDYQEANDDILNNGVREYEVRQAPKMTAEQKRVKEEKDIREREEELLTNAAPQSEADFERLLAGNEQSSYLWIRYVAFHVDRASIDKAEAVLDRAMTKICPDKEVDYRNLWLAKIALKEKFHGPEAGMNELYEGIRRNDPNELLRIYCSGKLDQGDWESAARGYDVLFSKKERKRIYENWRDYFLFLYNVKGHDIPANVVEGNRIKARGQELQKASSCLSQDVLLRLLCDSARAEYKINDVTRGRAAFDKLVGTMPQRMDIWGQYLDMEEKHVAPINPQDVRSLYERCCALRLSLKKMSYVLKRFYNFEKKFGTATTQERVKEIARAYANS

SEQ ID NO: 18308 - protein, 565 aa, Magnetospirillum magnetotacticum
MTNTATAQAVDDFAALLDETLGVGGSFEGSVITGTIVEIDGDVAVIDVGLKSEGRVPLKEFATAGRATDIKAGDQVDVFVERYEDRNGEVVLSREKAKREEAWTLLEKSFEAQQRVTGVIFGRVKGGFTVDLSGAVAFLPGSQVDIRPVRDITPLLGTPQPFQILKMDRSRGNIVVSRRAVLEETRAEQRSELIENLKEGQILEGVVKNITDYGAFVDLGGVDGLLHVTDIAWKRINHPSEALHIGQTVKVQVIRFNSETQRISLGIKQLDADPWEGVEAKYPVDAKFSGRVTNITDYGAFVELEPGVEGLVHVSEMSWTKKNVHPGKIVSTSQEVEVMVLDVDPQKRRISLGLKQTMNNPWEGFLDRFPQGTLVEGEIKNITEFGLFIGLPGDIDGMVHLSDLDWATPGEQAIQNFKKGDVVKAKVLDVDVEKERISLGIKQLGADPYQDAVASIKKGDVVTCTVTQVTENGLEVTVEGMTGFIRKSELSRERSEQRPERFAVGEKLDAKITAFEKAARKITLSVKAREVEEEKQAMAEYGSSDSGASLGDILGAAMRKAQEKE

SEQ ID NO: 18309 - protein, 384 aa, Leptospira interrogans serovar lai str. 56601
MKESEKELFEKMLDASFKKKKAMEAGTKITAIVNSAKKDFVFVTAKEGKLPGIISSEEFMESGLPNPGEELEAYFLKEDHGDVHFTTCLSGDLLNKDLLEIAKKAEIPVLGQFVSEGDSGADVKIGEFSGFCPFSQIDPELKKSGLIGKRLKFLIQDFGNRNKLVVSQKKISDRAKEAKLGVLKQELKEGMFVTCKVKTIQNFGLIVEMDGGVTALVPISEATYKKNPELEKEFQVGQTLRARVLRIDWENQKFALTVKDFLKDPWAQTVPFKEGDIVKGTIDSLKPFGVFVKLDDHFNGLVPGRETGISNRVPLSQSFKPGEVVDVFVMEVNPEKKQISLSIQKAKEIQERMDYSSYLSVDTSGSTSSFGAILQNSLNKNKKK

SEQ ID NO: 18310 - protein, 560 aa, Leptospira interrogans serovar lai str. 56601
MTNKEEKSTFAEVFKQWEQSIHEEPELRKDQVVEGKIVSVDNDYVYVAIEGLKQEGRIPRGDFDEAPERGNYVSAIVKRKESQDSGCILSKKEADQRKGWEIVKEAFKNGYQVTGRLVNEIKGKGYIVNVEGVELFLPASQLSYKFKEGETFKNKELEFKIIELNDRTRSGVVSRKKLLDEVNEEKWDALLLKLKVGDKVKAIVSKIASFGVFCEVDGVTGLLRQRDISYKKYAPFKQYFQVGQEVELVILELDKENNKLALGLKQLYEDPWVWAERSLEKEMVIRGTVTSLTKFGAFVELKEGLEGLIHTSELAWSKKPPQPKDILKKGQEVEALVLDIDFKNRRLSLGLKQLQPNPWDQLGPEIRRGNVLEGVITGITKYGAFVEVENGIEGLIHISDITWDEKVANPTSQLKKGDTVRYMILDVNLDAQRISCGLKQLMENPYEIFRNEHPVGTIVEGKVKSIKEFGIFVEVAPGIEGLVHISEVPNGKEVNLTELYKSDEIVKTAVIKVDVKNKKISLSIKDFDKALEREEMSKYLKTSDAPSRESLGSFLNTSLR

SEQ ID NO: 18311 - protein, 827 aa, Fusobacterium nucleatum subsp. nucleatum ATCC 25586
MEIIRAKHMGFCFGVLEAINVCNSLVEEKGRKYILGMLVHNKQVVEDMERKGFKLVTEDELLNDMDELKEDDIVVIRAHGTSKSVHEKLKERKVKVFDATCIFVNKIRQEIEIANENGYSILFMGDKNHPEVKGVISFADDIQIFESFEEAKKLKIDLDKTYLLSTQTTLNKKKFEEIKKYFKENYKNVVIFDKICGATAVRQKAVEDLAVKVEVMIIVGDTKSSNTKKLYEISKKLNDNSYLVENEEQLDLSIFRGKEVVGITAGASTPEETIMNIEKKVRGIYKMSNVNENQNEFSLMLEEFLPNQEKRVEGVIESMDQNFSYLDVPGERTAVRVRTDELKDYKVGDTVEVLITGLSEEDDDQEYITASRRKIEVEKNWEKIEDSFKNKTILDAKVTKKIKGGYLVEAFLYPGFLPNSLSEISDSEEKVNGKKIQVIVKDIKMDPKDKKNRKITYSVKDIRLAEQEKEFAGLAVGQIVDCVVTEVLDFGLAVDINTLKGFIHISEVSWKRLDKLSDNYKVGDKIKAVVVSLDEAKRNVKLSIKKLEEDPWATVANEFKVDDEIEGIVTKVLPYGAFVEIKPGVEGLVHISDFSWTKKKVNVADYVKEREKIKVRITDLHPEDRKLKLGIKQLVANPWETAEKDFAIDTVIKGKVVEVKPFGIFVEIADGIDAFVHSSDYNWVGEEIPKFEIGNEVELKITELDLNNKKIKGSLKALRKSPWEHAMEEYKVGTTVEKKIKTVADFGLFIELIKGIDGFIPTQFASKEFIKNIRDKFSEGDVVKAQVVEVNKETQKIKLSIKKIEIEEEKREEREQIEKYSTSSSEE

SEQ ID NO: 18312 - protein, 559 aa, Xanthomonas campestris pv. campestris str. ATCC 33913
MTESFAELFEASQANLAKLKPGSIVTGTVVEVRGDVVVINAGLKSEGIVPIEQFRNDAGEIDVGVGDQVKVALDSIENGFGETVLSREKAKRAMVWDELEEALEKNETITGRISGKVKGGFTVDIKDVRAFLPGSLVDVRPVRDPAYLEGKELEFKLIKLDRKRNNVVVSRRAVVESEHSEEREQLMDKLQEGAILKGVVKNLTDYGAFVDLGGIDGLLHITDMAWKRVRHPSEVVNVGDELDVRVLKFDRERNRVSLGLKQLGEDPWDNIARRYPANSRVFGKVSNVTDYGAFVEIEPGVEGLVHVSEMDWTNKNVNPSKVVQVGDEVEVMVLDVDEERRRISLGMKQVAANPWETFAATHKKNDKVSGQIKSITDFGIFIGLDGGIDGLVHLSDISWNTTGEDVVRNYKKGDTLEAVVLAVDPERERISLGVKQLEQDPFGQYMASNPKGSKVEGVVREVDAKGATIDLADGIEGYVAARDIANERVDDATQHLKVGDKIEAKFVGMDRKGRTLQLSIKAKDDAEMREVLEEYQSASGGTTQLGALLRAQLNSNKSE

SEQ ID NO: 18313 - protein, 561 aa, Xanthomonas axonopodis pv. citri str. 306
MTESFAELFEASQANLAKLKPGSIVTGTVVEVRGDVVVINAGLKSEGIVPIEQFRNDAGEIDVGVGDQVKVALDSIENGFGETVLSREKAKRAMVWDELEEALEKNETITGRISGKVKGGFTVDIKDVRAFLPGSLVDVRPVRDPAYLEGKELEFKLIKLDRKRNNVVVSRRAVVESEHSEEREQLMDKLQEGAILKGVVKNLTDYGAFVDLGGIDGLLHITDMAWKRVRHPSEVVNVGDELDVRVLKFDRERNRVSLGLKQLGEDPWDNIARRYPANSRVFGKVSNVTDYGAFVEIEPGVEGLVHVSEMDWTNKNVNPSKVVQVGDEVEVMVLDVDEERRRISLGMKQVAANPWETFAATHKKNDKVSGQIKSITDFGIFIGLDGGIDGLVHLSDISWNTTGEDVVRNYKKGDTLEAVVLAVDPERERISLGVKQLEQDPFGQYMASNPKGSKVEGVVREVDAKGATIDLADGIEGYVAARDIANERVDDATQHLKVGDKIEAKFVGMDRKGRTLQLSIKAKDDAEMRETLEDYQSASASGGMTQLGALLRAQLNNNKSE

SEQ ID NO: 18314 - protein, 565 aa, Caulobacter crescentus CB15
MSFNPTRDDFEALLNDSMGGRDFAEGTVVKGKVVGIEKDFAIIDVGLKTEGRVQLKEFGVDENGKATVKAGDTVEVFLERLENAMGEAVISREKAKREEAWTRLEGVYARNEPVMGAIVGRVKGGFTVDLGGASAFLPGSQVDIRPVRDVGPLMGKEQPFAILKMDRPRGNIVVSRRAILEEARAEQRTELVSQLQEGEIREGVVKNITDYGAFVDLGGIDGLLHVTDMSWKRVNHPSQVLAVGDTVKVQIVKINPDTQRISLGMKQLQSDPWDGVEAKYPVGAKFTGRITNITDYGAFVELEAGVEGLVHVSEMSWTKKNVHPGKIVSTSQEVDVVVLDVDPSKRRVSLGLKQALANPWEAFLEAHPVGSTVEGEVKNATEFGLFVGLDNDIDGMVHLSDIDWSVPGEEAMARYKKGDMVKAKVLDVDVEKERISLGIKQLAGDPMSGDTYRKNQTVTVTVTEVTSGGIEVRFGEDDAPMTAFIRKSDLSRDRQEQRPERFAVGDRVDAQITNVDKAARRVSLSIKSLEMAEEKEAIEQFGSSDSGASLGDILGAALRERASKD

SEQ ID NO: 18315 - protein, 382 aa, Bacillus anthracis str. A2012
MVEKMNEEVMDSKELQVGDVVTGSVTKVEEKQVLVNVGYKTDGVIPISELANVHIEKASDVVELDQTLELKVIKLEENDLVLSKRAVDAEKAWVELQEKFNSGHVFDVTVKDIVNGGLVVDLGVRGFIPASLVEVHYVEDFTDYKGKTLAVKIVELDREKNRVILSHKAVVELELDSKKKEAISSLKEGDVVEGTVQRLTDFGAFVNVGGVDGLVHISQISHERVEQPSEVLEQGQKVKVKVLSVDADTQRISLSIKAAQPGPWENVGGEVKAGDIREGVVKRLVTFGAFVEILPGVEGLVHVSQIANRHVKNPNEVLEMGQEVKVKVLEVHVAEKRISLSIKEALEENNVTEDYSQYEPNADSATFQLSDIIGEQLKKLKK

SEQ ID NO: 18316 - protein, 556 aa, Campylobacter jejuni subsp. jejuni NCTC 11168
MSEVNKKVQDGVDDYLEEEDFGQLLEAFDKSREEATTEGVIVEIKNDEVYVDIGKKSEGILALSEIQGDNSKLLFNVGDSIKVAVMGSRGGRSLLSHKKALRKEKVIEFIKNYQENQDDIFTVKVVGKNKGGLIVVDENDVEFFLPKSQYGFKETNNIIGKTFKVKIIKIDKDEQSIIVSRKKTLDDERRKRKELINNVAQQEDLIEGIVKKITTYGMFVDVGGVDGLVHYSEISYKGPVNPGTLYKEGDKVPVKVIKYDKERKHLSLSIKAALPDPWSEIKDTLDIGDTIKVIVSNIEPYGAFVDLGNDIEGFLHISEISWDKNIKNPKDYINKGQEIDVEVIEINPNERRLRVSLRNLLSRPFDEFMKSYKIADVVEGEITSVTSFGAFVKLGGIEGLLHNEDASWDRNDKCKDKFSQGDKIKVKIIKIDEENQKISLSTKELSSSPVQEYAKIHKVGDIVKGAIRDIKDFGVFVELSKNVDALIHKEDISTSMLENLKIGDDIEAAIVFIDEKKNRIRLSVKNLVRIKEREVLNEINNDDKVTLGDIIKDQLA

SEQ ID NO: 18317 - protein, 550 aa, Chlorobium tepidum TLS
MESLYTSTLSEISEEEIVKGRIVSISNKDVTIDVGFKSEGIVSLLEFRDDDEIKVGDDVEVYLENIEDKMGQLILSKRKADVLRIWDKIYDSIENDTIINGKIINRVKGGMTVSLSGVEAFLPGSQIDVKPVRDFDALVGKTMDFRVVKINPVTQNIVVSHKVILEEEYAAKREEMLANIKVGMVLEGTVKNITDFGIFVDLGGLDGLVHITDITWGRINHPSEVVELDQPIKVVVVGFDENTKRVSLGMKQLEAHPWENIEIKYPVGIKATGRVVSITDYGAFVEIEKGIEGLVHISEMSWTQHIKHPSQFVSLNQEVEVVILNIDKEHTKLSLSMKRVSEDPWIALSEKYVEGSLHKGTVSNITDFGVFVELEPGVDGLVHISDLSWTKKIRHPSELVKKGQELEVKVLKFDVNARRIALGHKQINNDPWGEFEQKYAVGAECTGAISQIIEKGVIVILPGEVDGFVPVSHLLQGGVKDIHSSFKIGDELPLRVIEFDKENKRIILSALEYFKDKSKEEIEAYLQAHPNEKKEIEAASAELEPQPKGR

SEQ ID NO: 18318 - protein, 378 aa, Clostridium perfringens str. 13
MSENLTMSELMDSFELKHFHKGEIVKGKVISVKNDEIIVNIGHFADGVVPRNEISNDKNFDINSINVDDDIFVMVLSGDDGEGNVLLSKKRADAIKVCDDLKEAFEEEKSIKVSLKEVVKGGIVGDFNGLRVFMPASQCAGRRIENLEELVGKTLEVRVIEFNKENRKVVVSRRVIDEEIRNNEKKALWSSIKEGEKRKGKVTRLAKFGAFVDIGGVEGLVHLSDMSWSRVHKPEEVVSVGDEVEVFVSEVDMDRERIALSLKDVIKNPWETLEGLKVGNVVLGKVTNFIKVGAFVEVLPGIEGLVHISEITDENIAKPSDILELGQEVKVKILNIDDENKKMSLSIKDAVETSNEYMQYNDEEEGYSLADLFKGLNL

SEQ ID NO: 18319 - protein, 485 aa, Corynebacterium efficiens YS-314
MPTNNAPQVAINDIGSAEDFLAAIDATIKYFNDGDIVEGTVVKVDHDEVLLDIGYKTEGVIPSRELSIKHDVDPDEVVQVGDQIDALVLTKEDKEGRLILSKKRAQYERAWGAIEELKEKDEPVTGTVIEVVKGGLILDIGLRGFLPASLVEMRRVRDLDPYIGQELEAKIIELDKNRNNVVLSRRAFLEQTQSEVRSEFLHQLQKGQVRKGVVSSIVNFGAFVDLGGVDGLVHVSELSWKHIDHPSEVVTVGDEVTVEVLDVDLDRERVSLSLKATQEDPWRVFARTHAVGQIVPGKVTKLVPFGAFVRVEEGIEGLVHISELAQRHVEVPDQVVTVGEEVMVKVIDIDLERRRISLSLKQADEDYTEEFDPSKYGMADSYDEQGNYIFPEGFDPETNEWLEGFDEQRQAWEARYAESERRFQAHTAQIERRRQQAEEAAAEAPAGNYSSESEDAAPSAAVEETGGSLASDEQLAALREKLAGN

SEQ ID NO: 18320 - protein, 391 aa, Staphylococcus aureus subsp. aureus MW2
MTEEFNESMINDIKEGDKVTGEVQQVEDKQVVVHINGGKFNGIIPISQLSTHHIDSPSEVVKEGDEVEAYVTKVEFDEENETGAYILSRRQLETEKSYSYLQEKLDNNEIIEAKVTEVVKGGLVVDVGQRGFVPASLISTDFIEDFSVFDGQTIRIKVEELDPENNRVILSRKAVEQEENDAKKDQLLQSLNEGDVIDGKVARLTQFGAFIDIGGVDGLVHVSELSHEHVQTPEEVVSIGQDVKVKIKSIDRDTERISLSIKDTLPTPFENIKGQFHENDVIEGVVVRLANFGAFVEIAPGVQGLVHISEIAHKHIGTPGEVLEPGQQVNVKILGIDEENERVSLSIKATLPNEDVVESDPSTTKAYLENEEEDNPTIGDMIGDKLKNLKL

SEQ ID NO: 18321 - protein, 486 aa, Corynebacterium glutamicum ATCC 13032
MPTNNAPQVAINDIGSAEDFLAAIDATIKYFNDGDIVEGTVVKVDRDEVLLDIGYKTEGVIPSRELSIKHDVDPDEVVEVGDQIDALVLTKEDKEGRLILSKKRAQYERAWGAIEELKEKDEPVTGTVIEVVKGGLIIDIGLRGFLPASLVEMRRVRDLDPYIGQELEAKIIELDKNRNNVVLSRRAFLEQTQSEVRSEFLHQLQKGQVRKGVVSSIVNFGAFVDLGGVDGLVHVSELSWKHIDHPSEVVTVGDEVTVEVLEVDLDRERVSLSLKATQEDPWRVFARTHAVGQIVPGKVTKLVPFGAFVRVEEGIEGLVHISELAQRHVEVPDQVVAVGEEVMVKVIDIDLERRRISLSLKQADEDYTEEFDPSKYGMADSYDEQGNYIFPEGFDAETNEWLEGFDEQRQAWEARYAESERRFTAHTAQIERRRQQAEEAAAEAPAGNYSTDSAEDAPAAEAVEESAGSLASDEQLAALREKLAGN

SEQ ID NO: 18322 - protein, 401 aa, Streptococcus pyogenes MGAS315
MNEFEDLLNSVSEVNPGDVVTAEVLTVDNGQANVVIEGTGVEGVLTLRELTNDRDADINDFVKAGDTVEVLVLRQVVGKDTDTVTFLVSKKRLEARKAWDKLVGREGEVVTVKGTRAVKGGLSVEFEGLRGFIPASMIDTRFVRNTEKFVGQEFDAKIKEVDAAENRFILSRREVIEEAAKEARAEVFSKISEGAVVTGTVARLTSFGAFIDLGGVDGLVHVTELSHERNVSPKSVVSVGEEVEVKVLSIDEEAGRVSLSLKATTPGPWDGVEQKLAQGDVVESKVKRLTDFGAFVEVLPGIDGLVHISQISHKRVENPKDVLSVGQEVTVKVLEVNAADERVSLSIKALEERPAQAEGDNKEEKRQSRPRRPKRESRRDYELPETQTGFSMADLFGDIEL

SEQ ID NO: 18323 - protein, 559 aa, Buchnera aphidicola str. Sg (Schizaphis graminum)
MNESFAQLFEESLKEIKTRPGSIIRGTIVSIEKDIVLVDAGLKSESAIPVEQFKNAQGLLDVKVGDQIDVALDAIEDGFGETLLSREKAKRHEAWLILEQAHEKSETVIGIINGKVKGGFTVELNEIRAFLPGSLVDVRPVRDTIHLEGKELEFKVIKLDQKRNNVVVSRRAVIESENSAERDQLLESLQEGIEIKGIVKNLTDYGAFVDLGGVDGLLHITDMAWKRVKHPSEIVNVGDEINVKILKFDKERTRVSLGLKQLGEDPWIAISNRYPEGIKLSGRVTNLTDYGCFVEIEEGVEGLVHVSEMDWTNKNIHPSKVVAVNNIVDVIVLDIDEERRRISLGLKQCKINPWQEFSETHKKGIHVSGKIKSITDFGIFIGLKGGIDGLVHLSDISWKISGEEAVKNYKKGDEISAVVLQVDAERERISLGIKQLEEDPFNVYVSNHKKGAIITGIIKDFDKKTVTVKLSDGVEGNIKFSDSSRVNSEEIIKKLKIDDTILVKISNFDRKNRIINLTFHILDENNNKKDLKNKINVKSNDESFSNVMAEAFKAAQNTE

SEQ ID NO: 18324 - protein, 530 aa, Thermobifida fusca
MRIRGRPHLWCGGPPIRAFPVGSESNVFSQRVQTSIHVRTGVHPHMTSSTEATSTPQVAVNDIGSEEAFLAAIDETIKYFNDGDIVEGTIVKVDRDEVLLDIGYKTEGVIPSRELSIKHDVDPHEVVAVGDHVEALVLQKEDKEGRLILSKKRAQYERAWGTIEKIKEEDGVVTGTVIEVVKGGLILDIGLRGFLPASLVEMRRVRDLQPYVGRELEAKIIELDKNRNNVVLSRRAWLEQTQSEVRQTFLNTLQKGQIRKGVVSSIVNFGAFVDLGGVDGLVHVSELSWKHIDHPSEVVEVGQEVTVEVLDVDMERERVSLSLKATQEDPWQQFARTHQIGQIVPGKVTKLVPFGAFVRVEEGIEGLVHISELAERHVEVPEQVVQVGTEIFVKIIDIDLDRRRISLSLKQANESISPDQTEFDPTMYGMVAEYDEHGNYKYPEGFDPETGEWMEGYEAQRDEWERQYALAQARFEAHRKQVQEAQAAEAAAAQEQQADDDSGSGQGGGELASDEALAALREKLAGGGES

SEQ ID NO: 18325 - protein, 422 aa, Leuconostoc mesenteroides subsp. mesenteroides ATCC 8293
MFFTIQELKYLVHYIHSVNCRRTFDVMSETNNELLAALESADQIKVGDVVTGEVLAVDNDNQAVIGLHTGEEGVVPAREYSDDRNINLADELKVGDSVEAVVISNVTSDKEGVSYLLSKKRLEARKAWENLSFGEGDTVDAKVINAVRGGLVVDVNGVRGFVPASMVADRFVSDLNQFKNKDIKAQVIEIDAAKARLILSRKAVAAQERAAQLAEAFEKLSVGEVVEGKVARLTDFGAFVDLGGVDGLVHVSEISHDRVKNPADVLTKGETVNVKILALDAEKGRISLSIKATQPGPWDKVAEEAPAGTVLEGTVKRVKDFGAFVEIFPGIEGLVHVSQISHKRIENPSEVLKSGDKVQVQVLDVKPAEERISLSMKALEEKPEREDRGNSKDSSASRADIAAYKQQDDSAATLGDLFDGKF

SEQ ID NO: 18326 - protein, 557 aa, Microbulbifer degradans 2-40
  unsure (1)..(557): unsure at all Xaa locations
MLNIIGIAMIESFAELFEESLKTVDMVPGSIVTGVVIDIDQDWXXXXXXXXXXXXXXXXXIGDEVQVALESVEDGFGETRLSREKAKRAESWKVLEAAHDAEEVITGVINGKVKGGFTVDVAGIRAFLPGSLVDVRPVRETTHLEGKELEFKVIKLDQRRNNVVVSRRAVMEQANSEEREELLANLQEGMAVKGIVKNLTDYGAFVDLGGVDGLLHITDMAWKRIKHPSEIVAVGDEIDVKVLKFDRERNRVSLGLKQLGEDPWSAITQRYPEGAKVKARITNLTDYGCFAEIEEGVEGLVHVSEMDWTNKNIHPSKVVSLGDEVEVMILDIDEERRRISLGIKQCQENPWDAFSNQFAKGDKISGKIKSITDFGIFIGLDGGIDGLVHLSDISWNEAGEEAVRKFKKGDEIETVVLAIDPERERISLGVKQLDEDPFSAYVAENDKGTIVTGTVKEVDAKEAVILLADDITGTLKASEISRDKVEDARNVLKEGDEVEAKITNVDRKNRAIILSVKAKDVADEKAAIKEHSTKAAEAAQPATIGDLIKAEMENKNS

SEQ ID NO: 18327 - protein, 473 aa, Tropheryma whipplei str. Twist
MNMKVIDELSSEDLLLSEIDKTVKSFSDGDIVVGTVVRVYRDEVLVDVGYKTEGVIPVKELSLRADVDPNELLEVGSTVEALVFQKEDSQGRLILSKKRAQYEKAWSDLEKIKDSDLTVTGKVIEIVRGGLIVDIGLRGFLPASLIDIRRVRDLSSYLGMEIEAKVLELDRQRNNVVLSRRVLLEQNQSEARTSLFGNLHKGQVRKGTVSSIVSFGAFVDLGGIDGLVHISEISWKHVTQPSEVLKVGEEVTVEILEVDSERHRVSLSLRATQEDPWQVFAHDHAIGQIMPGVVTKVMNFGVFVRLAEDVEGLAHVSELLDSSLESTEDVFSPGDEVFVKIVDIDIDSRRISLSLKQATAALTLDSKGFDPALYGMLAEYDDDGNYKYPEGFDPEANQWKEGFEEEKARWEQGYAVARDVWHAHTVFVSEFQKKLEALSVSNAPEALPSAESVSAIDSDTTNSPESAKGSEQD

SEQ ID NO: 18328 - protein, 566 aa, Brucella suis 1330
MSQSNPTRADFESLLAESFAEHDLAEGYVVKGRIVAIEKDMAIIDAGLKVEGRVPLKEFGAKGKDGTLKPGDEVEVYVERIENALGEAVLSREKARREESWVKLEQKFANGERVDGVIFNQVKGGFTVDLDGAVAFLPRSQVDIRPIRDVTPLMHVPQPFEILKMDKRRGNIVVSRRTVLEESRAEQRSEIVQNLEEGQVVEGVVKNITDYGAFVDLGGIDGLLHVTDMAWRRVNHPSEILTIGQTVKVQIIRINQETHRISLGMKQLESDPWDGIGAKYPIGKKITGTVTNITDYGAFVEIEPGIEGLIHVSEMSWTKKNVHPGKILSTTQEVEVVVLEVDPVKRRISLGLKQTLDNPWTTFAQKYPVGTVVEGEVKNKTEFGLFIGLDGDVDGMVHLSDLDWNRPGEQVIEEYNKGEVVKAVVLDVDVEKERISLGIKQLSGDKVGEAAASGELRKNAVVTCEVTAVTDGGLEVRLVDHDLDSFIRRSDLSRDRDEQRPERFTVGQKVDARVIAFDKKTRKLQVSIKALEIAEEKEAVAQYGSSDSGASLGDILGAALKKQEKN

SEQ ID NO: 18329 - protein, 484 aa, Bifidobacterium longum DJO10A
  unsure (1)..(484): unsure at all Xaa locations
MAENNTEVTKVAINDIGTEEDFIKAVDSTIKNFDDGDLVEGTVVKIDHDEVLLDIGYKTEGVIPSRELSIKKDVDPDEVVEVGDTIEALVVTKEDKEGRLILSKKRAQYERAWGDIEKIKEADGVVEGTVIEAVKGGLIVDIGLRGFLPASLVEMRRVRDLSPYIGQKIKAKILELDKNRNNVVLSRRQYLEETQSEVRETFLSQLKKGQIREGVVSSIVNFGAFVDLGGVDGLIHVSELSWKHIDHPSEVVKVGDKVTVEVLDVDLDRERISLSLKATQEDPWQRFARTHVPGQIVKGKVTKIVQFGVFISVEDGIEGLVHISELANRHVENPETVVKPGETVFVKVIDVDLDRRRXXXXXXXXXXXXXXXXXRRAGQLQVPRRLRPEHQRVDRWLREAARGVGVSVRRRSRAVGGAQGVRGQGAGERCRIRSRRRPGPEGREAGRGDLQLLFRCSDYRYPRRLRSARRPARPAARQVSLPRS

SEQ ID NO: 18330 - protein, 294 aa, Haemophilus somnus 129PT
MSESFAQLFEESLKDLETRVGSIVNATVVAIEKGFVYVDAGLKSEARIPAEEFQNAQGELDVKVGDVVNVALDAVEDGFGETKLSREKAVRQESWIDLEKAYEEQATVIGLINGKVKGGFTVELNGVRAFLPGSLVDTRPTREADHLLGKEQEFKVIKLDQKRNNVVVSRRAVIESENSQEREEILANLAEGSEVKGTVKNLTDYGAFVDLGGVDGLLHITDMAWKRVKHPGEIVSVGDEITVKVLKFDKDKTRVSLGLKQLGQDPWVAIAENHPVNSKLTGKVTNLTDYGCFV

SEQ ID NO: 18331 - protein, 591 aa, Pseudomonas syringae pv. syringae B728a
  unsure (1)..(591): unsure at all Xaa locations
MKSRFAVLPDDEEACGRPVIVPQAFFYLNETHVXXXXXXXXXXXXXXXXXIITAIIVDIDYQAGWVTVHAGLKSEGLIPLEQFHNDAGELTIKIGDEVHVALDAVEDGFGETKLSREKAKRAECWIVLEAAFAAEEVVKGVINGKVKGGFTVDVNGIRAFLPGSLVDVRPVRDTTHLEGKELEFKVIKLDQKRNNVVVSRRSVLEAENSAEREALLESLQEGQQVKGIVKNLTDYGAFVDLGGVDGLLHITDMAWKRIKHPSEIVNVGDEIDVKVLKYDRERNRVSLGLKQLGEDPWVAIKARYPESTRVTARVTNLTDYGCFAELEEGVEGLVHVSEMDWTNKNIHPSKVVQVGDEVEVMVLDIDEERRRISLGIKQCKSNPWEDFSGQFNKGDKISGTIKSITDFGIFIGLDGGIDGLVHLSDISWNEVGEEAVRRFKKGDELDTVILSVDPERERISLGIKQLESDPFSEYVTVNDKGAIVRGIVKEVDAKGAIITLADDIEATLKASEISRDRVEDARNVLKEGEEIEAKIISVDRKSRVISLSIKSKDVEDEKEAIQSLRSKPEVAESTGPTTIGDLLRAQMEKQN

SEQ ID NO: 18332 - protein, 561 aa, Pseudomonas fluorescens PfO-1
MSESFAELFEESLKTLNLQAGSIITGVIVDIDYQARWVTVHAGLKSEALIPLEQFYNDAGELNINVGDEVHVALDSVEDGFGETKLSREKAKRAECWIVLEAAFAAEEVVKGVINGKVKGGFTVDVNGIRAFLPGSLVDVRPVRDTTHLEGKELEFKVIKLDQKRNNVVVSRRSVLEAENSAEREALLESLQEGQQVKGIVKNLTDYGAFVDLGGVDGLLHITDMAWKRIKHPSEIVNVGDEIDVKVLKYDRERNRVSLGLKQLGEDPWVAIKARYPEGTRVTARVTNLTDYGCFAELEEGVEGLVHVSEMDWTNKNIHPSKVVQVGDEVEVMVLDIDEERRRISLGIKQCKSNPWEDFSGQFNKGDKISGTIKSITDFGIFIGLDGGIDGLVHLSDISWNEVGEEAVRRFKKGDELDTVILSVDPERERISLGIKQLESDPFSEYVSVNDKGAIVKGTVKEVDAKGAIIVLADDIEATLKASEISRDRVEDARNALKEGQEVEAKIISVDRKSRQISLSIKSKDDAEEKEAIQSLKAAPEGEAADTTMAALLRQAMAKQN

SEQ ID NO: 18333 - protein, 491 aa, Bifidobacterium longum NCC2705
MAENNTEVTKVAINDIGTEEDFIKAVDSTIKNFDDGDLVEGTVVKIDHDEVLLDIGYKTEGVIPSRELSIKKDVDPDEVVEVGDTIEALVVTKEDKEGRLILSKKRAQYERAWGDIEKIKEADGVVEGTVIEAVKGGLIVDIGLRGFLPASLVEMRRVRDLSPYIGQKIKAKILELDKNRNNVVLSRRQYLEETQSEVRETFLSQLKKGQIREGVVSSIVNFGAFVDLGGVDGLIHVSELSWKHIDHPSEVVKVGDKVTVEVLDVDLDRERISLSLKATQEDPWQRFARTHVPGQIVKGKVTKIVQFGVFISVEDGIEGLVHISELANRHVENPETVVKPGETVFVKVIDVDLDRRRISLSLKQANDSVDPASEDFDPAIYGMPAEYDEQGNYKYPEGFDPNTNEWIAGYEKQREEWESQYAAAHELWEEHKEFVAKELENAAESAAADGQGPKEEKPVEETSNYSSAAPTTGTLADSDQLAALRDQLLGK

SEQ ID NO: 18334 - protein, 574 aa, Desulfovibrio desulfuricans G20
MTTETIDTSLDAEMSFESALENYLSSDFGDLEEGSIVKGEVVRVDGDYVLVDVNFKSEGQIAASEFKDAEGNLAIKVGDTVDVFVARKNEMEGTITLSFEKAKRMQVFDKLEEVQESEGTTCGRIIRRIKGGYTVDLGGVEAFLPGSHVDLRPVPDMDALVNQEFDFRVLKINRRRSNVIVSRRVLLEEERDSKRQDLLKTLEEGQIVTGKAKNITEYGVFVDLGGLDGLLHITDMSWKRIRHPKELVSLGQELELKILSFDRDSQKVSLGMKQLVNDPWADITSKYPENARLNGKVTNLVDYGAFVELEPGVEGLVHISEMSWTRKLRHPSQMVRVGDEVEVVILGVDPDKKRISLGMKQVKPNPWEVVAEKYPEGTILEGVIKNITEFGMFIGIEDGIDGLIHVSDISWTKKIRHPNELYNVGDTVQAKVLTVDQESEKFTLGVKQLTEDPWSKVPANYPVGTLVNGVVTNITDFGLFVEVEEGIEGLVHVSEISQKKVKSPSEMFKEGVTIQAKVIHVSAEERRLGLSIKQIKDDEERRRPKEFRSGPAEAGGQTLGDILKLKLEEDAADN

SEQ ID NO: 18335 - protein, 400 aa, Streptococcus agalactiae 2603V/R
MNEFEDLLNSVSEVNPGDVVTAEVLTVDNGQANVVIDGTGVEGVLTLRELTNDRDADINDFVKAGDTVEVLVLRQVVGKDTDTVTFLVSKKRLEARKAWDKLVGREGEVVTVKGTRAVKGGLSVEFEGLRGFIPASMIDTRFVRNTEKFVGQEFDAKIKEVDAAENRFILSRREVVEESAAAARKEVFSNIEVGSVVTGKVARLTSFGAFIDLGGVDGLVHVTELSHERNVSPKSVVTVGEEVEVKVLSIDEEAGRVSLSLKATTPGPWDGVEQKLAAGDVIEGKVKRLTDFGAFVEVLPGIDGLVHISQISHKRVENPKDVLSAGQEVTVKVLEVNSDAERVSLSMKALEERPAQAEGEKEEKRQSRPRRPRRQEKRDYELPETQTGFSMADLFGDIEL

SEQ ID NO: 18336 - protein, 559 aa, Pseudomonas aeruginosa PAO1
MSESFAELFEESLKSLDMQPGAIITGIVVDIDGDWVTVHAGLKSEGVIPVEQFYNEQGELTIKVGDEVHVALDAVEDGFGETKLSREKAKRAESWIVLEAAFAADEVVKGVINGKVKGGFTVDVNGIRAFLPGSLVDVRPVRDTTHLEGKELEFKVIKLDQKRNNVVVSRRSVLEAENSAEREALLESLQEGQQVKGIVKNLTDYGAFVDLGGVDGLLHITDMAWKRIKHPSEIVNVGDEIDVKVLKFDRERNRVSLGLKQLGEDPWVAIKARYPEGTRVMARVTNLTDYGCFAELEEGVEGLVHVSEMDWTNKNIHPSKVVQVGDEVEVQVLDIDEERRRISLGIKQCKSNPWEDFSSQFNKGDRISGTIKSITDFGIFIGLDGGIDGLVHLSDISWNEVGEEAVRRFKKGDELETVILSVDPERERISLGIKQLEDDPFSNYASLHEKGSIVRGTVKEVDAKGAVISLGDDIEGILKASEISRDRVEDARNVLKEGEEVEAKIISIDRKSRVISLSVKSKDVDDEKDAMKELRKQEVESAGPTTIGDLIRAQMENQG

SEQ ID NO: 18337 - protein, 827 aa, Fusobacterium nucleatum subsp. vincentii ATCC 49256
MEIIRAKHMGFCFGVLEAINVCNSLVEEKGRKYILGMLVHNKQVVEDMQRKGFKLVTENELLEDMDGLKEGDIVVIRAHGTSKSVHEKLKERKVKVFDATCIFVNKIRQEIEIANENGYSILFMGDKNHPEVKGVISFADDIQIFEGFEEAKKLKIDLDKTYLLSTQTTLNKKKFEEIKKYFKENYKNVIIFDKICGATAVRQKAVEDLAIKVEVMIIVGDTKSSNTKKLYEISKKLNGNSYLVENEEQLDLTIFRGKEVVGITAGASTPEETIMNIEKKIRGIYKMSNANENQNEFSLMLEEFLPNQEKRVEGVIESMDQNYSYLDVPGERTAVRVRTDELKGYKVGDTVEVLITGLSEEEDDQEYITASRRKIEVEKNWEKIEDSFKNKTILDAKVTKKIKGGYLVEAFLYPGFLPNSLSEISDSEEKVNGKKIQVIVKDIKVDPKDKKNRKITYSVKDIRLAEQEKEFAGLTVGQIVDCVVTEVLDFGLAVDINTLKGFIHISEVSWKRLDKLSDVYKVGDHIKAVIVSLDEAKRNVKLSIKKLEEDPWATVANEFKVDDEVEGTVTKVLPYGAFVEIKPGVEGLVHISDFSWTKKKVNVAEYVKEGERVKVRITDLHPENRKLKLGIKQLVANPWETAEKDFAVGTVIKGKVVEVKPFGIFVEITDGIDAFVHSSDYSWIGEETPKFEIGNEVELKITELDLNDKKIKGSLKALRKSPWEHAMEEYKVGTTVEKKIKTVADFGLFIELTKGIDGFIPTQFASKEFIKNIRDKFNEGDIVKAQVVEVNKDTQKIKLSIKKIEIEEEKREEREQIEKYSTSSSEE

SEQ ID NO: 18338 - protein, 399 aa, Streptococcus mutans UA159
MNEFEDLLNSVSEVNPGDVVTAEVLTVDGEQANLVIDGTGVEAVLTLRELTNDRNADINDFVKAGDKVEVLVLRQVVGKDTDTVTFLVSKKRLEARKAWDKLVGREGDVVTVKGTRAVKGGLSVEFEGLRGFIPASMIDTRFVRNTEKFVGQQFEAKIKEIDPSENRFILSRRDVVEAAAAKAREEVFSRLAVGDIVTGTVARLTSFGAFIDLGGVDGLVHITELSHERNVSPKSVVTVGEEIQVKVLAIDEEAGRVSLSLKATTPGPWDGVEQKLAAGDVIEGKVKRLTDFGAFVEVLPGIDGLVHISQISHKRVENPKDVLSVGQDVTVKVLDVNTADERVSLSIKALEERPAQDESNGEKRQSRPRRQKRQDKRDYELPETQTGFSMADLFGDIEL

SEQ ID NO: 18339 - protein, 555 aa, Shewanella oneidensis MR-1
MTESFADLFEQSLQTLEFRPGSIVRGTVVAIENGMVLVDAGLKSESPIPAEQFKNAQGVLEIAVGDEVDVALDSVEDGFGETQLSREKAKRHEAWIVLEKAYEDAETVIGIINGKVKGGFTVELNGIRAFLPGSLVDVRPVRDTAHLEYKELEFKVIKLDQKRNNVVVSRRAVIESESSAERDALLENLQEGQAVKGIVKNLTDYGAFVDLGGVDGLLHITDMAWKRVKHPSEIVNVGDEINVKVLKYDRERTRVSLGLKQLGEDPWLEISKRYPENTKLTGRVTNLTDYGCFVEIEEGVEGLVHVSEMDWTNKNIHPSKVVNLGDEVEVLVLDIDEERRRISLGLKQCKTNPWDDFATRYNKGDKVSGKIKSITDFGIFIGLDGGIDGLVHLSDISWNGTGEDAVSEYKKGDEIHAVVLSVDPERERISLGVKQTEDDPFNAYLADKKKGTIVHGTVSAVDAKGVTVELADTVEGYIRVADISRERIEDASTVYSVGDAIEAKFMGVDRKNRSISLSIKAKDEAEEKEVMATLNKQEDAVISNAMAEAFKAARK

SEQ ID NO: 18340 - protein, 387 aa, Clostridium tetani E88
MSKINEDLTMENMIEEIDKNMKKVKEKDIVKGKVISVSEDEVLINIGYVADGIIKKSDLEDIDFKEEFKKDEEVYVYVVKLNDGEGNVILSKRIADKIRTLDKLEKDFKEGNIFKIKIEEIVKGGVITHINGVRAFIPASHISSKFVQDLNEFLGKEKDVKVIEFNRKDNKLVLSAKEVEDEKLTKKREELWKTLKEGEKINGKVVRLVKFGVFVDIGGIEGLVHLSDLSWKRVNNPSDIVKEGDEVEVFILNVDKKRERLGLALKDIKEDPWKKALDNHKIGTVEHGTVVKLVEFGAFVELKDGLEGLLHISEISEERILKPEEVLKIGDKIKVKILDINKENRKMSLSKKAAEDKSSAEMEKYSDKEEGVSLGEILGDKLKDFKF

SEQ ID NO: 18341 - protein, 635 aa, Clostridium tetani E88
MSIILAKKSGFCYGVKRAVDTCLKIKQNYPDKIIYTLGPLIHNNDVVDFLKTKNIFSIGYENIDTLKEGDIIILRSHGVTLETIQKLKEKKLNIIDATCPYVSNIQKKAQKYYKEGYSILIVGDKNHPEVIGINGWCNNSAIICRKAEEIEDLPKKICVVSQTTEKKEHWISVLSKVVNECREVVAFNTICNATEVRQLSAEDLSKEVDFMIVIGSKSSSNTTKLYEICKNNCSNTIHIENAGELPDYISNKYSKIGVTAGASTPDWIIKEAIFKMSNKNLNEQLEYMENNDIQISIGQEVEGEIVSIVSSNEAYVNIGYKSDAILLLSEVTKDNDEDINNFVKKGDIIKGKIIKLGSENKPPVISVIELNRENAYVELKEAFENKEKVVVKVKEDVNGGLISIYKNIVRVFIPASHVELRHVDDLSIYKGCELTVNIIEFEEGRNNTRIVASRRDLLKEEQSKVEEETWSSLEKDTIKEGEVRRLTDFGAFVNINGVDGLLHVSEISWGRVEKPSDMLKVGDKIKVYIKDIDKDKKKLALSIKDLTKDPWKDVEVKYPVGNIVLGTVVRFASFGAFVELEPGVDGLIHISQISHKRVDRVEDELSIGEQVKAKIVEVDGEKRKIGLSIKEVNDI

SEQ ID NO: 18342 - protein, 557 aa, Yersinia pestis CO92
MIESFAQLFEESLKTIETRPGSIVRGVVVSIDKDIVLVDAGLKSESAIPAEQFKNAQGELEIQVGDEVDVALDAVEDGFGETLLSREKAKRHEAWLMLEKAYEEAATVTGVINGKVKGGFTVELNGIRAFLPGSLVDVRPVRDTLHLEGKELEFKVIKLDQKRNNVVVSRRAVIESENSAERDQLLENLQEGMEVKGIVKNLTDYGAFVDLGGVDGLLHITDMAWKRVKHPSEIVNVGDEITVKVLKFDRERTRVSLGLKQLGEDPWVAIAKRYPESTKLTGRVTNLTDYGCFVEIEEGVEGLVHVSEMDWTNKNIHPSKVVNVGDVVEVMVLDIDEERRRISLGLKQCKSNPWQLFAETHNKNDRVEGKIKSITDFGIFIGLDGGIDGLVHLSDISWNVAGEEAVREYKKGDEIAAVVLQVDAERERISLGVKQLAEDPFNNYLSVNKKGAIVTGKVTAVDAKGATVELAGGVEGYLRAFEATRDRVEDATLVLNVGDEVEAKYTGVDRKNRVISLSVRAKDEADEKDAIATVNTKPEESNFSSAMAEAFKAAKGE

SEQ ID NO: 18343 - protein, 556 aa, Vibrio vulnificus CMCP6
MTESFAQLFEEFLNETEFQQGTIVKGTVVAIENGYVLVDAGLKSESAIPAEQFKNAAGELEVEVGSEVDVALDAVEDGFGETQLSREKAKRHEAWIVLEKAYEEAATVVGIINGKVKGGFTVELNGIRAFLPGSLVDVRPIRDTAHLENKELEFKVIKLDQKRNNVVVSRRAVIESESTVERDELLETLQEGSEVKGIVKNLTDYGAFVDLGGVDGLLHITDMAWKRVKHPSEIVNVGDEILVKVLKFDRDRTRVSLGLKQLGEDPWVAIAKRYPEGHKLSGRVTNLTDYGCFVEIEEGVEGLVHVSEMDWTNKNIHPSKVVNVGDEVEVMVLEIDEERRRISLGLKQCKANPWQSFAEAQAKGDKVTGKIKSITDFGIFIGLDGGIDGLVHLSDISWNVAGEETVREFKKGDEISAVVLAVDAERERISLGIKQMENDPFNAYVADNKKGALVNGTVTAVDAKGATIELEDGVEGYIRASEVSRDRVEDATLILSVGDKVEAKFTGVDRKNRVINLSIKAKDEAEEQEAMASINKADEAAFGNAMADAFKAAKGE

SEQ ID NO: 18344 - protein, 473 aa, Tropheryma whipplei TW08/27
MNMKVIDELSSEDLLLSEIDKTVKSFSDGDIVVGTVVRVYRDEVLVDVGYKTEGVIPVKELSLRADVDPNELLEVGSTVEALVFQKEDSQGRLILSKKRAQYEKAWSDLEKIKDSDLTVTGKVIEIVRGGLIVDIGLRGFLPASLIDIRRVRDLSSYLGMEIEAKVLELDRQRNNVVLSRRVLLEQNQSEARTSLFGNLHKGQVRKGTVSSIVSFGAFVDLGGIDGLVHISEISWKHVTQPSEVLKVGEEVTVEILEVDSERHRVSLSLRATQEDPWQVFAHDHAIGQIMPGVVTKVMNFGVFVRLAEDVEGLAHVSELLDSSLESTEDVFSPGDEVFVKIVDIDIDSRRISLSLKQATAALTLDSKGFDPALYGMLAEYDDDGNYKYPEGFDPEANQWKEGFEEEKARWEQGYAVARDVWHAHTVFVSEFQKKLEALSVSNAPETLPSAESVSAIDSDTTNSPESAKGSEQD

SEQ ID NO: 18345 - protein, 429 aa, Lactobacillus plantarum WCFS1
MSENENSQEKNELLDALNSVEEVNVGDVVKGEVLAIDDDKQVIVGIQGTGVEGVVPLKELSTQRVDDVNEAAKVGDVLDLVVISRIGSDKENGSYLLSHRRLEARKVWDDVEKEYEAGHTIKAPVTQVVKGGLVVDAGVRGFIPASMIDDHYVEDLNAYKGQELELKIIEIEPSENRLILSHRAVVEKQREAQREEALKTLQAGDVVEGKVARLTNFGAFVDLGGIDGLVHVSEISYERVEKPADVLKVGQEVTVKILSVDADRERVSLSIKATLPEPWDGIEEKAPQGAVLDGKVKRLTSFGAFVEVFPGVEGLVHISQISHQHIATPNDVLKVGQEIKVKVLDVRPDEKRLALSIKALEEKPQTADDDNESQPERRSNNNRRRNNNRDNRTASERSTANAPEESTGFTLGDLIGDELKNAESNNDEN

SEQ ID NO: 18346 - protein, 376 aa, Oceanobacillus iheyensis HTE831
MSEESKDLQTMEVGTTVTGTVVKLEDKQVLVDIGYKTEGILPIGELSSLHVEATTDVLTEGDTVTLKVKKIDDDEIILSKRAIDSETAWEELEQKYNSGEAFDTTVKEVVKGGLVVDVGVRGFIPASLVETYYVEDFSDYLNKTLKVKIADLDRSQNRVILSHRAIVEDEEKNRKNDVLQSLEPGQVIEGTVQRITNFGAFVDLGGVDGLVHISQLAHEHVEKTSDVVSEGDKIKVEVLSVDLDNERISLSHKNTLPGPWANVEEQVKVGSTIEGTVKRLVSFGAFVELLPGVEGLVHISQIANRHIGTPQEVLEIGQTVQVKVLDVSEQDQRISLSIKELEEEQEAKEYKQYEKDDDQSGFQLGDFIGDKLDKYK

SEQ ID NO: 18347 - protein, 563 aa, Pseudomonas syringae pv. tomato str. DC3000
MSESFAELFEESLKTLNLQAGSIITAIIVDIDYQAGWVTVHAGLKSEGLIPLEQFHNDAGELTIKIGDEVHVALDAVEDGFGETKLSREKAKRAECWIVLEAAFAAEEVVKGVINGKVKGGFTVDVNGIRAFLPGSLVDVRPVRDTTHLEGKELEFKVIKLDQKRNNVVVSRRSVLEAENSAEREALLESLQEGQQVKGIVKNLTDYGAFVDLGGVDGLLHITDMAWKRIKHPSEIVNVGDEIDVKVLKYDRERNRVSLGLKQLGEDPWVAIKARYPESTRVTARVTNLTDYGCFAELEEGVEGLVHVSEMDWTNKNIHPSKVVQVGDEVEVMVLDIDEERRRISLGIKQCKSNPWEDFSGQFNKGDKISGTIKSITDFGIFIGLDGGIDGLVHLSDISWNEVGEEAVRRFKKGDELDTVILSVDPERERISLGIKQLESDPFSEYVTVNDKGAIVRGIVKEVDAKGAIITLADDIEATLKASEISRDRVEDARNVLKEGEEIEAKIISVDRKSRVISLSIKSKDVEDEKEAIQSLRSKPEVAESTGPTTIGDLLRAQMEKQN

SEQ ID NO: 18348 - protein, 556 aa, Vibrio parahaemolyticus RIMD 2210633
MTESFAQLFEEFLNETEFQQGSIVKGTVVAIENGFVLVDAGLKSESAIPAEQFKNAAGELEVEVGAEVDVALDAVEDGFGETQLSREKAKRHEAWIVLEKAYEEAETVVGIINGKVKGGFTVELNGIRAFLPGSLVDVRPIRDTAHLENKELEFKVIKLDQKRNNVVVSRRAVIESENSVERDELLETLQEGSEVKGIVKNLTDYGAFVDLGGVDGLLHITDMAWKRVKHPSEIVNVGDEIQVKVLKFDRERTRVSLGLKQLGEDPWVAIAKRYPEGHKLTGRVTNLTDYGCFVEIEEGVEGLVHVSEMDWTNKNIHPSKVVNVGDEVEVMVLEIDEERRRISLGLKQCKANPWQSFAEAQAKGDKVTGKIKSITDFGIFIGLEGGIDGLVHLSDISWNVAGEEAVREYKKGDEISAVVLAVDAERERISLGIKQMENDPFNAYVADNKKGTLVNATVTAVDAKGATVEIAEGVEGYIRASEVSRDRVEDASLILSAGDVVEAKFTGVDRKNRVINLSIKAKDEAEEQEAMASINKQDEAAFGNAMADAFKAAKGE

SEQ ID NO: 18349 - protein, 382 aa, Bacillus subtilis subsp. subtilis str. 168
MTEEMNQIDVQVPEVGDVVKGIVTKVEDKHVDVEIINVKQSGIIPISELSSLHVEKASDVVKVDDELDLKVTKVEDDALILSKRAVDADRAWEDLEKKFETKEVFEAEVKDVVKGGLVVDIGVRGFIPASLVEAHFVEDFTDYKGKTLSLLVVELDRDKNRVILSHRAVVESEQANKKQELLQSLEVGSVLDGKVQRLTDFGAFVDIGGIDGLVHISQLSHSHVEKPSDVVEEGQEVKVKVLSVDRDNERISLSIKDTLPGPWNQIGEKVKPGDVLEGTVQRLVSFGAFVEILPGVEGLVHISQISNKHIGTPHEVLEEGQTVKVKVLDVNENEERISLSMRELEETPKADQEDYRQYQAKEETSTGFQLGDLIGDKLNKLK

SEQ ID NO: 18350 - protein, 553 aa, Borrelia burgdorferi B31
MRMENQKDLQENYLKVLERVELGSRVSGTVVNIMKDYVLVDIGYKSEGFIKIEEFENVPQVGDRLEAIVVRIGGELGLILSVEKLNSLNFQDKVYEYIQNKKIIKGKVLVELPNGYKIQINENVSGFMPFYLSSKSKDEKLKRGSVVEFYILEASEADGLRLILDRRTLEKERDLAKRIELVSSYNEEDVVDGVVERITEYGAIVKIKNFVTGILHKRNIAFNQVENVEDFVRVGDKLKLKIIKINPQTGKMELSLKALKANPWDSVDVKYKIDSIVKGKVVKILPFGAVIELDSELSGFLHISNFSWIRVVKSPQELIKLGQIVEVKILEIDKENQKISLGIKQINENPWERLTEKYPIGRVVQGVVTNITKTGAFVNIEEGIDAYVSKFDISWLEEIDPEEYFKIGDLVNGKVLEVDKRKRNVRLGIKQLEESPWEDFSKSYKKGDTIEVEIVEKKSKGFQVRVYNKIMGFISKIQLGDTKESSLETFEKLNVGDKLKVVITSIDSKDKSVLLSYREYENQRSREEISSYLFKGNDEESYKPFENLLKRDE

SEQ ID NO: 18351 - protein, 582 aa, Bradyrhizobium japonicum USDA 110
MNPTAGKTSATGEQMASTSADTYSPSRDDFAAMLDESFAGGNLQESSVVKGKVVAIEKDMAVIDVGLKTEGRVALREFSGPGRDSEIKVGDEVEVFLDRIENALGEAVLSRDKARREESWGKLEKAFQNNEKVNGVIFNQVKGGFTVDLDGAVAFLPRSQVDIRPIRDVAPLMNNSQPFQILKMDRRRGNIVVSRRTVLEETRAEQRQELVQNLEEGQVIDGVVKNITDYGAFVDLGGIDGLLHVTDIAWRRVNHPTEVLSIGQTVKVKIIKINHETHRISLGMKQLLDDPWQGIEAKYPLGARFTGRVTNITDYGAFVELEPGIEGLIHVSEMSWTKKNMHPGKIVSTSQEVEVQVLEVDSVKRRISLGLKQTMRNPWEVFVEGHPTGSVVEGEVKNKTEFGLFLGLEGDVDGMVHLSDLDWKLPGEQVIDNYKKGDMVKAVVLDVDVEKERISLGIKQLEGDPFAEPGDVKKGAVVTCEVLEVKESGIEVKIAGTDFTTFIKRSELARDRNDQRAERFAVGEKVDARVIQFDKKARKVQVSIKALEVAEEKEAIAQYGSSDSGATLGDILGTALKNRDSK

SEQ ID NO: 18352 - protein, 576 aa, Brucella melitensis 16M
MAIPDAPGVYMSQSNPTRADFESLLAESFAEHDLAEGYVVKGRIVAIEKDMAIIDAGLKVEGRVPLKEFGAKGKDGTLKPGDEVEVYVERIENALGEAVLSREKARREESWVKLEQKFANGERVDGVIFNQVKGGFTVDLDGAVAFLPRSQVDIRPIRDVTPLMHVPQPFEILKMDKRRGNIVVSRRTVLEESRAEQRSEIVQNLEEGQVVEGVVKNITDYGAFVDLGGIDGLLHVTDMAWRRVNHPSEILTIGQTVKVQIIRINQETHRISLGMKQLESDPWDGIGAKYPIGKKITGTVTNITDYGAFVEIEPGIEGLIHVSEMSWTKKNVHPGKILSTTQEVEVVVLEVDPVKRRISLGLKQTLDNPWTTFAQKYPVGTVVEGEVKNKTEFGLFIGLDGDVDGMVHLSDLDWNRPGEQVIEEYNKGEVVKAVVLDVDVEKERISLGIKQLSGDKVGEAAASGELRKNAVVTCEVTAVTDGGLEVRLVDHDLDSFIRRSDLSRDRDEQRPERFTVGQKVDARVIAFDKKTRKLQVSIKALEIAEEKEAVAQYGSSDSGASLGDILGAALKKQEKN

SEQ ID NO: 18353 - protein, 576 aa, Buchnera aphidicola str. Bp (Baizongia pistaciae)
MLKLYFTIINMTESFAQLFEESLKNIKTRPGSIIQGTVVAITKDTILVDAKLKSESKIPIDQFKNSQGELEVKVGDQIDVALDAIEDGFGETLLSREKAKRHEAWLTLEQAYKDSKTVVGLINGKVKGGFTVELEDIRAFLPGSLVDIRPVRETMHLEGKELEFKVIKLDQKRNNVVVSRRAVIESEYNAERNLLLETLQEGLIVSGIVKNLTDYGAFVDLGGVDGLLHITDMAWKRVKHPSEIVNIGDEVKIKILKFDREKIRVSLGLKQLSDDPWTKISERYPEKTKITGRVTNLTDYGCFVEIEEGVEGLVHVSEMDWTNKNIHPSKMVQVNSVVKVMILDIDEERRRISLGLKQCKNNPWMEFSKKYNKGSHVVGKIKSITDFGIFIGLEGSIDGLVHLSDISWNISGEESVKKYKKGEEVLAVVLQVDPDRERISLGIKQLQEDPFAKYVSSHKKGSLVSGTIKKIDNNVIVVSLSEHIDGLIKFLNISDEIMNVHDNKPWNKAKIGEIVEVKLNSIDKKERIIYLSILEKQELKISNDIKKNNSHKQEIDKDKNFSNAMTEAFKAAKNVD

SEQ ID NO: 18354 - protein, 403 aa, Enterococcus faecalis V583
MTDFEDKQVANNETMEDAMNSVQEVSVGDIVKGEVLAIEDKQVVVGIEGAGVEGVVPAKELSTLPVEDVHELVKVGDVLDLVVITSIGKDKENGSYLLSKRRLDAKKVWEEIEQDFQAGKVIEAPVTNVVKGGLVVDVGVRGFVPASMVEDHFVADFSEYKGQTLAFKIIEIEPSENRLILSHKAVVEAEKESKKEELLSSLHDGDVVEGKVARLTDFGAFIDLGGVDGLVHVSEIAHQHVGKPSDALTVGEDVQVKILSINPEEGRISLSIKETLPGPWTDIETKAAAGTVLDGTVKRLTSFGAFVEVFPGVEGLVHISQISHKHIATPHEVLHEGDQVQVKVLEVNPEEHRIALSIKALEPKPESQEEPKEEQEYELPEENTGFTMGDILGDALSDAKEEE

SEQ ID NO: 18355 - protein, 599 aa, Bacteroides thetaiotaomicron VPI-5482
MENLKNVAPIEDFNWDAYENGEAVTSASHEDLEKAYDGTLNKVNDREVVDGTVIAMNKREVVVNIGYKSDGIIPLNEFRYNPDLKVGDTVEVYIENQEDKKGQLVLSHRKARATRSWDRVNAALENEEIIKGFIKCRTKGGMIVDVFGIEAFLPGSQIDVKPIRDYDVFVGKTMEFKVVKINQEFKNVVVSHKALIEAELEQQKKEIIGKLEKGQVLEGTVKNITSYGVFIDLGGVDGLIHITDLSWGRVSDPKEVVELDQKLNVVILDFDDEKKRIALGLKQLTPHPWDALDTDLKVGDKVKGKVVVMADYGAFIEIATGVEGLIHVSEMSWSQHLRSAQDFMKVGDEVEAVVLTLDREERKMSLGIKQLKQDPWETIEEKYPVGSKHTAKVRNFTNFGVFVEIEEGVDGLIHISDLSWTKKVKHPSEFTQIGADIEVQVLEIDKENRRLSLGHKQLEENPWDVFETVFTVGSVHEGTIIEMLDKGAVVALPYGVEGFATPKHLVKEDGSQAQLDEKLEFKVIEFNKDAKRIILSHSRIFEDVAKAEERAEKKAASGAKKSSNNKREDAPMIQNQAASTTLGDIDALAALKEQLEGKK

SEQ ID NO: 18356 - protein, 382 aa, Bacillus cereus ATCC 14579
MVEKMNEEVMDSKELQVGDVVTGSVTKVEEKQVLVNVGYKTDGVIPISELANVHIEKASDVVELDQTLELKIIKLEEDDLVLSKRAVDAEKAWVELQEKFTSGHVFDVIVKDIVNGGLVVDLGVRGFIPASLVEVHYVEDFTDYKGKTLAVKIVELDREKNRVILSHKAVVELELDSKKKEAISSLKEGDVVEGTVQRLTDFGAFVNVGGVDGLVHISQISHERVEQPSEVLEQGQKVKVKVLSVDADTQRISLSIKAAQPGPWENVAGEIKAGDIREGVVKRLVTFGAFVEILPGVEGLVHVSQIANRHVKNPNEVLEMGQEVKVKVLEVHVAEKRISLSIKEALEENNVTEDYSQYEPNADSATFQLSDIIGEQLKKLKK

SEQ ID NO: 18357 - protein, 551 aa, Coxiella burnetii RSA 493
MSETFAELFEKSLTETDLRPGALVKATVVEVRPDRVIVNAGLKSEGIIPASEFRNEEPHVGDEFFVVIEASDNGFGETRLSREKARRAKAWSELEKAYKAGEMVKGVIIERVKGGFTVDLNSVRAFLPGSLVDVKPVRDPGYLEDKEIDFKIIKMDQRRNNVVVSRRAVMEAETSAERQARLEELQEGQEIKGVIKNITDYGAFVDLGGVDGLLHITDMAWGRVKHPSDLLNVGDEVHVKVLKFDRDKKRVSLGMKQLADDPWAKIERRYPVNSRVFGKVTNITDYGCFVKLEEGVEGLVHTSELDWTNKNIHPSKVVQSGEEVEVMVLEIDEERRRISLGIKQCKRNPWQEFAEKHEKDEKITGKVRSITDFGMFIGLEGDIDGLVHLSDISWTESGEEAIRNYKKGDEVQAVILGIDPERERISLGIKQLEGDPFMEFVESYDKDAVIQAKVKEVESKQAVLELADQVLGQMRLADYTYDRVKDLTQELNVGDEVAVKIVNVDRKNRLINVSHKAVEGRSEKGTRTVSDVPTKTTLGDLLKEKIQSKDE

SEQ ID NO: 18358 - protein, 501 aa, Streptomyces avermitilis MA-4680
MTSSTETTSTTPQVAVNDIGNEEAFLAAIDETIKYFNDGDIVDGVIVKVDRDEVLLDIGYKTEGVIPSRELSIKHDVDPNEVVKVGDEIEALVLQKEDKEGRLILSKKRAQYERAWGTIEKIKEEDGIVTGTVIEVVKGGLILDIGLRGFLPASLVEMRRVRDLQPYVGKELEAKIIELDKNRNNVVLSRRAWLEQTQSEVRQTFLTTLQKGQVRSGVVSSIVNFGAFVDLGGVDGLVHVSELSWKHIDHPSEVVEVGQEVTVEVLDVDMDRERVSLSLKATQEDPWQQFARTHQIGQVVPGKVTKLVPFGAFVRVDEGIEGLVHISELAERHVEIPEQVVQVNDEIFVKVIDIDLERRRISLSLKQANEAFGGDPASVEFDPTLYGMAASYDDQGNYIYPEGFDPETNDWLEGFESQREVWETQYAEAQQRFEQHQAQVIKSREADAQAEAEGAAAPAAGGSGAGVSGGSYSSESDDNSGALASDEALAALREKLAGGQS

SEQ ID NO: 18359 - protein, 581 aa, Chlamydophila caviae GPIC
MPKQSEYTWGSKKILDTIDCLAEDVVEFKDLLCSTHGITSSDEETTSEIQPGAILKGTVVDINKDFVVVDVGLKSEGVIPMSEFIDSSEGLVLGAEVEVYLDQTEDEEGKVVLSREKATRQRQWEHILAHCEEGSIVKGQIIRKVKGGLIVDIGMEAFLPGSQIDNKKIKNLDDYVGKVCEFKILKINIDRRNVVVSRRELLEAERISKKAELIEQINIGERRRGIVKNITDFGVFLDLDGIDGLLHITDMTWKRIRHPSEMVELNQELEVIILSVDKEKGRVALGLKQKEHNPWEDIEKKYPPGKRIVGKIVKLLPYGAFIEIEEGIEGLIHVSEMSWVKNVVDPSEVVNKGDEVEAIVLSIQKDEGKISLGLKQTEHNPWDNIEEKYPIGLHVHAEIKNLTNYGAFVELEPGIEGLIHISDMSWIKKVSHPSELFKKGSTVEAVILSVDKESKKITLGVKQLSSNPWNEIEEMFPTGSNISGVVTKITAFGAFVELQNGIEGLIHVSELSEKPFSKIEDIISIGDSVSAKVIKLDPDHKKVSLSVKEYLADKQHDHMDTDLNNLDLDDLVGSDKKKKGK

SEQ ID NO: 18360 - protein, 543 aa, Thermotoga maritima
MEPFEFNDEILSQYEPEEFRRGQIVKGVVIGKEDDGVVVDFGGKSEGFVPENELIKSLDEYKVGENLTLQILNLNYEERSILSERRPVLRKTLEELRKDYEEKKPVKARIVSQTKGGYNVLLKGVVSAFLPGSHSLLRRNDPMPEKEIEVIILEMAQTRRGPRIVVSRRALQDKKIEEFFSEKKVGDIVEGTVKGISNAGVEVEISEGVRGFIPRSELSYDTRISPEDIVKPGQNITAKIIELDKVKKNVILSLKKLMPDPWEKVEEKYPVGKVVSGEVTSIHPFGFFVRLEPGVEGLVPRSEVFWGNARKSLEEVVSVGDLVEVEVINVDKENRKLTLSYRKAKGDPWENIEDRYNVNNVVTGKVTGIIKQGAFVELEEGVEGFVPVSEISWKRIDEPGEILKIGEKVKVKILKIDKENRKITLSIKRTQENPWERALKELKPDSIVSGTIKKIVNSGVVVEVEEYDVEGFVPNNHLLSEPETGKALNLVVLRIDPDEVFGGRMILSEKRYEERKNIEEYKKMVEKESSQKSIGDLLKKNGE

SEQ ID NO: 18361 - protein, 536 aa, Thermus thermophilus
MEDKATQTPEQTFSMEAALQETEARLEKRVRPGQILTGKVVLVGSEGVAVDIGAKTEGIIPFNQLTTKPLSEEELRNLLSPGDEVKVQVLRVDPETGQILLSRKKIEAQEKWDRIQELYEKGEPVTVTIKERVKGGVVAELDGIQGFMPASQLDLRRVPNLDEFVGQQVLAKIIEFHRRKGRVILSRRAVLEEEQKKAREAFLKSLEPGQVVEGTVVEVTDFGVFVNLGPVDGLVHRSEITWGRFNHPREVIQKGQKVKARVLSVDPEKERVNLSIKALIPDPWTTVAEKYPVGTRVRGKVVGLTQFGAFVEVEPGLEGLIHISELSWTKRPKHPSEVVKEGDEVEAVVLRLDPEERRLSLGLKQTQPDPWQQLTEKYPPGTVLKGKVTGVTDFGVFVEIEPGIEGLVHVSELDHKRVENPAALFKKGDEMEVVVLNIDPVEQRVSLSRKRLLPPPLPQEEERPRRARSGKERARRKGAPRREDRREYEYGAVAEYNLYDASSVPTTTATVKLGDLYGDLLASLGLEEEAEEKSRG

SEQ ID NO: 18362 - protein, 263 aa, Porphyra purpurea
MTKNNESFTHRNFAAVLQKYKYDLNLGDIVAGTIFSFELNGVLVDIGTPVSAYLPIQEVSSNQELNNFNSLNINDTREFFLLDYNVESRQLILSIRRLEYIRAWKRIRQLLAEDSLLDVRIKGFNKGGMIVNLEGISGFVPNSHLNNFSKNTSSTNKFIKLKLLNVEEKSNNLILSHRRALIAQASSNLIVGNIIEGVINQITPYGLFIKAGNLKGLVHISEINVKQVERIPSQFKIGDTIKAVIIHVDKKQGRLSLSMKHLK

SEQ ID NO: 18363 - protein, 591 aa, Prevotella intermedia
MANFENVNPLSDFNWDDFENGVTVGGDKEELTKAYDNTLNKIQEHQVVEGEVISIDKKEVVVNIGYKSDGIIPASEFRYNPELKVGDKVEVYVENQEDKSGQLILSHKKARLQKSWVNINEALEADAVIQGYIKSRTKGGMIVDVFGIEAFLPGSQIDVHPIRDYDVFVGKTMEFKVVKINQEFRNVVVSHKALIEAELEAQRKEIISHLEKGQILEGVVKNITSYGVFVDLGGVDGLIHITDLSWGRINDPHEVVELDQKINVVILDFDEEKKRIALGLKQLAPHPWDALDPNLKVGDHVKGKVVVMADYGAFVEIQPGVEGLIHVSEMSWSQHLRSAQEFMKAGDEVEAVVLTLDRDERKMSLGIKQLKEDPWEAIEAKYPVGSKHVAKVRNFTNFGIFVELEEGVDGLIHISDLSWTKKVKHPSEFTQVGADMDVIVLEIDKENRRLSLGHKQLETNPWDTYESIYTPGSTHVGKITESMDKGAVITLNEGGEGFATPKHLVKEDGSQAQLGEELPFVVIEFVKDTKRIILSHSRTFEEVKEEQARRQRTASKKHSEPASQINNVAAGTSLGDLDVLADLKKKMEEGK

SEQ ID NO: 18364 - protein, 586 aa, Geobacter metallireducens
MSEDKDMKNRNAMTIKRFVDVEEDGEHGGSGEFAELFQESIKQHRVGEVVTGKVVHISNEFVLVDIGYKSEGCIAIDEFLDEDGNLTVKVGDEVKALFERKENQKGYAVLSRRKAERLAVWDVIDEAGGEGGIIEGKITGKVKGGLTVDIGVQAFLPASQVDLRPGGNLDKYIGTTDRFKVLKLNKKRGNIVLSRRVLMEEERESSRKETLATLAEGQVREGVVKNITDYGAFVDIGGVDGLLHVTDMSWGRLGHPSEILKPGDKLNVKVLKYDQEKGKISLGLKQVTPDPWVSVEQKYNQGDRVKGKVVSLTDYGAFIALEDGVEGLVHVSEMSWTRRLRHPSEILTVGDEVETVVLGVDMGNRRISLGLKQVQVNPWTQLEEKYPVGTKLEGQIKSITDFGVFIGIEEGIDGLVHVSDISWTKRIKHPGEVFTKGQTVQAVVLNIDPENERLSLGIKQLLLDPWSEIPVKYRPGTRVHGKVTSVTDFGVFLEIEEGIEGLIHVSELSREKVASPKEFTNVGDELDAVVLSVDESEKKIALSIKSLQMAAEKAEIESYMQAQGEATSNLGELLKVGFRKNGDGND

SEQ ID NO: 18365 - protein, 401 aa, Geobacter metallireducens
MDMDEKDVVETEEESFAELFEKSNSETQRLRPGSKVEGKILKIGAEWVFIDIGKKGEGVMERKELQDAEGNLTVAEGDTITAWFTGSVRNEMRFTTKLGAGAAANAQLEEAHRSGIPVEGFVVKEIKGGFEVRLSGTTRAFCPFSQISLRRAENPAEFVGKHLLFKVTEYSERGRNIVLSHRQILEEEQRVKREALKEVLLEGMTVTGTVTRLADFGAFVDLGGVDGLIPVSEVGWTRVKHVRDVLSVGEQVSVVIKKIDWEAGKISLSLKDTLADPWTTVAEQFPEGSYHTGTVARLAAFGAFVTLAPGIDGLIHISKLGKGKRINHPSDVLKEGETVEVKVDGVDREARRLSLALAEVSRAAEEEEKSVASFRQQATSSSKESMGSFGDLLKAKIEEKR

SEQ ID NO: 18366 - protein, 562 aa, Ralstonia solanacearum
MSQTNESFAALFEESIARSNMKAGEVISAEVVRIDHNFVVVNAGLKSEAFVPVEEFLNDQGELEVQVGDYVSVAIDALENGYGDTILSRDKAKRLASWLNLEKALESGEIISGTVTGKVKGGLTVMVNGIRAFLPGSLVDVRPIKDTTPYEGKTLEFKVIKLDRKRNNVVLSRRAVVEATLGEERQKLMETLKEGAIVNGIVKNITDYGAFVDLGGIDGLLHITDLAWRRVRHPSEVLSVGQEITAKILKFDQEKNRVSLGVKQLGEDPWVGISRRYPQGTRLFGKVTNLTDYGAFVEIEAGIEGLVHVSEMDWTNKNVAPSKVVQLGDEVEVMVLDIDEDKRRISLGMKQCKANPWDDFARNHKKGDKLAGQIKSITDFGVFIGLPGGIDGLVHLSDLSWQETGEEAVRKYKKGDEVEAVVLAIDVEKERISLGIKQLSGDPFNNFISANDKGSIVSVTIKTVDPKGAVVQLADDVEGYLRASEISSDRVEDARNVLKEGETMTAMIVNIDRKSRNINVSIKAKDSADQQEAMQKFAQDTGTAGTTNLGALLKAKLNETNQ

SEQ ID NO: 18367 - protein, 575 aa, Azotobacter vinelandii
MWRWAGFLPPQSTGINMSESFAELFEESLKSLDMQPGAIITGIVVDIDGDWVTVHAGLKSEGVIPVEQFYNEQGELTIKVGDEVHVALDAVEDGFGETKLSREKAKRAESWLVLEAAFAADEVVKGIINGKVKGGFTVDINGIRAFLPGSLVDVRPVRDTTHLEGKELEFKVIKLDQKRNNVVVSRRSVLEAENSAEREALLESLQEGQQVKGIVKNLTDYGAFVDLGGVDGLLHITDMAWKRIKHPSEIVNVGDEIDVKVLKFDRERNRVSLGLKQLGEDPWVAIKARYPEGTRVMARVTNLTDYGCFAELEEGVEGLVHVSEMDWTNKNIHPSKVVQVGDEVEVMVLDIDEERRRISLGIKQCKSNPWEDFSSRYNKGDRITGTIKSITDFGIFIGLEGGIDGLVHLSDISWNEQGEEAVRRFKKGDELETVILSVDPERERISLGVKQLADDPFSSYASLNEKGSIVHGTVKEVDAKGAIVDLGNDIEAVLKASEISRDRVEDARNVLKEGDEVEAKIISIDRKSRVISLSIKAKDVDDEKDAIKELRKQETEAPGPTTIGDLIRAQMGNQS

SEQ ID NO: 18368 - protein, 411 aa, Spinacia oleracea
MASLAQQLAGGLRCPPLSNSNLSKPFSPKHTLKPRFSPIVSAVAVSNAQTRERQKLKQLFEDAYERCRNAPMEGVSFTIDDFHTALDKYDFNSEMGSRVKGTVFCTDANGALVDITAKSSAYLPLAEACIYRIKNVEEAGIIPGVREEFVIIGENEADDSLILSLRQIQYELAWERCRQLQAEDVVVKGKIVGANKGGVVALVEGLRGFVPFSQISSKSSAEELLEKEIPLKFVEVDEEQSRLVMSNRKAMADSQAQLGIGSVVTGTVQSLKPYGAFIDIGGINGLLHVSQISHDRVSDIATVLQPGDTLKVMILSHDRERGRVSLSTKKLEPTPGDMIRNPKLVFEKAEEMAQTFRQRIAQAEAMARADMLRFQPESGLTLSSDGILGPLTSDLPAEGLDLSVVPPAVES

SEQ ID NO: 18369 - protein, 568 aa, Rickettsia sibirica
MSIKLKQRFVPQLAAMNHEFAEDFSKMLETVDTSHIKEKTVVKGQVIEIKNDIIIVDVGLKNEGRIPKSEFLALPEVGDVVEVFIEKIEGRNGRTILSREKAVKEELWGQLEIMCSKGEFVDGTIFGRVKGGFTVDLSGVVAFLPGSQVDVRPIKDPTSIMNIKQPFKILSMDKKLGNIVVSRRAILEESRSEARDEMLSKIKEGMVLEGTVKNITDYGAFIDLGSVDGLLHLTDISWGRVNHPSEVLDFNQKVKVMVIKFDEKTKRISLGIKQLDSNPWEAIKEEFPVGKQMTGKVTNFADYGVFIELKDGLEGLVHSSEISWLKSNPNPRKTLTIGQEVDFVVLEVDTEKHRVSLSIKQCQENPLTKFAENNPVGTIIKAPIRNITDFGIFVALGNNMDGMIHEGDISWEDKGTDLLKSYKKGDEIECKVLAINIEKEQVSLGIKQLSPNPYQEISDEYKKGTIVKALITAVKDEGLEVLLNDKVAGFIKRTELSDEKDEQKPEMFQIDKEIEAKVVSIEKSTGRILLSVKAHKIAERQKALKEYGSSDNTTNMGDILANALEDKK

SEQ ID NO: 18370 - protein, 468 aa, Plasmodium falciparum 3D7
MVEKEDSYITNKKVEENKMNKIIHIKDEQINKKKNKKNKKNKKEGKSVTKEMNETSNLGLYSNICEEKKHKKKKKEKEKDKDKDKLDALNKNSKKKNKKNDKSNKKEGKKLENNDEMKDDVIISDHEDDIIYEHDDIIYEHDDIIYEHDDIIRDHDDIIRDHDDDILDDNNNTQLKNNDIIINNNNKVITPFDYERLIASEKNKSAIWISYIAFYLEQNNLEEARKVAERALKTIDIHEIDEKLNIYLCYINMECLYGDKLNDIFKRALLCNNEKSIYLHTIHILKKNKKLTQLKDLCEEAIKKFKYSKKIWSCYLQILHNTFKDEEYAHNILLKSLHSLPKKKHLNMIINAARFEYKYSNKERGKTYFEKLIQEYPKRSDLWFTYLDIHINSLTKNENKEKIKLNLKELQFIRNIFERFLSYKFKPRVMKIIFTKWLLFEKSQGNMHSQKTVQEKAYKYVESLNALV

SEQ ID NO: 18371 - protein, 554 aa, Wigglesworthia glossinidia endosymbiont of Glossina brevipalpis
MTESFARLFEESLKKIQTRPGSLVKGTVIAILKDIVLVDAGLKSESAVPIEQFLNNKGHLEVKVGDVIDVTLDAIEDGFGETILSREKAKRKEAWLNLEKAHLDSITVNGIINGKVKGGFTVELNGIRAFLPGSLVDIRPIRDTIHLEGKDLEFKVIKLDQKRNNVVVSRRAVIESENSAERDHILKILQEGSKAVGVVKNLTDYGAFIDLGGVDGLLHITDMAWKRVKHPNEIVSIGDEITVKILKFDKEKTRVSLGLKQLGQDPWIEISKRYPENVKISGKVTNLTDYGCFVEIEEGVEGLVHISEMDWTNKNIHPSKVVNVGDTVNVLVLDIDEERRRISLGLKQCKPNPWKNFSKLNKKGDKVQGRIKSITDFGIFIGLEGGIDGLVHLSDVSWNIQGEEAVKEYKKGDIISAMVLQVDSDRERISLGIKQLSEDPFNYYVKNNKIGDIVDGTISIIEKSKFVIKLDSFVEGYVNIADKKEENITKNFKISNILKLKIIGIDRKNRTINLSFIIDDYKKKSNKNDKKNNSIEDSFSNVMTEAFKAATKSD

SEQ ID NO: 18372 - protein, 1838 aa, Arabidopsis thaliana
MVVPQKKFANGKRNDSTKSFKPMKKPFKKTKDDVAARSEAMALQLEDVPDFPRGGGTSLSKKEREKLYEEVDAEFDADERVSKKSKGGKSKKRIPSDLDDLGLLFGGGLHGKRPRYANKITTKNISPGMKLLGVVTEVNQKDIVISLPGGLRGLVRASEVSDFTDRGIEVFSANVKSIEDHGSILHFGLPSITGFIEISDDGNQESGMKTGQLIQGVVTKIDRDRKIVHLSSDPDSVAKCLTKDLSGMSFDLLIPGMMVNARVQSVLENGILFDFLTYFNGTVDLFHLKNPLSNKSWKDEYNQNKTVNARILFIDPSSRAVGLTLSPHVVCNKAPPLHVFSGDIFDEAKVVRIDKSGLLLELPSKPTPTPAYVSFKEGNHIRVRVLGLKQMEGLAVGTLKESAFEGPVFTHSDVKPGMVTKAKVISVDTFGAIVQFSGGLKAMCPLRHMSEFEVTKPRKKFKVGAELVFRVLGCKSKRITVTYKKTLVKSKLPILSSYTDATEGLVTHGWITKIEKHGCFVRFYNGVQGFVPRFELGLEPGSDPDSVFHVGEVVKCRVTSAVHGTQRITLNDSIKLGSIVSGIIDTITSQAVIVRVKSKSVVKGTISAEHLADHHEQAKLIMSLLRPGYELDKLLVLDIEGNNMALSSKYSLIKLAEELPSDFNQLQPNSVVHGYVCNLIENGCFVRFLGRLTGFAPRSKAIDDPKADVSESFFVGQSVRANIVDVNQEKSRITLSLKQSSCASVDASFVQEYFLMDEKISDLQSSDITKSDCSWVEKFSIGSLIKGTIQEQNDLGVVVNFDNINNVLGFIPQHHMGGATLVPGSVVNAVVLDISRAERLVDLSLRPELLNNLTKEVSNSSKKKRKRGISKELEVHQRVSAVVEIVKEQHLVLSIPEHGYTIGYASVSDYNTQKLPVKQFSTGQSVVASVKAVQNPLTSGRLLLLLDSVSGTSETSRSKRAKKKSSCEVGSVVHAEITEIKPFELRVNFGNSFRGRIHITEVLVNDASTSDEPFAKFRVGQSISARVVAKPCHTDIKKTQLWELSVKPAMLKDSSEFNDTQESEQLEFAAGQCVIGYVYKVDKEWVWLAVSRNVTARIFILDTSCKAHELEEFERRFPIGKAVSGYVLTYNKEKKTLRLVQRPLLFIHKSIANGGGSKTDKPDSSIPGDDDTLFIHEGDILGGRISKILPGVGGLRVQLGPYVFGRVHFTEINDSWVPDPLDGFREGQFVKCKVLEISSSSKGTWQIELSLRTSLDGMSSADHLSEDLKNNDNVCKRFERIEDLSPDMGVQGYVKNTMSKGCFIILSRTVEAKVRLSNLCDTFVKEPEKEFPVGKLVTGRVLNVEPLSKRIEVTLKTVNAGGRPKSESYDLKKLHVGDMISGRIRRVEPFGLFIDIDQTGMVGLCHISQLSDDRMENVQARYKAGESVRAKILKLDEEKKRISLGMKSSYLMNGDDDKAQPLSEDNTSMECDPINDPKSEVLAAVDDFGFQETSGGTSLVLAQVESRASIPPLEVDLDDIEETDFDSSQNQEKLLGANKDEKSKRREKQKDKEEREKKIQAAEGRLLEHHAPENADEFEKLVRSSPNSSFVWIKYMAFMLSLADIEKARSIAERALRTINIREEEEKLNIWVAYFNLENEHGNPPEESVKKVFERARQYCDPKKVYLALLGVYERTEQYKLADKLLDEMIKKFKQSCKIWLRKIQSSLKQNEEAIQSVVNRALLCLPRHKHIKFISQTAILEFKCGVADRGRSLFEGVLREYPKRTDLWSVYLDQEIRLGEDDVIRSLFERAISLSLPPKKMKFLFKKFLEYEKSVGDEERVEYVKQRAMEYANSTLA

SEQ ID NO: 18373 - protein, 1765 aa, Arabidopsis thaliana
MKLLGVVTEVNQKDIVISLPGGLRGLVRASEVSDFTDRGIEDDENELLGDIFSVGQLVPCIVLELDDDKKEAGKRKIWLSLRLSLLHKGFSFDSFQLGMVFSANVKSIEDHGSILHFGLPSITGFIEISDDGNQESGMKTGQLIQGVVTKIDRDRKIVHLSSDPDSVAKCLTKDLSGMSFDLLIPGMMVNARVQSVLENGILFDFLTYFNGTVDLFHLKNPLSNKSWKDEYNQNKTVNARILFIDPSSRAVGLTLSPHVVCNKAPPLHVFSGDIFDEAKVVRIDKSGLLLELPSKPTPTPAYTYDAAGDEVTKLEKKFKEGNHIRVRVLGLKQMEGLAVGTLKESAFEGPVFTHSDVKPGMVTKAKVISVDTFGAIVQFSGGLKAMCPLRHMSEFEVTKPRKKFKVGAELVFRVLGCKSKRITVTYKKTLVKSKLPILSSYTDATEGLVTHGWITKIEKHGCFVRFYNGVQGFVPRFELGLEPGSDPDSVFHVGEVVKCRVTSAVHGTQRITLSFMIKPSSVSEDDSIKLGSIVSGIIDTITSQAVIVRVKSKSVVKGTISAEHLADHHEQAKLIMSLLRPGYELDKLLVLDIEGNNMALSSKYSLIKLAEELPSDFNQLQPNSVVHGYVCNLIENGCFVRFLGRLTGFAPRSKAIDDPKADVSESFFVGQSVRANIVDVNQEKSRITLSLKQSSCASVDASFVQEYFLMDEKISDLQSSDITKSDCSWVEKFSIGSLIKGTIQEQNDLGVVVNFDNINNVLGFIPQHHMGGATLVPGSVVNAVVLDISRAERLVDLSLRPELLNNLTKEVSNSSKKKRKRGISKELEVHQRVSAVVEIVKEQHLVLSIPEHGYTIGYASVSDYNTQKLPVKQFSTGQSVVASVKAVQNPLTSGRLLLLLDSVSGTSETSRSKRAKKKSSCEVGSVVHAEVNDASTSDEPFAKFRVGQSISARVVAKPCHTDIKKTQLWELSVKPAMLKDSSEFNDTQESEQLEFAAGQCVIGYVYKVDKEWVWLAVSRNVTARIFILDTSCKAHELEEFERRFPIGKAVSGYVLTYNKEKKTLRLVQRPLLFIHKSIANGGGSKTDKPDSSIPGDDDTLFIHEGDILGGRISKILPGVGGLRVQLGPYVFGRVHFTEINDSWVPDPLDGFREGQFVKCKVLEISSSSKGTWQIELSLRTSLDGMSSADHLSEDLKNNDNVCKRFERIEDLSPDMGVQGYVKNTMSKGCFIILSRTVEAKVRLSNLCDTFVKEPEKEFPVGKLVTGRVLNVEPLSKRIEVTLKTVNAGGRPKSESYDLKKLHVGDMISGRIRRVEPFGLFIDIDQTGMVGLCHISQLSDDRMENVQARYKAGESVRAKILKLDEEKKRISLGMKSSYLMNGDDDKAQPLSEDNTSMECDPINDPKSEVLAAVDDFGFQETSGGTSLVLAQVESRASIPPLEVDLDDIEETDFDSSQNQEKLLGANKDEKSKRREKQKDKEEREKKIQAAEGRLLEHHAPENADEFEKLVRSSPNSSFVWIKYMAFMLSLADIEKARSIAERALRTINIREEEEKLNIWVAYFNLENEHGNPPEESVKKVFERARQYCDPKKVYLALLGVYERTEQYKLADKLLDEMIKKFKQSCKIWLRKIQSSLKQNEEAIQSVVNRALLCLPRHKHIKFISQTAILEFKCGVADRGRSLFEGVLREYPKRTDLWSVYLDQEIRLGEDDVIRSLFERAISLSLPPKKMKFLFKKFLEYEKSVGDEERVEYVKQRAMEYANSTLA

SEQ ID NO: 18374 - protein, 1111 aa, Arabidopsis thaliana
AIDDPKADVSESFFVGQSVRANIVDVNQEKSRITLSLKQSSCASVDASFVQEYFLMDEKISDLQSSDITKSDCSWVEKFSIGSLIKGTIQEQNDLGVVVNFDNINNVLGFIPQHHMGGATLVPGSVVNAVVLDISRAERLVDLSLRPELLNNLTKEVSNSSKKKRKRGISKELEVHQRVSAVVEIVKEQHLVLSIPEHGYTIGYASVSDYNTQKLPVKQFSTGQSVVASVKAVQNPLTSGRLLLLLDSVSGTSETSRSKRAKKKSSCEVGSVVHAEVNDASTSDEPFAKFRVGQSISARVVAKPCHTDIKKTQLWELSVKPAMLKDSSEFNDTQESEQLEFAAGQCVIGYVYKVDKEWVWLAVSRNVTARIFILDTSCKAHELEEFERRFPIGKAVSGYVLTYNKEKKTLRLVQRPLLFIHKSIANGGGSKTDKPDSSIPGDDDTLFIHEGDILGGRISKILPGVGGLRVQLGPYVFGRVHFTEINDSWVPDPLDGFREGQFVKCKVLEISSSSKGTWQIELSLRTSLDGMSSADHLSEDLKNNDNVCKRFERIEDLSPDMGVQGYVKNTMSKGCFIILSRTVEAKVRLSNLCDTFVKEPEKEFPVGKLVTGRVLNVEPLSKRIEVTLKTVNAGGRPKSESYDLKKLHVGDMISGRIRRVEPFGLFIDIDQTGMVGLCHISQLSDDRMENVQARYKAGESVRAKILKLDEEKKRISLGMKSSYLMNGDDDKAQPLSEDNTSMECDPINDPKSEVLAAVDDFGFQETSGGTSLVLAQVESRASIPPLEVDLDDIEETDFDSSQNQEKLLGANKDEKSKRREKQKDKEEREKKIQAAEGRLLEHHAPENADEFEKLVRSSPNSSFVWIKYMAFMLSLADIEKARSIAERALRTINIREEEEKLNIWVAYFNLENEHGNPPEESVKKVFERARQYCDPKKVYLALLGVYERTEQYKLADKLLDEMIKKFKQSCKIWLRKIQSSLKQNEEAIQSVVNRALLCLPRHKHIKFISQTAILEFKCGVADRGRSLFEGVLREYPKRTDLWSVYLDQEIRLGEDDVIRSLFERAISLSLPPKKMKFLFKKFLEYEKSVGDEERVEYVKQRAMEYANSTLA

SEQ ID NO: 18375 - protein, 1396 aa, Arabidopsis thaliana
MVVPQKKFANGKRNDSTKSFKPMKKPFKKTKDDVAARSEAMALQLEDVPDFPRGGGTSLSKKEREKLYEEVDAEFDADERVSKKSKGGKSKKRIPSDLDDLGLLFGGGLHGKRPRYANKITTKNISPGMKLLGVVTEVNQKDIVISLPGGLRGLVRASEVSDFTDRGIEDDENELLGDIFSVGQLVPCIVLELDDDKKEAGKRKIWLSLRLSLLHKGFSFDSFQLGMVFSANVKSIEDHGSILHFGLPSITGFIEISDDGNQESGMKTGQLIQGVVTKIDRDRKIVHLSSDPDSVAKCLTKDLSGMSFDLLIPGMMVNARVQSVLENGILFDFLTYFNGTVDLFHLKNPLSNKSWKDEYNQNKTVNARILFIDPSSRAVGLTLSPHVVCNKAPPLHVFSGDIFDEAKVVRIDKSGLLLELPSKPTPTPAYVSTYDAAGDEVTKLEKKFKEGNHIRVRVLGLKQMEGLAVGTLKESAFEGPVFTHSDVKPGMVTKAKVISVDTFGAIVQFSGGLKAMCPLRHMSEFEVTKPRKKFKVGAELVFRVLGCKSKRITVTYKKTLVKSKLPILSSYTDATEGLVTHGWITKIEKHGCFVRFYNGVQGFVPRFELGLEPGSDPDSVFHVGEVVKCRVTSAVHGTQRITLSFMIKPSSVSEDDSIKLGSIVSGIIDTITSQAVIVRVKSKSVVKGTISAEHLADHHEQAKLIMSLLRPGYELDKLLVLDIEGNNMALSSKYSLIKLAEELPSDFNQLQPNSVVHGYVCNLIENGCFVRFLGRLTGFAPRSKAIDDPKADVSESFFVGQSVRANIVDVNQEKSRITLSLKQSSCASVDASFVQEYFLMDEKISDLQSSDITKSDCSWVEKFSIGSLIKGTIQEQNDLGVVVNFDNINNVLGFIPQHHMGGATLVPGSVVNAVVLDISRAERLVDLSLRPELLNNLTKEVSNSSKKKRKRGISKELEVHQRVSAVVEIVKEQHLVLSIPEHGYTIGYASVSDYNTQKLPVKQFSTGQSVVASVKAVQNPLTSGRLLLLLDSVSGTSETSRSKRAKKKSSCEVGSVVHAEVNDASTSDEPFAKFRVGQSISARVVAKPCHTDIKKTQLWELSVKPAMLKDSSEFNDTQESEQLEFAAGQCVIGYVYKVDKEWVWLAVSRNVTARIFILDTSCKAHELEEFERRFPIGKAVSGYVLTYNKEKKTLRLVQRPLLFIHKSIANGGGSKTDKPDSSIPGDDDTLFIHEGDILGGRISKILPGVGGLRVQLGPYVFGRVHFTEINDSWVPDPLDGFREGQFVKCKVLEISSSSKGTWQIELSLRTSLDGMSSADHLSEDLKNNDNVCKRFERIEDLSPDMGVQGYVKNTMSKGCFIILSRTVEAKVRLSNLCDTFVKEPEKEFPVGKLVTG

SEQ ID NO: 18376 - protein, 392 aa, Arabidopsis thaliana
MAVFSGATTLGSVSFASHLFDQQSTFLSCPLRLLPSSSSSSSNRNSLVCIVKSFSSSATADTDRNSDQSASSSVLSASNSLLRDTSDEASAAGPSDWKTAKAYCKSGDTFEGEVQGFNGGGLLIRFHSLVGFLPYPQLSPSRSCKEPQKSIHEIAKTLVGSKLPVKVVQADEENRKLILSEKLALWPKYSQNVNVGDVFNGRVGSVEDYGAFIHLRFDDGLYHLTGLVHVSEVSWDYVQDVRDVLRDGDEVRVIVTNIDKEKSRITLSIKQLEDDPLLETLDKVILKDSSTGSPSLSSNNGDTIEPLPGLETILEELLKEDGIEAVKINRQGFEKRVVSQDLQLWLSNTPPSDGKFVLLARAGRQVQEIHLTTSLEQGGIKKALQHVLERVP

SEQ ID NO: 18377 - protein, 565 aa, Mesorhizobium loti
MSAANPTRDDFASLLEESFTTGHSGEGQVVKGTITAIEKDMAIIDVGLKVEGRVPLKEFGVKGKDTTLKVGDTVEVYVERIENALGEAMLSREKARREESWVRLEEKFTKGERVEGVIFNQVKGGFTVDLDGAVAFLPRSQVDIRPIRDVSPLMHNPQPFEILKMDRRRGNIVVSRRTVLEESRAEQRSEIVQNLEEGQVVEGVVKNITDYGAFVDLGGIDGLLHVTDMAWRRVNHPTEILNIGQTVKVQIIRINQETHRISLGMKQLESDPWSEIGTKFPIGKKIKGTVTNITDYGAFVELEPGIEGLIHVSEMSWTKKNVHPGKILSTTQEVDVVVLEVDPAKRRISLGLKQTLENPWEAFARNHPVGSQVEGEVKNKTEFGLFIGLEGDVDGMVHLSDLDWTRPGEQVIEEYNRGDMVKAQVLDVDIEKERISLGIKQLARDTVGEAATSGELRKNAVVTCEVIGVKDGGLEVRLVDSGIETFIKRSDLSRDRDEQRPERFTVGQKVDARVIAFDKKTRKLQVSIKALEIAEEKEAVAQYGSTDSGASLGDILGAALKKQGN

SEQ ID NO: 18378 - protein, 568 aa, Sinorhizobium meliloti
MSATNPTRDDFAALLEESFAKTDLAEGYVAKGIVTAIEKDVAIVDVGLKVEGRVPLKEFGAKAKDGTLKVGDEVEVYVERIENALGERVLSREKARREESWQRLEVKFEAGERVEGIIFNQVKGGFTVDLDGAVAFLPRSQVDIRPIRDVTPADAQPAALRNLKMDKRRGNIVVSRRTVLEESRAEQRSEIVQNLEEGQVVEGVVKNITDYGAFVDLGGIDGLLHVTDMAWRRVKHPSEIQNIGQQVKVQIIRINQETHRISLGMKQLESDPWDGIGAKYPVGKKISGTVTNITDYGAFVELEPGIEGLIHISEMSWTKKNVHPGKILSTSQEVDVVVLEVDPTKRRISLGLKQTLENPWQAFAHSHPAGTEVEGEVKNKTEFGLFIGLDGDVDGMVHLSDLDWNRPGEQVIEEFNKGDVVRAVVLDVDVDKERISLGIKQLGRDAVGEAAASGELRKNAVVSAEVIGVNDGGIEVRLVNHEDVTAFIRRADLSRDRDEQRPERFSVGQTVDARVTNFSKKDRKIQLSIKALEIAEEKEAVAQFGSSDSGRSLGDILGAALKNRQNNE

SEQ ID NO: 18379 - protein, 568 aa, Sinorhizobium meliloti
MSATNPTRDDFAALLEESFAKTDLAEGYVAKGIVTAIEKDVAIVDVGLKVEGRVPLKEFGAKAKDGTLKVGDEVEVYVERIENALGEAVLSREKARREESWQRLEVKFEAGERVEGIIFNQVKGGFTVDLDGAVAFLPRSQVDIRPIRDVTPLMHNPQPFEILKMDKRRGNIVVSRRTVLEESRAEQRSEIVQNLEEGQVVEGVVKNITDYGAFVDLGGIDGLLHVTDMAWRRVNHPSEILNIGQQVKVQIIRINQETHRISLGMKQLESDPWDGIGAKYPVGKKISGTVTNITDYGAFVELEPGIEGLIHISEMSWTKKNVHPGKILSTSQEVDVVVLEVDPTKRRISLGLKQTLENPWQAFAHSHPAGTEVEGEVKNKTEFGLFIGLDGDVDGMVHLSDLDWNRPGEQVIEEFNKGDVVRAVVLDVDVDKERISLGIKQLGRDAVGEAAASGELRKNAVVSAEVIGVNDGGIEVRLVNHEDVTAFIRRADLSRDRDEQRPERFSVGQTVDARVTNFSKKDRKIQLSIKALEIAEEKEAVAQFGSSDSGASLGDILGAALKNRQNNE

SEQ ID NO: 18380 - protein, 349 aa, Glycine max
  unsure (1)..(349): unsure at all Xaa locations
XPSATXLPXPPQERADIPPLDVALDDFDQFDANNTNSQSEEHANEEDIVNEKHKRREKKKAKEEREKQIRAAEERLLEDDVPRTADEFEKLIRSSPNSSFTWIKYMDFMVSMVDVEKARSIAERALRTINIREENEKLNIWKAYFNLENKYGNPREEAVMKVFQRALQYNDPKKVYLALLGMYERTEQHNLADELLNKMTKKYKHSCKVXLRRIQSLLKQNKDGIQPXVIDRASLSLPKHKHIKFFSQTAILEFKVGFPDRGRSMFEKILREYPKRTDLWSVYLDQEIQHKDEDIIHALFERAVSLSLPPKKMKFLFKKYLDYEMSQGDQERIESVKRKAIEYVESLNN

SEQ ID NO: 18381 - protein, 532 aa, Glycine max
  unsure (1)..(532): unsure at all Xaa locations
KRRREASKDLVLHQTVNAVVEIVKENYLVLSIPENDYTIGYASVSDYNAQRFPHKQYQHGQSVVATVMALPSPETSGRLLLLVDVVNETSSSSKRTKKKSSYKVGTLVEAEITDIKTLELKLKFGFGLYGRIHITAARPGNVLENPFSSYKVGQTVTARIVAKPNESDGKKGSQWELSVRPEMVTGSSDIDDVSENLEFKIGQCVAGYVYKVESEWVWLTISRNVRAQLYILDGATEPSELEDFQNRYHVGQPVSGHVLSVNMEKKLLRLGCAPLXXYSSLRNXSEEPLTNVVDKGLTAHVHEGDILGGRVSKILPGVGGLLVQVGPRTYGKVHFTELADTLVPDPLSGYHEEQFVKCVVLEVSHTVKGTIHVDLSLGSSNVKLSQDSAVNANXXKCVEKIEDLHPDMIVKGYIKNVTPKGCFIMLSRKIDAKILLSNLSEQYVQEPEKEFPVGKLVIGRVTSVEPLSNRVEVTLKTSTAPNIPKSETMDLSKFHVGDVVSGXRIKRVESLGLFIPLDNTYMVGLCPISEIS

SEQ ID NO: 18382 - protein, 362 aa, Triticum aestivum
  unsure (1)..(362): unsure at all Xaa locations
XPMDISRAPQMSGGFNSTLVLPGPEPRASVPPLQVALDEYEGSDQEGDQKAHEIANGSEPNVKKSDRRLKEKARKQREIEISALEERALQKDIPQTPDEFEKLVRTSPNSSFVWIKYMAFLLDLADVEKARSVAERALRTINIREEEEKLNVWVAYFNLENEYGSPREDAVKKIFQRALQYCDPKKVHLALLGMYERTKQNELADELFDRMTKRFKTSCKIWLRRIQFSLTQGKDVEYIKSVVNRALLSLPQSKRIKFLTQTAILEFKCGVAEEGRSRFELILREYPKRTDIWSVYLDQEIRLGEREIIRALFDRVTCLSLPPRKMKFLFKKYLRYEKAQGDEERIKHVKQKAMEFVEICRA

SEQ ID NO: 18383 - protein, 621 aa, Zea mays
  unsure (1)..(621): unsure at all Xaa locations
XGRVQKILPGVGGLVVQIGPHLHGRVHYTEIVDSWVSEPLSGFHEGQFVKCKVLSVSRSSEGSLRVDLSLRSSNLIRDSNNSRLDDLETCTSRIEKIKDLLPGTEIKGYVKNVNSKGCFIMLSRMVDARITLSNLSDEYVENPQKDFPVGMLVHGRILSTDPSSGRVEASLRKTTGSKLEKLDDISYSDLHVGDIVDGQVKRVESFGLFVTIRRSELVGLCHVSELSDEPVVDINSCYKAGDMVKAKILKIDETRHRVSLGMKKSYXXDSDLTADTNDDESALMDISVAPQMVEYXXNRNLVHPKAEPRASVLPLQVSLDESEGSDLEDNISNTCLEIANGTEANAKKSDKQLKKEARKQRELEISAMEERALQEDIPQTPDDFEKLVRSSPNSSFIWIKYMATLLDLADVKKARAVAERMXVKKVFQRALQYCDPKKLHLALLAMYERTEQYELADELLDRMTKRFKTSCKIWLCRIQFALKQGKDVEYIKAIVNRALLSLPHRKRIKFLSQTAILEFKCGVPEEGRSRFELILREYPKRTDLWSVYLDQEIRLGDVEVIRALFERRVACLTLPPKKMQFLFKKYLNFEKSLGKDNERIQLVQQKAIEYVQSSLPSQDNS

SEQ ID NO: 18384 - protein, 323 aa, Zea mays
  unsure (1)..(323): unsure at all Xaa locations
RRLSHQXEGKGAGGKTDLRPDRKHKEGSKKTKELEISAMEERALQEDIPQTPDDFEKLVRSSPNSSFIWIKYMATLLDLADVEKARAVAERALKTIIPREEEEKLNVWVAYFNLENEYGSPREDAVKKVFQRALQYCDPKKLHLALLAMYERTEQYELADELLDRMTKRFKTSCKIWLCRIQFALKQGKDVEYIKAIVNRALLSLPHRKRIKFLSQTAILEFKCGVPEEGRSRFEIILREYPKRTDLWSVYLDQEIRLGDVEVIRALFERVTCLTLPPKKMQFLFKKYLNFEKSLGKDNERIQLVQQKAIEYVQSSLPSQDNS

SEQ ID NO: 18385 - protein, 354 aa, Zea mays
RRLIHRKAEPRASVLPLQVSLDESEGSDLEDNISNTCLEIANGTEANAKKSDKQLKKEARKQRELEISAMEERALQEDIPQTPDDFEKLVRSSPNSSFIWIKYMATLLDLADVEKARAVAERALKTIIPREEEEKLNVWVAYFNLENEYGSPREDAVKKVFQRALQYCDPKKLHLALLAMYERTEQYELADELLDRMTKRFKTSCKIWLCRIQFALKQGKDVEYIKAIVNRALLSLPHRKRIKFLSQTAILEFKCGVPEEGRSRFELILREYPKRTDLWSVYLDQEIRLGDVEVIRALFERVTCLTLPPKKMQFLFKKYLNFEKSLGKDNERIQLVQQKAIEYVQSSLPSQDNS

SEQ ID NO: 18386 - protein, 307 aa, Zea mays
  unsure (1)..(307): unsure at all Xaa locations
XIGYLEAGRGKIRNAAFSLLSSQARMLSTSKPLKSDKQLKKEARKQRELEISAMEERALQEDIPQTPDDFEKLVRSSPNSSFIWIKYMATLLDLADVKKARAVAERMXVKKVFQRALQYCDPKKLHLALLAMYERTEQYELADELLDRMTKRFKTSCKIWLCRIQFALKQGKDVEYIKAIVNRALLSLPHRKRIKFLSQTAILEFKCGVPEEGRSRFELILREYPKRTDLWSVYLDQEIRLGDVEVIRALFERRVACLTLPPKKMQFLFKKYLNFEKSLGKDNERIQLVQQKAIEYVQSSLPSQDNS

SEQ ID NO: 18387 - protein, 165 aa, Zea mays
  unsure (1)..(165): unsure at all Xaa locations
XLGIRLETLSNLYDXYVENPQKDFRVGMLVHGRILSTDPSSGRVEASLRKTTGSKLEKLDDISYSDLHVGDIVDGQVKRVESFGLFVTIRRSELVGLCHVSELSDEPVGDINSCYKAGDMVKAKILKIDETRHRVSLGMKKSYXXDSDLTADTNDDESASMDISX

SEQ ID NO: 18388 - protein, 262 aa, Zea mays
  unsure (1)..(262): unsure at all Xaa locations
AKVATVEPFGAIVQFXSGVKALCPLPHMSELEHVVKPPKKFKVGAELLFRVLGCKSKRVTVTYKKSLVKSKLDVLSSYADAKIGLVTHGWITHIEKHGCFVKFYNGVQGFVSRSDLGLEAGTEAENVYHVGQVVKCRIINVIPASRKLNVSFVISHNRIAPIDTPKLGSIVSGDVERLTPAAVVVSVNGFSKGTILNEHLADHHGQAAQLKNVLKPGHEFNQLLVLDTEGQNLVLSAKHSLINCANDIPSEISQMHPGVVVH

SEQ ID NO: 18389 - protein, 316 aa, Zea mays
  unsure (1)..(316): unsure at all Xaa locations
IASLSLPPEDGGECRRAPPADWESARACKDQGRIFSLPVLRANSGGLIVRFNSLQGFVPNPLLSPAHWCKDPKRPIQDVTKDLVGTSISVKVAEVNEEEKKLVFSEKDASWSTYSSRIKIGDIYDGIVGSVFHYGAFVHLRFPDGLYHLTGLVHISEVSWDLVQDVKDFLNEGDAVKVIVVNIDMTKSRIALSIRQLEEDPLLETLDKVIPLEADQSPNRMMSPSXXVELLPGLDGICNELLQEDGITDVQFGRQALEKRVVSQDLELWISNVQAKDNRFTLLARAGRQVQEVYLTTSLDQEGIKKSLQRVLGRVP

SEQ ID NO: 18390 - protein, 566 aa, Novosphingobium aromaticivorans
MASNPSRDDFAALLDESLGGAANGGFEGRVVKGTITAIENDKAVIDVGLKSEGRVALREFAAPGQPHGLKVGDEVEVYVDRVENADGEAMLSRDRARREAAWDKLESEFGEGKRVEGVIFGRVKGGFTVDLDGAVAFLPGSQVDIRPVRDVTPLMDMPQPFQILKMDRRRGNIVVSRRAVLEETRAEQRSGLIQNLKEGQIIDGVVKNITDYGAFVDLGGIDGLLHVTDMSYKRVNHPSEVIAIGDTVRVQIIRINQDTQRISLGMKQLESDPWDGVAAKYPVGAKLRGTVTNITEYGAFVELEAGIEGLVHVSEMSWTKKNVHPGKIVSTSQEVDVMVLEVDSDKRRISLGLKQAQQNPWEAFAEKHPVGSTVEGEVKNATEFGLFIGLDGDVDGMVHMSDIAWGISGEDALALHRKGEQVSAVVLDVDVEKERISLGMKQLEKGAPAAGGVASSGSLRRGEVVTVTVLEVRDGGLEVQAGEDGATGFIKRSDLGRDRDEQRPDRFQVGQKIDAMVTGFDRSKKPNFSVKARQLAEEKEAVEQYGSSDAGASLGDILGAALKAKQ

SEQ ID NO: 18391 - protein, 1690 aa, Schizosaccharomyces pombe
MAGNKRKRSNASEGSDSQGNERISSLSANEATQDFPRGGASSLTPLEYKEAVLEAKKDFMESASGTAELSKKTRPKKKGSKKSSKSELDNEENLKVHIQSLRYKNITPGSLILGQIAQINTLDLAVSLPNCLTGYVPITNISDKLSDRLDSIDNHAEDNAATEEEDGLNQIPDLMDLYKVGQWVRVSVTALGSENTTKTGKRHIELSLKPQDANGSAPEAADFVAGSMIQAVVSSIEDHGIVFDIGINNYTGFLSKKHINDFPFVEGQSLLCSVISKEDRIFHLSLTATSTKALEVMPSVQAILPGDYINVLVTDIKESGVIAKYMGVVDVTSDIYHSSPVKGEDLEDKFQLAKSVPARVLFVIPGDPPKIAVSFLPHVLTFNFATPNTPHPDQLDIGFIVNAAKVTYVSSSLGVFCDVGVPEISGFAHISRLSDKKVAGISPNSGPYKVDSTHEARIINYSYVDNLYILSFQQSVLNQQFLRIEDIEVGQFVDGTIAKLIPQGIVVTISEGINGLVPSTHMADIALQFPERRFKVGSSVKCRVLSTNVLRKRVLLTLKKSLLNTDLPLIYDYEQATPGTQTVGTLARIFEDGAIVEFYNSVRAFLPVSEMSEAYIRDAREHFKVGQTLSVTIVSCDPENRKMRVGCREQSWDAKRLERFENIKAGSVLSGIVLQKTEDSVIVDLGDKVTGVITLGQLCDGDLNKCSKVMNKLRASTKLAEVLVLRKDTSKKLISLSLKKSLVEAAKENRMPINITDLKEGIKYFGFVRNATTFGVFVEFCDGLVALVPKAYISEEYVPVPSAVYKPQQSVTCVCLSVELSQEKAFMSFKPLAQKQEKAVEFMESKYDIDNPVDETIKKTYDYVAGKITWAVVTSAKASQLNVDLAANVHGRVDVSEVFDNFGEIVDPNKPLKRFHKGDKIRVRVLGIHDSRNHKFLPISHRVSPKQFLELSVRPSILNMEPFSMKEPQFKKGDEVTGFVNNVSKECVWVSLTPSVNGRIPILDLTTDVKELNSLQKHFFLGKAIKCYVVNAEDSITLSAIGPLQGFENLTPGSRLVGKVTNVNEAGAILQLPGHMSGRVSRIDMFDDYDILPETKFTRNNLVGVCVLSVDVPNRKVALSARNSRTQSQPVEIKDKEINSVDDLKIGDICRGFVCNVANQGLFVTIGHNLIARVKIGELFDTFIKDWKPHFHVNQLVKGSIVGIDNDSKRIEMSLKQSKIKDSSEITKTFADIAVGSNLDGTVVKVGDYGVLIRIDGTDNIVGLCHKSEIADAVVLNISKLYSSGDKVRAHVLDVDSEKRRIALGLKSSYFDSDSDISMSDNEEDVEMRSEDQSDTSESEVGSKDDVQSEEVENLESAGDEDEEEEPSALQANGFDWTDGSTVFDKLADDTEDSEDEEDEEPKRKKSKSDRFDDEEKDLDEIPSTAADFERQLLSSPNSSLLWISYMAYHLNLNELQEAREVGKRALSTINYREEDEKLNVWMALLNLEVAYGTEDSLKEVFKEACAYCDALIVYEKLCGILIKGGKVDLADEYMQLMLKNFKQVPSVWIQYATFLLNNDKAEKAHGLLERSLQSLPKSEHVGIIEKFAILEFKNGDPERGRTIFEGLLSSYPKRLDLWNVLIDMEMKQDDPSIVRRLFQRLLALNLSTKKAKFAFKKWLAYEKNIGDDEGAEQVKRRAIEYVSESHSEN

SEQ ID NO: 18392 - protein, 498 aa, Desulfitobacterium hafniense
ANFHGIVDELKTHTHALKVHNTICNATEERQTVARELAGKVDVMIVVGGKNSANTRKLAGICSERTQTYLIETADELEDNWFTGVVTVGLTAGASTPDWIIEEVYRKMSTMENKETHEMMNMEDWAEGMQNLHRGALVTGTVVKINHDEVFVDLGWKSEGVIALKELTVASDLQTSDIVAIGDQISAVVLRVENEEGNPVLSKRRADEMAAVDKLKELAESKEEIQGKVADVVKGGLIVDVGMRGFVPASQIQPGYVEDLNQFKGQTLRLRVIEFDPAKRRVVLSQKEILQEEQAAKKEHLLATLQEGDVVSGVVKRLAQFGAFVDIGGVDGLLHVSDIAYTRIKHPSEYVNVGDEVEVQILKVDKEQGKISLGLKQLKPSPWESAPEKYALGSLVTGKVVRIAPFGAFVQLEDGIDALIHISQLSEKRVNKVEDVVKVGDMVQAKVIECKPEEKRISLSIREAAAEAQATEDAELLASQPEAPQVTIGDVVQSESES

SEQ ID NO: 18393 - protein, 1779 aa, Neurospora crassa
MGAQKRKEGPGGAPVNKSTQSASESRPSKRPKSNDAGSKAGAKTGKQGNKPAPKSDKPAPPAPTAPATSTLLKEEEPMFPRGGASILTPLEYKQIQVQAKNDALFEEQSSKATAKKAGEKEGKQKKSKKRSKSDDTPAKPDADAVKVESLNFKRLVKGSLVLGSVCAINSLDIAVALPNNIIGHVPITAISAPLTKRLEASAGNDNAEESEDENDNDVDLESLFQIGQYVRAYVVSTVDEASTHTPGKAKRHIELSLQPSLANTGMAEQDVVVNSTVMAAIASVEDHGYVMDIEIADSKLQGFLARKQVDKSIPQEALQPGAVLLCIVTKNAKGKVVQLSTLGETMGNVENVPSTATTIDTFLPGTAADVLVSEVSSHGIVGKIMGSLDVTADLVHSGAGPDGIDLEDTYKVGSRLKARVICNFPTAKHPKLGISVLKHVTSLKPKTASKDDQPVVPLQALPHSTIVEKCTVKQVEPEIGLYVDVGVEGVSGFVHISRVKDGKVDALFENSGPYKVGSVHAGRVVGYNAFDGMYLISLEKSVLEQPFLRIEDIPVGAVVSGVVEKMVVNAAGVGGLIVKIADGISGLVPEMHFADVHLQNPEKKFREGLKVKARVLSTDAASRQIRLTLKKTLALGTIINVLQHGAIVQFYGRLRGFLPVSEMSEAYIQDPKEHFRVGQTVSIYVISFDPDAAKLIVSCKDPSAFGLEKQLALKKLQIGDVVSAKVTQKTDDDVFVELADSSLKAILPVAHLTDKSVSKTQSALKKIHVNQTLAELVILEKNEARRSIILSQKPSLVKASKEGKFLTTLDGARVGDEVSGYIRNITATAVFVQFGGKLTALLPKSMIPREDQDKPDFGMFKSQSVTVKITSVNTELNRLVVAIPGAAEQVKKVETKGEKVANPVDESITTLDDISIGKLTKARIVSVKDTQLNVQLADNIQGRIDVSQVYDSWEQIKDTKKPLKRFQPNQVVPVRVLGVHDARNHRFLPISHRSSHSVLELSAKPSDVKEGASSEPLSFDNLKVGSSYVGFVNNVGQGHLWVNLSPTVRGRVNAMEASDDVSLLTNLAKNFPIGSALRVRVVSVDAESKRLDLSARSPGSEDELTWDKIAQDVILVGKITKVDERQVIVKLSESLAGPVHKVDLVDDYEEANPAKFAKNEIVRVAVVEVDKSNKRIRLSTRPSRILNSSLPVKDKEITQNTKLEVGEIVRGFVKNVSDKGLFVTLGGTVTAFVQIKNLSDAYLKYWKEQFQVDQLVKGRIISVANGRIEMSLKPSVVDKDYVPLTTISDLKEGQTITGRVRKVEEFGAFIDIDGSANLSGLCHRSEMSDKTVKDARKLYEEGDKVKAKVLKVDITAKRINLGLKPSYFGEQDDEDEMDVDEEDAEDSEGDDSDEDMSDADDAVQITGTDNVEDESEDEDEASDVEMVDADVKGLEAGGFDWSASLEDGEKANASAADLEALAKKKKARREPQVTVDKTASLDVDGPQTASDYERLLLGQPNSSQLWIAYMAFQMQVSDLAAARQVAERAIKTINIKEEIEKLNVWIAYLNLEVAYGNEETVDEVFKRACTYNDKQEVHERLASIYIQSGKRKQADDLFEKIVKEFGYKSPEVWVNYAHFLHTTAHSPDRARALLKRATQVLGKETHMYLALLPKFAALEFRSPNGDKEQGRTLFENLLATYPKKFDLWNQLIDLETSAADADKGVIRDLFDRGSKVKGLKPRQAKAWFRRWAQWEEKNGDKKSRERVSAKAQEWARTAAEKKKTAAASAAQEEESGDEE

SEQ ID NO: 18394 - protein, 556 aa, Escherichia coli
MTESFAQLFEESLKEIETRPGSIVRGVVVAIDKDVVLVDAGLKSESAIPAEQFKNAQGELEIQVGDEVDVALDAVEDGFGETLLSREKAKRHEAWITLEKAYEDAETVTGVINGKVKGGFTVELNGIRAFLPGSLVDVRPVRDTLHLEGKELEFKVIKLDQKRNNVVVSRRAVIESENSADDQLLENLQEGMEVKGIVKNLTDYGAFVDLGGVDGLLHITDMAWKRVKHPSEIVNVGDEITVKVLKFDRERTRVSLGLKQLGEDPWVAIAKRYPEGTKLTGRVTNLTDYGCFVEIEEGVEGLVHVSEMDWTNKNIHPSKVVNVGDVVEVMVLDIDEERRRISLGLKQCKANPWQQFAETHNKGDRVEGKIKSITDFGIFIGLDGGIDGLVHLSDISWNVAGEEAVREYKKGDEIAAVVLQVDAERERISLGVKQLAEDPFNNWVALNKKGVIVTGKVTAVDAKGATVELADGVEGYLRASEASRDRVEDATLVLSVGDEVEAKFTGVDRKNRAISLSVRAKDEADEKDAIATVNKQEDANFSNNAMAEAFKAAKGE

SEQ ID NO: 18395 - protein, 557 aa, Escherichia coli
MTESFAQLFEESLKEIETRPGSIVRGVVVAIDKDVVLVDAGLKSESAIPAEQFKNAQGELEIQVGDEVDVALDAVEDGFGETLLSREKAKRHEAWITLEKAYEDAETVTGVINGKVKGGFTVELDGIRAFLPGSLVDVRPVRDTLHLEGKELEFKVIKLDQKRNNVVVSRRAVIESENSAERDQLLENLQEGMEVKGIVKNLTDYGAFVDLGGVDGLLHITDMAWKRVKHPSEIVNVGDEITVKVLKFDRERTRVSLGLKQLGEDPWVAIAKRYPEGTKLTGRVTNLTDYGCFVEIEEGVEGLVHVSEMDWTNKNIHPSKVVNVGDVVEVMVLDIDEERRRISLGLKQCKANPWQQFAETHNKGDRVEGKIKSITDFGIFIGLDGGIDGLVHLSDISWNVAGEEAVREYKKGDEIAAVVLQVDAERERISLGVKQLAEDPFNNWVALNKKGAIVTGKVTAVDAKGATVELADGVEGYLRASEASRDRVEDATLVLSVGDEVEAKFTGVDRKNRAISLSVRAKDEADEKDAIATVNKQEDANFSNNAMAEAFKAAKGE

SEQ ID NO: 18396 - protein, 556 aa, Escherichia coli
MTESFAQLFEESLKEIETRPGSIVRGVVVAIDKDVVLVDAGLKSESAIPAEQFKNAQGELEIQVGDEVDVALDAVEDGFGETLLSREKAKRHEAWITLEKAYEDAETVTGVINGKVKGGFTVELNGIRAFLPGSLVDVRPVRDTLHLEGKELEFKVIKLDQKRNNVVVSRRAVIESENSADDQLLENLQEGMEVKGIVKNLTDYGAFVDLGGVDGLLHITDMAWKRVKHPSEIVNVGDEITVKVLKFDRERTRVSLGLKQLGEDPWVAIAKRYPEGTKLTGRVTNLTDYGCFVEIEEGVEGLVHVSEMDWTNKNIHPSKVVNVGDVVEVMVLDIDEERRRISLGLKQCKANPWQQFAETHNKGDRVEGKIKSITDFGIFIGLDGGIDGLVHLSDISWNVAGEEAVREYKKGDEIAAVVLQVDAERERISLGVKQLAEDPFNNWVALNKKGAIVTGKVTAVDAKGATVELADGVEGYLRASEASRDRVEDATLVLSVGDEVEAKFTGVDRKNRAISLSVRAKDEADEKDAIATVNKQEDANFSNNAMAEAFKAAKGE

SEQ ID NO: 18397 - protein, 679 aa, Trypanosoma brucei
MQYREYRVHHAAPDGILVQLPGNGGFGKLTVETLGGDALAAALLKRFATNDHIRAVARPTRDVHHYRLLSVQLLELWSGAATYPAPVLSLLLQLFRKHALIGLGTTAMARVVKSSPEKGVVLSLPGGIPAVAVLENVSEEAGAVEVRLLNYDVQVDVVNVTVQYDVVERTPSDVDALQKLLTSVTAGSVVSATVLVSCTDDNCAIVEVPCGDECSVIGYYIYNWPGLSAAGDEKPVVGSCLQLTVEFVPEEPALQDVLPFFVLSRRQHFAGLPAVRCAILPNTSTPHATVGLVGRFPWRDKKRDRRPEVEDINDPDDDDSDDDENTNVNRSKIRKRKLEETIDAYERSMETAVPSSSEEFQRLLLASPNNSYLWVQWMTHHVSLQQFEEARLVAEKALTTIGVRETQERLNVWVAYMNLENLHGTAESLASVFKRALRHALDELVVYERLADIFSATRKFNQLLSLCRAMVSKNRKVPRVWERLGTVLIDHNKRDQLKRVLKDMSDALKRDEYALVVVHLGVHEYRNGSVENGRALFEGLLLRMPKKSDVWSVYLDQELGLLARRSEVASAVFVRGLFERAVSTSFSAKVMQQVLTRFMSFERAHGTPADVEKVKARARSYVEAKISASVGSVDPTVKTGGVSVKKGATKDFNATSASAKGSSVSDEATDKHYDGEAEE

SEQ ID NO: 18398 - protein, 378 aa, Providencia sp.
ETVTGVINGKVKGGFTVELNGIRAFLPGSLVDVRPVRDTTHLEGKELEFKVIKLDQKRNNVVVSRRAVIESESSAERDQLLENLQEGMEVKGIVKNLTDYGAFVDLGGVDGLLHITDMAWKRVKHPSEIVNVGDEITVKVLKFDRERTRVSLGLKQLGEDPWVAIAKRYPEGTKLTGRVTNLTDYGCFVEIEEGVEGLVHVSEMDWTNKNIHPSKVVNVGDVVEVMVLDIDEERRRISLGLKQCKSNPWQQFAETHNKGDRVEGKIKSITDFGIFIGLEGGIDGLVHLSDISWNVAGEEAVREYKKGDEIAAVVLQVDAERERISLGVKQLAEDPFNNYLAATKKGAIVTGKVTAVDAKGATVELTLGVEGYLRASEA

SEQ ID NO: 18399 - protein, 363 aa, Prochlorococcus marinus subsp. pastoris str. CCMP1378
MIENPSQIVKEISDEKEIENSTIEENTSDTPKEEDLSFDHKDIPSADSSSSRRNNDLDTAGFTQEEFASLLGKYDYNFKPGDLVKGTVFALEPKGAMIDIGAKTAAFMPMQEVSINRVEGLSDVLQPSESREFFIMSEENEDGQLALSIRRIEYQRAWERVRQLQKEDATIYSEVFATNRGGALVRVEGLRGFIPGSHISARKIKEDLEGEYLPLKFLEVDEERNRLVLSHRRALVEKKMNRLEVGEVVIGSVKGIKPYGAFIDIGGVSGLLHISEISHEHIETPHNVLNVNDQMKVMIIDLDSERGRISLSTKALEPEPGDMLTDPQKVFNKAEEMAAKYKQMLLEQTDENEEQTVEIAESV

SEQ ID NO: 18400 - protein, 1743 aa, Caenorhabditis elegans
MVKLDEVTNEKCFPRGGGSDKPKPLNKSNSDFVGTKGGLKRKSAAPEQHEAKKAKEESSWIPKVEENCFIEGLTGFGVVSEVFDDGVLLHTAGTHTVKIHASEVSKKFTELFNEEKIEIKNAFQLGQMVPFRVISKKQGNDKGKVKGTCNPARLNKHLSPNMLAAGLVLHTAVVSIEEKGAILDVGLDQITGFIEKSQFPAAGLKEGMPLIVRVLSSTSRVVKVTSFVEQDNLNMTSCEKLQLNHLMPGTILECEPTGDAVTAGVIVNIGNGLKGILPRRNLPPRLRENPEKLGKAIRAIVMFCQQNSKILVLNAHPDIVAASRIEKRTSFEGISIGDKVKCTVIDVLPTKSMVYFALPAIDGKKSLVTAVSSRGLLEKPDQVSTEYEVGTEKLCRVTGFRYADRSITISTRKDILNQKITKYQDAKCGDVLDARVHHVAKSGVYFMVCNFVKAFAPLSMLSDKPLPAQKMKNIYKVGTEVKCRVWQICDERKNLIVTCRESILGLKSPSVNSVQELEIGVTVPCVIRKVFPTGVLLLGTFNNICGVLRKESAVHLPGTPKNNDFVVANVEKIEDNRVVFVLRDVNPSAAVANGQNSEKKLVQRPNPADGGISIGKIYKGSLCAKAGEKANVTFTGEGKKEVYASVDDHLLSDLLDAPIGLTKRLLIENKEDISTIVPMGKMAAINRACVKRSVASFVKGMKLPKKIDELKVGKVIVGIVGQVITNVGVFVELVGGSGLVGKVLERKNAKNTSELLEVGQVIVGTIESIDTTKKSFLIDPCTDLETGELMLKKYALPLLESIVEEVKWLAEQSNYPIPGSKVNGKVTKELDDLTLVEFEHNGKKIAGILPKMVDDKKTTEKTKKKKATKSFIVVDINHSTNEVVLATPSTEQSRIVAIRRDYLCAVSPDGLIYLPTRLHPNHLPTSDSKVKLHTVIDLNDQKSVGEGVFVATRGGGDVDDVARTTLINKEFVGDEKKKKQTAEGSDGAVSTSTKSVKNFGVYSGVVIGTANLEENRKRNSLFADIRLPGDNIGRLHVSELPPSLLKAENPLDEFVKRNVRKAVIVRIIGFIKSSKGPRIAELTMIPSKIQAGKVRASNLSYKSNYKIGDVVKCFGANTMTEKQELKVEVNPVWTGTISRENLSDDLKVTAADGGIVDLALKKGEMREAKITAVDRKNMSLKLTLDTAEEAFEIGASVTGRVFFVSKTYIRLKLSSGQQAVLTPTAITDKYETIEKITENQLTDGKLVDVVCAKLQEKPRRYFVVLKNRFNSKSTDAKRQLLLDSKLMKEGDQYDGIVENASKGSLFIELGPGVSGRIPVNEENQDLLEIGTNSVIRVTVVKVAKNEITLKLDDILIRKWTVKPDRKRTSSKSEGVPSKVALLEEERSKETVEAEDPGFDWSNKGFRNEDLAAVGKLTLKDAEEESEEEEEEDEEEVEDEEVDEDASDEEEEVDGEEDESDDEENIELIEKSEEDHSRLVRSDPNSAINWIEYMSHFIEKSDLAAARKTAEEALGAINPTESDELLKIWTAYLNMEVAYGDAATVQKVFERACKNANAYTVHKTLSKIYQKFEKNAEATQILEQMVKKFRANQLEVWTLLAEHLMTQNDQKAARELLPRALKSAPKAQQHVQLISKFAQLEFKHGDAERGRTLLEGLVTAHPKKTDLWLVYAEAVLKHLGIEHARKVLERACNLGFSIHKMRPLYKKWLEMESKHGDAAAVELVKAKAEKFLQAVADNVLEEDN

SEQ ID NO: 18401 - protein, 1810 aa, Caenorhabditis elegans
MPCFCFQKIVDILFTRNISSGVMNILFQMVKLDEVTNEKCFPRGGGSDKPKPLNKSNSDFVGTKGGLKRKSAAPEQHEAKKAKEESSWIPKVEENCFIEGLTGFGVVSEVFDDGVLLHTAGTHTVKIHASEVSKKFTELFNEEKIEIKNAFQLGQMVPFRVISKKQGNDKGKVKGTCNPARLNKHLSPNMLAAGLVLHTAVVSIEEKGAILDVGLDQITGFIEKSQFPAAGLKEGMPLIVRVLSSTSRVVKVTSFVEQDNLNMTSCEKLQLNHLMPGTILECEPTGDAVTAGVIVNIGNGLKGILPRRNLPPRLRENPEKLGKAIRAIVMFCQQNSKILVLNAHPDIVAASRIEKRTSFEGISIGDKVKCTVIDVLPTKSMVYFALPAIDGKKSLVTAVSSRGLLEKPDQVSTEYEVGTEKLCRVTGFRYADRSITISTRKDILNQKITKYQDAKCGDVLDARVHHVAKSGVYFMVCNFVKAFAPLSMLSDKPLPAQKMKNIYKVGTEVKCRVWQICDERKNLIVTCRESILGLKSPSVNSVQELEIGVTVPCVIRKVFPTGVLLLGTFNNICGVLRKESAVHLPGTPKNNDFVVANVEKIEDNRVVFVLRDVNPSAAVANGQNSEKKLVQRPNPADGGISIGKIYKGSLCAKAGEKANVTFTGEGKKEVYASVDDHLLSDLLDAPIGLTKRLLIENKEDISTIVPMGKMAAINRACVKRSVASFVKGMKLPKKIDELKVGKVIVGIVGQVITNVGVFVELVGGSGLVGKVLERKNAKNTSELLEVGQVIVGTIESIDTTKKSFLIDPCTDLETGELMLKKYALPLLESIVEEVKWLAEQSNYPIPGSKVNGKVTKELDDLTLVEFEHNGKKIAGILPKMVDDKKTTEKTKKKKATKSFIVVDINHSTNEVVLATPSTEQSRIVAIRRDYLCAVSPDGLIYLPTRLHPNHLPTSDSKVKLHTVIDLNDQKSVGEGVFVATRGGGDVDDVARTTLINKEFVGDEKKKKQTAEGSDGAVSTSTKSVKNFGVYSGVVIGTANLEENRKRNSLFADIRLPGDNIGRLHVSELPPSLLKAENPLDEFVKRNVRKAVIVRIIGFIKSSKGPRIAELTMIPSKIQAGKVRASNLSYKSNYKIGDVVKCFGANTMTEKQELKVEVNPVWTGTISRENLSDDLKVTAADGGIVDLALKKGEMREAKITAVDRKNMSLKLTLDTAEEAFEIGASVTGRVFFVSKTYIRLKLSSGQQAVLTPTAITDKYETIEKITENQLTDGKLVDVVCAKLQEKPRRYFVVLKNRFNSKSTDAKRQLLLDSKLMKEGDQYDGIVENASKGSLFIELGPGVSGRIPVNEENQDLLEIGTNSVIRVTVVKVAKNEITLKLDDILIRKWTVKPDRKRTSSKSEGVPSKVALLEEERSKETVEAEDPGFDWSNKGFRNEDLAAVGKLTLKDAEEESEEEEEEDEEEVEDEEVDEDASDEEEEVDGEEDESDDEENIELIEKSEEDHSRLVRSDPNSAINWIEYMSHFIEKSDLAAARKTAEEALGAINPTESDELLKIWTAYLNMEVAYGDAATVQKVFERACKNANAYTVHKTLSKIYQKFEKNAEATQILEQMVKKFRANQLEVWTLLAEHLMTQNDQKAARELLPRALKSAPKAQQRESCFRSYFRNISIFIVFFVAFLSVQKYFKTKKAKFNVSDVQLISKFAQLEFKHGDAERGRTLLEGLVTAHPKKTDLWLVYAEAVLKHLGIEHARKVLERACNLGFSIHKMRPLYKKWLEMESKHGDAAAVELVKAKAEKFLQAVADNVLEEDN

SEQ ID NO: 18402 - protein, 375 aa, Nostoc punctiforme
MVNQNLTATEIGFTHEDFAALLDKYDYHFSPGDVVPGTVFSIEPRGALIDIGAKTAAYIPIQEMSINRVDSPEEVLQSNETREFFILTDENEDGQLTLSIRRIEYMRAWERVRQLQAEDATVRSGVFATNRGGALVRIEGLRGFIPGSHISTRKPKEELVGEELPLKFLEVDEERNRLVLSHRRALVERKMNRLEVGEVVIGTVRGIKPYGAFIDIGGVSGLLHISEISHEHIDTPHSVFNVNDEVKVMIIDLDAERGRISLSTKQLEPEPGDMIKNRDLVYDKAEEMAAKYREQLLAKQQGATAAPAAPADVLAEEDIPPATELEDEIPPAAELEEEIPPAAEIEEVTPVVAEIQEKIPATTETEEEIPAAIEE

SEQ ID NO: 18403 - protein, 556 aa, Vibrio cholerae
MTESFAQLFEEFLNETQFQQGTIVKGTVVAIENGYVLVDAGLKSESAIPAEQFKNAAGELEVQVGSQVDVALDAVEDGFGETQLSREKAKRHEAWIVLEKAYEEAATVIGIINGKVKGGFTVELNGIRAFLPGSLVDVRPIRDTAHLENKELEFKVIKLDQKRNNVVVSRRAVIESESSVERDELLETLQEGTEVKGIVKNLTDYGAFVDLGGVDGLLHITDMAWKRVKHPSEIVNVGDEILVKVLKFDRDRTRVSLGLKQLGEDPWVAIAKRYPEGHKLSGRVTNLTDYGCFVEIEEGVEGLVHVSEMDWTNKNIHPSKVVNVGDEVEVMVLDIDEERRRISLGLKQCKANPWQSFAEAQAKGDKVTGKIKSITDFGIFIGLEGGIDGLVHLSDISWNVPGEEAVREFKKGDEISAVVLAVDAERERISLGIKQMENDPFNAYVSDNKKGALVNGTVTAVDAKGATIELEDGVEGYIRASEVSRDRIEDASLILNVGDKVEAKFTGVDRKNRVINLSIKAKDEAEEQEVMATLNKQDEAAFGNAMADAFKAAKGE

SEQ ID NO: 18404 - protein, 549 aa, Haemophilus influenzae Rd
  unsure (1)..(549): unsure at all Xaa locations
MSESFAQLFEESLKVLETRQGSIVSGTVVAIQKGFVLVDAGLKSESAIPVAEFLNAQGELEIQVGDTVNVALDAVEDGFGETKLSREKAVRHESWIELEKAYEEKATVIGLIXGKVKGGFTVELNGVRAFLPGSLVDTRPAREADHLLGKELEFKVIKLDQKRNNVVVSRRAVIESENSQEREQVLENLVEGSEVKGVVKNLTEYGAFVDLGGVDGLLHITDMAWKRVKHPSEIVNVGDEVTVKVLKFDKDRTRVSLGLKQLGQDPWAAIAENHPVNSKLTGKVTNLTDYGCFVEILDGVEGLVHVSEMDWTNKNIHPSKVVSLGDTVEVMVLEIDEERRRISLGLKQCKANPWTQFADTHNKGDKVTGKIKSITDFGIFIGLEGGIDGLVHLSDISWSISGEEAVRQYKKGDEVSAVVLAVDAVKERISLGIKQLEEDPFNNFVAINKKGAVVSATVVEADAKGAKVELAGGVEGYIRSADLTSEVAVGDVVEAKYTGVDRKSRIVHLSVKAKDQAEEAAAVASVNNKQEDIVIPNAMAEAFKAAKGE

SEQ ID NO: 18405 - protein, 1430 aa, Drosophila melanogaster
MVPNEKSFPRGGTIHSEVKTDDVSLNIVFGASQKKVKKAPKVKENLLSYETEEQNGQLEAFSAETLNMDTLQEDMLVMGVVKELTATALQIALPGRMFARTLVADISDAYTRVAKAAMSGDTSEYHDLTELFQLGRIVYGKAIKTEKLDTGRVSLLLSLKPADVHGNLHHKSIKKGFIFSGAVAEALEHGYVIESGVQGLQAFVPCEKPAQKLHVGQLAFLKVKTVHHDTHQSTCTCVQVEQDQLRIKSQNETNLDYILPGSIVKFKVAKHLKDGLKGSIMNESFSAYVNEHHLANALDTLDAYELNEDYNARVLYVMPLTKLVYLTLNLDIKTGAAVAKDQDEEEQEVEPIKVGSVVEKAKVLRLGSGGVVLLLNKKLKGIISYGSIRGNFKGNYDKDEVLSKYGRKTKHKVRILGYDVIESLYYCSDDPNVVNEKLFCLEDINAGDLVTAKIFKKDDKIKGWSVRIGKVNGILEQFYLAPNVRYDVGQSLKCRVLEVNAERKICYVSNRAEYLGKGIKILTDYASAHVGNVYMGTVVRCEDTYVLVKFGNGIKGVLHRQNLKENSSFFEGQTTKFRILTRNKDQITLTLPEDKFQLGEICPVEITNALDAGLEVKITFAAEDDEEDEDGNPKLEEFVGLIPLRLLSDHLELLHAQMRVHPAGSYTDAACIMQNIFSLRDVPYFSGQLTKDWQSVQVGDIIRSYVKHATDQVVDLMVCVRNYNKPVKVHVKMLRLNAVKNAPVELVPEQLLWVKVLSKEVETKTLTVSAKLTDVWSGDLSDTAKLVEGYLNEVAQIKAGLEEASAPISKYSVGEKINVVFKGIDATTNDWVYTVEGNGKVSALLLSSLVGTAKAPEMGSKHEAVILWIEYSSDVLLISNKKLDIAHISPSGELSTNLIGKAGMKAKVLLKLESVAVCSLKKGTNPLVICPIRLHPNDIENSGSAELRQGDFCNIAFIHDKLHIAVPETVWRLWRGVKRTAGTEVAPVKAKKAKVEESPKQKKTTIEETSAQKKVKAKAKVETKTEAKAIPTKRKAEVVEKITNGQKKTQPLTNGIVKEKPKQNGKLFFEDKTPAKNAKSETPKSNGAEGKSRLPGVSSFWEDDVNQSKEGSSDEDEELNVAETQKNAAKKKRLSAKEKAKAEIKEEQRLREIEERNADPKARLETIDQYERLVIAQPNNSISWLKYIAFLLSNTEIEKARALARRAISTISFRETQELRNMWSALLNMELVYSNNFDDVLKEALNCNDPLEIYISVVDILKKNKRKDRLSSVLTTVLNKFKTELRVWPVAAEAYFWLGKSDQVHNLLQRALRALPNQEHIPCIVSFAKLYAKHDNNDMAQTLLDDVVTSYPKRIDIWSVYVDMLIKAGLIDSARNVLERAVVQKLKPNKMQVIYKKYLQLEENHGTDATVAKVKQQAEQWVKNYAKTVK

SEQ ID NO: 18406 - protein, 437 aa, Plasmodium yoelii yoelii
  unsure (1)..(437): unsure at all Xaa locations
MTTAEDDQLGTTNEESKPQNEGNDQICEKTNDINNVKIKNNKKIEGKAIIKDHNKRGNLSLYAEIXNKKKTXKKKKKKKTKEKYDKEDEIENEKTNKKKHKETQEHNSSSSEENEKFDSYDESDNDNILLKNKIINNKNGQNGQNEEKVKPYDYEKLLVSEKNKSTIWISYIVYYLEKGNIQEARNVAERALKTIDIHLIEEKLNIYLCYINMECAYGDNLNEIFKRALLVNNEKSIYLHTMNILKMNKKYNELKELCEEAIKKFKYSKKIWTRYLELLHNTLNDEEYAHNILLKSLHALPKRKHLNIIINAARFEYKYSNIERGKNYFEKLIQEYPKRSDIWFTYLDIHINSLTKGKKNENDDENKKKKIKKLTLNELQFIRNIFERFLSIKFKTRVMKMIFTKWLLFEKNHGSVNTQKMVQKKAYDYVESLNSLV

SEQ ID NO: 18407 - protein, 549 aa, Pasteurella multocida
MTESFAQLFEESLKELETRQGSIVSGTVVAIQKGFVLVDAGLKSESAIPVEEFLNAQGELDVQVGDVVNVALDAVEDGFGETKLSREKAVRHESWIELEKAYEEQATVIGLINGKVKGGFTVELNGVRAFLPGSLVDTRPVRETLHLEGKELEFKVIKLDQKRNNVVVSRRAVIESENSQEREQILENLQEGSEVKGIVKNLTDYGAFVDLGGVDGLLHITDMAWKRVKHPSEIVNVGDEITVKVLKFDKDRTRVSLGLKQLGQDPWVAIAENHPVNSKLSGKVTNLTDYGCFVEILDGVEGLVHVSEMDWTNKNIHPSKVVSLGDVVEVMVLEIDEERRRISLGLKQCKPNPWLQFAETHNKGDKVEGKIKSITDFGIFIGLDGGIDGLVHLSDISWNVSGEEAVRQYKKGDEVAAVVLQVDAVKERISLGIKQLEEDPFNNFVAVNKKGAVLSAKVVEADAKGAKVELDGGVEGYIRAADLTNEVNAGDVVEAKYTGVDRKARIVHLSVRAKDQAEEAAAVANVNNKQEDVAIPNAMAEAFKAAKGE

SEQ ID NO: 18408 - protein, 568 aa, Rickettsia conorii
MSIKLKQRFVPQLAAMNHEFAEDFSKMLETVDTSHIKEKTVVKGQVIEIKNDIIIVDVGLKNEGRIPKSEFLALPEVGDVVEVFIEKIEGRNGRTILSREKAVKEELWGQLEIMCSKGEFVDGTIFGRVKGGFTVDLSGVVAFLPGSQVDVRPIKDPTSIMNIKQPFKILSMDKKLGNIVVSRRAILEESRSEARDEMLSKIKEGMVLEGTVKNITDYGAFIDLGSVDGLLHLTDISWGRVNHPSEVLDFNQKVKVMVIKFDEKNKRISLGIKQLDSNPWEAIKEEFPVGKQMTGKVTNFADYGVFIELKDGLEGLVHSSEISWLKSNQNPRKTLTIGQEVEFVVLEVDTEKHRVSLSIKQCQENPLTKFAENNPVGTIIKAPIRNITDFGIFVALGNNMDGMIHEGDISWEDKGTDLLKSYKKGDEIECKVLAINIEKEQVSLGIKQLSPNPYQEISDEYKKGTIVKALITEVKDEGLEVLLNDKVAGFIKRTELSDEKDEQKPEMFQIDKEIEAKVVSIEKSTGRILLSVKAHKIAERQKALKEYGSSDNTTNMGDILANALEDKK

SEQ ID NO: 18409 - protein, 568 aa, Rickettsia prowazekii
MSIKLKQRFVPQLAAINCQFEEDFAQMLKTVDTSHIKEKTVVKGQVIEIKNDMIIVDVGLKNEGRIPKSEFLSLPEVGDVVEVFIEKIEGRNGRTILSREKAVKEELWGQLEIMCSKGEFVDGTIFGRVKGGFTVDLSGVVAFLPGSQVDVRPIKDPTSIMNIKQPFKILSMDKKLGNIVVSRRVILEESRSEARDEMLSKIKEGIVLEGVVKNITDYGAFIDLGSVDGLLHLTDISWGRVNHPSEVLEFNQKVKVMVIKFDEKTKRISLGIKQLDSNPWDAIKEEFPVGKKMTGKVTNFADYGVFLELKDGLEGLVHSSEISWLKSNQNPRKMLTIGQEVEFIVLEVDTEKHRVSLSIKQCQENPLIKFAENNPIGTIIKAPIRNITDFGIFVVLGNNMDGMIHEGDISWEDNGTDLLKSYKKGDEIECKVLAINFEKEQVSLGIKQLLPNPYQKISDEYKKSTIVKAVVTEIKDDGLVVLLNNKVTGFIKRVELSDEKDEQKPEMFKVHEEIDAKVVSIEKSTGRVLLSIKAHKIAERQKTLKEYGSSDNTTNMGDILANVLEEKK

SEQ ID NO: 18410 - protein, 569 aa, Chlamydia trachomatis
MPKQADYTWGAKKNLDTIACLPEDVKQFKDLLYAMYGFTATEEEPTSEVHPGAILKGTVVDISKDFVVVDVGLKSEGVIPMSEFIDSSEGLTVGAEVEVYLDQTEDDEGKVVLSREKATRQRQWEYILAHCEEGSIVKGQITRKVKGGLIVDIGMEAFLPGSQIDNKKIKNLDDYVGKVCEFKILKINVDRRNVVVSRRELLEAERISKKAELIEQITIGERRKGIVKNITDFGVFLDLDGIDGLLHITDMTWKRIRHPSEMVELNQELEVIILSVDKEKGRVALGLKQKEHNPWEDIEKKYPPGKRVRGKIVKLLPYGAFIEIEEGIEGLIHVSEMSWVKNIVDPNEVVNKGDEVEVVVLSIQKDEGKISLGLKQTKHNPWDNIEEKYPIGLRVTAEIKNLTNYGAFVELEPGIEGLIHISDMSWIKKVSHPSELFKKGNTVEAVILSVDKESKKITLGVKQLTPNPWDEIEVMFPVGSDISGVVTKITAFGAFVELQNGIEGLIHVSELSEKPFAKIEDVLSIGDKVSAKVIKLDPDHKKVSLSIKEFLVHGGDAGHDAEEESSDRD

SEQ ID NO: 18411 - protein, 481 aa, Mycobacterium tuberculosis H37Rv
MPSPTVTSPQVAVNDIGSSEDFLAAIDKTIKYFNDGDIVEGTIVKVDRDEVLLDIGYKTEGVIPARELSIKHDVDPNEVVSVGDEVEALVLTKEDKEGRLILSKKRAQYERAWGTIEALKEKDEAVKGTVIEVVKGGLILDIGLRGFLPASLVEMRRVRDLQPYIGKEIEAKIIELDKNRNNVVLSRRAWLEQTQSEVRSEFLNNLQKGTIRKGVVSSIVNFGAFVDLGGVDGLVHVSELSWKHIDHPSEVVQVGDEVTVEVLDVDMDRERVSLSLKATQEDPWRHFARTHAIGQIVPGKVTKLVPFGAFVRVEEGIEGLVHISELAERHVEVPDQVVAVGDDAMVKVIDIDLERRRISLSLKQANEDYTEEFDPAKYGMADSYDEQGNYIFPEGFDAETNEWLEGFEKQRAEWEARYAEAERRHKMHTAQMEKFAAAEAAGRGADDQSSASSAPSEKTAGGSLASDAQLAALREKLAGSA

SEQ ID NO: 18412 - protein, 536 aa, Chlamydia muridarum
MHGFTATEEEPTSEVQPGAILKGTVVDISKDFVVVDVGLKSEGVIPMSEFIDSSEGLSVGAEVEVYLDQTEDEEGKVVLSREKATRQRQWEYILAHCEEGSIVKGQITRKVKGGLIVDIGMEAFLPGSQIDNKKIKNLDDYVGKVCEFKILKINVDRRNVVVSRRELLEAERISKKAELIEQITIGERRKGIVKNITDFGVFLDLDGIDGLLHITDMTWKRIRHPSEMVELNQELEVIILSVDKEKGRVALGLKQKEHNPWEDIEKKYPPGKRVRGKIVKLLPYGAFIEIEEGIEGLIHVSEMSWVKNIVDPNEVVNKGDEVEVVVLSIQKDEGKISLGLKQTEHNPWDNIEEKYPIGLRVTAEIKNLTNYGAFVELEPGIEGLIHISDMSWIKKVSHPSELFKKGNTVEAVILSVDKESKKITLGVKQLTPNPWDEIEAMFPVGSDISGIVTKITAFGAFVELQNGIEGLIHVSKLSDKPFAKIEDILSIGDKVSAKVIKLDPDHKKVSLSIKEFLAHGGHAGQDAEEETSSNRD

SEQ ID NO: 18413 - protein, 570 aa, Chlamydia muridarum
MPKQADYTWGAKKNLDTIACLPEDVKQFKDLLYAMHGFTATEEEPTSEVQPGAILKGTVVDISKDFVVVDVGLKSEGVIPMSEFIDSSEGLSVGAEVEVYLDQTEDEEGKVVLSREKATRQRQWEYILAHCEEGSIVKGQITRKVKGGLIVDIGMEAFLPGSQIDNKKIKNLDDYVGKVCEFKILKINVDRRNVVVSRRELLEAERISKKAELIEQITIGERRKGIVKNITDFGVFLDLDGIDGLLHITDMTWKRIRHPSEMVELNQELEVIILSVDKEKGRVALGLKQKEHNPWEDIEKKYPPGKRVRGKIVKLLPYGAFIEIEEGIEGLIHVSEMSWVKNIVDPNEVVNKGDEVEVVVLSIQKDEGKISLGLKQTEHNPWDNIEEKYPIGLRVTAEIKNLTNYGAFVELEPGIEGLIHISDMSWIKKVSHPSELFKKGNTVEAVILSVDKESKKITLGVKQLTPNPWDEIEAMFPVGSDISGIVTKITAFGAFVELQNGIEGLIHVSKLSDKPFAKIEDILSIGDKVSAKVIKLDPDHKKVSLSIKEFLAHGGHAGQDAEEETSSNRD

SEQ ID NO: 18414 - protein, 599 aa, Porphyromonas gingivalis
MENLKNIQPREDFNWEEFEAGGVHAAVSRQEQEAAYDKTLNTIKEKEVVMGRVTAINKREVVINVGYKSEGVVPATEFRYNPELKVGDEVEVYIENQEDKKGQLVLSHRKARAARSWERVNEALEKDEIVKGYVKCRTKGGMIVDVFGIEAFLPGSQIDVRPIRDYDAFVEKTMEFKIVKINQEYKNVVVSHKVLIEAELEQQKKEIIGKLEKGQVLEGIVKNITSYGVFIDLGGVDGLIHITDLSWGRVAHPEEIVQLDQKINVVILDFDEDRKRIALGLKQLMPHPWDALDSELKVGDKVKGKVVVMADYGAFVEIAQGVEGLIHVSEMSWTQHLRSAQDFLHVGDEVEAVILTLDREERKMSLGLKQLKPDPWADIETRFPVGSRHHARVRNFTNFGVFVEIEEGVDGLIHISDLSWTKKIKHPSEFTEVGADIEVQVIEIDKENRRLSLGHKQLEENPWDVFETVFTVGSIHEGTVIEVMDKGAVVSLPYGVEGFATPKHMVKEDGSQAVLEEKLPFKVIEFNKDAKRIIVSHSRVFEDEQKMAQREANAERKAEAKAAQKEAAAEAANPAQAVEKATLGDLGELAALKEKLSEN

SEQ ID NO: 18415 - protein, 556 aa, Helicobacter pylori 26695
MSKIADDQNFNDEEENFAKLFKKELEKEETLEKGTIKEGLVVSINENDGYAMVSVGGKTEGRLALNEITDEKGQLLYQKNDPIIVHVSEKGEHPSVSYKKAISQQKIQAKIEELGENYENAIIEGKIVGKNKGGYIVESQGVEYFLSRSHSSLKNDANHIGKRVKACIIRVDKENHSINISRKRFFEVNDKRQLEVSKELLEATEPVLGVVRQITPFGIFVEAKGIEGLVHYSEISHKGPVNPEKYYKEGDEVYVKAIAYDAEKRRLSLSIKATIEDPWEEIQDKLKPGYAIKVVVSNIEHYGVFVDIGNDIEGFLHVSEISWDKNVSHPNNYLSVGQEIDVKIIDIDPKNRRLRVSLKQLTNRPFDVFESKHQVGDVLEGKVATLTDFGAFLNLGGVDGLLHNHDAFWDKDKKCKDHYKIGDVIKVKILKINKKDKKISLSAKHLVTSPTEEFAQKHKTDSVIQGKVVSIKDFGVFINADGIDVLIKNEDLNPLKKDEIKIGQEITCVVVAIEKSNNKVRASVHRLERKKEKEELQAFNTSDDKMTLGDILKEKL

SEQ ID NO: 18416 - protein, 552 aa, Helicobacter pylori J99
MSKIADDQYFNDEEEDFAKLLEKEETLEKGTIKEGLIVSINENDGYAMVSVGGKTEGRLALNEITDEKGQLMYQKNDPIVVHVSEKGEHPSVSYKKAISQQKIQAKIEELGENYENAIIEGKIVGKNKGGYIVESQGVEYFLSRSHSSLKNDANHIGKRIKACIIRVDKENHSINISRKRFFEVNDKRQLEISKELLEATEPVLGVVRQITPFGIFVKFKGIDGLVHYSEISHKGPVNPEKYYKEGDEVYVKAIAYDEEKRRLSLSIKATIEDPWEEIQDKLKPGYAIKVVVSNIEHYGVFVDIGNDIEGFLHVSEISWDKNVSHPSHYLSVGQEIDVKIIDIDPKNRRLRVSLKQLTNRPFDVFESKHQVGDIVEGKVATLTDFGAFLNLGGVDGLLHNHDAFWDKDKKCKDHYKIGDVIKVKILKINKKDKKISLSAKHLVTSPTEEFAQKHKTDSVIQGKVVSIKDFGVFIHADGIDVLIKNEDLNPLKKDEIKIGQEITCVVVAIEKSNNKVRASVHRLERKKEKEELQAFNTSDDKMTLGDILKEKL

SEQ ID NO: 18417 - protein, 383 aa, Bacillus halodurans
MVEEMNNEVTEMKSFSVGDVVSGKVTKVEDKQAFVDVGFKVDGIIPISELSSLHVEKVSDVLSEGDELELKVLKVEDDELILSKRAVQAEKAWETLQAALDSGEVIEAEVADVVKGGLVVDLGVRGFIPASLVERHYVEDFSDYKGRTLRLKVVELDKEANKLILSQRAVLDEEVEAKKKEVLASLQPGDVVEGTVQRLTDFGAFVDVGGVDGLVHISQLAHHRVETPAEVVKEGDAVKVKVLSVDPDSERVSLSIKETLPGPWEQVEGTIQPGDVIEGTVKRLVSFGAFVEVAPGVEGLVHISQIANRHIGTPGEVLSEGERVQAKVLDVNISEKRISLSIRELLDDAGSNQSDREVYESTNEESSGFSLGDMIGDELKKYK

SEQ ID NO: 18418 - protein, 557 aa, Salmonella enterica subsp. enterica serovar Typhi
MTESFAQLFEESLKEIETRPGSIVRGVVVAIDKDVVLVDAGLKSESAIPAEQFKNAQGELEIQVGDEVDVALDAVEDGFGETLLSREKAKRHEAWITLEKAYEDAETVTGVINGKVKGGFTVELNGIRAFLPGSLVDVRPVRDTLHLEGKELEFKVIKLDQKRNNVVVSRRAVIESENSAERDQLLENLQEGMEVKGIVKNLTDYGAFVDLGGVDGLLHITDMAWKRVKHPSEIVNVGDEINVKVLKFDRERTRVSLGLKQLGEDPWVAIAKRYPEGTKLTGRVTNLTDYGCFVEIEEGVEGLVHVSEMDWTNKNIHPSKVVNVGDVVEVMVLDIDEERRRISLGLKQCKSNPWQQFAETHNKGDRVEGKIKSITDFGIFIGLDGGIDGLVHLSDISWNVAGEEAVREYKKGDEIAAVVLQVDAERERISLGVKQLAEDPFNNWVALNKKGAIVTGKVTAVDAKGATVELADGVEGYLRASEASRDRVEDATLVLSVGDDVEAKFTGVDRKNRAISLSVRAKDEADEKDAIATVNKQEDANFSNNAMAEAFKAAKGE

SEQ ID NO: 18419 - protein, 572 aa, Nitrosomonas europaea
MTIATSVAGSSENFAELFNESLSHKEMRVGEVITAEIIRVDYNFVVVNAGLKSESYIPIEEFKNDRGEIEAREGDFVSVAIEALENGFGETRLSRDKAKRLNAWYELEEAMEKGKIVTGMVNGKVKGGLTATINGIRAFLPGSLVDIRPVKDMTPYENKEMEFKVIKLDRKRNNVVVSRRAVLEETQGADRDELLASLQDGAVVQGIVKNITDYGAFVDLGGIDGLLHITDLAWRRVKHPTEVINVGDEVTAKVLKFDQEKNRVSLGLKQLTEDPWIGLSRRYPQGTRIFGKVTNMTDYGAFVEIEQGIEGLVHVSEMDWTNKNVYPSKIVQLGDEVEVMILEIDEDRRRISLGMKQCRPNPWEEFSLSHEKGDKVTGQIKSITDFGLFIGLPGNIDGLVHLSDLSWNQPGEKAISEFKKGDEVEAVVLSIDVEKERISLGIKQLEGDPFNIYVASHDKNSIVKGTVKSVDAKGAVIALTDEVEGYLRASEFSRDKIEDIRSRVNEGDEIEAMIINIDRKNRSISLSVKARIQDEEDKAVKSLASVSNPASAGTTNLGALLKAKIDSKSSEE

SEQ ID NO: 18420 - protein, 1884 aa, Homo sapiens
VAGCRRRGAGDPNMANLEESFPRGGTRKIHKPEKAFQQSVEQDNLFDISTEEGSTKRKKSQKGPAKTKKLKIEKRESSKSAREKFEILSVESLCEGMRILGCVKEVNELELVISLPNGLQGFVQVTEICDAYTKKLNEQVTQEQPLKDLLHLPELFSPGMLVRCVVSSLGITDRGKKSVKLSLNPKNVNRVLSAEALKPGMLLTGTVSSLEDHGYLVDIGVDGTRAFLPLLKAQEYIRQKNKGAKLKVGQYLNCIVEKVKGNGGVVSLSVGHSEVSTAIATEQQSWNLNNLLPGLVVKAQVQKVTPFGLTLNFLTFFTGVVDFMHLDPKKAGTYFSNQAVRACILCVHPRTRVVHLSLRPIFLQPGRPLTRLSCQNLGAVLDDVPVQGFFKKAGATFRLKDGVLAYARLSHLSDSKNVFNPEAFKPGNTHKCRIIDYSQMDELALLSLRTSIIEAQYLRYHDIEPGAVVKGTVLTIKSYGMLVKVGEQMRGLVPPMHLADILMKNPEKKYHIGDEVKCRVLLCDPEAKKLMMTLKKTLIESKLPVITCYADAKPGLQTHGFIIRVKDYGCIVKFYNNVQGLVPKHELSTEYIPDPERVFYTGQVVKVVVLNCEPSKERMLLSFKLSSDPEPKKEPAGHSQKKGKAINIGQLVDVKVLEKTKDGLEVAVLPHNIRAFLPTSHLSDHVANGPLLHHWLQAGDILHRVLCLSQSEGRVLLCRKPALVSTVEGGQDPKNFSEIHPGMLLIGFVKSIKDYGVFIQFPSGLSGLAPKAIMSDKFVTSTSDHFVEGQTVAAKVTNVDEEKQRMLLSLRLSDCGLGDLAITSLLLLNQCLEELQGVRSLMSNRDSVLIQTLAEMTPGMFLDLVVQEVLEDGSVVFSGGPVPDLVLKASRYHRAGQEVESGQKKKVVILNVDLLKLEVHVSLHQDLVNRKARKLRKGSEHQAIVQHLEKSFAIASLVETGHLAAFSLTSHLNDTFRFDSEKLQVGQGVSLTLKTTEPGVTGLLLAVEGPAAKRTMRPTQKDSETVDEDEEVDPALTVGTIKKHTLSIGDMVTGTVKSIKPTHVVVTLEDGIIGCIHASHILDDVPEGTSPTTKLKVGKTVTARVIGGRDMKTFKYLPISHPRFVRTIPELSVRPSELEDGHTALNTHSVSPMEKIKQYQAGQTVTCFLKKYNVVKKWLEVEIAPDIRGRIPLLLTSLSFKVLKHPDKKFRVGQALRATVVGPDSSKTFLCLSLTGPHKLEEGEVAMGRVVKVTPNEGLTVSFPFGKIGTVSIFHMSDSYSETPLEDFVPQKVVRCYILSTADNVLTLSLRSSRTNPETKSKVEDPEINSIQDIKEGQLLRGYVGSIQPHGVFFRLGPSVVGLARYSHVSQHSPSKKALYNKHLPEGKLLTARVLRLNHQKNLVELSFLPGDTGKPDVLSASLEGQLTKQEERKTEAEERDQKGEKKNQKRNEKKNQKGQEEVEMPSKEKQQPQKPQAQKRGGRECRESGSEQERVSKKPKKAGLSEEDDSLVDVYYREGKEEAEETNVLPKEKQTKPAEAPRLQLSSGFAWNVGLDSLTPALPPLAESSDSEEDEKPHQATIKKSKKERELEKQKAEKELSRIEEALMDPGRQPESADDFDRLVLSSPNSSILWLQYMAFHLQATEIEKARAVAERALKTISFREEQEKLNVWVALLNLENMYGSQESLTKVFERAVQYNEPLKVFLHLADIYAKSEKFQEAGELYNRMLKRFRQEKAVWIKYGAFLLRRSQAAASHRVLQRALECLPSKEHVDVIAKFAQLEFQLGDAERAKAIFENTLSTYPKRTDVWSVYIDMTIKHGSQKDVRDIFERVIHLSLAPKRMKFFFKRYLDYEKQHGTEKDVQAVKAKALEYVEAKSSVLED

SEQ ID NO: 18421 - protein, 1871 aa, Homo sapiens
MANLEESFPRGGTRKIHKPEKAFQQSVEQDNLFDISTEEGSTKRKKSQKGPAKTKKLKIEKRESSKSAREKFEILSVESLCEGMRILGCVKEVNELELVISLPNGLQGFVQVTEICDAYTKKLNEQVTQEQPLKDLLHLPELFSPGMLVRCVVSSLGITDRGKKSVKLSLNPKNVNRVLSAEALKPGMLLTGTVSSLEDHGYLVDIGVDGTRAFLPLLKAQEYIRQKNKGAKLKVGQYLNCIVEKVKGNGGVVSLSVGHSEVSTAIATEQQSWNLNNLLPGLVVKAQVQKVTPFGLTLNFLTFFTGVVDFMHLDPKKAGTYFSNQAVRACILCVHPRTRVVHLSLRPIFLQPGRPLTRLSCQNLGAVLDDVPVQGFFKKAGATFRLKDGVLAYARLSHLSDSKNVFNPEAFKPGNTHKCRIIDYSQMDELALLSLRTSIIEAQYLRYHDIEPGAVVKGTVLTIKSYGMLVKVGEQMRGLVPPMHLADILMKNPEKKYHIGDEVKCRVLLCDPEAKKLMMTLKKTLIESKLPVITCYADAKPGLQTHGFIIRVKDYGCIVKFYNNVQGLVPKHELSTEYIPDPERVFYTGQVVKVVVLNCEPSKERMLLSFKLSSDPEPKKEPAGHSQKKGKAINIGQLVDVKVLEKTKDGLEVAVLPHNIRAFLPTSHLSDHVANGPLLHHWLQAGDILHRVLCLSQSEGRVLLCRKPALVSTVEGGQDPKNFSEIHPGMLLIGFVKSIKDYGVFIQFPSGLSGLAPKAIMSDKFVTSTSDHFVEGQTVAAKVTNVDEEKQRMLLSLRLSDCGLGDLAITSLLLLNQCLEELQGVRSLMSNRDSVLIQTLAEMTPGMFLDLVVQEVLEDGSVVFSGGPVPDLVLKASRYHRAGQEVESGQKKKVVILNVDLLKLEVHVSLHQDLVNRKARKLRKGSEHQAIVQHLEKSFAIASLVETGHLAAFSLTSHLNDTFRFDSEKLQVGQGVSLTLKTTEPGVTGLLLAVEGPAAKRTMRPTQKDSETVDEDEEVDPALTVGTIKKHTLSIGDMVTGTVKSIKPTHVVVTLEDGIIGCIHASHILDDVPEGTSPTTKLKVGKTVTARVIGGRDMKTFKYLPISHPRFVRTIPELSVRPSELEDGHTALNTHSVSPMEKIKQYQAGQTVTCFLKKYNVVKKWLEVEIAPDIRGRIPLLLTSLSFKVLKHPDKKFRVGQALRATVVGPDSSKTLLCLSLTGPHKLEEGEVAMGRVVKVTPNEGLTVSFPFGKIGTVSIFHMSDSYSETPLEDFVPQKVVRCYILSTADNVLTLSLRSSRTNPETKSKVEDPEINSIQDIKEGQLLRGYVGSIQPHGVFFRLGPSVVGLARYSHVSQHSPSKKALYNKHLPEGKLLTARVLRLNHQKNLVELSFLPGDTGKPDVLSASLEGQLTKQEERKTEAEERDQKGEKKNQKRNEKKNQKGQEEVEMPSKEKQQPQKPQAQKRGGRECRESGSEQERVSKKPKKAGLSEEDDSLVDVYYREGKEEAEETNVLPKEKQTKPAEAPRLQLSSGFAWNVGLDSLTPALPPLAESSDSEEDEKPHQATIKKSKKERELEKQKAEKELSRIEEALMDPGRQPESADDFDRLVLSSPNSSILWLQYMAFHLQATEIEKARAVAERALKTISFREEQEKLNVWVALLNLENMYGSQESLTKVFERAVQYNEPLKVFLHLADIYAKSEKFQEAGELYNRMLKRFRQEKAVWIKYGAFLLRRSQAAASHRVLQRALECLPSKEHVDVIAKFAQLEFQLGDAERAKAIFENTLSTYPKRTDVWSVYIDMTIKHGSQKDVRDIFERVIHLSLAPKRMKFFFKRYLDYEKQHGTEKDVQAVKAKALEYVEAKSSVLED

SEQ ID NO: 18422 - protein, 1436 aa, Homo sapiens
MANLEESFPRGGTRKIHKPEKAFQQSVEQDNLFDISTEEGSTKRKKSQKGPAKTKKLKIEKRESSKSAREKFEILSVESLCEGMRILGCVKEVNELELVISLPNGLQGFVQVTEICDAYTKKLNEQVTQEQPLKDLLHLPELFSPGMLVRCVVSSLGITDRGKKSVKLSLNPKNVNRVLSAEALKPGMLLTGTVSSLEDHGYLVDIGVDGTRAFLPLLKAQEYIRQKNKGAKLKVGQYLNCIVEKVKGNGGVVSLSVGHSEVSTAIATEQQSWNLNNLLPGLVVKAQVQKVTPFGLTLNFLTFFTGVVDFMHLDPKKAGTYFSNQAVRACILCVHPRTRVVHLSLRPIFLQPGRPLTRLSCQNLGAVLDDVPVQGFFKKAGATFRLKDGVLAYARLSHLSDSKNVFNPEAFKPGNTHKCRIIDYSQMDELALLSLRTSIIEAQYLRYHDIEPGAVVKGTVLTIKSYGMLVKVGEQMRGLVPPMHLADILMKNPEKKYHIGDEVKCRVLLCDPEAKKLMMTLKKTLIESKLPVITCYADAKPGLQTHGFIIRVKDYGCIVKFYNNVQGLVPKHELSTEYIPDPERVFYTGQVVKVVVLNCEPSKERMLLSFKLSSDPEPKKEPAGHSQKKGKAINIGQLVDVKVLEKTKDGLEVAVLPHNIRAFLPTSHLSDHVANGPLLHHWLQAGDILHRVLCLSQSEGRVLLCRKPALVSTVEGGQDPKNFSEIHPGMLLIGFVKSIKDYGVFIQFPSGLSGLAPKAIMSDKFVTSTSDHFVEGQTVAAKVTNVDEEKQRMLLSLRLSDCGLGDLAITSLLLLNQCLEELQGVRSLMSNRDSVLIQTLAEMTPGMFLDLVVQEVLEDGSVVFSGGPVPDLVLKASRYHRAGQEVESGQKKKVVILNVDLLKLEVHVSLHQDLVNRKARKLRKGSEHQAIVQHLEKSFAIASLVETGHLAAFSLTSHLNDTFRFDSEKLQVGQGVSLTLKTTEPGVTGLLLAVEGPAAKRTMRPTQKDSETVDEDEEVDPALTVGTIKKHTLSIGDMVTGTVKSIKPTHVVVTLEDGIIGCIHASHILDDVPEGTSPTTKLKVGKTVTARVIGGRDMKTFKYLPISHPRFVRTIPELSVRPSELEDGHTALNTHSVSPMEKIKQYQAGQTVTCFLKKYNVVKKWLEVEIAPDIRGRIPLLLTSLSFKVLKHPDKKFRVGQALRATVVGPDSSKTLLCLSLTGPHKLEEGEVAMGRVVKVTPNEGLTVSFPFGKIGTVSIFHMSDSYSETPLEDFVPQKVVRCYILSTADNVLTLSLRSSRTNPETKSKVEDPEINSIQDIKEGQLLRGYVGSIQPHGVFFRLGPSVVGLARYSHVSQHSPSKKALYNKHLPEGKLLTARVLRLNHQKNLVELSFLPGDTGKPDVLSASLEGQLTKQEERKTEAEERDQKEKKKKK

SEQ ID NO: 18423 - protein, 406 aa, Homo sapiens
GVNCRRTLDVMSETNNEFLAALESAADQIKVGDVVTGELLAIDNDNQAVVGLSTGEEGVVPAREYSDDRNINLADELKIGDTIEAVVISNVTSDKEGVAYLLSKKRLDARKAWENLSFAEGDTVDAKVINAVRGGLIVDVNGVRGFVPASMVAERFVSDLNQFKNKDIKAQVIEIDPANARLILSRKAVAAQERAAQLAEVFSKLSVGEVVEGTVARLTDFGAFVDLGGVDGLVHVSEISHDRVKNPADVLTKGDKVDVKILALDTEKGRISLSIKATQRGPWDEAADQIAAGSVLEGTVKRVKDFGAFVEILPGIEGLVHVSQISNKRIENPSEVLKSGDKVQVKVLDIKPAEERISLSMKALEEKPEREDRRGNDGSASRADIAAYKQQDDSAATLGDIFGDKL

SEQ ID NO: 18424 - protein, 396 aa, Homo sapiens [sequence omitted]

SEQ ID NO: 18425 - protein, 352 aa, Homo sapiens
GEEGVVPAREYSDDRNINLADELKIGDTIEAVVISNVTSDKEGVSYLLSKKRLDARKAWENLSFAEGDTVDAKVINAVRGGLIVDVNGVRGFVPASMVAERFVSDLNQFKNKDIKAQVIEIDPANARLILSRKAVAAQERAAQLAEVFSKLSVGEVVEGTVARLTDFGAFVDLGGVDGLVHVSEISHDRVKNPADVLTKGDKVDVKILALDTEKGRISLSIKATQRGPWDEAADQIAAGSVLEGTVKRVKDFGAFVEILPGIEGLVHVSQISNKRIENPSEVLKSGDKVQVKVLDIKPAEERISLSMKALEEKPEREDRRGNDGSASRADIAAYKQQDDSAATLGDIFGDKL

SEQ ID NO: 18426 - protein, 372 aa, Cytophaga hutchinsonii
MYNRVNIMLTPKPEDFNWDLVGDKGFGGGYTAAEKEKIASLYEGTLSEVTEKQVLSGTVVGVTERDVIINIGFKSDGLIPLSEFRDVDGGVKVGEVYDVFVEDQENASGQLVLSRRKARIVKAWENIQGALDNDIIIEALVKRRTKGGLIVDLFGVEAFLPGSQIDVKPIRDFDIFVGKKMEVKVVKINYTNDNVVVSHKVLIEKDIEKQKAVILNNLEKGQVLEGVIKNMTNFGVFIDLGGVDGLLHITDISWGRISHPQEVLSLDQKVQVVVLDFDEEKKRISLGMKQLTSHPWDALAADVVVGSKIKGKIVNVADYGAFLELHPGVEGLIHVSEMSWSQHLRNPQDFIKVGDELETVVLTLDRDDVKCL

SEQ ID NO: 18427 - protein, 2429 aa, Mus musculus
DGPPNPKRAKLSSPGFSANDNTDFGSLFDLENDLPDELIPNGELSLLNSGNLVPDAASKHKQLSELLRGGSGSSINPGIGNVSASSPVQQGLGGQAQGQPNSTNMASLGAMGKSPLNQGDSSTPNLPKQAASTSGPTPPASQALNPQAQKQVGLVTSSPATSQTGPGICMNANFNQTHPGLLNSNSGHSLMNQAQQGQAQVMNGSLGAAGRGRGAGMPYPAPAMQGATSSVLAETLTQVSPQMAGHAGLNTAQAGGMTKMGMTGTTSPFGQPFSQTGGQQMGATGVNPQLASKQSMVNSLPAFPTDIKNTSVTTVPNMSQLQTSVGIVPTQAIATGPTADPEKRKLIQQQLVLLLHAHKCQRREQANGEVRACSLPHCRTMKNVLNHMTHCQAGKACQVAHCASSRQIISHWKNCTRHDCPVCLPLKNASDKRNQQTILGSPASGIQNTIGSVGAGQQNATSLSNPNPIDPSSMQRAYAALGLPYMNQPQTQLQPQVPGQQPAQPPAHQQMRTLNALGNNPMSIPAGGITTDQQPPNLISESALPTSLGATNPLMNDGSNSGNIGSLSTIPTAAPPSSTGVRKGWHEHVTQDLRSHLVHKLVQAIFPTPDPAALKDRRMENLVAYAKKVEGDMYESANSRDEYYHLLAEKIYKIQKELEEKRRSRLHKQGILGNQPALPASGAQPPVIPPAQSVRPPNGPLPLPVNRMQVSQGMNSFNPMSLGNVQLPQAPMGPRAASPMNHSVQMNSMASVPGMAISPSRMPQPPNMMGTHANNIMAQAPTQNQFLPQNQFPSSSGAMSVNSVGMGQPAAQAGVSQGQVPGAALPNPLNMLAPQASQLPCPPVTQSPLHPTPPPASTAAGMPSLQHPTAPGMTPPQPAAPTQPSTPVSSGQTPTPTPGSVPSAAQTQSTPTVQAAAQAQVTPQPQTPVQPPSVATPQSSQQQPTPVHTQPPGTPLSQAAASIDNRVPTPSSVTSAETSSQQPGPDVPMLEMKTEVQTDDAEPEPTESKGEPRSEMMEEDLQGSSQVKEETDTTEQKSEPMEVEEKKPEVKVEAKEEEENSSNDTASQSTSPSQPRKKIFKPEELRQALMPTLEALYRQDPESLPFRQPVDPQLLGIPDYFDIVKNPMDLSTIKRKLDTGQYQEPWQYVDDVWLMFNNAWLYNRKTSRVYKFCSKLAEVFEQEIDPVMQSLGYCCGRKYEFSPQTLCCYGKQLCTIPRDAAYYSYQNRYHFCEKCFTEIQGENVTLGDDPSQPQTTISKDQFEKKKNDTLDPEPFVDCKECGRKMHQICVLHYDIIWPSGFVCDNCLKKTGRPRKENKFSAKRLQTTRLGNHLEDRVNKFLRRQNHPEAGEVFVRVVASSDKTVEVKPGMKSRFVDSGEMSESFPYRTKALFAFEEIDGVDVCFFGMHVQEYGSDCPPPNTRRVYISYLDSIHFFRPRCLRTAVYHEILIGYLEYVKKLGYVTGHIWACPPSEGDDYIFHCHPPDQKIPKPKRLQEWYKKMLDKAFAERIINDYKDIFKQANEDRLTSAKELPYFEGDFWPNVLEESIKELEQEEEERKKEESTAASETPEGSQGDSKNAKKKNNKKTNKNKSSISRANKKKPSMPNVSNDLSQKLYATMEKHKEVFFVIHLHAGPVISTQPPIVDPDPLLSCDLMDGRDAFLTLARDKHWEFSSLRRSKWSTLCMLVELHTQGQDRFVYTCNECKHHVETRWHCTVCEDYDLCINCYNTKSHTHKMVKWGLGLDDEGSSQGEPQSKSPQESRRLSIQRCIQSLVHACQCRNANCSLPSCQKMKRVVQHTKGCKRKTNGGCPVCKQLIALCCYHAKHCQENKCPVPFCLNIKHKLRQQQIQHRLQQAQLMRRRMATMNTRNVPQQSLPSPTSAPPGTPTQQPSTPQTPQPPAQPQPSPVNMSPAGFPNVARTQPPTIVSAGKPTNQVPAPPPPAQPPPAAVEAARQIEREAQQQQHLYRANINNGMPPGRAGMGTPGSQMTPVGLNVPRPNQVSGPVMSSMPPGQWQQAPIPQQQPMPGMPRPVMSMQAQAAVAGPRMPNVQPPRSISPSALQDLLRTLKSPSSPQQQQQVLNILKSNPQLMAAFIKQRTAKYVANQPGMQPQPGLQSQPGMQPQPGMHQQPSLQNLNAMQAGVPRPGVPPPQPAMGGLNPQGQALNIMNPGHNPNMTNMNPQYREMVRRQLLQHQQQQQQQQQQQQQQQNSASLAGGMAGHSQFQQPQGPGGYAPAMQQQRMQQHLPIQGSSMGQMAAPMGQLGQMGQPGLGADSTPNIQQALQQRILQQQQMKQQIGSPGQPNPMSPQQHMLSGQPQASHLPGQQIATSLSNQVRSPAPVQSPRPQSQPPHSSPSPRIQPQPSPHHVSPQTGSPHPGLAVTMASSMDQGHLGNPEQSAMLPQLNTPNRSALSSELSLVGDTTGDTLE

SEQ ID NO: 18428 - protein, 2441 aa, Mus musculus
MAENLLDGPPNPKRAKLSSPGFSANDNTDFGSLFDLENDLPDELIPNGELSLLNSGNLVPDAASKHKQLSELLRGGSGSSINPGIGNVSASSPVQQGLGGQAQGQPNSTNMASLGAMGKSPLNQGDSSTPNLPKQAASTSGPTPPASQALNPQAQKQVGLVTSSPATSQTGPGICMNANFNQTHPGLLNSNSGHSLMNQAQQGQAQVMNGSLGAAGRGRGAGMPYPAPAMQGATSSVLAETLTQVSPQMAGHAGLNTAQAGGMTKMGMTGTTSPFGQPFSQTGGQQMGATGVNPQLASKQSMVNSLPAFPTDIKNTSVTTVPNMSQLQTSVGIVPTQAIATGPTADPEKRKLIQQQLVLLLHAHKCQRREQANGEVRACSLPHCRTMKNVLNHMTHCQAPKACQVAHCASSRQIISHWKNCTRHDCPVCLPLKNASDKRNQQTILGSPASGIQNTIGSVGAGQQNATSLSNPNPIDPSSMQRAYAALGLPYMNQPQTQLQPQVPGQQPAQPPAHQQMRTLNALGNNPMSVPAGGITTDQQPPNLISESALPTSLGATNPLMNDGSNSGNIGSLSTIPTAAPPSSTGVRKGWHEHVTQDLRSHLVHKLVQAIFPTPDPAALKDRRMENLVAYAKKVEGDMYESANSRDEYYHLLAEKIYKIQKELEEKRRTRLHKQGILGNQPALPASGAQPPVIPPAQSVRPPNGPLPLPVNRMQVSQGMNSFNPMSLGNVQLPQAPMGPRAASPMNHSVQMNSMASVPGMAISPSRMPQPPNMMGTHANNIMAQAPTQNQFLPQNQFPSSSGAMSVNSVGMGQPAAQAGVSQGQEPGAALPNPLNMLAPQASQLPCPPVTQSPLHPTPPPASTAAGMPSLQHPTAPGMTPPQPAAPTQPSTPVSSGQTPTPTPGSVPSAAQTQSTPTVQAAAQAQVTPQPQTPVQPPSVATPQSSQQQPTPVHTQPPGTPLSQAAASIDNRVPTPSTVTSAETSSQQPGPDVPMLEMKTEVQTDDAEPEPTESKGEPRSEMMEEDLQGSSQVKEETDTTEQKSEPMEVEEKKPEVKVEAKEEEENSSNDTASQSTSPSQPRKKIFKPEELRQALMPTLEALYRQDPESLPFRQPVDPQLLGIPDYFDIVKNPMDLSTIKRKLDTGQYQEPWQYVDDVRLMFNNAWLYNRKTSRVYKFCSKLAEVFEQEIDPVMQSLGYCCGRKYEFSPQTLCCYGKQLCTIPRDAAYYSYQNRYHFCGKCFTEIQGENVTLGDDPSQPQTTISKDQFEKKKNDTLDPEPFVDCKECGRKMHQICVLHYDIIWPSGFVCDNCLKKTGRPRKENKFSAKRLQTTRLGNHLEDRVNKFLRRQNHPEAGEVFVRVVASSDKTVEVKPGMKSRFVDSGEMSESFPYRTKALFAFEEIDGVDVCFFGMHVQDTALIAPHQIQGCVYISYLDSIHFFRPRCLRTAVYHEILIGYLEYVKKLVYVTAHIWACPPSEGDDYIFHCHPPDQKIPKPKRLQEWYKKMLDKAFAERIINDYKDIFKQANEDRLTSAKELPYFEGDFWPNVLEESIKELEQEEEERKKEESTAASETPEGSQGDSKNAKKKNNKKTNKNKSSISRANKKKPSMPNVSNDLSQKLYATMEKHKEVFFVIHLHAGPVISTQPPIVDPDPLLSCDLMDGRDAFLTLARDKHWEFSSLRRSKWSTLCMLVELHTQGQDRFVYTCNECKHHVETRWHCTVCEDYDLCINCYNTKSHTHKMVKWGLGLDDEGSSQGEPQSKSPQESRRLSIQRCIQSLVHACQCRNANCSLPSCQKMKRVVQHTKGCKRKTNGGCPVCKQLIALCCYHAKHCQENKCPVPFCLNIKHNVRQQQIQHCLQQAQLMRRRMATMNTRNVPQQSLPSPTSAPPGTPTQQPSTPQTPQPPAQPQPSPVNMSPAGFPNVARTQPPTIVSAGKPTNQVPAPPPPAQPPPAAVEAARQIEREAQQQQHLYRANINNGMPPGRDGMGTPGSQMTPVGLNVPRPNQVSGPVMSSMPPGQWQQAPIPQQQPMPGMPRPVMSMQAQAAVAGPRMPNVQPNRSISPSALQDLLRTLKSPSSPQQQQQVLNILKSNPQLMAAFIKQRTAKYVANQPGMQPQPGLQSQPGMQPQPGMHQQPSLQNLNAMQAGVPRPGVPPPQPAMGGLNPQGQALNIMNPGHNPNMTNMNPQYREMVRRQLLQHQQQQQQQQQQQQQQQNSASLAGGMAGHSQFQQPQGPGGYAPAMQQQRMQQHLPIQGSSMGQMAAPMGQLGQMGQPGLGADSTPNIQQALQQRILQQQQMKQQIGSPGQPNPMSPQQHMLSGQPQASHLPGQQIATSLSNQVRSPAPVQSPRPQSQPPHSSPSPRIQPQPSPHHVSPQTGTPHPGLAVTMASSMDQGHLGNPEQSAMLPQLNTPNRSALSSELSLVGDTTGDTLEKFVEGL

SEQ ID NO: 18429 - protein, 2441 aa, Mus musculus
MAENLLDGPPNPKRAKLSSPGFSANDNTDFGSLFDLENDLPDELIPNGELSLLNSGNLVPDAASKHKQLSELLRGGSGSSINPGIGNVSASSPVQQGLGGQAQGQPNSTNMASLGAMGKSPLNQGDSSTPNLPKQAASTSGPTPPASQALNPQAQKQVGLVTSSPATSQTGPGICMNANFNQTHPGLLNSNSGHSLMNQAQQGQAQVMNGSLGAAGRGRGAGMPYPAPAMQGATSSVLAETLTQVSPQMAGHAGLNTAQAGGMTKMGMTGTTSPFGQPFSQTGGQQMGATGVNPQLASKQSMVNSLPAFPTDIKNTSVTTVPNMSQLQTSVGIVPTQAIATGPTADPEKRKLIQQQLVLLLHAHKCQRREQANGEVRACSLPHCRTMKNVLNHMTHCQAPKACQVAHCASSRQIISHWKNCTRHDCPVCLPLKNASDKRNQQTILGSPASGIQNTIGSVGAGQQNATSLSNPNPIDPSSMQRAYAALGLPYMNQPQTQLQPQVPGQQPAQPPAHQQMRTLNALGNNPMSVPAGGITTDQQPPNLISESALPTSLGATNPLMNDGSNSGNIGSLSTIPTAAPPSSTGVRKGWHERVTQDLRSHLVHKLVQAIFPTPDPAALKDRRMENLVAYAKKVEGDMYESANSRDEYYHLLAEKIYKIQKELEEKRRTRLHKQGILGNQPALPASGAQPPVIPPAQSVRPPNGPLPLPVNRMQVSQGMNSFNPMSLGNVQLPQAPMGPRAASPMNHSVQMNSMASVPGMAISPSRMPQPPNMMGTHANNIMAQAPTQNQFLPQNQFPSSSGAMSVNSVGMGQPAAQAGVSQGQEPGAALPNPLNMLAPQASQLPCPPVTQSPLHPTPPPASTAAGMPSLQHPTAPGMTPPQPAAPTQPSTPVSSGQTPTPTPGSVPSAAQTQSTPTVQAAAQAQVTPQPQTPVQPPSVATPQSSQQQPTPVHTQPPGTPLSQAAASIDNRVPTPSTVTSAETSSQQPGPDVPMLEMKTEVQTDDAEPEPTESKGEPRSEMMEEDLQGSSQVKEETDTTEQKSEPMEVEEKKPEVKVEAKEEEENSSNDTASQSTSPSQPRKKIFKPEELRQALMPTLEALYRQDPESLPFRQPVDPQLLGIPDYFDIVKNPMDLSTIKRKLDTGQYQEPWQYVDDVRLMFNNAWLYNRKTSRVYKFCSKLAEVFEQEIDPVMQSLGYCCGRKYEFSPQTLCCYGKQLCTIPRDAAYYSYQNRYHFCGKCFTEIQGENVTLGDDPSQPQTTISKDQFEKKKNDTLDPEPFVDCKECGRKMHQICVLHYDIIWPSGFVCDNCLKKTGRPRKENKFSAKRLQTTRLGNHLEDRVNKFLRRQNHPEAGEVFVRVVASSDKTVEVKPGMKSRFVDSGEMSESFPYRTKALFAFEEIDGVDVCFFGMHVQDTALIAPHQIQGCVYISYLDSIHFFRPRCLRTAVYHEILIGYLEYVKKLVYVTAHIWACPPSEGDDYIFHCHPPDQKIPKPKRLQEWYKKMLDKAFAERIINDYKDIFKQANEDRLTSAKELPYFEGDFWPNVLEESIKELEQEEEERKKEESTAASETPEGSQGDSKNAKKKNNKKTNKNKSSISRANKKKPSMPNVSNDLSQKLYATMEKHKEVFFVIHLHAGPVISTQPPIVDPDPLLSCDLMDGRDAFLTLARDKHWEFSSLRRSKWSTLCMLVELHTQGQDRFVYTCNECKHHVETRWHCTVCEDYDLCINCYNTKSHTHKMVKWGLGLDDEGSSQGEPQSKSPQESRRLSIQRCIQSLVHACQCRNANCSLPSCQKMKRVVQHTKGCKRKTNGGCPVCKQLIALCCYHAKHCQENKCPVPFCLNIKHNVRQQQIQHCLQQAQLMRRRMATMNTRNVPQQSLPSPTSAPPGTPTQQPSTPQTPQPPAQPQPSPVNMSPAGFPNVARTQPPTIVSAGKPTNQVPAPPPPAPQQQAAVEAARQIEREAQQQQHLYRANINNGMPPGRDGMGTPGSQMTPVGLNVPRPNQVSGPVMSSMPPGQWQQAPIPQQQPMPGMPRPVMSMQAQAAVAGPRMPNVQPNRSISPSALQDLLRTLKSPSSPQQQQQVLNILKSNPQLMAAFIKQRTAKYVANQPGMQPQPGLQSQPGMQPQPGMHQQPSLQNLNAMQAGVPRPGVPPPQPAMGGLNPQGQALNIMNPGHNPNMTNMNPQYREMVRRQLLQHQQQQQQQQQQQQQQQNSASLAGGMAGHSQFQQPQGPGGYAPAMQQQRMQQHLPIQGSSMGQMAAPMGQLGQMGQPGLGADSTPNIQQALQQRILQQQQMKQQIGSPGQPNPMSPQQHMLSGQPQASHLPGQQIATSLSNQVRSPAPVQSPRPQSQPPHSSPSPRIQPQPSPHHVSPQTGTPHPGLAVTMASSMDQGHLGNPEQSAMLPQLNTPNRSALSSELSLVGDTTGDTLEKFVEGL

SEQ ID NO: 18430 - protein, 234 aa, Mus musculus
MICDFLFICRFVDSGEMAESFPYRTKALFAFEEIDGVDLCFFGMHVQEYGSDCPPPNQRRVYISYLDSVHFFRPKCLRTAVYHEILIGYLEYVKKLGYTTGHIWACPPSEGDDYIFHCHPPDQKIPKPKRLQEWYKKMLDKAVSERIVHDYKDILKQATEDRLTSAKELPYFEGDFWPNVLEESIKELEQEEEERKREENTSNESTDVRAFCVCSVYLDTSLTIQKGVYTLNLV

SEQ ID NO: 18431 - protein, 2156 aa, Rattus norvegicus
MKNVLNHMTHCQSGKSCQVAHCASSRQIISHWKNCTRHDCPVCLPLKNAGDKRNQQSILTGAPVGLGNPSSLGVGQQSTPSLSTVSQIDPSSIERAYAALGLPYQVNQIPPQPPVQAKNQQSQPSGQSPQGMRSMNNMSASPMGVNGGVGVQTPNLLSDSMLHSTINSQNPMMNENASVASLGPLPTAAQPSSTGIRKQWHEDITQDLRNHLVHKLVQAIFPTPDPAALKDRRMENLVAYARKVEGDMYESANNRAEYYHLLAEKIYKIQKELEEKRRTRLQKQNMLPSAPGMVPVPMNTAPNMGQQPTGMTTKTKGYLTISVSTPDGPLPDPSMIRGSVPNQMMPRMTPQPGLNQFGQMNIPQPPIGPRQPSPLQHHGQLAQSGSLNPPMGYGPRMQQTSGQNQFLSQTQFPSQGMNVTNMPLAPSSSQAPVSQAQMSSSSCPVNSPIMPPGSQGSHIHCPTLPQQAHQNSPSPVPSRTPTPHHTPPSIGTQQPAATAIPAPVPTPPAMPPGAQPQSLRPPSRQTPTPPTHLPPQVQPSLPVPPADQSQPQPRSQQSTAASVPTPTAPLLPPQPPTPLSQPAVSVEGQVSNPPSTSSTEVNSQTIPEKQPSQEVKMEVKMDVDQPEPADAQPDDTKEAKAEDGKVEPTETEERGPELKTEVKEEEDQPSTSAAQSSPAPGQSKKKIFKPEELRQALMPTLEALYRQDPESLPFRQPVDPQLLGIPDYFDIVKSPMDLSTIKRKLDTGQYQEPWQYIDDIWLMFNNAWLYNRKTSRVYKYCSKLSEVFEQEIDPVMQSLGYCCGRKVFALLNKYFLLQLEFSPQTLCCYGKQLCTIPRDATYYSYQNRYHFCEKCFNEIQGESVSLGDDPSQPQTTINKEQFSKRKNDTLDPELFVECTECGRKMHQICVLHHEVIWPSGFVCDGCLKKTARTRKENKFSAKRLPSTRLGTFLENRVNDFLRRQNHPESGEVTVRVVHASDKTVEVKPGMKARCLVISHSLLTDLQLFVDSGEMAESFPYRTKALFAFEEIDGVDLCFFGMHVQEYGSDCPPPNQRRVYISYLDSVHFFRPKCLRTAVYHEILIGYLEYVKKLGYTTGHIWACPPSEGDDYIFHCHPPDQKIPKPKRLQEWYKKMLDKAVSERIVHDYKDILKQATEDRLTSAKELPYFEGDFWPNVLEESIKELEQEEEERKREENTSNESTDVTKGDSKNAKKKNNKKTSKNKSSLSRGNKKKPGVPNVSNDLSQKLYATMEKHKEWHYSSRVTVSLVCWQVFFVIRLIACPAPNSLPPIVDPDPLIPCDLMDGRDAFLTLARDKHLEFSSLRRAQWSTMCMLVELHTQSQDRFVYTCNECKHHVETRWHCTVCEDYDLCITCYNTKNHDHKMEKLGLGLDDESNNQQAAATQSPGDSRRLSIQRCIQSLVHACQCRNANCSLPSCQKMKRVVQHTKGCKRKTNGGCPICKQLIALCCYHAKHCQENKCPVPFCLNIKQKLRQQQLQHRLQQAQMLRRRMASMQRTGVAGQQQGLPSPTPATPTTPTGQQPATPQTPQPQPTSQPQPTPPNNMTPYLPRTQTAGPVSQGKAAGQVTPPTPPQTAQPPLPGPPPAAVEMAMQIQRAAETQRQMAHVQIFQRPIQHQMAPMAPMGMNPPPMARGPGGHLDPGMGPAGMQQQPPWAQGGMPQPQQMQSGMPRPAMMSVAQHGQPLNMAPQPGLGQVGVSPLKPGTVSQQALQNLLRTLRSPSSPLQQQQVLSILHANPQLLAAFIKQRAAKYANSNPQPLPGQPGMPQGQPGLQPPTMPGQQGVHSNPALQNMNPMQAGVQRAGLPQQQPQQQLQPPMGGMSPQAQQMNMNHNTMPSQFRDILRRQMMQQQGAGPGIGPGMANHNQFQQPQGIGYPPQQQQQQQQQRMQHHMQQMQQGNMGQMGQLPQALGAEAGASLQAYQQRLLQQQMGSPAQPNPMSPQQHMLPNQAQSPHLQGQQIPNSLSNQVRSPQPVPSPRPQSQPPHSSPSPRMQPQPSPHHVSPQTSSPHPGLVAAQAANPMEQGHFASPDQNSMLSQLASNPGMANLHGASATDLGLSADSADLSSNLSQSLEMKLVQCLPDMYQLFPQLAMAMPQWAATCRPSIDKGEEAEREAGSHCQLSSTPEDMNPRNIEDSV

SEQ ID NO: 18432 - protein, 1605 aa, Rattus norvegicus
MKNVLNHMTHCQSGKSCQVAHCASSRQIISHWKNCTRHDCPVCLPLKNAGDKRNQQSILTGAPVGLGNPSSLGVGQQSTPSLSTVSQIDPSSIERAYAALGLPYQVNQIPPQPPVQAKNQQSQPSGQSPQGMRSMNNMSASPMGVNGGVGVQTPNLLSDSMLHSTINSQNPMMNENASVASLGPLPTAAQPSSTGIRKQWHEDITQDLRNHLVHKLVQAIFPTPDPAALKDRRMENLVAYARKVEGDMYESANNRAEYYHLLAEKIYKIQKELEEKRRTRLQKQNMLPSAPGMVPVPMNTAPNMGQQPTGMTTKTKGYLTISVSTPDGPLPDPSMIRGSVPNQMMPRMTPQPGSQGSHIHCPTLPQQAHQNSPSPVPSRTPTPHHTPPSIGTQQPAATAIPAPVPTPPAMPPGAQPQSLRPPSRQTPTPPTHLPPQLSQPAVSVEGQVSNPPSTSSTEVNSQTIPEKQPSQEVKMEVKMDVDQPEPADAQPDDTKEAKAEDGKVEPTETEERGPELKTEVKEEEDQPSTSAAQSSPAPGQSKKKIFKPEELRQALMPTLEALYRQDPESLPFRQPVDPQLLGIPDYFDIVKSPMDLSTIKRKLDTGQYQEPWQYIDDIWLMFNNAWLYNRKTSRVYKYCSKLSEVFEQEIDPVMQSLGYCCGRKVFALLNKYFLLQLEFSPQTLCCYGKQLCTIPRDATYYSYQNRYHFCEKCFNEIQGESVSLGDDPSQPQTTINKEQFSKRKNDTLDPELFVECTECGRKMHQICVLHHEVIWPSGFVCDGCLKKTARTRKENKFSAKRLPSTRLGTFLENRALFAFEEIDGVDLCFFGMHVQEYGSDCPPPNQRRVYISYLDSVHFFRPKCLRTAVYHEILIGYLEYVKKLGYTTGHIWACPPSEGDDYIFHCHPPDQKIPKPKRLQEWYKKMLDKAVSERIVHDYKDILKQATEDRLTSAKELPYFEGDFWPNVLEESIKELEQEEEERKREENTSNESTDVTKGDSKNAKKKNNKKTSKNKSSLSRGNKKKPGVPNVSNDLSQKLYATMEKHKEWHYSSRVTVSLVCWQVFFVIRLIACPAPNSLPPIVDPDPLIPCDLMDGRDAFLTLARDKHLEFSSLRRAQWSTMCMLVELHTQSQDRFVYTCNECKHHVETRWHCTVCEDYDLCITCYNTKNHDHKMEKLGLGLDDESNNQQAAATQSPGDSRRLSIQRCIQSLVHACQCRNANCSLPSCQKMKRVVQHTKGCKRKTNGGCPICKQLIALCCYHAKHCQENKCPVPFCLNIKQKLRQQQLQHRLQQAQMLRRRMASMQRTGVAGQQQGLPSPTPATPTTPTGQQPATPQTPQPQPTSQPQPTPPNNMTPYLPRTQTAGPVSQGKAAGQVTPPTPPQTAQPPLPGPPPAAVEMAMQIQRAAETQRQMAHVQIFQRPIQHQMAPMAPMGMNPPPMARGPGGHLDPGMGPAGMQQQPPWAQGGMPQPQQMQSGMPRPAMMSVAQHGQPLNMAPQPGLGQVGVSPLKPGTVSQQALQNLLRTLRSPSSPLQQQQVLSILHANPQLLAAFIKQRAAKYANSNPQPLPGQPGMPQGQPGLQPPTMPASHGNATVGSYLQAQY

SEQ ID NO: 18433 - protein, 2531 aa, Anopheles gambiae str. PEST
AMPGQAMLGMGPLGAKTPGMLSSMNQAMGNNVVVNAMGAGGGAGMLGMGSGIGPNGGVGGGAGGAGGPVMTNSMGLSGGVMSGGGLVQLNSGGVRQSNAQQVGGGAGGNGGPMMHQLVPPQNGPMGGGQPRLGNPGLMPRTTGHMNPGLRQLVQQGHAVGAPMVGQMGGGGAGNAAGGQFVVGYQQQGVMAQGVRTVSPVLVNRQPPNAPGPGGARLPNPMVTGGGGAGGATIGMLGGDGSVGPQTQAGPGGPGGVVSLQQQQQHVGPGPNAPQIRPLVASAAAAAAAQQNQAMNSMNVASGAAGGSGPGSSGTVGGATGGGTSGTMNSSPGGNPLLADPEKRKLIQQQLVLLLHAHKCQRREAENPSGNICSLAHCRTMKEVLTHMQSCLLGKNCPKTHCSSSRQIINHWKNCQRQDCPVCLPLQQHHDKQQDTLEPAKGDDASQAEQKEGKADGLADQQQQQDKKEQSETESKSQDAGAGEAKDQQDKPSGESLDHKMADGTAEGKAALDKKQQPGETGAASDAATDQSEKKPESQSPDQTSATDHSAGIATDEPAAAERTAAPNGRLGGPGAGGRTGRPGRVSGAGNAVRLMMPPNQLVSSGGMLQQNATDGMLGQNAANQQGGGGVQQTQANPSIIPMGAGSGGGGNQMLFSPGDGSTLTNSGAVVCSTSTTGGGGMQTMTSQSMPLMNATNTSTMSGGGGGGPNTSSFAAGSGAGGGGAGGTGGTNPSMVAVPVQGTKDWHHSVTPDLRNHLVHKLVQAIFPSPDPSAMFDKRMYNLVAYAKKVEGDMYEMANSRSEYYHLLAEKIYKIQKELEEKRQKRKVGGAGAGGAGANAAGQLLRPLNHNHQQQVNLLGGMNATAGANNPAAMQQMRHGGGAGGLMNQAQNSLGGQLGPNSRLGVVNAQQQGGGPGGQTQQLFVAQPGPSPNGNLVHGAGGTVLPGGLSPFAQQQQPNNHAQGMVGVPQQQPSPQVVNQQSFLNGPAMMDSSSQLQQFNDIVRAKCANLSGGGVDGTQQQLGQLSSALTGQTMAQGMRTAFGGVNASAAQQQQQQGANPGNNPGGTGLTGTADLLASSPYGVVGGAGGTIGPNATTVATSNGPMLPSPAGNSSTSSNSIVPLLLTPGGPPSTESSSAGVGDGLGGPTATTGASSALPVGGGLLPPGSSLGGTMVTGAAATATLSLNGSSTTTTPATTPATPGSGAALPSTSTVLPASTGNLSGGSGTTNTTANGASTLTTSVGMSVSRMTSSSSYSSQMAALEAAMARDKEDSPEQPSSSKNNKGKFEMKREEDIKSEPDSNHMDTSGGGESGGKNVNNECMSMMAHEIKSELMDEQAGRDLVQGGGGAGPPRQPEGEGDEDGAEGGHLPEPTIQTNASDNKKKCSFKPEELREALLPTLEKLVTQEPESIPFRMPVDPNSLGIPDYFDIVRQPMDLSTIRKKLESGQYQDPREYVDDVWLMFDNAWLYNRKTSRVYRYCTKLSEVFEMEIDPVMQSLGYCCGRKYTFNPQVLCCYGKQLCTIPRDAKYYSYQNRSFGALSTRYTYCQKCFNEIPGDTVTLGDDPMQSQTQIKKDQFKEMKNDHLELEPFVDCLDCGRKQHQICVLYLESIWPGGFVCDACLKKKGQKRKDNKFNAKRLPTSKLGTYIETRVNNFLKKKEAGAGEVHIRVVSSSDKMVEVKPGMRSRFVENGEMLPEFPYRAKALFAFEEVDGVDVCFFGMHVQEYGSECAAPNTRRVYIAYLDSVHFFRPRQYRTSVYHEILLGYMDYAKQLGYTMAHIWACPPSEGDDYIFHCHPPEQRIPKPKRLQEWYKKMLDKGMVERTIQDYKDILKQAMEDKLQSASELPYFEGDFWPNVLEESIKELDQEEEEKRKQAEREEAANAMIMSNDDSDTVADGKKKGQKKAKKSNKSKAAQRKSNKKTNEQIGNDLSAKIFATMEKHKEVFFVIRLHSAQSAASLAPIQDPDPLINCDLMDGRDAFLTLARDKHFEFSSLRRAQFSTLCMLYELHNQGQDKFVYTCNNCKNHVETRYHCTVCDDFDLCITCKEKVGHQHKMDKLGFDLDDGSSPSDVKQTNPQEARKQSIQRCIQSLVHACQCRDANCRLPSCQKMKRVVQHTKHCKRKTHGGCPICKQLIALCCYHAKHCQEAKCLVPFCPNIKHKLKQQQLQQRLQQQQLLRRRMAVMNTTRLGAPTPQIPQNSNGGGSSLSSAVCSTNVIAGCSVAPSGPVSNTMAIGVPASGGGVVTSMACGGLNNAGAGAMSPSAVPNTVQMGGMGSPHHGGIGMKPGAQTPPANVLQAVQEEAARQQAPHVGYGKVNPVMIPPVMARAMPAGHMNAGGVGVNVSGVGVMPNAQQQPNAVGVAMGGPGGGPGGLGQNVMQMDQWNTRYPNGGGPGMRPTLPGMMQQPQQQQPQNTLQTVSEASVHSQEHDRPMDKGIMGGGVGGAQMMAGIRQGPVAMQGGMMGNAQQQQAGGQQNQPGQTQMATQPKQAIAQLMATLKNPAAGPEQQQQLLSILKANPQLMAAFIKQRQQ

SEQ ID NO: 18434 - protein, 994 aa, Oryza sativa (japonica cultivar-group)
MGAANFAHSLADKPKQMPERLANTIFTSCASTLPKCSPSIDVLHIGHIKEHFSAEVIWHHKHYGQILPGDAYQNDSSQPSTSGSSSSLSAVWDQTTCSSAMRTLPMDSFSTVNGQNLSTNNKSLYPTTGQGPLLQQYIECEMKQETWSRSLEQSDQSNITTGNRDLYHAQIHPYINGEHKRDRCIQMKEKLGHTSDHEGFSREKSSNLSNHFMHHQQGFMTNYGACSPVSKTVDRAEQTSNSTVSKPTSPASDGSSGKHYPAKRLKVDVPHLVHVNEMEASKEQQPAANETYASAETVQSEVTNSPTKSPCCTSLGDNIACTDNVHGMDMVRLSGSAVQTEEEFRRENSDIEMKDAKVDLLDQTLSGDSLRARKRRGASVLYALTSEELKDHLCTLNHDTSQSKVPTEELLSVEGLPDQNTCNLCGMERLLFEPPPRFCALCFKIINSTGSYYVEVENGNDKSSICGRCHHLSSAKAKYQKRFSYAETDAEAEWWVQCDKCKAWQHQICALFNPKIVDPEAEYTCAKCFLKEKDNEDVDSLEPSTILGARELPRTRLSDHIEQRLSERLVQERQQRAIASGKSVDEVPGVEGLTVRVVSSADRTLQVQPRFKDFFKKEQYPGEFPYKSKAILLFQKNEGVDVCLFAMYVQEYGSACPSPNQRHVYLAYIDSVKYFRPEIKSASGEALRTFVYHEILIGYLDFCKKRGFVSCSIWTCPSTKRDDYVLYCHPTIQKMPKSDKLRSWYQNLVKKAVKEGVVVERNTLYDFFLQPTNECKTNISAAWLPYCDNDFWPGEAERLLEKKDDDTSQKKETQLGRLLRVAKRDDRKGNLEDILLVHKLGERLRTMKEDFLMLCLQQFCKHCHHPIVSGSSWVCTSCKNFFLCERCYAEELNTPLKDRHPATTKQKHAFERIEEEPLPETDDVDPTMESKNCSSMVYDVIPVPVVEEVAICVYSCGNCCSRTHCFVTMQTVQLPDAGKVCITRNIDLPSGVVK

SEQ ID NO: 18435 - protein, 199 aa, Triticum aestivum
  unsure (1)..(199): unsure at all Xaa locations
RQLEINPHXREQKRRSRTSGSPGLQVVAPRLFQKNEGVDVCLFAMYVQEYGSASPSPNQRHVYLAYIDSVKYFRPEIKSASGEALRTFVYHEILIGYLDYCKKQGFVSCSIWACPSTKRDDYVLYCHPTAQKMPRSDKLRSWYQNLIKKAVKEGVVVERNTLYDFFLQPTSECKAIISAACLPYCENDFWPGEAEKLLV

SEQ ID NO: 18436 - protein, 182 aa, Triticum aestivum
  unsure (1)..(182): unsure at all Xaa locations
XGVKPRFLETFQEDNYPTEFPYKSKAVLLFQKIDGVEVCLFGMYVQEFGAECAFPNQRRVYLSYLDSVKYFRPGIKAATGEALRTFVYHEILIGYLEYCKQRGFTSCYIWARPPLEGDNIFYCNPTIQTTRTSDILREWCLAMIRKATKEEIVVELTNLYDHFFITTGECKAKVTASRLTYX

SEQ ID NO: 18437 - protein, 123 aa, Triticum aestivum
  unsure (1)..(123): unsure at all Xaa locations
XGAECADPNQRRVYLSYLDSVKFFRPDVKTVSGEALRTYVYHEILIGYLEYCKQRGFTSCYIWACPPLKGEDYILYCHPEIXKTPKSDKLREWYLSMLRKAVKERIVVELTNLYDHFFITTKX

SEQ ID NO: 18438 - protein, 268 aa, Triticum aestivum
  unsure (1)..(268): unsure at all Xaa locations
XKRALKAAGHTDLSGNASKDAMLMQKLGETIYPMKEDFIMVHLQYSCSHCCILMSSGKRWVCHQCRSFYICDKCYSAEQQLEDRERHPSNSRDTHKLHPVDIVGVPEETKDRDDILESEFFDTRQAFLSLCQGNHYQYDTLRRAKHSSMMVLYHLHNPTAPAFVTTCNVCSHDIETGQGWRCEICPDFDVCNGCYQKGAVNHPHKXGLFRHGMQCKTRASGGCALCKKMWYMLQLHARASXKAATAVPRRRAAVNEMMRQRAAEVATT

SEQ ID NO: 18439 - protein, 201 aa, Triticum aestivum
  unsure (1)..(201): unsure at all Xaa locations
XAGQTDLSGNASKDAILMQKLGETIYPMKEDFIMVHLQHSCSHCSTLMVAGKRWVCHQCKSFYICDSCYDSEQRLEEKERHPSNSRDLHVLHPVDIVGVPEDTKDXDDVLECEFFDTRQAFLSLCQGNHYQYDTLRRAKHSSMMVLYHLHNPTAPAFVTTCNICNNDIEAGQGWRCEECPDFDVCAGCYNKDGGANHRHKX

SEQ ID NO: 18440 - protein, 83 aa, Triticum aestivum
SNQISQILQRHPGGHDLYSGNCVTVREAVGRAEQTSNSTVSKPNSPASDESSGKHHPAKRLKVNYPIPVHADETEFPKEQQPA

SEQ ID NO: 18441 - protein, 121 aa, Triticum aestivum
  unsure (1)..(121): unsure at all Xaa locations
XGVRPRGVLPVLVVAFPTGAPFXSAAVRVSQSGDGVEVCCFGSYVRHSPAVGPCPDPRRVYGADRGSAYYSGPPFLPASGGALRSCVCLAFLLRYLEYCKQRGFTSCYIWACPPLKGEDYX

SEQ ID NO: 18442 - protein, 311 aa, Zea mays
  unsure (1)..(311): unsure at all Xaa locations
XPRVRLSDHIEQRLSERLEQDRQQRASASGKVAEEVPGVKGLTVRVVSSAERLLQVQPRFRGFFKQGKYPGEFPYKSKAILLFQKIEGVDVCLFAMYVQEYGSDCPPPNQRHVYLAYIDSVKYFRPEIKSATGEALRTFVYHEILIGYLDYCKKRGFVSCSIWACPSTKRDDYVLYCHPTVQKMPKSDKLRSWYQNLIKKAIKEGVVVERNTLSDFFLQPTNECKANISAACLPYCENDFWPGEAERLLEKKDDNASQKEETQVGRLLRVAKRDDRKGNLDDILLVHNLGERMRTMKEDFIMLCLQQFCKX

SEQ ID NO: 18443 - protein, 2045 aa, Caenorhabditis elegans
MDEPPSKKSRADSDYDSGLDALSALESLEAFPTSSKDTDVDNNPSTSAGGSGGPSGSTPHPQGTPQPAPSNNGGFNLQPGQSQPQQPPQNMGGGVNGSVLQELLMNPSQTSNNSPRPQAYPPGQQNAFNRSPMMPNGTPNMMSPPSMGRVPGPSPGGPQPPGPGQPQMRPGQPGMFQGDQQQQMMMGAQGQQFPGMMHRYPYAQGGPPPGAQGMPQGYPGVSRGGPTPGQPMGRGAMMNGAMPRSGPMPTQGRPGIPPNQQAMMQPMMTDRQFMQHGQYGQQRPEFMQQYGRPGGYPMMHQGMMMDSNGQPIRGPNQMMMMSNGHPGMSHGPPNGQPGPQAAAAQHAAQQQAAAQAQAQAAAQQQQQQQREQEAAAAAQRNGAGRATTPGSSMLATHQDPEKRKLIQQQLVLLLHAHKCSQREKENRDFAAKNQPPPHAACTLPHCSTMKEVLTHMTSCNVGRLCHFAHCASSRQIIAHWKNCSREDCPVCKPLKRIQDTPLQFSLPDLANLIGVNGNSNGSAEGDGLHQFGSPAMRTGNITNSLFEGFNGNPFQNGPNRGGPRPPGGNGEIPNLPPPDMPDCTKEWHHQVTKDLRNHLVGKLVKAIFPEPNQEAMNDNRLKDLIAYARKVEKEMFESANDREEYYHLLAEKIYKIQKELQEKKNSRLNQGAAAHDQYAIPPSNELAQMLGVEGGRSDVHSEGSSMAVAPSQQNQPWGGAPNSNMHQQIPPNGQVPQVNNSSTFPSSGNSTPNIGASSTVSAMLQPKTEPMDDQNTDSLSSRPPTAIGFGGSSSSTPAPIMNGIVKKEEDPEESSNQAPPSVKDTKDGVAESKPKEQQAKREPTPPPTEDTVFSQEDLIKFLLPVWEKLDKSEDAAPFRVPVDAKLLNIPDYHEIIKRPMDLETVHKKLYAGQYQNAGQFCDDIWLMLDNAWLYNRKNSKVYKYGLKLSEMFVSEMDPVMKSMGYCCAKKLAFTPLSLFCYGAAMCTIAREQQYWVFEQSSTQYNVTVTERYTYCQKCFDALPPEGISLSENPNDRNNMAPKTSFTEQKNSVIDYEPFERCKYCMRKWHRICALHDKKVYPEGFICECCRTAKKYQKPDNKYLASKLPHNKLSTFLEDRVNGFIKKQLQAEAHKYPVIIRTLCVQDKEAEVKAQMKQKYVESNQFPEKFPYRTKAVFAFEIIDGVEVCFFGLHVQEYGSACPAPNARRVYIAYLDSVHFFQPRELRTDVYHELLLGYLDYAKMLGYTMAHIWACPPSEGDDYIFHCHPPEQKIPKPKRLQDWYKKMLEKGVQEGSVVEFKDIYKQARDDNLTTPTQLPYFEGDFWPNVIEDCIREASNEEAQRKVKEDDDDGEDADGGLGGGDSGKKKSSKNKKNNLKKNAKMNKKKAGSITGNEVADKLYSQFEKHKEVFFTIRLVSLQNEPAVLAKPISDPDGLMQSDMMDGRDTFLTKAREEHWEFSSLRRAKYSTLCLAYSLHETDSKGMEYTCNKCSSPAVWHCQSCDDFDLCDGCKPTTQHPHEMEKIKSLIGGGEAGDSAAGGTRYESIQRCIASLVHACQCRDANCRRMSCHKMKRVVQHTKMCKKRINGTCPVCKQLIALCCYHAKHCTRDACTVPFCMNIRQKLAEQKRSQQRRADMMMRRRMEGLQSHVGGAAPTPSTVSNGTPSNAPTPPVSAGPGPAVKGGGVGQVQMQQHQGSHVGGSGPAGMGQPMNSFGGMPGMGLGPNAQNGPGLPGMNPQMNANQSRYMPNGPGLGQSGAPGQQQQPMYSSGMPMQRPGGLGGMNPQQQPQQQQGHPGLQNPGGRPGGVHGMGQNQPVRNNQDMVMNMQMQNQHQQPPPFDSTLQPQIMKINSRLKAAKTEEERETVFSDLKKTPHLFHAWLRMRENQNLVPNRMQGYSQMSMGSSNLQNLQQQQLQQQQAGAMRGGGGFAPGQNNSQPRAPSGQFASMNPSMQQQYPQQQQGWPQQRQQNPGGMQQNANPYNQFQNRQNMMMMPQQQQPHPSNAGDRCSYLLFFVLNLRIDCPRFLYFPFFLNRSLLRCCSECAVI

SEQ ID NO: 18444 - protein, 2027 aa, Caenorhabditis elegans
MDEPPSKKSRADSDYDSGLDALSALESLEAFPTSSKDTDVDNNPSTSAGGSGGPSGSTPHPQGTPQPAPSNNGGFNLQPGQSQPQQPPQNMGGGVNGSVLQELLMNPSQTSNNSPRPQAYPPGQQNAFNRSPMMPNGTPNMMSPPSMGRVPGPSPGGPQPPGPGQPQMRPGQPGMFQGDQQQQMMMGAQGQQFPGMMHRYPYAQGGPPPGAQGMPQGYPGVSRGGPTPGQPMGRGAMMNGAMPRSGPMPTQGRPGIPPNQQAMMQPMMTDRQFMQHGQYGQQRPEFMQQYGRPGGYPMMHQGMMMDSNGQPIRGPNQMMMMSNGHPGMSHGPPNGQPGPQAAAAQHAAQQQAAAQAQAQAAAQQQQQQQREQEAAAAAQRNGAGRATTPGSSMLATHQDPEKRKLIQQQLVLLLHAHKCSQREKENRDFAAKNQPPPHAACTLPHCSTMKEVLTHMTSCNVGRLCHSDTTQTTKKCSVAHCASSRQIIAHWKNCSREDCPVCKPLKRIQDTPLQFSLPDLANLIGVNGNSNGSAEGDGLHQFGSPAMRTGNITNSLFEGFNGNPFQNGPNRGGPRPPGGNGEIPNLPPPDMPDCTKEWHHQVTKDLRNHLVGKLVKAIFPEPNQEAMNDNRLKDLIAYARKVEKEMFESANDREEYYHLLAEKIYKIQKELQEKKNSRLNQGAAAHDQYAIPPSNELAQMLGVEGGRSDVHSEGSSMAVAPSQQNQPWGGAPNSNMHQQIPPNGQVPQVNNSSTFPSSGNSTPNIGASSTVSAMLQPKTEPMDDQNTDSLSSRPPTAIGFGGSSSSTPAPIMNGIVKKEEDPEESSNQAPPSVKDTKDGVAESKPKEQQAKREPTPPPTEDTVFSQEDLIKFLLPVWEKLDKSEDAAPFRVPVDAKLLNIPDYHEIIKRPMDLETVHKKLYAGQYQNAGQFCDDIWLMLDNAWLYNRKNSKVYKYGLKLSEMFVSEMDPVMKSMGYCCAKKLAFTPLSLFCYGAAMCTIAREQQYWVFEQSSTQYNVTVTERYTYCQKCFDALPPEGISLSENPNDRNNMAPKTSFTEQKNSVIDYEPFERCKYCMRKWHRICALHDKKVYPEGFICECCRTAKKYQKPDNKYLASKLPHNKLSTFLEDRVNGFIKKQLQAEAHKYPVIIRTLCVQDKEAEVKAQMKQKYVESNQFPEKFPYRTKAVFAFEIIDGVEVCFFGLHVQEYGSACPAPNARRVYIAYLDSVHFFQPRELRTDVYHELLLGYLDYAKMLGYTMAHIWACPPSEGDDYIFHCHPPEQKIPKPKRLQDWYKKMLEKGVQEGSVVEFKDIYKQARDDNLTTPTQLPYFEGDFWPNVIEDCIREASNEEAQRKVKEDDDDGEDADGGLGGGDSGKKKSSKNKKNNLKKNAKMNKKKAGSITGNEVADKLYSQFEKHKEVFFTIRLVSLQNEPAVLAKPISDPDGLMQSDMMDGRDTFLTKAREEHWEFSSLRRAKYSTLCLAYSLHETDSKGMEYTCNKCSSPAVWHCQSCDDFDLCDGCKPTTQHPHEMEKIKSLIGGGEAGDSAAGGTRYESIQRCIASLVHACQCRDANCRRMSCHKMKRVVQHTKMCKKRINGTCPVCKQLIALCCYHAKHCTRDACTVPFCMNIRQKLAEQKRSQQRRADMMMRRRMEGLQSHVGGAAPTPSTVSNGTPSNAPTPPVSAGPGPAVKGGGVGQVQMQQHQGSHVGGSGPAGMGQPMNSFGGMPGMGLGPNAQNGPGLPGMNPQMNANQSRYMPNGPGLGQSGAPGQQQQPMYSSGMPMQRPGGLGGMNPQQQPQQQQGHPGLQNPGGRPGGVHGMGQNQPVRNNQDMVMNMQMQNQHQQPPPFDSTLQPQIMKINSRLKAAKTEEERETVFSDLKKTPHLFHAWLRQQQLQQQQAGAMRGGGGFAPGQNNSQPRAPSGQFASMNPSMQQQYPQQQQGWPQQRQQNPGGMQQNANPYNQFQNRQNMMMMPQQQQPHPSNAGDRCSYLLFFVLNLRIDCPRFLYFPFFLNRSLLRCCSECAVI

SEQ ID NO: 18445 - protein, 2056 aa, Caenorhabditis elegans
MDEPPSKKSRADSDYDSGLDALSALESLEAFPTSSKDTDVDNNPSTSAGGSGGPSGSTPHPQGTPQPAPSNNGGFNLQPGQSQPQQPPQNMGGGVNGSVLQELLMNPSQTSNNSPRPQAYPPGQQNAFNRSPMMPNGTPNMMSPPSMGRVPGPSPGGPQPPGPGQPQMRPGQPGMFQGDQQQQMMMGAQGQQFPGMMHRYPYAQGGPPPGAQGMPQGYPGVSRGGPTPGQPMGRGAMMNGAMPRSGPMPTQGRPGIPPNQQAMMQPMMTDRQFMQHGQYGQQRPEFMQQYGRPGGYPMMHQGMMMDSNGQPIRGPNQMMMMSNGHPGMSHGPPNGQPGPQAAAAQHAAQQQAAAQAQAQAAAQQQQQQQREQEAAAAAQRNGAGRATTPGSSMLATHQDPEKRKLIQQQLVLLLHAHKCSQREKENRDFAAKNQPPPHAACTLPHCSTMKEVLTHMTSCNVGRLCHSDTTQTTKKCSVAHCASSRQIIAHWKNCSREDCPVCKPLKRIQDTPLQFSLPDLANLIGVNGNSNGSAEGDGLHQFGSPAMRTGNITNSLFEGFNGNPFQNGPNRGGPRPPGGNGEIPNLPPPDMPDCTKEWHHQVTKDLRNHLVGKLVKAIFPEPNQEAMNDNRLKDLIAYARKVEKEMFESANDREEYYHLLAEKIYKIQKELQEKKNSRLNQGAAAHDQYAIPPSNELAQMLGVEGGRSDVHSEGSSMAVAPSQQNQPWGGAPNSNMHQQIPPNGQVPQVNNSSTFPSSGNSTPNIGASSTVSAMLQPKTEPMDDQNTDSLSSRPPTAIGFGGSSSSTPAPIMNGIVKKEEDPEESSNQAPPSVKDTKDGVAESKPKEQQAKREPTPPPTEDTVFSQEDLIKFLLPVWEKLDKSEDAAPFRVPVDAKLLNIPDYHEIIKRPMDLETVHKKLYAGQYQNAGQFCDDIWLMLDNAWLYNRKNSKVYKYGLKLSEMFVSEMDPVMKSMGYCCAKKLAFTPLSLFCYGAAMCTIAREQQYWVFEQSSTQYNVTVTERYTYCQKCFDALPPEGISLSENPNDRNNMAPKTSFTEQKNSVIDYEPFERCKYCMRKWHRICALHDKKVYPEGFICECCRTAKKYQKPDNKYLASKLPHNKLSTFLEDRVNGFIKKQLQAEAHKYPVIIRTLCVQDKEAEVKAQMKQKYVESNQFPEKFPYRTKAVFAFEIIDGVEVCFFGLHVQEYGSACPAPNARRVYIAYLDSVHFFQPRELRTDVYHELLLGYLDYAKMLGYTMAHIWACPPSEGDDYIFHCHPPEQKIPKPKRLQDWYKKMLEKGVQEGSVVEFKDIYKQARDDNLTTPTQLPYFEGDFWPNVIEDCIREASNEEAQRKVKEDDDDGEDADGGLGGGDSGKKKSSKNKKNNLKKNAKMNKKKAGSITGNEVADKLYSQFEKHKEVFFTIRLVSLQNEPAVLAKPISDPDGLMQSDMMDGRDTFLTKAREEHWEFSSLRRAKYSTLCLAYSLHETDSKGMEYTCNKCSSPAVWHCQSCDDFDLCDGCKPTTQHPHEMEKIKSLIGGGEAGDSAAGGTRYESIQRCIASLVHACQCRDANCRRMSCHKMKRVVQHTKMCKKRINGTCPVCKQLIALCCYHAKHCTRDACTVPFCMNIRQKLAEQKRSQQRRADMMMRRRMEGLQSHVGGAAPTPSTVSNGTPSNAPTPPVSAGPGPAVKGGGVGQVQMQQHQGSHVGGSGPAGMGQPMNSFGGMPGMGLGPNAQNGPGLPGMNPQMNANQSRYMPNGPGLGQSGAPGQQQQPMYSSGMPMQRPGGLGGMNPQQQPQQQQGHPGLQNPGGRPGGVHGMGQNQPVRNNQDMVMNMQMQNQHQQPPPFDSTLQPQIMKINSRLKAAKTEEERETVFSDLKKTPHLFHAWLRMRENQNLVPNRMQGYSQMSMGSSNLQNLQQQQLQQQQAGAMRGGGGFAPGQNNSQPRAPSGQFASMNPSMQQQYPQQQQGWPQQRQQNPGGMQQNANPYNQFQNRQNMMMMPQQQQPHPSNAGDRCSYLLFFVLNLRIDCPRFLYFPFFLNRSLLRCCSECAVI

SEQ ID NO: 18446 - protein, 2245 aa, Aplysia californica
MADHQLGPPANKKPRIGSPSLNTPSDNNEFNFGNLNFDGIVNELPDDLDGLQGTSGDGQTPQGSQDTSMGGSLSQLLSRSTPNSQTSLPLPVNSAGGIQTSRSPGMGAMMNMGMGKNPMSNNLAATLANKAATSSHMNMNDALVSSASFTISGTNAGPMGGVTNTMGMNPTMGNPQMIGSVGSLNMNQQMPNQMMNGPTSFPGNMGQMRAMQGNNVNPSTSMQVPQTGMMQSPGMPQMQGHQGMPGHPNMNMPQNPPQNIRPGQPTGSGTSGPRQAAGEPDKSKLIQQQLVLLLHAHKCQRREQNNIEQECKLPYCRTMKNVLNHMTTCNKGKSCEVAHCASSRQIITHWKNCLRQDCPVCFALKIADKRNTQGQSVNQTSTMTAPNAADPATMKRAFESLGLQYNQNTPAHNAAQHGHPQMNAMQNDAGQINKTNMPNQQGPKVVPDQSSSPMSMLPVPPTGQLPQTIQPQSGTQLASATAQAAAMGNAPDIVKSIPVSSRKDWHAQVTQDLRNHLVHKLVQAIFPTPDQATLRDSRMKNLVAYARKVEGDMYESANNRGQYYHLLAEKIYKIQKELEEKRIQRMKVQNAPNAQVPGMQGQIHPNAQNGPNNVQGNAFFNEMNNLPMPNQQQIQPPQGQLKMKWSNMRATPPPVQMPGVATSSTMTMNAALADSQQQFDAIKRSMPQQPGGMNRLMMPSATATSTHQSPQQPLLHQQLNSQAQVVQSQASNQSAMSTPQQSNLQNHMNSTLPDVLGGVNNQRMTGTPTVGGSLDSVVATSGVHVATSQQSLIQLAGPAAATPVSQPHLPISRASQLNGQTPTQDLSNELSQVTDDLMKSESNNKDTALSESSQNLSSLLSAASPSTLSLTTMTPSVVTSSTTVSSMLNLPQKGDVKTESSTDVKVKQEVEVKEEKMDTGKSESEVKPEPDSIKAENETSSPKLDNLDESSQASIEEKPASVGDASNNSAASTPKPRCKKVFDKDELRQALMPTLEKLFKQDPESLPFRQPVDPVVLHIPDYFDIVKKPMDLSTIRRKLDSGLYSDPWEYVDDVCLMFDNAWLYNRKTSRVYKYASKLSEVFESEIDSVMQSLGYCCGHKYVFCPQVLCCYGKQLCTIPRDSMYYSYQNRYVYCEKCFNEIQTDEVELSEDPTQPMTKIRKDQFDRVKNDQLDYEPFIDCQECGRRWHQICALWFESIWREGWSCDSCLKAKGVKRKENKFTSKKLPTTKLGTYLENRVNNFLRKKDSGAGEVTIRVLSSYDKMTEVKPLMKKRFGNDMEDSYPYRAKAMFAFEEIDGVDVCFFGMHVQEYGSSCPGPNTRRVYISYLDSVHFFKPRHLRTAVYHEILIGYLEYAKTLGYTTAHIWACPPSEGDDYIFHCHPPEQKIPKPKRLQEWYKKMLDKAIIDRVVVDYKDIFKDAIDSGISSAKDLAYFEGDFWPNVIEESIKELDQEEEEKRRREEAEAAAAEAEAQDTVEETTDAVCSDVAGTKKGEKKGQRNKKANKSKGSARKNNRKTNLPQGTNDLTAKLYNHMEKHKEVFFVIRLHNQQIAASLPPITEPDPAMSCELMDGRDAFLTTAREKHYEFSSLRRAKLSSMALLYELHNQGKDAFVYTCNSCKAAVETRYHCSTCDDFDLCVPCYNKEGHHHKMTKLGLGLDDIASSDKEENPQESRRKSIQRCISSLVHACQCRNANCRMNACHKMKRVVGHTMSCRRKTNNGCPICKQLIALCCYHAKHCVENKCQVPFCAQLKQKLKQKQLLTTLHQAQMLRRRVAIMTGTTNTSTNNGPSSATPSSQDSPPQSTASQPSFTSGSVGKAPGAPPPRGALIAAQEAQVQAEAQRQGAGVPAINSIGKGAMQPPIRPAAPAIVPSTGKPMRPQQAWPPSYPQAPSQQPRPNMARDVRMQGMQPHPQQQPQQQQPVPTMGPSTGNATAGPAAAGGAGATPIGPAVHTMLRAFKNQHLSQSEWLDLLRKNPQLMAQVLKLKNEKARMQQAQQQQQQQQQQQHPQAQQQQMHGMPNMGQPMPQQAGGQMQHQQQMRNQMNQMMQHQYRQQHIQQQPQQQTSQLNQFAQPQQPFVQRPRMNFPQQTFQNDTGHNMHQFPQQHMMQHRQPMSPQFMLAQQANPSSQQMLNQVRSPPASAAGLPQTVRSPQPTPSPRQQPIPSPRQLQQSPHHNIVNNQSPLHGMGVGQDTSQLSNDHVMLSSFQTHTTMTQLQNSDVSMGQQDNEVAPLTPQDKLANFVNQI

SEQ ID NO: 18447 - protein, 3276 aa, Drosophila melanogaster
MMADHLDEPPQKRVKMDPTDISYFLEENLPDELVSSNSGWSDQLTGGAGGGNGGGGASGVTTNPTSGPNPGGGPNKPAAQGPGSGTGGVGVGVNVGVGGVVGVGVVPSQMNGAGGGNGSGTGGDDGSGNGSGAGNRISQMQHQQLQHLLQQQQQGQKGAMVVPGMQQLGSKSPNLQSPNQGGMQQVVGTQMGMVNSMPMSISNNGNNGMNAIPGMNTIAQGNLGNMVLTNSVGGGMGGMVNHLKQQPGGGGGGMINSVSVPGGPGAGAGGVGAGGGGAVAANQGMHMQNGPMMGRMVGQQHMLRGPHLMGASGGAGGPGNGPGGGGPRMQNPNMQMTQLNSLPYGVGQYGGPGGGNNPQQQQQQQQQQLLAQQMAQRGGVVPGMPQGNRPVGTVVPMSTLGGDGSGPAGQLVSGNPQQQQMLAQQQTGAMGPRPPQPNQLLGHPGQQQQQQQQPGTSQQQQQQQGVGIGGAGVVANAGTVAGVPAVAGGGAGGAVQSSGPGGANRDVPDDRKRQIQQQLMLLLHAHKCNRRENLNPNREVCNVNYCKAMKSVLAHMGTCKQSKDCTMQHCASSRQILLHYKTCQNSGCVICYPFRQNHSVFQNANVPPGGGPAGIGGAPPGGGGAGGGAAGAGGNLQQQQQQQQQQQQNQQPNLTGLVVDGKQGQQVAPGGGQNTAIVLPQQQGAGGAPGAPKTPADMVQQLTQQQQQQQQQVHQQQVQQQELRRFDGMSQQVVAGGMQQQQQQGLPPVIRIQGAQPAVRVLGPGGPGGPSGPNVLPNDVNSLHQQQQQMLQQQQQQGQNRRRGGLATMVEQQQQHQQQQQQPNPAQLGGNIPAPLSVNVGGFGNTNFGGAAAGGAVGANDKQQLKVAQVHPQSHGVGAGGASAGAGASGGQVAAGSSVLMPADTTGSGNAGNPNQNAGGVAGGAGGGNGGNTGPPGDNEKDWRESVTADLRNHLVHKLVQAIFPTSDPTTMQDKRMHNLVSYAEKVEKDMYEMAKSRSEYYHLLAEKIYKIQKELEEKRLKRKEQHQQMLMQQQGVANPVAGGAAGGAGSAAGVAGGVVLPQQQQQQQQQQQQQGQQPLQSCIHPSISPMGGVMPPQQLRPQGPPGILGQQTAAGLGVGVGVTNNMVTMRSHSPGGNMLALQQQQRMQFPQQQQQQPPGSGAGKMLVGPPGPSPGGMVVNPALSPYQTTNVLTSPVPGQQQQQQFINANGGTGANPQLSEIMKQRHIHQQQQQQQQQQQQGMLLPQSPFSNSTPLQQQQQQQQQQQQQQQATSNSFSSPMQQQQQGQQQQQQKPGSVLNNMPPTPTSLEALNAGAGAPGTGGSASNVTVSAPSPSPGFLSNGPSIGTPSNNNNNSSANNNPPSVSSLMQQPLSNRPGTPPYIPASPVPATSASGLAASSTPASAAATCASSGSGSNSSSGATAAGASSTSSSSSAGSGTPLSSVSTPTSATMATSSGGGGGGGGNAGGGSSTTPASNPLLLMSGGTAGGGTGATTTTSTSSSSRMMSSSSSLSSQMAALEAAARDNDDETPSPSGENTNGSGGSGNAGGMASKGKLDSIKQDDDIKKEFMDDSCGGNNDSSQMDCSTGGGKGKNVNNDGTSMIKMEIKTEDGLDGEVKIKTEAMDVDEAGGSTAGEHHGEGGGGSGVGGGKDNINGAHDGGATGGAVDIKPKTETKPLVPEPLAPNAGDKKKKCQFNPEELRTALLPTLEKLYRQEPESVPFRYPVDPQALGIPDYFEIVKKPMDLGTIRTNIQNGKYSDPWEYVDDVWLMFDNAWLYNRKTSRVYRYCTKLSEVFEAEIDPVMQALGYCCGRKYTFNPQVLCCYGKQLCTIPRDAKYYSYQNSLKEYGVASNRYTYCQKCFNDIQGDTVTLGDDPLQSQTQIKKDQFKEMKNDHLELEPFVNCQECGRKQHQICVLWLDSIWPGGFVCDNCLKKKNSKRKENKFNAKRLPTTKLGVYIETRVNNFLKKKEAGAGEVHIRVVSSSDKCVEVKPGMRRRFVEQGEMMNEFPYRAKALFAFEEVDGIDVCFFGMHVQEYGSECPAPNTRRVYIAYLDSVHFFRPRQYRTAVYHEILLGYMDYVKQLGYTMAHIWACPPSEGDDYIFHCHPTDQKIPKPKRLQEWYKKMLDKGMIERIIQDYKDILKQAMEDKLGSAAELPYFEGDFWPNVLEESIKELDQEEEEKRKQAEAAEAAAAANLFSIEENEVSGDGKKKGQKKAKKSNKSKAAQRKNSKKSNEHQSGNDLSTKIYATMEKHKEVFFVIRLHSAQSAASLAPIQDPDPLLTCDLMDGRDAFLTLARDKHFEFSSLRRAQFSTLSMLYELHNQGQDKFVYTCNHCKTAVETRYHCTVCDDFDLCIVCKEKVGHQHKMEKLGFDIDDGSALADHKQANPQEARKQSIQRCIQSLAHACQCRDANCRLPSCQKMKLVVQHTKNCKRKPNGGCPICKQLIALCCYHAKNCEEQKCPVPFCPNIKHKLKQQQSQQKFQQQQLLRRRVALMSRTAAPAALQGPAAVSGPTVVSGGVPVVGMSGVAVSQQVIPGQAGILPPGAGGMSPSTVAVPSPVSGGAGAGGMGGMTSPHPHQPGIGMKPGGGHSPSPNVLQVVKQVQEEAARQQVSHGGGFGKGVPMAPPVMNRPMGGAGPNQNVVNQLGGMGVGVGGVGGVGVGGVGGVGVNQLNSGGGNTPGAPISGPGMNVNHLMSMDQWGGGGAGGGGANPGGGNPQARYANNTGGMRQPTHVMQTNLIPPQQQQQMMGGLGGPNQLGGGQMPVGGQHGGMGMGMGAPPMAGTVGGVRPSPGAGGGGGSATGGGLNTQQLALIMQKIKNNPTNESNQHILAILKQNPQIMAAIIKQRQQSQNNAAAGGGAPGPGGALQQQQAGNGPQNPQQQQQQQQQQQVMQQQQMQHMMNQQQGGGGPQQMNPNQQQQQQQVNLMQQQQQGGPGGPGSGLPTRMPNMPNALGMLQSLPPNMSPGVSTQGGMVPNQNWNKMRYMQMSQYPPPYPQRQRGPHMGGAGPGPGQQQFPGGGGGAGNFNAGGAGGAGGVVGVGGVPGGAGTVPGGDQYSMANAAAASNMLQQQQGQVGVGVGVGVKPGPGQQQQQMGVGMPPGMQQQQQQQQPLQQQQMMQVAMPNANAQNPSAVVGGPNAQVMGPPTPHSLQQQLMQSARSSPPIRSPQPTPSPRSAPSPRAAPSASPRAQPSPHHVMSSHSPAPQGPPHDGMHNHGMHHQSPLPGVPQDVGVGVGVGVGVGVNVNVGNVGVGNAGGALPDASDQLTKFVERL

SEQ ID NO: 18448 - protein, 3190 aa, Drosophila melanogaster
MMADHLDEPPQKRVKMDPTDISYFLEENLPDELVSSNSGWSDQLTGGAGGGNGGGGASGVTTNPTSGPNPGGGPNKPAAQGPGSGTGGVGVGVNVGVGGVVGVGVVPSQMNGAGGGNGSGTGGDDGSGNGSGAGNRISQMQHQQLQHLLQQQQQGQKGAMVVPGMQQLGSKSPNLQSPNQGGMQQVVGTQMGMVNSMPMSISNNGNNGMNAIPGMNTIAQGNLGNMVLTNSVGGGMGGMVNHLKQQPGGGGGGMINSVSVPGGPGAGAGGVGAGGGGAVAANQGMHMQNGPMMGRMVGQQHMLRGPHLMGASGGAGGPGNGPGGGGPRMQNPNMQMTQLNSLPYGVGQYGGPGGGNNPQQQQQQQQQQLLAQQMAQRGGVVPGMPRGNRPVGTVVPMSTLGGDGSGPAGQLVSGNPQQQQMLAQQQTGAMGPRPPQPNQLLGHPGQQQQQQQQPGTSQQQQQQQGVGIGGAGVVANAGTVAGVPAVAGGGAGGAVQSSGPGGANRDVPDDRKRQIQQQLMLLLHAHKCNRRENLNPNREVCNVNYCKAMKSVLAHMGTCKQSKDCTMQHCASSRQILLHYKTCQNSGCVICYPFRQNHSVFQNANVPPGGGPAGIGGAPPGGGGAGGGAAGAGGNLQQQQQQQQQQQQNQQPNLTGLVVGGKQGQQVAPGGGQNTAIVLPQQQGAGGAPGAPKTPADMVQQLTQQQQQQQQQVHQQQVQQQELRRFDGMSQQVVAGGMQQQQQQGLPPVIRIQGAQPAVRVLGPGGPGGPSGPNVLPNDVNSLHQQQQQMLQQQQQQGQNRRRGGLATMVEQQQQHQQQQQQPNPAQLGGNIPAPLSVNVGGFGNTNFGGAAAGGAVGANDKQQLKVAQVHPQSHGVGAGGASAGAGASGGQVAAGSSVLMPADTTGSGNAGNPNQNAGGVAGGAGGGNGGNTGPPGDNEKDWRESVTADLRNHLVHKLVQAIFPTSDPTTMQDKRMHNLVSYAEKVEKDMYEMAKSRSEYYHLLAEKIYKIQKELEEKRLKRKEQHQQMLMQQQGVANPVAGGAAGGAGSAAGVAGGVVLPQQQQQQQQQQQQQGQQPLQSCIHPSISPMGGVMPPQQLRPQGPPGILGQQTAAGLGVGVGVTNNMVTMRSHSPGGNMLALQQQQRMQFPQQQQQQPPGSGAGKMLVGPPGPSPGGMVVNPALSPYQTTNVLTSPVPGQQQQQQFINANGGTGANPQLSEIMKQRHIHQQQQQQQQQQQQQGMLLPQSPFSNSTPLQQQQQQQQQQQQQQATSNSFSSPMQQQQQGQQQQQQKPGSVLNNMPPTPTSLEALNAGAGAPGTGGSASNVTVSAPSPSPGFLSNGPSIGTPSNNNNSSSANNNPPSVSSLMQQPLSNRPGTPPYIPASPVPATSASGLAASSTPASAAATCASSGSGSNSSSGATAAGASSTSSSSSAGSGTPLSSVSTPTSATMATSSGGGGGGGGNAGGGSSTTPASNPLLLMSGGTAGGGTGATTTTSTSSSSRMMSSSSSLSSQMAALEAAARDNDDETPSPSGENTNGSGGSGNAGGMASKGKLDSIKQDDDIKKEFMDDSCGGNNDSSQMDCSTGGGKGKNVNNDGTSMIKMEIKTEDGLDGEVKIKTEAMDVDEAGGSTAGEHHGEGGGGSGVGGGKDNINGAHDGGATGGAVDIKPKTETKPLVPEPLAPNAGDKKKKCQFNPEELRTALLPTLEKLYRQEPESVPFRYPVDPQALGIPDYFEIVKKPMDLGTIRTNIQNGKYSDPWEYVDDVWLMFDNAWLYNPKTSRVYRYCTKLSEVFEAEIDPVMQALGYCCGRKYTFNPQVLCCYGKQLCTIPRDAKYYSYQNSLKEYGVASNRYTYCQKCFNDIQGDTVTLGDDPLQSQTQIKKDQFKEMKNDHLELEPFVNCQECGRKQHQICVLWLDSIWPGGFVCDNCLKKKNSKRKENKFNAKRLPTTKLGVYIETRVNNFLKKKEAGAGEVHIRVVSSSDKCVEVKPGMRRRFVEQGEMMNEFPYRAKALFAFEEVDGIDVCFFGMHVQEYGSECPAPNTRRVYIAYLDSVHFFRPRQYRTAVYHEILLGYMDYVKQLGYTMAHIWACPPSEGDDYIFHCHPTDQKIPKPKRLQEWYKKMLDKGMIERIIQDYKDILKQAMEDKLGSAAELPYFEGDFWPNVLEESIKELDQEEEEKRKQAEAAEAAAAANLFSIEENEVSGDGKKKGQKKAKKSNKSKAAQRKNSKKSNEHQSGNDLSTKIYATMEKHKEVFFVIRLHSAQSAASLAPIQDPDPLLTCDLMDGRDAFLTLARDKHFEFSSLRRAQFSTLSMLYELHNQGQDKFVYTCNHCKTAVETRYHCTVCDDFDLCIVCKEKVGHQHKMEKLGFDIDDGSALADHKQANPQEARKQSIQRCIQSLAHACQCRDANCRLPSCQKMKLVVQHTKNCKRKPNGGCPICKQLIALCCYHAKNCEEQKCPVPFCPNIKHKLKQQQSQQKFQQQQLLRRRVALMSRTAAPAALQGPAAVSGPTVVSGGVPVVGMSGVAVSQQVIPGQAGILPPGAGGMSPSTVAVPSPVSGGAGAGGMGGMTSPHPHQPGIGMKPGGGHSPSPNVLQVVKQVQEEAARQQVSHGGGFGKGVPMAPPVMNRPMGGAGPNQNVVNQLGGMGVGVGGVGGVGVGGVGGVGVNQLNSGGGNTPGAPISGPGMNVNHLMSMDQWGGGGAGGGGANPGGGNPQARYANNTGGMRQPTHVMQTNLIPPQQQQQMMGGLGGPNQLGGGQMPVGGQHGGMGMGMGAPPMAGTVGGVRPSPGAGGGGGSATGGGLNTQQLALIMQKIKNNPTNESNQHILAILKQNPQIMAAIIKQRQQSQNNAAAGGGAPGPGGALQQQQAGNGPQNPQQQQQQQQQQQVMQQQQMQHMMNQQQGGGGPQQMNPNQQQQQQQVNLMQQQQQGGPGGPGSGLPTRMPNMPNALGMLQSLPPNMSPGVSTQGGMVPNQNWNKMRYMQMSQYPPPYPQRQRGPHMGGAGPGPGQQQFPGGGGGAGNFNAGGAGGAGGVVGVGGVPGGAGTVPGGDQYSMANAAAASNMLQQQQGQVGVGVGVGVKPGPGQQQQQMGVGMPPGMQQQQQQQQPLQQQQMMQVAMPNANAQNPSAVVGGPNAQVMVRRRRISAAAADAIGPLVAAYSLPAANAIATFGSIATCCSIRLA

SEQ ID NO: 18449 - protein, 2414 aa, Homo sapiens
MAENVVEPGPPSAKRPKLSSPALSASASDGTDFGSLFDLEHDLPDELINSTELGLTNGGDINQLQTSLGMVQDAASKHKQLSELLRSGSSPNLNMGVGGPGQVMASQAQQSSPGLGLINSMVKSPMTQAGLTSPNMGMGTSGPNQGPTQSTGMMNSPVNQPAMGMNTGTNAGMNPGMLAAGNGQGIMPNQVMNGSIGAGRGRQDMQYPNPGMGSAGNLLTEPLQQGSPQMGGQTGLRGPQPLKMGMMNNPNPYGSPYTQNPGQQIGASGLGLQIQTKTVLSNNLSPFAMDKKAVPGGGMPNMGQQPAPQVQQPGLVTPVAQGMGSGAHTADPEKRKLIQQQLVLLLHAHKCQRREQANGEVRQCNLPHCRTMKNVLNHMTHCQSGKSCQVAHCASSRQIISHWKNCTRHDCPVCLPLKNAGDKRNQQPILTGAPVGLGNPSSLGVGQQSAPNLSTVSQIDPSSIERAYAALGLPYQVNQMPTQPQVQAKNQQNQQPGQSPQGMRPMSNMSASPMGVNGGVGVQTPSLLSDSMLHSAINSQNPMMSENASVPSLGPMPTAAQPSTTGIRKQWHEDITQDLRNHLVHKLVQAIFPTPDPAALKDRRMENLVAYARKVEGDMYESANNRAEYYHLLAEKIYKIQKELEEKRRTRLQKQNMLPNAAGMVPVSMNPGPNMGQPQPGMTSNGPLPDPSMIRGSVPNQMMPRITPQSGLNQFGQMSMAQPPIVPRQTPPLQHHGQLAQPGALNPPMGYGPRMQQPSNQGQFLPQTQFPSQGMNVTNIPLAPSSGQAPVSQAQMSSSSCPVNSPIMPPGSQGSHIHCPQLPQPALHQNSPSPVPSRTPTPHHTPPSIGAQQPPATTIPAPVPTPPAMPPGPQSQALHPPPRQTPTPPTTQLPQQVQPSLPAAPSADQPQQQPRSQQSTAASVPTPNAPLLPPQPATPLSQPAVSIEGQVSNPPSTSSTEVNSQAIAEKQPSQEVKMEAKMEVDQPEPADTQPEDISESKVEDCKMESTETEERSTELKTEIKEEEDQPSTSATQSSPAPGQSKKKIFKPEELRQALMPTLEALYRQDPESLPFRQPVDPQLLGIPDYFDIVKSPMDLSTIKRKLDTGQYQEPWQYVDDIWLMFNNAWLYNRKTSRVYKYCSKLSEVFEQEIDPVMQSLGYCCGRKLEFSPQTLCCYGKQLCTIPRDATYYSYQNRYHFCEKCFNEIQGESVSLGDDPSQPQTTINKEQFSKRKNDTLDPELFVECTECGRKMHQICVLHHEIIWPAGFVCDGCLKKSARTRKENKFSAKRLPSTRLGTFLENRVNDFLRRQNHPESGEVTVRVVHASDKTVEVKPGMKARFVDSGEMAESFPYRTKALFAFEEIDGVDLCFFGMHVQEYGSDCPPPNQRRVYISYLDSVHFFRPKCLRTAVYHEILIGYLEYVKKLGYTTGHIWACPPSEGDDYIFHCHPPDQKIPKPKRLQEWYKKMLDKAVSERIVHDYKDIFKQATEDRLTSAKELPYFEGDFWPNVLEESIKELEQEEEERKREENTSNESTDVTKGDSKNAKKKNNKKTSKNKSSLSRGNKKKPGMPNVSNDLSQKLYATMEKHKEVFFVIRLIAGPAANSLPPIVDPDPLIPCDLMDGRDAFLTLARDKHLEFSSLRRAQWSTMCMLVELHTQSQDRFVYTCNECKHHVETRWHCTVCEDYDLCITCYNTKNHDHKMEKLGLGLDDESNNQQAAATQSPGDSRRLSIQRCIQSLVHACQCRNANCSLPSCQKMKRVVQHTKGCKRKTNGGCPICKQLIALCCYHAKHCQENKCPVPFCLNIKQKLRQQQLQHRLQQAQMLRRRMASMQRTGVVGQQQGLPSPTPATPTTPTGQQPTTPQTPQPTSQPQPTPPNSMPPYLPRTQAAGPVSQGKAAGQVTPPTPPQTAQPPLPGPPPTAVEMAMQIQRAAETQRQMAHVQIFQRPIQHQMPPMTPMAPMGMNPPPMTRGPSGHLEPGMGPTGMQQQPPWSQGGLPQPQQLQSGMPRPAMMSVAQHGQPLNMAPQPGLGQVGISPLKPGTVSQQALQNLLRTLRSPSSPLQQQQVLSILHANPQLLAAFIKQRAAKYANSNPQPIPGQPGMPQGQPGLQPPTMPGQQGVHSNPAMQNMNPMQAGVQRAGLPQQQPQQQLQPPMGGMSPQAQQMNMNHNTMPSQFRDILRRQQMMQQQQQQGAGPGIGPGMANHNQFQQPQGVGYPPQPQQRMQHHMQQMQQGNMGQIGQLPQALGAEAGASLQAYQQRLLQQQMGSPVQPNPMSPQQHMLPNQAQSPHLQGQQIPNSLSNQVRSPQPVPSPRPQSQPPHSSPSPRMQPQPSPHHVSPQTSSPHPGLVAAQANPMEQGHFASPDQNSMLSQLASNPGMANLHGASATDLGLSTDNSDLNSNLSQSTLDIH

SEQ ID NO: 18450 - protein, 2442 aa, Homo sapiens
MAENLLDGPPNPKRAKLSSPGFSANDSTDFGSLFDLENDLPDELIPNGGELGLLNSGNLVPDAASKHKQLSELLRGGSGSSINPGIGNVSASSPVQQGLGGQAQGQPNSANMASLSAMGKSPLSQGDSSAPSLPKQAASTSGPTPAASQALNPQAQKQVGLATSSPATSQTGPGICMNANFNQTHPGLLNSNSGHSLINQASQGQAQVMNGSLGAAGRGRGAGMPYPTPAMQGASSSVLAETLTQVSPQMTGHAGLNTAQAGGMAKMGITGNTSPFGQPFSQAGGQPMGATGVNPQLASKQSMVNSLPTFPTDIKNTSVTNVPNMSQMQTSVGIVPTQAIATGPTADPEKRKLIQQQLVLLLHAHKCQRREQANGEVRACSLPHCRTMKNVLNHMTHCQAGKACQVAHCASSRQIISHWKNCTRHDCPVCLPLKNASDKRNQQTILGSPASGIQNTIGSVGTGQQNATSLSNPNPIDPSSMQRAYAALGLPYMNQPQTQLQPQVPGQQPAQPQTHQQMRTLNPLGNNPMNIPAGGITTDQQPPNLISESALPTSLGATNPLMNDGSNSGNIGTLSTIPTAAPPSSTGVRKGWHEHVTQDLRSHLVHKLVQAIFPTPDPAALKDRRMENLVAYAKKVEGDMYESANSRDEYYHLLAEKIYKIQKELEEKRRSRLHKQGILGNQPALPAPGAQPPVIPQAQPVRPPNGPLSLPVNRMQVSQGMNSFNPMSLGNVQLPQAPMGPRAASPMNHSVQMNSMGSVPGMAISPSRMPQPPNMMGAHTNNMMAQAPAQSQFLPQNQFPSSSGAMSVGMGQPPAQTGVSQGQVPGAALPNPLNMLGPQASQLPCPPVTQSPLHPTPPPASTAAGMPSLQHTTPPGMTPPQPAAPTQPSTPVSSSGQTPTPTPGSVPSATQTQSTPTVQAAAQAQVTPQPQTPVQPPSVATPQSSQQQPTPVHAQPPGTPLSQAAASIDNRVPTPSSVASAETNSQQPGPDVPVLEMKTETQAEDTEPDPGESKGEPRSEMMEEDLQGASQVKEETDIAEQKSEPMEVDEKKPEVKVEVKEEEESSSNGTASQSTSPSQPRKKIFKPEELRQALMPTLEALYRQDPESLPFRQPVDPQLLGIPDYFDIVKNPMDLSTIKRKLDTGQYQEPWQYVDDVWLMFNNAWLYNRKTSRVYKFCSKLAEVFEQEIDPVMQSLGYCCGRKYEFSPQTLCCYGKQLCTIPRDAAYYSYQNRYHFCEKCFTEIQGENVTLGDDPSQPQTTISKDQFEKKKNDTLDPEPFVDCKECGRKMHQICVLHYDIIWPSGFVCDNCLKKTGRPRKENKFSAKRLQTTRLGNHLEDRVNKFLRRQNHPEAGEVFVRVVASSDKTVEVKPGMKSRFVDSGEMSESFPYRTKALFAFEEIDGVDVCFFGMHVQEYGSDCPPPNTRRVYISYLDSIHFFRPRCLRTAVYHEILIGYLEYVKKLGYVTGHIWACPPSEGDDYIFHCHPPDQKIPKPKRLQEWYKKMLDKAFAERIIHDYKDIFKQATEDRLTSAKELPYFEGDFWPNVLEESIKELEQEEEERKKEESTAASETTEGSQGDSKNAKKKNNKKTNKNKSSISRANKKKPSMPNVSNDLSQKLYATMEKHKEVFFVIHLHAGPVINTLPPIVDPDPLLSCDLMDGRDAFLTLARDKHWEFSSLRRSKWSTLCMLVELHTQGQDRFVYTCNECKHHVETRWHCTVCEDYDLCINCYNTKSHAHKMVKWGLGLDDEGSSQGEPQSKSPQESRRLSIQRCIQSLVHACQCRNANCSLPSCQKMKRVVQHTKGCKRKTNGGCPVCKQLIALCCYHAKHCQENKCPVPFCLNIKHKLRQQQIQHRLQQAQLMRRRMATMNTRNVPQQSLPSPTSAPPGTPTQQPSTPQTPQPPAQPQPSPVSMSPAGFPSVARTQPPTTVSTGKPTSQVPAPPPPAQPPPAAVEAARQIEREAQQQQHLYRVNINNSMPPGRTGMGTPGSQMAPVSLNVPRPNQVSGPVMPSMPPGQWQQAPLPQQQPMPGLPRPVISMQAQAAVAGPRMPSVQPPRSISPSALQDLLRTLKSPSSPQQQQQVLNILKSNPQLMAAFIKQRTAKYVANQPGMQPQPGLQSQPGMQPQPGMHQQPSLQNLNAMQAGVPRPGVPPQQQAMGGLNPQGQALNIMNPGHNPNMASMNPQYREMLRRQLLQQQQQQQQQQQQQQQQQQGSAGMAGGMAGHGQFQQPQGPGGYPPAMQQQQRMQQHLPLQGSSMGQMAAQMGQLGQMGQPGLGADSTPNIQQALQQRILQQQQMKQQIGSPGQPNPMSPQQHMLSGQPQASHLPGQQIATSLSNQVRSPAPVQSPRPQSQPPHSSPSPRIQPQPSPHHVSPQTGSPHPGLAVTMASSIDQGHLGNPEQSAMLPQLNTPSRSALSSELSLVGDTTGDTLEKFVEGL

SEQ ID NO: 18451 - protein, 2442 aa, Homo sapiens
MAENLLDGPPNPKRAKLSSPGFSANDSTDFGSLFDLENDLPDELIPNGGELGLLNSGNLVPDAASKHKQLSELLRGGSGSSINPGIGNVSASSPVQQGLGGQAQGQPNSANMASLSAMGKSPLSQGDSSAPSLPKQAASTSGPTPAASQALNPQAQKQVGLATSSPATSQTGPGICMNANFNQTHPGLLNSNSGHSLINQASQGQAQVMNGSLGAAGRGRGAGMPYPTPAMQGASSSVLAETLTQVSPQMTGHAGLNTAQAGGMAKMGITGNTSPFGQPFSQAGGQPMGATGVNPQLASKQSMVNSLPTFPTDIKNTSVTNVPNMSQMQTSVGIVPTQAIATGPTADPEKRKLIQQQLVLLLHAHKCQRREQANGEVRACSLPHCRTMKNVLNHMTHCQAGKACQVAHCASSRQIISHWKNCTRHDCPVCLPLKNASDKRNQQTILGSPASGIQNTIGSVGTGQQNATSLSNPNPIDPSSMQRAYAALGLPYMNQPQTQLQPQVPGQQPAQPQTHQQMRTLNPLGNNPMNIPAGGITTDQQPPNLISESALPTSLGATNPLMNDGSNSGNIGTLSTIPTAAPPSSTGVRKGWHEHVTQDLRSHLVHKLVQAIFPTPDPAALKDRRMENLVAYAKKVEGDMYESANSRDEYYHLLAEKIYKIQKELEEKRRSRLHKQGILGNQPALPAPGAQPPVIPQAQPVRPPNGPLSLPVNRMQVSQGMNSFNPMSLGNVQLPQAPMGPRAASPMNHSVQMNSMGSVPGMAISPSRMPQPPNMMGAHTNNMMAQAPAQSQFLPQNQFPSSSGAMSVGMGQPPAQTGVSQGQVPGAALPNPLNMLGPQASQLPCPPVTQSPLHPTPPPASTAAGMPSLQHTTPPGMTPPQPAAPTQPSTPVSSSGQTPTPTPGSVPSATQTQSTPTVQAAAQAQVTPQPQTPVQPPSVATPQSSQQQPTPVHAQPPGTPLSQAAASIDNRVPTPSSVASAETNSQQPGPDVPVLEMKTETQAEDTEPDPGESKGEPRSEMMEEDLQGASQVKEETDIAEQKSEPMEVDEKKPEVKVEVKEEEESSSNGTASQSTSPSQPRKKIFKPEELRQALMPTLEALYRQDPESLPFRQPVDPQLLGIPDYFDIVKNPMDLSTIKRKLDTGQYQEPWQYVDDVWLMFNNAWLYNRKTSRVYKFCSKLAEVFEQEIDPVMQSLGYCCGRKYEFSPQTLCCYGKQLCTIPRDAAYYSYQNRYHFCEKCFTEIQGENVTLGDDPSQPQTTISKDQFEKKKNDTLDPEPFVDCKECGRKMHQICVLHYDIIWPSGFVCDNCLKKTGRPRKENKFSAKRLQTTRLGNHLEDRVNKFLRRQNHPEAGEVFVRVVASSDKTVEVKPGMKSRFVDSGEMSESFPYRTKALFAFEEIDGVDVCFFGMHVQEYGSDCPPPNTRRVYISYLDSIHFFRPRCLRTAVYHEILIGYLEYVKKLGYVTGHIWACPPSEGDDYIFHCHPPDQKIPKPKRLQEWYKKMLDKAFAERIIHDYKDIFKQATEDRLTSAKELPYFEGDFWPNVLEESIKELEQEEEERKKEESTAASETTEGSQGDSKNAKKKNNKKTNKNKSSISRANKKKPSMPNVSNDLSQKLYATMEKHKEVFFVIHLHAGPVINTLPPIVDPDPLLSCDLMDGRDAFLTLARDKHWEFSSLRRSKWSTLCMLVELHTQGQDRFVYTCNECKHHVETRWHCTVCEDYDLCINCYNTKSHAHKMVKWGLGLDDEGSSQGEPQSKSPQESRRVSIQRCIQSLVHACQCRNANCSLPSCQKMKRVVQHTKGCKRKTNGGCPVCKQLIALCCYHAKHCQENKCPVPFCLNIKHKLRQQQIQHRLQQAQLMRRRMATMNTRNVPQQSLPSPTSAPPGTPTQQPSTPQTPQPPAQPQPSPVSMSPAGFPSVARTQPPTTVSTGKPTSQVPAPPPPAQPPPAAVEAARQIEREAQQQQHLYRVNINNSMPPGRTGMGTPGSQMAPVSLNVPRPNQVSGPVMPSMPPGQWQQAPLPQQQPMPGLPRPVISMQAQAAVAGPRMPSVQPPRSISPSALQDLLRTLKSPSSPQQQQQVLNILKSNPQLMAAFIKQRTAKYVANQPGMQPQPGLQSQPGMQPQPGMHQQPSLQNLNAMQAGVPRPGVPPQQQAMGGLNPQGQALNIMNPGHNPNMASMNPQYREMLRRQLLQQQQQQQQQQQQQQQQQQGSAGMAGGMAGHGQFQQPQGPGGYPPAMQQQQRMQQHLPLQGSSMGQMAAQMGQLGQMGQPGLGADSTPNIQQALQQRILQQQQMKQQIGSPGQPNPMSPQQHMLSGQPQASHLPGQQIATSLSNQVRSPAPVQSPRPQSQPPHSSPSPRIQPQPSPHHVSPQTGSPHPGLAVTMASSIDQGHLGNPEQSAMLPQLNTPSRSALSSELSLVGDTTGDTLEKFVEGL

SEQ ID NO: 18452 - protein, 2440 aa, Homo sapiens
MAENLLDGPPNPKRAKLSSPGFSANSNTDFGSLFDLENDLPDELIPNGGELGLLNSGNLVPDAASKHKQLSELLRGGSGSSINPGIGNVSASSPVQQGLGGQAQGQPNSANMASLSAMGKSPLSQGDSSSPSLPKQAASTSGPTPAASQALNPQAQKQVGLATSSPATSQTGPGICMNANFNQTHPGLLNSNSGHSLINQASQGQAQVMNGSLGAAGRGRGAGMPYTAPAMQGASSSVLAETLTQVSPQTAGHAGLNTAQAGGMAKIGMNGTTSPFGQPFSQAGGQPMGATGVNPQLASKQSMVNSLPTFPTDIKNTSVTNVPNMSQMQTSVGIVPTQAIATGPTADPEKRKLIQQQLVLLLHAHKCQRREQANGEVRACSLPHCRTMKNVLNHMTHCQAGKACQVAHCASSRQIISHWKNCTRHDCPVCLPLKNASDKRNQQTILGSPASGIQNTIGSVGTGQQNATSLSNPNPIDPSSMQRAYAALGLPYMNQPQTQLQPQVPGQQPAQPQTHQQMRTLNPLGNNPMNIPAGGITTDQQPPNLISESALPTSLGATNPLMNDGSNSGNIGTLSTIPTAAPPSSTGVRKGWHEHVTQDLRSHLVHKLVQAIFPTPDPAALKDRRMENLVAYAKKVEGDMYESANSRDEYYHLLAEKIYKIQKELEEKRRSRLHKQGILGNQPALPAPGAQPPVIPQAQSVRPPNGPLSLPVNRMQVSQGMNSFNPMSLGNVQLPQAPMGPRAASPMNHSVQMNSMGSVPGMAISPSRMPQPPNMMGAHTNNMMAQAPAQSQFLPQNQFPSSSGAMSVGMGQPPAQTGVSQGQVPGAALPNPLNMLGPQASQLPCPPVTQSPLHPTPPPASTAAGMPSLQHTTPPGMTPPQPAAPTQPSTPVSSSGQTPTPTPGSVPSATQTQSTPTVQAAAQAQVTPQPQTPVQPPSVATPQSSQQQPTPVHAQPPGTPLSQAAASIDNRVPTPSTVASAETNSQQPGPDVPVLEMKTETQAEDTEPDPGESKGEPRSEMMEEDLQGASQVKEETDIAEQKSEPMEVEDKKPEVKVEVKEEEESSSNGTASQSTSPSQPRKKIFKPEELRQALMPTLEALYRQDPESLPFRQPVDPQLLGIPDYFDIVKNPMDLSTIKRKLDTGQYQEPWQYVDDVWLMFNNAWLYNRKTSRVYKFCSKLAEVFEQEIDPVMQSLGYCCGRKYEFSPQTLCCYGKQLCTIPRDAAYYSYQNRYHFCEKCFTEIQGENVTLGDDPSQPQTTISKDQFEKKKNDTLDPEPFVDCKECGRKMHQICVLHYDIIWPSGFVCDNCLKKTGRPRKENKFSAKRLQTTRLGNHLEDRVNKFLRRQNHPEAGEVFVRVVASSDKTVEVKPGMKSRFVDSGEMSESFPYRTKALFAFEEIDGVDVCFFGMHVQDTALIAPHQIQGCVYISYLDSIHFFRPRCLRTAVYHEILIGYLEYVKKLVYVTAHIWACPPSEGDDYIFHCHPPDQKIPKPKRLQEWYKKMLDKAFAERIINDYKDIFKQANEDRLTSAKELPYFEGDFWPNVLEESIKELEQEEEERKKEESTAASETPEGSQGDSKNAKKKNNKKTNKNKSSISRANKKKPSMPNVSNDLSQKLYATMEKHKEVFFVIHLHAGPVISTQPPIVDPDPLLSCDLMDGRDAFLTLARDKHWEFSSLRRSKWSTLCMLVELHTQGQDRFVYTCNECKHHVETRWHCTVCEDYDLCINCYNTKSHTHKMVKWGLGLDDEGSSQGEPQSKSPQESRRLSIQRCIQSLVHACQCRNANCSLPSCQKMKRVVQHTKGCKRKTNGGCPVCKQLIALCCYHAKHCQENKCPVPFCLNIKHNVRQQQIQHCLQQAQLMRRRMATMNTRNVPQQSLPSPTSAPPGTPTQQPSTPQTPQPPAQPQPSPVNMSPAGFPNVARTQPPTIVSAGKPTNQVPAPPPPAQPPPAAVEAARQIEREAQQQQHLYRANINNGMPPGRDGMGTPGSQMTPVGLNVPRPNQVSGPVMSSMPPGQWQQAPIPQQQPMPGMPRPVMSMQAQAAVAGPRMPNVQPNRSISPSALQDLLRTLKSPSSPQQQQQVLNILKSNPQLMAAFIKQRTAKYVANQPGMQPQPGLQSQPGMQPQPGMHQQPSLQNLNAMQAGVPRPGVPPPQPAMGGLNPQGQALNIMNPGHNPNMTNMNPQYREMVRRQLLQHQQQQQQQQQQQQQQQNSASLAGGMAGHSQFQQPQGPGGYAPAMQQQRMQQHLPIQGSSMGQMAAPMGQLGQMGQPGLGADSTPNIQQALQQRILQQQQMKQQIGSPGQPNPMSPQQHMLSGQPQASHLPGQQIATSLSNQVRSPAPVQSPRPQSQPPHSSPSPRIQPQPSPHHVSPQTGTPHPGLAVTMASSMDQGHLGNPEQSAMLPQLNTPNRSALSSELSLVGDTTGDTLEKFVEGL

SEQ ID NO: 18453 - protein, 923 aa, Homo sapiens
YVTGHIWACPPSEGDDYIFHCHPPDQKIPKPKRLQEWYKKMLDKAFAERIIHDYKDIFKQATEDRLTSAKELPYFEGDFWPNVLEESIKELEQEEEERKKEESTAASETTEVFFVIHLHAGPVINTLPPIVDPDPLLSCDLMDGRDAFLTLARDKHWEFSSLRRSKWSTLCMLVELHTQGQDRFVYTCNECKHHVETRWHCTVCEDYDLCINCYNTKSHAHKMVKWGLGLDDEGSSQGEPQSKSPQESRRLSIQRCIQSLVHACQCRNANCSLPSCQKMKRVVQHTKGCKRKTNGGCPVCKQLIALCCYHAKHCQENKCPVPFCLNIKHKLRQQQIQHRLQQAQLMRRRMATMNTRNVPQQSLPSPTSAPPGTPTQQPSTPQTPQPPAQPQPSPVSMSPAGFPSVARTQPPTTVSTGKPTSQVPAPPPPAQPPPAAVEAARQIEREAQQQQHLYRVNINNSMPPGRTGMGTPGSQMAPVSLNVPRPNQVSGPVMPSMPPGQWQQAPLPQQQPMPGLPRPVISMQAQAAVAGPRMPSVQPPRSISPSALQDLLRTLKSPSSPQQQQQVLNILKSNPQLMAAFIKQRTAKYVANQPGMQPQPGLQSQPGMQPQPGMHQQPSLQNLNAMQAGVPRPGVPPQQQAMGGLNPQGQALNIMNPGHNPNMASMNPQYREMLRRQLLQQQQQQQQQQQQQQQQQQGSAGMAGGMAGHGQFQQPQGPGGYPPAMQQQQRMQQHLPLQGSSMGQMAAQMGQLGQMGQPGLGADSTPNIQQALQQRILQQQQMKQQIGSPGQPNPMSPQQHMLSGQPQASHLPGQQIATSLSNQVRSPAPVQSPRPQSQPPHSSPSPRIQPQPSPHHVSPQTGSPHPGLAVTMASSIDQGHLGNPEQSAMLPQLNTPSRSALSSELSLVGDTTGDTLEKFVEGL

SEQ ID NO: 18454 - protein, 770 aa, Mus musculus
MDFSKFLADDFDVKDWINAAFRAGPKDGAAGKADGHAATLVMKLQLFIQEVNHAVEETSLQALQNMPKVLRDVEALKQEASFLKEQMILVKEDIKKFEQDTSQSMQVLVEIDQVKSRMQLAAESLQEADKWSTLSADIEETFKTQDIAVISAKLTGMQNSLMMLVDTPDYSEKCVHLEALKNRLEALASPQIVASFTSQSVDQSKVFVKVFTEIDRMPQLLAYYYKCHKVQLLATWQELCQSDLPLDRQLTGLYDALLGAWHTQTQWATQVFKNPHEVVTVLLIQTLGALVPSLPMCLSAGVERAGPELELTRLLEFYDTTAHFAKGLEMALLPHLQDHNLVKVVELVDAVYGPYKPFQLKYGDMEENNLLIQISAVPLEHGEVIDCVQELSHSVHKLFGLASAAVDRCAKFTNGLGTCGLLTALKSLFAKYVSHFTNALQSIRKKCKLDDIPPNSLFQEDWTAFQNSVRIIATCGELLRQCGDFEQQLANRILSTAGKYLSDSYSPRSLAGFQDSILTDKKSPAKNPWQEYNYLQKDNPAEYASLMEILYTLKEKGSSNHNLLSASRTALTRLNQQAHQLAFDSVFLRIKQQLLLVSRMDSWNTAGIGETLTDDLPAFSLTPLEYISNIGQYIMSLPLNLEPFVTQEDSALELALHAGKLPFPPEQGDELPELDNMADNWLGSIARATMQTYCDVILQIPEVTPHSTKQLATDIDYLINVMDALGLQPSRTLQNIAALLKAKPEEYRQVSKGLPRRLAATVATMRGVNY

SEQ ID NO: 18455 - protein, 780 aa, Anopheles gambiae str. PEST
IWLIGSGLLSRKSTNRLLNSIQLLQNNTASTKLRWVRFGTHTLAKMDVSAFSGDDFDVSSWINASYERSQKTATGSVGKEAFVSSLVSKMQLYVQQINVALEQTGGQVLKNIPKVISDANMLQIESGLLKQRMNQVQREIAHLQTETGDCMVSLERLDDIKQRLQSSKQCLQEADGWGKLAGELDDLLEKSDIDASSGKLLSLQKSLAAQVGLHGHSERENLVEYFKNRLEALVSPSVVVALRSMDTAACRRYVGIFEGIGRLAQLKQYYRTVLKTFVQEQWSSAIEGSESGGSDVLKEFYDHLVELLKSHLRWSCQCFGEATDCVLAVADALENLDPTRESVVRSALKRATDKFWTLTQFSKVNVSMGSLIEGWVRGGPQQDIRCDDETTIDRLANSLFVFFGIFLKEYPTLENSQLEASLQGLTIVGTAPADSVHNLESANAKIIRWALEAVTRCQDITQNCALLSLGSVLQNYLLTYLDQYNKVQKQLAASQPSQTDWNLLQLSVVLLQYLGSFRQAAYELEQTFLQQVLTKHSQLTAGSARARFEYRLNTKGEFNELHKLATTFQQPSSESGREYFSEFHQRMKRTCEDIHDTMLQIAFSPITKHFKQIEPAATGPTGAAGGTTAMDTLPDYSYAPQEYITLISQYLLTLPQHLEPLLLSPAAALKAVLEVADHRYASNRPCADVFLALVVEESEALYVEQIENICSLSVSGAKQLATDIEYFGSVLEEMGQSLGGNLQQTVKLLRAPLESYASAATGCDPELVAAIRQKRNLISC

SEQ ID NO: 18456 - protein, 836 aa, Arabidopsis thaliana
MMLDLGPFSDEKFDAKRWVNSSCQARHPQDSLEKHLVDLEMKLQIASEEIGASLEEQSGGALLRVPRATRDVLRLRDDAVSLRGSVAGILQKLKKAEGSSADCIAALARVDNVKQRMEAAYKTLQDAAGLTQLSSTVEDVFASGDLPRAAETLASMRNCLSAVGEVAEFANVRKQLEVLEDRLEAMVQPRLTDALTYHKVDVAQDLRVILIRIGRFKSLELQYSKVRLKPIKQLWEDFDTKQRANKLANERSESQRLSSGDEFQSTSSQTSFASWLTSFYDELLLYLEQEWKWCMVAFPDDYMTLVPKLLVETMGVLGASFVSRLNLATGDAVPETKALAKGVMDLLSGDLPKGINIQTKHLEALIELHNVTGSFARNIQHLFAESELRILIDTLKAVYSPFESFKQKYGKMERAILSSEIAVVDLRGAVTRGVGAQGIELSETVRRMEESIPQVVVLLEAAVERCIGFTGGSEADELILALDDIMLQYISMLQETLKSLRVVCGVDGTGDGVGSKKDASAEKRESSRKMDLTSNEEWSIVQGALQILTVADCLTSRSSVFEASLRATLARLNSSLSISLFGTNLDHNLSHLKSEQTAGDLSMAGRASMDVAAIRLVDVPEKAHKLLNLLEQSKDPRFHALPLASQRVAAFADTVNELVYDVLISKVRQRLGEVSRLPIWSSVEEQTAFPLPNFSSYPQSYVTSVGEYLLTLPQQLEPLAEGISTNGDSNNEDAQFFATEWMFKVAEGATALYMDQLRGIQYISDRGAQQLSVDIEYLSNVLSALSMPIPPVLATFQTCLATPRGELKDVMKSEAGNELDCPTANLVCKMRRISFD

SEQ ID NO: 18457 - protein, 576 aa, Glycine max
  unsure (1)..(576): unsure at all Xaa locations
DRLQSVSPAIPFSSWLPCFYDELLLYLEQEWKWCMIAFPDDYKTLVPRLLSETMMAIGSSFISRLNLAIGDAVPETKALAKGLLDILAGDMQKGIKLQTKHLEALIELHNMTGTFARNIQHLFSVSDVRVLMDVLKSVYLPYESFKQRYGQMERAILSAEIAGVDLRGAVIRGLGAQGVELSETVRRMEESIPQITILLEAAAERCINFTGGSEADELILALDDIMLQYISTLQETLKSLRTVCGVDYGSDGTVKKDMEKKDGNQNARRVDLISNEEEWSIVQGALQILTVADNLTSRSSVFEASLRATLARLSTTLSFSAFGSSLDXXHQTINSSVDGEPSYGGRAALDMAALRLVDVSEKARKLFNLLNQSRDPRFHALPLASQRVAAFTDTVNELVYDVLISKVRQRLSDVSRLPIWSSVEEQGAFPLPTFSAYPQSYVTSVGEYLLTLPQQLEPLAEGISNNXXVNDEAQFFATEWMFKVAEGATALYIEQLRGIQYISDRGAQQLSVDIEYLSNVLSALSMPIPPVLATFQSCLSTPRNQLKDLLKTDSGNQLDMPTANLVCKMRRVNLDS

SEQ ID NO: 18458 - protein, 301 aa, Glycine max
  unsure (1)..(301): unsure at all Xaa locations
MMLDLGPFSNENFDPKKWINSACQSRHPQDSLDKHLVDMEMKLQMVSEEIAASLEEQSAAALLRVPRATRDVIRLRDDAVSLRSAVSSILQKLKKAEGSSAESIAALAKVDVVKQRMEAAYETLQDAAGLTQLSATVEDVFASGDLPRAAETLANMRHCLSAVGEVAEFANIRKQLEVLEDRLDNMVQPRLMDALSNRKVDAAQDLRGILIRIGRFKSLESQYVKVHLKPIKQLXWEDFDSRERASKPANEKNEMDRTSSGGDXXXXSPAIPFSSWLPSFYDELLLYLEQEWKWYLLAYIX

SEQ ID NO: 18459 - protein, 129 aa, Glycine max
  unsure (1)..(129): unsure at all Xaa locations
MMLDLGSFSNENFDPKKWINSACQSRHPQDSLDKHLVDMEMKLQMVSEEIAASLEEQSSAALLXXPRATRDVIRLRDDAVSLRSAVSSILQKLKKAEGSSAESIAALAKVDVVKQRMEAAYETLQDAAX

SEQ ID NO: 18460 - protein, 65 aa, Glycine max
  unsure (1)..(65): unsure at all Xaa locations
MVQPRLTDALSNPLIVVIQVDAAQDLRGIIIRIGRFKSLESQYIKVHLKPIKQLWEDFDSRERAX

SEQ ID NO: 18461 - protein, 644 aa, Triticum aestivum
  unsure (1)..(644): unsure at all Xaa locations
XQEKADEMXQPRLLDXLSNRKIDAVQDLRGILTRIGRFKSLEVQYTKIHIKPLKKLWEDFDLKQRASRAEVEKRGGEITSVSFSSWLPSFYDETLLYLEQEWKWCLTAFPEEYRSLVPKVLVETMNELNSSFVSRVKVATGDAVPETRSVAKGVLDVISGDLPKSIKLQNKHLAALIELHNMTGTFARNIQHLFSESDLGVVLSTLKAIYSPYETFKMRYGQMERAVLSAAMAGIDIRGAISRGLGAQGIELSETVRRMEESIPQMIVLLEAAVERCISLTGGSEADELVLALDDVMLQYISNLQETLKSLHEVCGLDNTTHTDASKKDAGLEKKEAPRLVDVSEEEEWSIVQGALQVLTVADCLTSRTSVFEASLRATLARIGTNFSLSGFGSSMDKLSAGTADDNSGAXXLGGRAALDIATIRLVEVPGLLHPDANLPGLRLGGPPGLPAVPVVFSGPEVFHDGVDXLVYDVQLAGVGERPGQIVDVPVGAGVRAVAGLRLVAKGAGRQXHVASLREPLHTLAPQLGPLAEGVXXDREAGDDESKLFATEWRCRVAAGATAASMEQLRGVQWRTAGGAEQLGADTVQLSNVVAALSVPIPLPRSQFHAWGPGPRAEVRGRLSPAGXXPGGRRVSGIRRRRWG

SEQ ID NO: 18462 - protein, 290 aa, Triticum aestivum
  unsure (1)..(290): unsure at all Xaa locations
XQVLTVADCLTSRTSVFEASLRATLARIGTNFSLSGFGSSMDKLSAGTADDNSGAXXLGGRAALDIATIRLTNLPDKSKKLLTVLEQSKDPRFHALPVTSQRVAAFSDKVNELVYDVLISKVRQRLCEIARLPIWSSVEEQGGLPLPSFSAYPQAYVTSVGEYLLTLPQQLEPLAEGISGSEAGNDEAQFFATEWIFKVAEGATALFMEQLRGIHYITDRGAQQLAADIEYLNXVLSALSMPIPPFLSTFHACISTPRDQVRDLIKSDGGTQLDLPXAHLVXQIRRISLE

SEQ ID NO: 18463 - protein, 783 aa, Zea mays
TGSQLALAAALTSPGASLFSFKLALDRRKPPSSTSALRFPAAPLARRSRRASVLQSLPPAVAPSAESIAALARIDTVKQRMEAAYTTLQDAAGLAQLSQSVEDVFSSGNLPKAAETLATMRHCLSAVGEVAEFANVRKQLEVLEERLDEMVQPRLVDALSNRKVDAVQDLRGILIRINRFKSLEVQYTKIHVKPLKKLWDDFELKQRSSKVDMEKLSGESISGLSFSSWLPNFYDETLLYLEQEWKWCLTAFPDEYKSLVPKVLTETMSELNSSFVSRINIATGDVIPETRSIAKGILDVLSGDLPKSTKLQNKHLQALIELHNMTGTFARNIQYLFSESDLAVVLNTLKAIYSPYETFKARYGQMERAILSAEMTSIDIRGAVPRGVGAQGIELSETVRRMEESIPEMIVLLEAAVERCISLTGGSEADELVLALDDVMLQYISNLQETLKSLRIICGLDSDALKKDAGLEKKEVQRLVDVSEEEEWSIVQGALQILTVADCLTSRTSVFEASLRATLARIGTNFSVSGFGSSLDKSPAATADENADLSFAGRAALDIAAIRLSDLPDKSKKFLTVLEQSKDPRFHALPLTSQRVAAFSDTVNELVYDVLISKVRQRLSEVARLPIWSSVEEQGGLPLPSFSAYPQAYVTSVGEYLLTLPQQLEPLAEGISGNEAGNDEAQFFATEWIFKVAEGATALFMEQLRGIHYITDRGSQQLAADIEYLNNVLSALSMPIPPFLSTFHACVSTPRDQVRDLIKSDGASQLDLPTTHLVCKIRRITLD

SEQ ID NO: 18464 - protein, 613 aa, Zea mays
  unsure (1)..(613): unsure at all Xaa locations
WSLEPAGPAIYPAPLPPSPDXFPPPTTSAMIPEIQTPSCRQTWTNSRQSITGXXSFSSRLANSYEETLLYLEQDWKRGLTAFPDEYKSLVPKVLTETMSELNSSFVSRINIATGDVIPETRSIAKGILDVLSGDLPKSTKLQNKHLQALIELHNMTGTFARNIQYLFSESDLAVVLNTLKAIYSPYETFKARYGQMERAILSAEMTSIDIRGAVPRGVGAQGIELSETVRRMEESIPEMIVLLEAAVERCISLTGGSEADELVLALDDVMLQYISNLQETLKSLRIICGLDSDALKKDAGLEKKEVQRLVDVSEEEEWSIVQGALQILTVADCLTSRTSVFEASLRATLARIGTNFSVSGFGSSLDKSPAATADENADLSFAGRAALDIAAIRLSDLPDKSKKFLTVLEQSKDPRFHALPLTSQRVAAFSDTVNELVYDVLISKVRQRLSEVARLPIWSSVEEQGGLPLPSFSAYPQAYVTSVGEYLLTLPQQLEPLAEGISGNEAGNDEAQFFATEWIFKVAEGATALFMEQLRGIHYITDRGSQQLAADIEYLNNVLSALSMPIPPFLSTFHACVSTPRDQVRDLIKSDGASQLDLPTTHLVCKIRRITLD

SEQ ID NO: 18465 - protein, 275 aa, Zea mays
  unsure (1)..(275): unsure at all Xaa locations
MVVVDASEFGAEGFDPKRWINAALDARHPSEPLDRFLADAEERLRSAADDAAAALERDSGDALRRVPLACRDALRLRDDAVALRSHLASVLQSLSLAEGSSAESIAALARIDTVKQRMEAAYTTLQDAAGLAQLSQSVEDVFSSGNLPKAAETLATMRHCLSAVGEVAEFANVRKQLEVLEERLDEMVQPRLVDALSNRKVDAVQDLRGILIRINRFKSLEVQYTKIHVKPLKKLLXDDFXAKARSSKVDMEKLSGGSISGLSFSSWLPNFYDEX

SEQ ID NO: 18466 - protein, 84 aa, Zea mays
SKDPRFHALPLTSQRVAAFSDTVNELVYDVLISKVRQRLSEVARLPIWSSVEEQGGLPLPSFSAYPQAYVTSVGEYLLTLPQQG

SEQ ID NO: 18467 - protein, 97 aa, Zea mays
  unsure (1)..(97): unsure at all Xaa locations
XWWSWTRRSSGRRASTRSGGSXAALDARHPSEPLDRFLADAEERLRSAADDAAAALERDSGDALRRVPLACRDALRLRDDAVALRSHLASVLQSLSL

SEQ ID NO: 18468 - protein, 67 aa, Zea mays
  unsure (1)..(67): unsure at all Xaa locations
XLAADIEYLNNVLFALXMPIPPFLFTFHAWVSTPRDQVRDLIKSDGASQLDLPIAHLVCKIRRIPLN

SEQ ID NO: 18469 - protein, 105 aa, Zea mays
RAGIYQTHCRVSCVHPEEPSTRSSEGNPLVFSRHRSGKRGSTDETFIPSEGSNPMRWINAALHARNPQELLDRLLADAHERLRSGVEYAVSALERDSGDTLRRVS

SEQ ID NO: 18470 - protein, 742 aa, Drosophila melanogaster
MDVSALSETTFSPAEWINANYKKFVEENGRDDSEAASAFIRSYVAKLQLYIFNVNNAVEESSRQVVASMPRIAKESAALQADVHRLQEKMSAMRLEVAAVQSETGECMATLERLNTKSQKLQVAKESLQESDGWGNLLAELEDGFERNDLKGVCDKLIALQKSLHAQEQLPGHAERQTQVEDFKNRLEALASPSVVQCFAEGNTEQAQHFVQIFTSIQRLPQLQQYYRAVQKNFWQQQWKQTLELQGTESQPQQQQFLTLYYDQLLEHCQRQVKWCSNLFGENSPQPFLVIAELLPALQPTRDAHILQLLKTSNERLEMLALFAKVNHSFVLHLNSLLEQSHITLSEELHRLLGEAIFEYFHKFIQQYPRLEETQLSTQVDRLSSNQATPSDGVRHLEESTRKLYEWLKEACERCASITSDLALCKLITLLNGIFKRQLESFGRIQRQIGLSLGSSSYAAQSENWSLLQYTMSQLQCLADFQVQLHQFEQDLHTRMVMLSNRLTKPSNRGPITIFQTCDHAARTQLLNSIADYQQKKSEATDSLGIFPQIYATLKSHFADTHDITLNILLQPIETHLAHIRPPVQDHAASGIEMPSFSFAPQESITQIGQYLLTLPQHLEPLLLSPSSLLKQALEVCNIKYTQAIPCADVLLSLVVEQCCVLYVTQILQIKSLPSSAATQLSVDIEYLSNVLEELGLSINLQLSQILTLLKAAPDQYLTLSSGCEPRLVTAIRQMRNIISTQ

SEQ ID NO: 18471 - protein, 637 aa, Macaca fascicularis
MKLQLFIQEVNHAVEETSHQALQNMPKVLRDVEALKQEASFLKEQMILVKEDIKKFEQDTSQSMQVLVEIDQVRSRMQLAAESLQEADKWSTLSADIEETFKTQDIAVISAKLTGMQNSLMMLVDTPDYSEKCVHLEALKNRLEALASPQIVAAFTSQAVDQSKVFVKVFTEIDRMPQLLAYYYKCHKVQLLAAWQELCQSDLPLDRQLAGLYDALLGAWHTQIQWATQVFQKPHEVVMVLLIQTLGALMPSLPSCLSNGVERAGPEQELTRLLEFYDATAHFAKGLEMALLPHLHEHNLVKVTELVDAVYDPYKPYQLKYGNMEESNLLIQMSAVPLEHGEVIDCVQELSHSVNKLFGLASAAVDRCIRFTNGLGTCGLLSALKSLFAKYVSDFTSTLQSVRKKCKLDDIPPDSLFQEDWTAFQNSIRIIATCGELLRHCGDFEQQLANRILSTAGKYLSDSCSPRSLAGFQESILTDKKSSAKNPWQEYNYLQKDNPAEYASLMEILYTLKEKGSSNHNLLAAPRAALTRLNQQAHQLAFDSVFLRIKQQLLLISKMDSWNTAGIGETLTDDLPAFSLTPLEYINVMDALGLQPSRTLQHIVTLLKTRPEDYRQVSKGLPRRLATTVATMRSVNY

SEQ ID NO: 18472 - protein, 770 aa, Homo sapiens
MDFSKFLADDFDVKEWINAAFRAGSKEAASGKADGHAATLVMKLQLFIQEVNHAVEETSHQALQNMPKVLRDVEALKQEASFLKEQMILVKEDIKKFEQDTSQSMQVLVEIDQVKSRMQLAAESLQEADKWSTLSADIEETFKTQDIAVISAKLTGMQNSLMMLVDTPDYSEKCVHLEALKNRLEALASPQIVAAFTSQAVDQSKVFVKVFTEIDRMPQLLAYYYKCHKVQLLAAWQELCQSDLSLDRQLTGLYDALLGAWHTQIQWATQVFQKPHEVVMVLLIQTLGALMPSLPSCLSNGVERAGPEQELTRLLEFYDATAHFAKGLEMALLPHLHEHNLVKVTELVDAVYDPYKPYQLKYGDMEESNLLIQMSAVPLEHGEVIDCVQELSHSVNKLFGLASAAVDRCVRFTNGLGTCGLLSALKSLFAKYVSDFTSTLQSIRKKCKLDHIPPNSLFQEDWTAFQNSIRIIATCGELLRHCGDFEQQLANRILSTAGKYLSDSCSPRSLAGFQESILTDKKNSAKNPWQEYNYLQKDNPAEYASLMEILYTLKEKGSSNHNLLAAPRAALTRLNQQAHQLAFDSVFLRIKQQLLLISKMDSWNTAGIGETLTDELPAFSLTPLEYISNIGQYIMSLPLNLEPFVTQEDSALELALHAGKLPFPPEQGDELPELDNMADNWLGSIARATMQTYCDAILQIPELSPHSAKQLATDIDYLINVMDALGLQPSRTLQHIVTLLKTRPEDYRQVSKGLPRRLATTVATMRSVNY

SEQ ID NO: 18473 - protein, 245 aa, Arabidopsis thaliana
MAATNVMRRDESLLIDPQRGDTSVSRGLSLEKKIEALESLAGQVSNRRSRRWLNDRILMELVPRLDAQEIRGLFAPPPWGDDVPPSAFSLTNVGEWDKFRNIDMDKEANIMDSLNRSSVRQKGSVDGDKIAVLNAWRRIDCRTRDALRRSFLPELIEGYESCISHFIEEGGEGDVLELKVQDPFHRLLLHGVCEYHNLVSTTATEQIGRIAMKTTSIKWKKSGDSGEKPSISLAHFLRMSKEGAW

SEQ ID NO: 18474 - protein, 256 aa, Arabidopsis thaliana
MAATNVMRRDESLLIDPQRGDTSVSRGLSLEKKIEALESLAGQVSNRRSRRWLNDRILMELVPRLDAQEIRGLFAPPPWGDDVPPSAFSLTNVGEWDKFRNIDMDKEANIMDSLNRSSVRQKGSVDGDKIAVLNAWRRIDCRTRDALRRSFLPELIEGYESCISHFIEEGGEGDVLELKVQDPFHRLLLHGVCEMLNEDIESNNLKETVFFGAVSQFGINNCNRTDRKDSNEDNEHQMEEEWRFRGETKHQPSAFP

SEQ ID NO: 18475 - protein, 244 aa, Glycine max
MVLHRELDHLFSSPFVDPPKDDAKSSGMSIEKKIEFLESLTGKVTNRRSRRWLNDRLLMELVPRLNAEEIRGLFAPPPWGDEVPPSTFSMTNMEEWDRFRNIDMDKEVNIIHSLENSIEKRKGHIDADKMAVLNGWHRIDCRTRDALRRSCLSELIEGYEECVRAFITESTDGDILELQIQDPFHRLLLHGVCEFYNLASDTVSGYNGVESSRITKIKRKKKGSPVLPNITLSHFLKMSKEGSW

SEQ ID NO: 18476 - protein, 268 aa, Oryza sativa
  unsure (1)..(268): unsure at all Xaa locations
HASANQSPHHILALETPRRAIHPPRNSTPSQILHRRSTSSFEAEEGERDKPAGRESTMADLLRREEEFYASLFDSPKGGDAVKSRGQMIERKIEVLEDMATKVSNRRSRRWLNDRLLIELVPRLHVEEIKGLFAPPPWGEELPVSAFCRTSVGEWDAFRSIDMDVEXARLMQQMKQSSTKQKNHVDSDELIALNAWHRIDRQTREAIKRNFLPDLLDIYEDRIRAFIEDASGKDVLVLNVQDPFQRLLLHGVCEIIRMTPIRHRYRGX

SEQ ID NO: 18477 - protein, 124 aa, Oryza sativa
  unsure (1)..(124): unsure at all Xaa locations
MADLLRREEEFYASLFDSPKGGDAVKSRGQMIERKIEVLEDMATKVSNRRSRRWLNDRLLIELVPRLHVEEIKGLFAPPPWGEELPVSAFCRTSDGEWDAFRSIDMDVEDRINCSIPSASTRPX

SEQ ID NO: 18478 - protein, 105 aa, Oryza sativa
  unsure (1)..(105): unsure at all Xaa locations
XDRQTREAKRGKFLPDLLDIYEDRIRAFIEDARGKDGLVLNVQDPVQRLLLHGVCEFYNVSSTTTTTMRDGKLWKTTTIKRRPGTGAPSRLTLVSFLRMKKNGSQ

SEQ ID NO: 18479 - protein, 190 aa, Oryza sativa
  unsure (1)..(190): unsure at all Xaa locations
KAGYRLQGTRVPGIIPGSDPPPFRAITRDPRPPVWDSPILALKPAPSGIGTRRPAWPGEERIGSAKGRGKSTWGGADLLRREEEFYASLFNSAKGGNAVKSRGQIIERKMEVFEDMAAKVSNRRSRRWLNDRLLIELVPRLHVEEIKGLFAPPPWGKIQGCSHFLTXHIACLTAWPSNVSFCLGGTKSLN

SEQ ID NO: 18480 - protein, 106 aa, Oryza sativa
  unsure (1)..(106): unsure at all Xaa locations
XDRQTREAIKRNFLPDLLDISGGRRRARREDASGKDVLVLNVQDPFQRLLLHGVCEFYNVSSTTTTTMRDGKLWKTTTXFRRSPGTGAPPRLTLVSFLRMKKNGSQ

SEQ ID NO: 18481 - protein, 158 aa, Mesocricetus auratus
MSGIALSRLAQERKAWRKDHPFGFVAVPTKNPDGTMNLMNWECAIPGKKGTPWEGGLFKLRMLFKDDYPSSPPKCKFEPPLFHPNVYPSGTVCLSILEEDKDWRPAITINQLFIGIQELLNEPNIQEPAQAEAYTIYCQNRVEYEKRFRAQAKKFCPS

SEQ ID NO: 18482 - protein, 151 aa, Mus musculus
MASMQKRLQKELLALQNDPPPGMTLNEKSVQNSITQWIVDMEGAPGTLYEGEKFQLLFKFSSRYPFDSPQVMFTGENIPIHPHVYSNGHICLSILTEDWSPALSVQSVCLSIISMLSSCKEKRRPPDNSFYVRTCNKNPKKTKWWYHDDTC

SEQ ID NO: 18483 - protein, 151 aa, Mus musculus
MASMQKRLQKELLALQNDPPPGMTLNEKSVQNSITHGVVDMEGAPGTLYEGEKFQLLFKFSSRYPFDSPQVMFTGENIPIHPHVYSNGHICLSILTEDWSPALSVQSVCLSIISMLSSCKEKRRPPDNSFYVRTCNKNPKKTKWWYHDDTC

SEQ ID NO: 18484 - protein, 148 aa, Mus musculus
MQKRLQKELLALQNDPPPGMTLNEKSVQNSITQVIVDMEGAPGTLYEGEKFQLLFKFSSRYPFDSPQVMFTGENIPIHPHVYSNGHICLSILTEDWSPALSVQSVCLSIISMLSSCKEKRRPPDNSFYVRTCNKNPKKTKWWYHDDTC

SEQ ID NO: 18485 - protein, 191 aa, Rattus norvegicus
MVRKCWAQARILRWTALQVPFPDWGALKLALLIFFFLRCPTLADSKRLQKELLALQNDPPPGMTLNEKSVQNSITQWIVDMEGAPGTLYEGEKFQLLFKFSSRYPFDSPQVMFTGENIPVHPHVYSNGHICLSILTEDWSPALSVQSVCLSIISMLSSCKEKRRPPDNSFYVRTCNKNPKKTKWWYHDDTC

SEQ ID NO: 18486 - protein, 116 aa, Rattus norvegicus
MEEYGETKKTVMFTGENIPVHPHVYSNGHICLSILTEDWSPALSVQSVCLSIISMLSSCKEKRRPPDNSFYVRTCNKNPKKTKWWYHEPRVGCISVVGCVVNEREAQAQRTCTGIS

SEQ ID NO: 18487 - protein, 85 aa, Brachionus plicatilis
RALQQELKSIQKEPLEGFTVSLVNDNLFEWEVAIFGPPNTLYQGGYFKSHIKFPSDYPYSPPSVRFATKMWHPNIYENGDVCISI

SEQ ID NO: 18488 - protein, 215 aa, African swine fever virus
MVSRFLIAEYRHLIENPSENFKISVNENNITEWDVILRGPPDTLYEGGLFKAKVAFPPEYPYAPPKLTFTSEMWHPNIYPDGRLCISILHGDNAEEQGMTWSPAQKIDTILLSVISLLNEPNPDSPANVDAAKSYRKYVYKEDLESYPMEVKKTVKKSLDECSPEDIEYFKNAASNVPPIPSDAYEDECEEMEDDTYILTYDDDEEEEDEEMDDE

SEQ ID NO: 18489 - protein, 213 aa, African swine fever virus (isolate Malawi Lil 20/1)
MVSSFLLAEYKNLIVNPSEHFKISVNEDNLTEWDVILKGPPDTLYEGGLFKAKIVFPPKYPYEPPRLTFTSEMWHPNIYSDGKLCISILHGDNAEEQGMTWSPAQKIDTVLLSVISLLNEPNPDSPANVDAAKSYRKYLYKEDLESYPMEVKKTVKKSLDECSAEDIEYFKNVPVNVLPVPSDDYEDEEMEDGTYILTYDDEDEEEDEEMDDE

SEQ ID NO: 18490 - protein, 160 aa, Populus euramericana
MSGGIARGRLAEERKSWRKNHPHGFVAKPETQPDGTVNLMVWHCTIPGKLGTDWEGGYFPLTLNFSEDYPSKPPKCKFPQGFFHPNVYPSGTVCLSILNEDSGWRPAITVKQILVGIQDLLDQPNPADPAQTEGYHLFIQDAAEYKKRVRQQAKQYPSLV

SEQ ID NO: 18491 - protein, 217 aa, Anopheles gambiae str. PEST
VCVCFVLRPESFFFKGSKMFNRLRMRKEKPSKSETISTTNTTVIQDAAKDNKKLILDNSRWEASLWFLLGRKRLQKELMSLIKEPPPGVSVDEESVSQNLTQWIINIDGVEGTLYEGEHFQLLFKFNNKYPFDSPEVTFIGSNIPIHPHVYSNGHICLSILTDDWSPALSVQSVCLSISSMLSSCREKRRPPDNGIYVKTCNKNPKKTKWWYHDDSV

SEQ ID NO: 18492 - protein, 178 aa, Giardia lamblia ATCC 50803
MQLAFKTRNSVKMANHKRIHATKNCWNSKMAQKRIQKELKEFQKDPPMNCSGGPVGDDISVWRACILGPKDSPYESGIFYLNICFPSDYPFKPPKVTFETKIFHPNISEDGVICLDILKKEWSPVLTIAKILLSICSLLDDPNPDDPLNSAAARLLKTDKENYIRTVKKYTLDYASKK

SEQ ID NO: 18493 - protein, 160 aa, Pseudotsuga menziesii
MSSTSTPNRGLTKIATNRLQKELVEWQVNPPAGFKHKVTDNLQRWIIEVTGAPGTLYANETYQLQVDFPEHYPMEAPQVIFLQPSPLHAHIYSNGHICLDILYDSWSPAMTVSSVCMSILSMLSSSTVKERPPDNDRYVKNCRNGRSPKETRWWFHDDKV

SEQ ID NO: 18494 - protein, 299 aa, Plasmodium falciparum 3D7
MKTLKEALTNVLSSLNIAEKKEILNVLYHILQKIIENPSRAKFRSLKKDNKTFVNKLLQFKESDELLRSLGFEEETEIWFFPVKNDHKLSSNLTEIRAFIKEHVNTIYNNQDSIFETGTASSSAHLPTDEKNVTENTSNLGDTCNNSEGLTLGGLSKRRLEKERLELLSQKENTIKLLQEHADKWIIQITGAENTLYSNETFQMQFKFTEKYPIESPEVIFLGQPPIHPHIYSNGHICLSILYDHWSPVLSVNSICLSIISMLSSCKKKRKPLDDILYCSTGPRISPKNMKWMFHDDKV

SEQ ID NO: 18495 - protein, 278 aa, Plasmodium falciparum 3D7
MFNIMRPIILFNILIGYYFFIVINNVVGNLPKKNSYYNIPNYKVKNVSNIKNNKYNYFIIDTYNNMKRKNNSIYEHNFNNFNRKNKTYLFIDNKKRRRKFFYSKIEENKNLQGKELKPSRTVEKHIKTKYNLGNANYRIQKELNNFLKNPPINCTIDVHPSNIRIWIVQYVGLENTIYANEVYKIKIIFPDNYPLKPPIVYFLQKPPKHTHVYSNGDICLSVLGDDYNPSLSISGLILSIISMLSSAKEKKLPIDNYTHADAKPGSSQNNFLYHDDKC

SEQ ID NO: 18496 - protein, 126 aa, Prunus armeniaca
GTVNLMVWHCTIPGKTGTDWEGGFFPLTLHFSEDYPSKPPKCKFPPGFFHPNVYPSGTVCLSILNEDSGWRPAITVKQILVGIQDLLDQPNPADPAQTEGYHLFIQDATEYKKRVRQQAKQYPPLV

SEQ ID NO: 18497 - protein, 161 aa, Arabidopsis thaliana
MTSSSSPSRKALSKIACNRLQKELSEWQVNPPTGFKHRVTDNLQKWVIEVTGAPGTLYANETYNLQVEFPQHYPMEAPQVIFVPPAPLHPHIYSNGHICLDILYDSWSPAMTVSSVCISILSMLSSSPEKQRPTDNDRYVKNCKNGRSPKETRWWFHDDKV

SEQ ID NO: 18498 - protein, 161 aa, Arabidopsis thaliana
MTSSSAPSRKALSKIACNRLQKELSEWQLNPPSGFRHKVTDNLQKWTIDVTGAPGTLYANETYQLQVEFPEHYPMEAPQVVFVSPAPSHPHIYSNGHICLDILYDSWSPAMTVNSVCISILSMLSSSPAKQRPADNDRYVKNCKNGRSPKETRWWFHDDKV

SEQ ID NO: 18499 - protein, 161 aa, Arabidopsis thaliana
MTSSSAPSRKALSKIACNRLQKELSEWQLNPPTGFRHKVTDNLQKWTIDVTGAPGTLYANETYQLQVEFPEHYPMEAPQVVFVSPAPSHPHIYSNGHICLDILYDSWSPAMTVNSVCISILSMLSSSPAKQRPADNDRYVKNCKNGRSPKETRWWFHDDKV

SEQ ID NO: 18500 - protein, 129 aa, Brassica oleracea
VSCSAGPVGDDMFHWQATIMGPTDSPFSGGVFLVSIHFPPDYPFKPPKVSFAPRFTTDINSNGSICLDILKEQWSPALTISKVLLSICSLLTDPNPDDPLVPEIAHTYKTDRVKYESTARSWTQKYAMG

SEQ ID NO: 18501 - protein, 134 aa, Oryza sativa (japonica cultivar-group)
MTSSSSPSRKVLSKIACNRLQKELAEWQVNPPSGFKHKVTDNLQRWVIEVAGAAGTLYAGETYQLQVDFPEHYPMEAPQVIFLHPAPMHPHIYSNGHICLDILYDSWSPAMTVSSVCISILSMLSSSPAKVVVS

SEQ ID NO: 18502 - protein, 153 aa, Catharanthus roseus
MANSNLPKRIIKETQRLLSEPAPGISASPSEDNMRDFNVMILGPAQSPYEGGVFKLELFLPEEYPMAPPKVRFLTKIYHPNIDKLGRICLDILKDKWSPALQIRTVLLSIQALLSAPNPDDPLSENIAKHWKSNEAEAVETAKEWTRLYATGA

SEQ ID NO: 18503 - protein, 148 aa, Hordeum vulgare
  unsure (1)..(148): unsure at all Xaa locations
MASKXILKEFKDLQKDPPTSCSAGPSGEDMFHWQATIMGPHDSPYAGGVFLVNIHFPPDYPFKPPKVSFKTKVFHPNINSNGSICLDILKEQWSPALTISKVLLSICSLLTDPNPDDPLVPEIAHMYKTDRSKYETTAXSWTQKYAMG

SEQ ID NO: 18504 - protein, 103 aa, Drosophila silvestris
MALKRINKELQDLGRDPPAQCSAGPVGDDLFHWQATIMGPPDSPYQGGVFFLTIHFPTDYPFKPPKVAFTTRIYHPNINSNGSICLHILRSQWSPALTISKVL

SEQ ID NO: 18505 - protein, 147 aa, Phytophthora infestans
MALKRINKELQDLGRDPPANCSAGPVGDDLFHWQATIMGPEDSPYAGGVYFLNIYFPADYPFKPPKVNFTTRIYHCNINANGGICLDILKDQWSPALTISKVLLSICSLLTDANPDDPLVPEIAQIYRTDRARHDATAREWTAKYAT

SEQ ID NO: 18506 - protein, 186 aa, Entodinium caudatum
GTPPGWKIDGPAAALEDSREAFCLSSNLSVAKKRLLTDFKRINQSQDNDDESVLATPHEDDIMIWDCIIFGPENSVWENGVFKLKMEFSEEYPNKPPHVLMKTKVFHPNFYVNGEICIDILKDQWSPIYDIKSILTSIQSLLTDPNPASPANVEAAKLYSDNIQEYNKKVKECVEKSIAEAEEDAN

SEQ ID NO: 18507 - protein, 188 aa, Pichia angusta
MSSTEKRLLKEYRAVKKELTEKRSPIHDTGIVDLHPLEDGLFRWSAVIRGPDQSPFEDALWKLEIDIPTNYPLDPPKIKFVVFGEEKIRQLQRKTSSGARKVCYKMPHPNVNFKTGEICLDILQQKWSPAWTLQSALVAIVVLLANPEPLSPLNIDMANLLKCDDTTAYKDLVHYYIAKYSAYESNDV

SEQ ID NO: 18508 - protein, 134 aa, Metarhizium anisopliae
MYNLNPLTKNNWRASLVPHRGNSSSNSSDSPYSGGVFFLAIHFPTDYPFKPPKVSFTTPIYHPNINSNGSICLDILRDQWSPALTISKVLLSICSMLTDPNPDDPLVPEIAHVYKTDRPRYEATAREWTRKYAV

SEQ ID NO: 18509 - protein, 147 aa, Guillardia theta
MATKRIQKEHKDLLKDPPSNCSAGPSDENLFRWTASIIGPSDSPYAGGVFFLSILFPPDYPFKPPKVQFTTKIYHPNINSNGSICLDILRDQWSPALTVSKVLLSISSLLTDPNPDDPLVPEIARVFKENRSRYEATAREWTQRYAT

SEQ ID NO: 18510 - protein, 148 aa, Leishmania major
MALRRIQKELKDLEKDPPANTSGGPVSESDLFNWKATIIGPEDSPYAGGLFFLNIHFPSDYPFKPPKLQFTTKIYHPNINNNGGICLDILKDQWSPALTISKVLLSVCSLLTDPNPDDPLVPDIARQYKTDRNAFNKTAAEWTRQYAM

SEQ ID NO: 18511 - protein, 151 aa, Trypanosoma cruzi
MALTTRIIKETEKLQREHQEGIEARPSPNNPRYFHVKIRGPPQSSYEGGIFHLELFLPEEYPMVPPKVRFLTRIYHPNVDKLGRICLDIIKDKWSPALQIIKVLLSIQLLMASPNPDDPLDNEVAESWKRDEAAAMRTAREWTQKYASPQA

SEQ ID NO: 18512 - protein, 425 aa, Paramecium tetraurelia
MGGMYFKEEELSRIGAVNAFFSAFADKTLAFEFNHIVKLVWFESFITDKCDFTNDFNNFIKLVDDASPRGGTKCYDAIAYAIEQLKEIKKKYPNIILRIIALTDGDDNQSKENPQSLVNRIFENQIIIDSFVVNNDCVGLKTLTHATNGRCYCPQTLAEGMSLFEIESILSISHREQKEYPKELQDLNSLKDKPFDTDGMKVVSMDVQKIAVMKKEEILKKISQIESAPQNSSSTSQSVNNTARILKELQDVTAQGDKLNFKCYPTADDIKTWKILLYGPKGTVYEGGLYILSYVFTQNYPFRPPKVQFITKLYHPNVSRGGSLCLDVLNTSWSPLLTTTKVLDAVSVMLQNPNADDALDCNIAAIYKHEPELFKQNALKEKLEAASPSEDNLLADILGAVDINSQEYLDTKKELQTWLEYQKSN

SEQ ID NO: 18513 - protein, 152 aa, Caenorhabditis elegans
MSDAATRRLMKELAQLKSEAPEGLLVDNTSTSNDLKQWKIGVVGAEGTLYAGEVFMLQFTFGPQYPFNSPEVMFVGETIPAHPHIYSNGHICLSILSDDWTPALSVQSVCLSILSMLSSSKEKKHPIDDAIYVRTCSKNPSKTRWWFHDDSV

SEQ ID NO: 18514 - protein, 177 aa, Spisula solidissima
MSGQNIDPAANQVRQKERPRDMTTSKERHSVSKRLQQELRTLLMSGDPGITAFPDGDNLFKWVATLDGPKDTVYESLKYKLTLEFPSDYPYKPPVVKFTTPCWHPNVDQSGNICLDILKENWTASYDVRTILLSLQSLLGEPNNASPLNAQAADMWSNQTEYKKVLHEKYKTAQSDK

SEQ ID NO: 18515 - protein, 156 aa, Spisula solidissima
MTTSKERHSVSKRLQQELRTLLMSGDPGITAFPDGDNLFKWVATLDGPKDTVYESLKYKLTLEFPSDYPYKPPVVKFTTPCWHPNVDQSGNICLDILKENWTASYDVRTILLSLQSLLGEPNNASPLNAQAADMWSNQTEYKKVLHEKYKTAQSDK

SEQ ID NO: 18516 - protein, 199 aa, Bombyx mori
MANIAAKRIKREFKEIMKSEEVIGGSIKLGLVNENWTELKGEIAGPVDTPYEGGTFLLEIKVPETYPFNPPKIRFLTKIWHPNVSSVTGAICLDILKDQWAAALTLRTVLLSLQALLSAGEPNDPQDAVVAKQFRENPRLFTMTARHWTNVYAGGPNIVHECNSKVQRMLDMGIDEHQARVALSSYDWDLERATEQLFG

SEQ ID NO: 18517 - protein, 140 aa, Pinus pinaster
ELQDLQRDPPTSCSAGPVGEDLFHWQATIMGPTESPYAGGVFFVMIHFPPDYPFKPPKVNFQTKVYHPNINSNGSICLDILKEQWSPALTISKVLLSICSLLTDPNPDDPLVPEIAHIYKSQRSRYEETARAWTQKYAMN

SEQ ID NO: 18518 - protein, 154 aa, Drosophila melanogaster
MSSKSPSERRLHKELMSLIKEPPPGVTIDTESVQQNLSEWKINIKGFEGTLYEGEDFQLLFKFNNKYPFDSPEVTFIGTNIPVHPHVYSNGHICLSILTEDWSPALSVQSVCLSIASMLSSCREKKRPPDNTIYVKTCNKNPKKTKWWYHDDSV

SEQ ID NO: 18519 - protein, 139 aa, Drosophila melanogaster
MSLIKEPPPGVTIDTESVQQNLSEWKINIKGFEGTLYEGEDFQLLFKFNNKYPFDSPEVTFIGTNIPVHPHVYSNGHICLSILTEDWSPALSVQSVCLSIASMLSSCREKKRPPDNTIYVKTCNKNPKKTKWWYHDDSV

SEQ ID NO: 18520 - protein, 224 aa, Plasmodium yoelii yoelii
MDIYIFLFRNLNQVQNYIKNNAYTIYNNTEHIFEQSQNSSNDLTNHTNNNCNNNITGNFKLEDKEKILKPRPDGLTLGGLSKRRLEKERNELLRERENTIKLIQEDSDKWIIQIKGAENTLYSNETFKMQFKFTDRYPIESPEVIFIGQPPIHPHIYSNGHICLSILYDHWSPVLSVNSICLSIISMLSSCTKKRKPIDDMLYCSAGSKVSPKNMRWMFHDDKV

SEQ ID NO: 18521 - protein, 276 aa, Plasmodium yoelii yoelii
MKSLKLAKGLAIFCICIFIFINNGKNVFVKGKSHLNISKCRGCPKFFNKYMNLMINTNNGEKKKRYKKGLIEAHSNYENSYNNNQINMSNKFIRRHTNCLLTIDPNKLTNNTPLKSNNVIQKHMRAKYNLGNANYRIQKELHNFLKNPPINCTLDVHPNNIRIWIVKYVGLENTIYANEVYKIKIIFPNDYPLKPPIVYFLQKPPKHTHVYSNGDICLSLLGNDYNPSLSISGLVLSIISMLSSAKEKKLPIDNYTHADAKPGSSQNNFLYHDDKC

SEQ ID NO: 18522 - protein, 98 aa, Platichthys flesus
KELNDLQRDPPASCSAGPVGEDMFHWQATITGPNDSPYHGGVFFLSVHFPTDYPFKPPKISFTTKIYHPNINSNGSICLDILRSQWSPALTVSKVLLS

SEQ ID NO: 18523 - protein, 152 aa, Avicennia marina
MSTPARKRLMRDFKRLQQDPPAGISGAPQDNNIMLWNAVIFGPDDTPWDGGTFKLTLQFTEDYPNKPPTVRFVSRMFHPNIYADGSICLDILQNQWSPIYDIAAILTSIQSLLCDPNPNSPANSEAARMFSENKREYNRRVREIVEQSWTAD

SEQ ID NO: 18524 - protein, 151 aa, Homo sapiens
MASMQKRLQKELLALQNDPPPGMTLNEKSVQNSITQWIVDMEGASGTLYEGEKFQLLFKFSSRYPFDSPQVMFTGENIPVHPHVYSNGHICLSILTEDWSPALSVQSVCLSIISMLSSCKEKRRPPDNSFYVRTCNKNPKKTKWWYHDDTC

SEQ ID NO: 18525 - protein, 151 aa, Homo sapiens
MASMQKRLQKELLALQNDPPPGMTLSEKSVQNSITQWIVDMEGAPGTLYEGEKFQLLFKFSSRYPFDSPQVMFTGENIPVHPHVYSNGHICLSILTEDWSPALSVQSVCLSIISMLSSCKEKRRPPDNSFYVRTCNKNPKKTKWWYHDDTC

SEQ ID NO: 18526 - protein, 151 aa, Homo sapiens
MASMQKRLQKELLALQNDPPPGMTLNEKSVQNSITQWIVDMEGAPGTLYEGEKFQLLFKFSSRYPFDSPQVMFTGENIPVHPHVYSNGHICLSILTEDWSPALSVQSVCLSIISMLSSCKEKRRPPDNSFYVRTCNKNPKKTKWWYHDDTC

SEQ ID NO: 18527 - protein, 162 aa, Homo sapiens
MASMQTTGRRVEVWFPKRLQKELLALQNDPPPGMTLNEKSVQNSITQWIVDMEGAPGTLYEGEKFQLLFKFSSRYPFDSPQVMFTGENIPVHPHVYSNGHICLSILTEDWSPALSVQSVCLSIISMLSSCKEKRRPPDNSFYVRTCNKNPKKTKWWYHDDTC

SEQ ID NO: 18528 - protein, 159 aa, Homo sapiens [sequence omitted]

SEQ ID NO: 18529 - protein, 126 aa, Equus caballus
LRDFKRLQEDPPAGVSGAPSENNIMVWNAVIFGPEGTPFEDGTFKLTIEFTEEYPNKPPTVRFVSKMFHPNVYADGSICLDILQNRWSPTYDVSSILTSIQSLLDEPNPNSPANSQAAQLYQENKR

SEQ ID NO: 18530 - protein, 126 aa, Sus scrofa
MRDFKRLQEDPPAGVSGAPSENNIMVWNAVIFGPEGTPFEDGTFKLTIELTEEYPNKPPTVRFVSKMFHPNVYADGSICLDILQNRWSPTYDVSSILTSIQSLLDEPNPNSPANSQAAQLYQENKR

SEQ ID NO: 18531 - protein, 250 aa, Oryctolagus cuniculus
RTGAPARTAAAAMAQQQMTSSQKALMLELKSLQEEPVEGFRITLVDESDLYNWEVAIFGPPNTLYEGGYFKAHIKFPIDYPYSPPTFRFLTKMWHPNIYENGDVCISILHPPVDDPQSGELPSERWNPTQNVRTILLSVISLLNEPNTFSPANVDASVMFRKWRDSKGKDKEYAEIIRKQVSATKAEAEKDGVKVPTTLAEYCIKTKVPSNDNSSDLLYDDLYDDDIDDEDEEEEDADCYDDDDSGNEES

SEQ ID NO: 18532 - protein, 323 aa, Mus musculus
MAAAARGSGRAPTRRLLVLLLLQLLWAPAGVRAGPEEDLSHRNQEPPAPAQQLQPQPAAVQGLEPARAEKGLTPVAPVHTNKEDAAAQTNLGFIHAFVAAISVIIVSELGDKTFFIAAIMAMRYNRLTVLAGAMLALALMTCLSVLFGYATTVIPRVYTYYVSTALFAIFGIRMLREGLKMSPDEGQEELEEVQAELKKKDEEFQRTKLLNGPDVETGTSTAIPQKKWLHFISPIFVQALTLTFLAEWGDRSQLTTIVLAAREDPYGVAVGGTVGHCLCTGLAVIGGRMIAQKISVRTVTIIGGIVFLAFAFSALFISPESGF

SEQ ID NO: 18533 - protein, 323 aa, Mus musculus
MAAAARGSGRAPTRRLLVLLLLQLLWAPAGVRAGPEEDLSHRNQEPPAPPSSCSPQPAAVQGLEPARAEKGLTPVAPVHTNKEDAAAQTNLGFIHAFVAAISVIIVSELGDKTFFIAAIMAMRYNRLTVLAGAMLALALMTCLSVLFGYATTVIPRVYTYYVSTALFAIFGIRMLREGLKMSPDEGQEELEEVQAELKKKDEEFQRTKLLNGPDVETGTSTAIPQKKWLHFISPIFVQALTLTFLAEWGDRSQLTTIVLAAREDPYGVAVGGTVGHCLCTGLAVIGGRMIAQKISVRTVTIIGGIVFLAFAFSALFISPESGF

SEQ ID NO: 18534 - protein, 204 aa, Rattus norvegicus
MAMRYNRLTVLAGAMLALALMTCLSVLFGYATTVIPRVYTYYVSTALFAIFGIRMLREGLKMSPDEGQEELEEVQAELKKKDEEFQRTKLLNGPDVETGTSTAIPQKKWLHFISPIFVQALTLTFLAEWGDRSQLTTIVLAAREDPYGVAVGGTVGHCLCTGLAVIGGRMIAQKISVRTVTIIGGIVFLAFAFSALFISPESGF

SEQ ID NO: 18535 - protein, 209 aa, Nostoc sp. PCC 7120
MLTAFTAGLLLITVSELGDKTFFIAMILAMHHSRRWVFTGVVGALAAMTILSVLFGKAASLLPPVYIYYAEITLFIAFGLKLLYDASKMSAAADKAEVMEEMEEAKAAVEKADLQLPKQKTPLSIILEAFVLTFMAEWGDRTQIATIALAAGNNIIGVTIGAILGHAICAAIAVIGGKMIAGKISERQLTFAGGCLFLIFGIVAAIEGV

SEQ ID NO: 18536 - protein, 206 aa, Synechocystis sp. PCC 6803
MLTAFTAGLLLITVSELGDKTFFIAMILAMRYPRRWVLVGVVGGLAAMTILSVLMGQIFTFLPTRYINYAEVALFLIFGTKLLWDARRIKATANLEEMEDAEKAIASGEKKLKIVPRGWGIVVESFALTFVAEWGDRTQIATIALAASNNAWGVSAGAILGHTICAVIAVMGGKFVAGRISEKTVTLIGGLLFYLFAVVSWWTKIA

SEQ ID NO: 18537 - protein, 235 aa, Anopheles gambiae str. PEST
SDIGFVHAFAASFMVIIVSELGDKTFFIAAIMAMRHPRLTVFAGAIAALALMTVLSVLFGIAATIIPRVYTFYISTALFALFGLKMLYDGYHMSATGAAEELEEVQSDLRKREDEVGPSRSVPSHPPIHPSIDPFAHPLLRGVALKLLLRIFMQAFTMTFVAEWGDRSQLTTVILSARENVYGVIAGGIIGHSICTGLAVIGGRMIAQRISVRTVTLIGGVVFLLFALSALIFGP

SEQ ID NO: 18538 - protein, 211 aa, Thermosynechococcus elongatus BP-1
MLTAFTAGLTLITISELGDKTFFIAMILATRHSKRWVFLGAWSALMTMTLLSVAVGKVFQLLPQEFTFYAAILLFTIFGLRMLIQGWRMGNKPCEDECEAAVETVEKAEANLSRWGSNPAWAAFVEAFSLTLMAEWGDRTQIATITLAAASQAFGVALGAIAGHGICTAIAVLGGGLIAGRISERTLTLSGGALFLIFAIVTALQGMPKLS

SEQ ID NO: 18539 - protein, 228 aa, Arabidopsis thaliana
MGSLLQGFTKSLAMTFLSEIGDKTFFAAAILAMRYPRRLVLAGCLSALIVMTILSATLGWAAPNLISRKWTHHITTFLFFGFGLWSLWDGFKEGGGSEELAEVEAELDSDLKKTNDQSKNSKIEDEQKKQKRPFLTAFFSPIFLKAFSINFFGEWGDKSQLATIGLAADENPLGVVLGGIVAQTLCTTAAVLGGKSLASQISERIVALSGGMLFIIFGIQSLLTPVDA

SEQ ID NO: 18540 - protein, 230 aa, Arabidopsis thaliana
MSSVLQGFTKSLAMTFVSEIGDKTFFAAAILAMRYPRRLVLAGCLSALIVMTILSATLGWAAPNLISRKWTHHITTLLFFGFGLWSLWDGFKEGGGGSEELAEVEAELDADLKANGKSPKDSSKREDENKKQNRAFLTQFFSPIFLKAFSINFFGEWGDKSQLATIGLAADENPFGVVLGGVVAQFLCTTAAVIGGKSLASQISERIVALSGGMLFIIFGIQSYLTSVEA

SEQ ID NO: 18541 - protein, 230 aa, Arabidopsis thaliana
MSSVLQGFTKSLAMTFVSQIGDKTFFAAAILAMRYPRRLVLAGCLSALIVMTILSATLGWAAPNLISRKWTHHITTLLFFGFGLWSLWDGFKEGGGGSEELAEVEAELDADLKANGKSPKDSSKREDENKKQNRAFLTQFFSPIFLKAFSINFFGEWGDKSQLATIGLAADENPFGVVLGGVVAQFLCTTAAVIGGKSLASQISERIVALSGGMLFIIFGIQSYLTSVEA

SEQ ID NO: 18542 - protein, 229 aa, Glycine max
MSSIVQGFSKSLAMTILSEIGDKTFFAAAILAMRHPRRLVLSGCLSALIVMTILSVLVGWAAPNLISRTWTHHITTFLFLGFGLWSLKDAIFEEGDAEELAEVEAKLDKDWKASNGATKNSNKDDDATKKHKRSFLSQFFSPIFLQAFSITFFGEWGDKSQLATIGLAADENPFGVVLGGILGQALCTAAAVVGGKSLASQISEKIVALSGGILFIVFGIQSFLSPVES

SEQ ID NO: 18543 - protein, 230 aa, Glycine max
  unsure (1)..(230): unsure at all Xaa locations
MSSIVQGFSKSLAMTILSEIGDKTFFAAAILAMRHPRRLVLSGCLSALIVMTILSALVGWAAPNLISRTWTHHITTFLFLGFGLWSLKDAIFEQGDAEELAEVEAKLDKDWKASNGATKNSNKDDDATKKHKRSFLSXSFFSPIFLQAFSITFFGEWGDKSQLATIGLAADENPFGVVLGGILGQALCTSAAVVGGKSLASQISEKIVALSGGILFIVFGIQSFLSPVES

SEQ ID NO: 18544 - protein, 205 aa, Glycine max
  unsure (1)..(205): unsure at all Xaa locations
XHASAILAMRHPRRLVLSGCLSALIVMTILSVLVGWAAPNLISRTWTHHITTFLFLGFGLWSLKDAIFEEGDAEELAEVEAKLDKDWKASNGATKNSNKDDDATKKHKRSFLSQFFSPIFLQAFSITFFGEWGDKSQLATIGLAADENPFGVVLGGILGQALCTAAAVVGGKSLASQISEKIVALSGGILFIVFGIQSFLSPVES

SEQ ID NO: 18545 - protein, 232 aa, Oryza sativa
MAPSLLGGFTKSLAMTVLSEIGDKTFFAAAILAMRYPRKLVLAGCLTSLTVMTALSVSLGWVAPNLISRKWTHHVTTLLFFVFGILSLWEGFKEDGDSEELAEVEAELDANFKSNKAESKSKSKANDDKKKQQRPFVLQFFSPIFIKAFSITFFGEWGDKSQIATIGLAADENPFGVVLGGVLAQALCTTAAVMGGKSLASQISEKMVGLSSGVLFLLFGIMSYLSGPEGEL

SEQ ID NO: 18546 - protein, 240 aa, Oryza sativa
MAPSLLGGFTKSLAMTVLSEIGDKTFFAAAILAMRYPRKLVLAGCLTSLTVMTALSVSLGWVAPNLISRKWTHHVTTLLFFVFGILSLWEGFKEDGDSEELAEVEAELDANFKSNKAESKSKSKANDDKKKQQRPFVLQFFSPIFIKAFSITFFGEWGDKSQIATIGLAADENPFGVVLGGVLAQALCTTAAVMGGKSLASQISEKMVGLSSGVLFLLFGIMSYLSGPRRRIIMPPESHA

SEQ ID NO: 18547 - protein, 232 aa, Triticum aestivum
MSPSLLGGLTKSLAMTVLSEVGDKTFFAAAILAMRHPRKLVLAGCLSALTVMTALSASLGWAAPNLISRKWTHHITTLLFFVFGIWSLWEGFKEEGESEDLAELEAKLDADFKSNKGESKNKSKATEDTKKKQRPFLMQFFSPIFIKAFSITFFGEWGDKSQIATIGLAADENPFGVVIGGVIAQALCTTAAVMGGKSLASQISEKMVELSSGVLFLLFGIMSLLSGPEGQL

SEQ ID NO: 18548 - protein, 232 aa, Triticum aestivum; identical to SEQ ID NO: 18547

SEQ ID NO: 18549 - protein, 287 aa, Schizosaccharomyces pombe
MKNPIKWAIIAVLLSTVVAKKIVGEGMADVSAIKHPEEVHPTNRDFLRSLIFSISMIFGCEIGDKTFIVAALLAFENSRLTVFAGSYSALFIMTLLGVLLGHAAPLLFPRKLTDILGGVLFVIFGIKMLMEAKEVMDSKESMSDEFQNVRNEIAANGPIDQLLEEGAAPSHYTGHRSRSGHTLMSQLKSKGRNVMATLFSPLFIKAFALTFVSEWGDRSQIATIAMAASDNVYGVFMGANVGHACCTALAVISGKYISTKIKVHKVMFIGGILFIAFGLVYFYQGFF

SEQ ID NO: 18550 - protein, 262 aa, Schizosaccharomyces pombe
MINVESPLNLETTLGSLQFSHGSVQNIGMSISMIIGCELGDKSFIVTALLAYQYGRASVFFGSYLALFFMTSFAVLVGRAAPFLFPKSITHILGGTLFLIFGVKMLKESKEVRESQQSLENEFDKVEKIIVNEEDMKKTLELGLPASNRSSSTLKDKFFKVFSMSCFKNLFSKKFSRAFIKAFALIFVSELGDRSQIATIVMSAKEKVLDVFIGVNIGHMLCTMVAVIVGRYISNKIEMYKVLFFGGIVFMIFGILYIFQGF

SEQ ID NO: 18551 - protein, 280 aa, Saccharomyces cerevisiae
MGNMIKKASLIALLPLFTAAAAAATDAETSMESGSSSHLKSFLMSVSMIGLSEIGDKTFLIAALMAMRHKRVLVFSAAATSLAIMTILSGVVGHSAVAFLSERYTAFFAGILFLVFGYKLTMEGLEMSKDAGVEEEMAEVEEEIAIKDMNQDMDDVEKGGDTAYDKQLKNASIGKKIVHRIRELASFMFSPVWVQIFLMVFLGELGDRSQISIIAMATDSDYWYVIAGAVIGHAICSGLAVVGGKLLATRISIRTITLASSLLFFIFALMYIYQAFTTQD

SEQ ID NO: 18552 - protein, 504 aa, Neurospora crassa
MRLRQLLIPSLAATAVIAQSTTESSKQLEKNAAIDSLVDVPPVAKKYGTKDAPVDGKDGKPHAGPFVDFESSAPETTKDLPVLKDRPEDPTIVGGKKIPDTNDGVMDDPNRQGPKEGTTGTSGGVSEKTKERILKENETGEKVENKPQAPKEAPPLPHAEQKKVDKETQDKHGDKAADDITGFEPANLPDKTHDKSPPLPDSAGRIDHLDVPSGEKTGASLGESGKGTEGVITPFHSFFLSFTMILFSEIGDKTFLVAALMAMKHDRLVVFSGAFAALITMTILSAVLGHAVPTLIPKKITNYLAAALFLVFGARLLREGMAMSPDEGVSAEMQEVEQELEEKEHLARKQGRRRSSVSPYSLEMGLGNRKSRSKSRFPTPPRSPSSSPDARNASPRGRNLTECLAGFNNLVSLLLSPAWVQTFVMTFLGEWGDRSQIATIAMAAGQDYWWVTLGAVVGHGICTSVAVIGGKAIAGKVSLKVITVGGAVAFLVFGVIYLVEGFYS

SEQ ID NO: 18553 - protein, 259 aa, Crithidia fasciculata
MEFTKSSSPIDGFLSSLSMILVSEIGDKTFFIACLMAMRHPRLTVYLGAISALAAMTVLSALMGVIVPSLLSVYLTQMLAAVLFLVFGGKILFDELVRNKAEDEESEDEMAEAAAALRRRDPNDAVETGSVASSVYTSAPARRWRRLLNPVMVEAFTLTFVAEWGDRSQLATIALAAAKNPYAVTVGGVLGHALCTGGAVLCGNLIAQRVSMKTVNVVGGVLFLIFGLVTLYELLGGGRHDLDNGQKNPAQNPPVKLFL

SEQ ID NO: 18554 - protein, 297 aa, Caenorhabditis elegans
MKFSLTFLLVSLLILVPHVTVAESDAVKDVDTVDVKLDETAVVEKTEEKEAQKEHKKISSEDISFYHGFLASFSVIVVSELGDKTWFIAVIMSMRHSRLTVFSGAMGALALMTVLSACLGWITQVIPRAVTYYLSTALFALFGLKMLHEGWTMSPNEGQEGYEEAQAEVAKREGELDAGKFEMLEGGGGVASQSETRKIFLFTSRIFIEAFSLTFVAEWGDRSQLTTIILGARENIAGVIGGGILGHALCTGIAVIGGKIVAQRISVRTVTLIGGVVFLLFALSALFINDIESAVDS

SEQ ID NO: 18555 - protein, 255 aa, Caenorhabditis elegans
MKFSLTFLLVSLLILVPHVTVAESDAVKDVDTVDVKLDETAVVEKTEEKEAQKEHKKISSEDISFYHGFLASFSVIVVSELGDKTWFIAVIMSMRHSRLTVFSGAMGALALMTVLSACLGWITQVIPRAVTYYLSTALFALFGLKMLHEGWTMSPNEGQEGYEEAQAEVAKREGELDAGKFEMLEGGGGVASQSETRKIFLFTSRIFIEAFSLTFVAEWGDRSQLTTIILGARENIGTEQAQRKSRENWTKIDKN

SEQ ID NO: 18556 - protein, 206 aa, Nostoc punctiforme
MLTAFTAGLLLITVSELGDKTFFIAVILAMHHPRRLVFIGVTAALAAMTIVSVLFGQAVSLLPKAYIHYAEIVLFLAFGIKLLYDASKMSSAACDTEVIEEAEAAVKKADLELPKKKTSLAIVIEAFILTFMAEWGDRTQIATIALAAGNNPIGVTVGAILGHTICAAIAVIGGKMIAGRISERQLTLIGGCLFLVFGFVAAIEGA

SEQ ID NO: 18557 - protein, 323 aa, Drosophila melanogaster
MSQNQSYFWQTTRHNVYLKRSAKWHMALALMVVLTFGTICAAEAQPDSADNAVIESGIQSNLDVQGDLNRPTDLSSLAEKPKDAADRPKTKGTFIDAFTASISVILLTELGDKTFFIAAIMAMRHPRLIVFGGAIAALALMTVLSCAFGMAANFIPKIYTYYISTALFLIFGLKMLYDGYKMKPTDAQEELEEVQTDLRKREDELDRDVNAALVNDAESGRRRPQKRGATYFTMRILAQAFTMTFLAEWGDRSQLTTIILAASKDVYGVIAGGIIGHCICTGLAVIGGRLVASKISVRTVTIVGGIVFIGFAIYAVAIPPDDI

SEQ ID NO: 18558 - protein, 305 aa, Danio rerio
MPLRAGERHGGGRFICFLVLLSVVLFSAGVTATQEEKKVINEEQPAEVQKGTTDHAPGPAIRVDEPNKGNLGFIHAFAAAISVIIVSELGDKTFFIAAIMAMRYNRLTVLAGAMLALGLMTCLSVLFGYATTIIPRIYTYYISTALFAIFGVRMLREGLRMSPDEGQEELEEVQAEIKKKDEELQRYKLANGAPDVEAGTAANMLPQRKWPSLISPIFIQALTLTFLAEWGDRSQLATIVLAAREDPFGVAVGGTLGHCLCTGLAVIGGRMVAQKISVRTVTIIGGIVFLAFAFSALFIKPDSGF

SEQ ID NO: 18559 - protein, 324 aa, Homo sapiens
MSGRGSGNGRASAPRLLLLFLVPLLWAPAAVRAGPDEDLSHRNKEPPAPAQQLQPQPVAVQGPEPARVEKIFTPAAPVHTNKEDPATQTNLGFIHAFVAAISVIIVSELGDKTFFIAAIMAMRYNRLTVLAGAMLALGLMTCLSVLFGYATTVIPRVYTYYVSTVLFAIFGIRMLREGLKMSPDEGQEELEEVQAELKKKDEEFQRTKLLNGPGDVETGTSITVPQKKWLHFISPIFVQALTLTFLAEWGDRSQLTTIVLAAREDPYGVAVGGTVGHCLCTGLAVIGGRMIAQKISVRTVTIIGGIVFLAFAFSALFISPDSGF

SEQ ID NO: 18560 - protein, 324 aa, Homo sapiens
MAAAAPGNGRASAPRLLLLFLVPLLWAPAAVRAGPDEDLSHRNKEPPAPAQQLQPQPVAVQGPEPARVEKIFTPAAPVHTNKEDPATQTNLGFIHAFVAAISVIIVSELGDKTFFIAAIMAMRYNRLTVLAGAMLALGLMTCLSVLFGYATTVIPRVYTYYVSTVLFAIFGIRMLREGLKMSPDEGQEELEEVQAELKKKDEEFQRTKLLNGPGDVETGTSITVPQKKWLHFISPIFVQALTLTFLAEWGDRSQLTTIVLAAREDPYGVAVGGTVGHCLCTGLAVIGGRMIAQKISVRTVTIIGGIVFLAFAFSALFISPDSGF

SEQ ID NO: 18561 - protein, 205 aa, Homo sapiens
MAMRYNRLTVLAGAMLALGLMTCLSVLFGYATTVIPRVYTYYVSTVLFAIFGIRMLREGLKMSPDEGQEELEEVQAELKKKDEEFQRTKLLNGPGDVETGTSITVPQKKWLHFISPIFVQALTLTFLAEWGDRSQLTTIVLAAREDPYGVAVGGTVGHCLCTGLAVIGGRMIAQKISVRTVTIIGGIVFLAFAFSALFISPDSGF

SEQ ID NO: 18562 - protein, 668 aa, Streptomyces coelicolor A3(2)
MWIVLAVLAVVVLMQVVGSSGGYKTVDTGQVVQAINDNRVESAKLTTGDEQTIKVQLKDGQKVEGSSKIQASYIGDQGVTLANTLQNKYQDKQIPDGYTVSPSKQNPFVGILLSLLPFVLIVVVFLFLMNQMQGGGSRVMNFGKSKAKLITKDTPKTTFSDVAGSDEAVEELHEIKEFLQEPAKFQAVGAKIPKGVLLYGPPGTGKTLLARAVAGEAGVPFYSISGSDFVEMFVGVGASRVRDLFEQAKANAPAIVFVDEIDAVGRHRGAGLGGGHDEREQTLNQLLVEMDGFDVKGGVILIAATNRPDILDPALLRPGRFDRQIAVDRPDMQGRLEILKVHQKGKPVAPDVDLSAVARRTPGMTGADLANVLNEAALLTARSDQKLIDNHMLDEAIDRVVAGPQKRTRIMSDKEKKITAYHEGGHALVAAASPNSDPVHKITILSRGRALGYTMVLPDEDKYSTTRNEMLDQLAYMLGGRAAEELVFHDPTTGAANDIEKATGLARAMVTQYGMTERLGAIKFGGDNSEPFLGREMAHQRDYSEEVAALVDEEVKKLIETAHNEAWEILVENRDVLDNLVLALLEKETLGKEEIAEVFSQIVKRPARPAWTGSSRRTPSTRPPVLSPKELALTNGANGATAAISTAKSTTVEPAPAPERAPEDRPES

SEQ ID NO: 18563 - protein, 648 aa, Streptomyces coelicolor A3(2)
MTNPSPPRKAPEPPWRTEGTPDEPPKPPPGGRRMRGGWWNLILAALIVYLIANLVLSFFNEGDEPTISYTEFSKQVDEGNVSKIYAKGDAIQGQLKKARDNPEGDGTYTKFTTERPTFADDQLWADLTKNRVTVTAEPVVQHRSFLANLLIALAPMLILVVLWIFIARRMRGALGGGAGGMLGRKAPPKPVELEAGKPRTTFADVAGIDEVEGELSDVVDFLKNPDAYRRMGAKMPRGVLLTGPPGTGKTLLARAVAGEAGVPFFSASASEFIEMIVGVGASRVRELFAEARKVAPSIIFIDEIDTIGRARGGGSGTGGHDEREQTLNQILTEMDGFSGSEGVIVIAATNRADILDAALTRPGRFDRVVSVSPPDRGGREAILEIHTREIPLAPDIDLAQVARTTPGMTGAELANLANEAALLAVKRKQERVTQANLSEALEKVQLGAERPLVMPEEERRRTAYHESGHALLGMLQPGADPVRKITIVPRGRALGVTLSTPDADKYAYTEEYLRGRIIGALGGMAAEHVVYGMITTGSESDLEQVTNIARGMVARWGMSERVGRLSALPGDAQQAYGLAAAPQTLDAIDGEMRRVVDSCYEEAVRKLRDHRGQLDALAESLLASETLDEADAYRIAGITRLTKDDPEA

SEQ ID NO: 18564 - protein, 588 aa, Streptomyces coelicolor A3(2)
MAAHDDDMNRGIRPGRGSEDPAGQVAYLEQEIAVLRRKLAESPRHTRILEERIVELQTNLAGVSAQNERLAGTLREARDQIVALKEEVDRLAQPPAGFGVFLQANEDGTADIFTGGRKLRVNVSPSVELDELRRGQEVMLNEALNVVEAMEYESVGDIVTLKEILEDGERALVLGHTDEERVVRLAEPLRGLTIRPGDALLLEPRSGYVYEVVPKSEVEELVLEEVPDIGYEQIGGLGGQIEMIRDAVELPYLYPDLFREHELRPPKGVLLYGPPGCGKTLIAKAVANSLAKKVAEVTGQAAGKSFFLNIKGPELLNKYVGETERQIRLVFQRAREKASEGTPVIVFFDEMESLFRTRGSGVSSDVENTIVPQLLAEIDGVEGLQNVVVIGASNREDMIDPAILRPGRLDVKIKIERPDAEAAKDIFGKYLTERLPLHSDDLAEHEKDKSATVSSMIQTAVEQMYAESEENRFLEVTYANGDKEVLYFKDFNSGAMIENIVGRAKKMAIKDFLDKNQKGLRVSHLLQACVDEFKENEDLPNTTNPDDWARISGKKGERIVYIRTLVTGKQGADTGRSIDTVANTGQYL

SEQ ID NO: 18565 - protein, 581 aa, Streptomyces coelicolor A3(2)
MNRGIRPGRGSEDPAGQVAYLEQEIAVLRRKLAESPRHTRILEERIVELQTNLAGVSAQNERLAGTLREARDQIVALKEEVDRLAQPPAGFGVFLQANEDGTADIFTGGRKLRVNVSPSVELDELRRGQEVMLNEALNVVEAMEYESVGDIVTLKEILEDGERALVLGHTDEERVVRLAEPLRGLTIRPGDALLLEPRSGYVYEVVPKSEVEELVLEEVPDIGYEQIGGLGGQIEMIRDAVELPYLYPDLFREHELRPPKGVLLYGPPGCGKTLIAKAVANSLAKKVAEVTGQAAGKSFFLNIKGPELLNKYVGETERQIRLVFQRAREKASEGTPVIVFFDEMESLFRTRGSGVSSDVENTIVPQLLAEIDGVEGLQNVVVIGASNREDMIDPAILRPGRLDVKIKIERPDAEAAKDIFGKYLTERLPLHSDDLAEHEKDKSATVSSMIQTAVEQMYAESEENRFLEVTYANGDKEVLYFKDFNSGAMIENIVGRAKKMAIKDFLDKNQKGLRVSHLLQACVDEFKENEDLPNTTNPDDWARISGKKGERIVYIRTLVTGKQGADTGRSIDTVANTGQYL

SEQ ID NO: 18566 - protein, 611 aa, Buchnera aphidicola str. APS (Acyrthosiphon pisum)
MVKNLIFWLVITVVLMSIFQNFNTNDVNNHKVDYSTFLSEVNQDQIREAYINGRMISVTKKDSSKYTTYIPINDPKLLDNLLVKRVKIIGAIPEEPSLFISILISWFPMLLLIGVWIFFMRQMQMGGGKGAMSFGKSKARMLSEDQIQTTFADVAGCDEAKEEVSELVEYLKEPSRFQKLGGKIPKGILMVGPPGTGKTLLAKAIAGEAKVPFFTISGSDFVEMFVGVGASRVRDMFEHSRKSAPCIIFIDEIDAVGRQRGAGLGGGHDEREQTLNQMLVEMDGFDGNEGIILIAATNRPDVLDPALLRPGRFDRQVIVALPDIRGREQILKVHMRKVPLSKDVDPMIIARGTPGFSGADLANLVNEAALFAARLDKRVVSMLEFERAKDKMMMGSERRSMVMSDFQKESTAYHEAGHVIIGRLVPDHDPAHKVTIIPRGRALGVTFFLPESDTLSISRQKLESQISTLYGGRLAEEIIYGAKNVSTGAYNDIKIATSLAKNMVTQWGFSEKLGPLLYAEEEGEIFLGRSVAKAKHMSDETARIIDEEVKLLIEINYSRARNILNENIDILHAMKEALIKYETIDAFQIDDLMKRREVRQPKGWIETDTNK

SEQ ID NO: 18567 - protein, 654 aa, Chloroflexus aurantiacus
MNDNRWLKNSFVYLIILVAALALFFQYFGQGASQTEEKGIADVIADAQVGLVSEIQAQAGDEQIIVTYKDGKKYRSRVETSDSVMQLLADYNVPLYDENGRRTINVTVQPAPAWGGLLSIFTILLPTLLLIGFFVFFMRQAQGSNNQAMSFGKSRARMFAGDKPTITFADVAGQEEAKQDLAEIVEFLKFPDKFAALGARIPRGVLMVGPPGTGKTLLSRAVAGEAGVPFFSISGSEFVEMFVGVGASRVRDLFDQAKRNAPCIVFIDEIDAVGRQRGAGLGGSHDEREQTLNQILVEMDGFDTNTNVIVIAATNRPDVLDPALVRPGRFDRQVVLDAPDVRGRIEILKVHVKGKPLAEDVNLEVIARQTPGFSGADLMNVVNEAAILAARRSKRKISMAEFQDAVERVAIGGPERRSRVMTDRQKLVVAYHEAGHAIVGAALPKADKVQKVTIIPRGQAGGYTLFLPDEDSLSLRTVSQFKARLAVSLGGRVAEEIVFGNDEVTTGASGDLMQVTRIARAMVTRYGMSQRLGPMVFGEKEELIFLGREISEQRNYGDEVARQIDEEVHAIVTEAYETAQQILLQNRAVLDDMANALLEYETLDGEQLEEMIRRVKPLALDLSKSSTPNGRAEERSTQPDASQHGFGGTNPLPA

SEQ ID NO: 18568 - protein, 594 aa, Ralstonia metallidurans
MDDAKNGKVVCVSTMQGRNLVVSPKEGSKYTIISPGDIWMVGDLMKYGVQVTGKADDEPNVLVQALYYLGPTLLIIVFWFYMMRQMQGGGKGGAFSFGKSRARLIDENQNAVTFADVAGCDESKEEVVELVDFLKDPQKFQKLGGRIPRGVLLVGPPGTGKTLLARAIAGEAKVPFFSISGSDFVEMFVGVGAARVRDMFENAKKQAPCIVFIDEIDAVGRHRGAGMGGGNDEREQTLNQMLVEMDGFEANSGVIVIAATNRADVLDKALLRPGRFDRQVYVGLPDIRGREQILKVHMRKVPIGNDVDASIIARGTPGFSGADLANLVNEAALFAARRSKRVVDMQDFEDAKDKIYMGPERKSTVMREEERKATAYHESGHAVVAKLLPKADPVHKVTIMPRGWALGVTWQLPEHDKYSKYKDNMLEEIAILFGGRAAEEVFLNAMSTGASNDFERATKIARDMVTRFGMSDSLGAMVYVDTEQDGMFGKLSSKTVSEATQQKVDAEIRRIIDDQYALAKRLLEENRDKVEAMTNALMEWETIDAEQVNDIMAGRPPRPPRGAQGPNSGGNTPPGGSPVAPTNAPATARADETV

SEQ ID NO: 18569 - protein, 655 aa, Neisseria meningitidis MC58
MGNTFKSILVWVALGIGLMAAFNALDGKKEDNGQIEYSQFIQQVNNGEVSGVNIEGSVVSGYLIKGERTDKSTFFTNAPLDDNLIKTLLDKNVRVKVTPEEKPSALAALFYSLLPVLLLIGAWFYFMRMQTGGGGKGGAFSFGKSRARLLDKDANKVTFADVAGCDEAKEEVQEIVDYLKAPNRYQSLGGRVPRGILLAGSPGTGKTLLAKAIAGEAGVPFFSISGSDFVEMFVGVGASRVRDMFEQAKKNAPCIIFIDEIDAVGRQRGAGLGGGNDEREQTLNQLLVEMDGFESNQTVIVIAATNRPDVLDPALQRPGRFDRQVVVPLPDIRGREQILNVHSKKVPLDESVDLLSLARGTPGFSGADLANLVNEAALFAGRRNKVKVDQSDFEDAKDKIYMGPERRSMVMHEDEKRATAYHESGHAIVAESLPFTDPVHKVTIMPRGRALGLTWQLPERDRISMYKDQMLSQLSILFGGRIAEDIFVGRISTGASNDFERATQMAREMVTRYGMSDKMGVMVYAENEGEVFLGRSVTRSQNISEKTQQDIDAEIRRILDEQYQVAYKILDENRDKMETMCKALMEWETIDRDQVLEIMAGKQPSPPKDYSHNLRENADAAEDNAPHAPTREETEAPAPADTASTESEQQPENKA

SEQ ID NO: 18570 - protein, 655 aa, Neisseria meningitidis Z2491
MGNTFKSILVWVALGIGLMAAFNALDGKKEDNGQIEYSQFIQQVNNGEVSGVNIEGSVVSGYLIKGERTDKSTFFTNAPLDDNLIKTLLDKNVRVKVTPEEKPSALAALFYSLLPVLLLIGAWFYFMRMQTGGGGKGGAFSFGKSRARLLDKDANKVTFADVAGCDEAKEEVQEIVDYLKAPNRYQSLGGRVPRGILLAGSPGTGKTLLAKAIAGEAGVPFFSISGSDFVEMFVGVGASRVRDMFEQAKKNAPCIIFIDEIDAVGRQRGAGLGGGNDEREQTLNQLLVEMDGFESNQTVIVIAATNRPDVLDPALQRPGRFDRQVVVPLPDIRGREQILNVHSKKVPLDKSVDLLSLARGTPGFSGADLANLVNEAALFAGRRNKVKVDQSDFEDAKDKIYMGPERRSMVMHEDEKRATAYHESGHAIVAESLPFTDPVHKVTIMPRGRALGLTWQLPERDRISMYKDQMLSQLSILFGGRIAEDIFVGRISTGASNDFERATQMAREMVTRYGMSDKMGVMVYAENEGEVFLGRSVTRSQNISEKTQQDIDAEIRRILDEQYQVAYKILDENRDKMETMCKALMEWETIDRDQVLEIMAGKQPSPPKDYSHNLRENADAAEDNAPHAPTREETEAPAPADTASTESEQQPENKA

SEQ ID NO: 18571 - protein, 618 aa, Deinococcus radiodurans
MKWWGWALLALTGGLLVLVLSGSPRSQSELNVNDFTQAVRTQQVKTADISFQNGTALVTGRLTSGLPYRARTLPADPVLKLGTLEGRGVTVTYLPPPRISVLGALSVLLTLALIGGLIALLVRSRNGGNNDAASSFGKSKAAIISEGQIKLTFADVAGCDEAKQDLQEVVEFLRQPEKYHQLGARIPRGVLLVGPPGSGKTLLAKAVAGEAKVPYFSISGSDFVEMFVGVGAARVRDLFEQARKASPCIVFIDEIDAVGRKRGMNIQGGNDEREQTLNQLLVEMDGFGSGQDVIILAATNRPDVLDAALLRPGRFDRQVVVDAPDVRGREQILRIHSRKKPLDVSVDLGVIARRTAGMVGADLENLLNEAALLAAREGRNRITGRDVDEARDRVLMGPERRSMVVREADRKVTAYHEVGHALVAQLLPHSDKAHKLTIVPRGRSLGSALYTPEDRMHHTRTALLDRICVALSGHAAEEVIYGEVTTGAQNDFQQATGLARRMVTEWGMSEVGQLALAQDNGNYLGFGPQPTNYSDHTAEQIDTAVADILNTQYARAHALLSEHVHVLHRLTDELVARESLSGDELQTVLNGGTLPELPAAVRPEGAPPPEGTLRPEGA

SEQ ID NO: 18572 - protein, 655 aa, Deinococcus radiodurans
MTRRAPVRRFSGRWSSRSGSWKAGLLTLHLLTLPVLVQGTAAATTAHVTASANAPTTPAPQPPTWTPNKGNPRLMPENYTVNRFFADLQAGKVERVKLDGAGNTQVFFKEPAGGPNPRWLLLPPDAATLARLRGSGVTMQVTPGGSRFAWLGQALPLVLTALILAVLWRSLRGNGGGGASSFAKSKAAIISEGQIKLTFADVAGCDEAKQDLQEVVDFLRQPEKYHQLGARIPHGVLLVGPPGSGKTLLAKAVAGEAKVPYFSISGSDFVEMFVGVGAARVRDLFEQARKSSPCIVFIDEIDAVGRKRGMNIQGGNDEREQTLNQLLVEMDGFGSGQDVIILAATNRPDVLDAALLRPGRFDRQVVVDAPDVRGREQILRIHSRKKPLDVSVDLGVIARRTAGMVGADLENLLNEAALLAAREGRNRITGRDVDEARDRVLMGPERRSMVVREADRKVTAYHEVGHALAAQLLPNAHRVAKLTVVPRGRAAGYMLPDADDRLHVTRAALEDMIAVALAGRAAEEVVYGEVTTGAQNDFQQATGLARRMVTEWGMSGRIGKVALASDEGNYLGGGPQPLPTSEHTSQVVDEEVRALIDAAYARVLALLREYLPQVHQIVTVLMQRETLSGEEFATLLAGGSLEPLPPVGQVALAPA

SEQ ID NO: 18573 - protein, 655 aa, Deinococcus radiodurans
MSLVHSTYGTAVCPNSVLSAVFPFSPLEAPLLKRLNPWIIVLLVLGLFLMFTNLPGSGRYTVNYNEFKSLLNQGRIERVTVREDVATVLLKERGQVSVITPQGQATKDGVESLIVRLPGNQATPDSGLIPQLEAKGVDYRFEAPSQWFAILINFLPLILLFGMMYFFFARSQGGQGGVMQFGQSKAKKYGKENRVPTKFTDVAGHEEAKRELIEVVDFLKNPAKYHQIGAEIPKGVLLVGPPGTGKTLLARAVAGEADVPFFSVSASEFMEMFVGVGASRVRTLFEDARKSAPAIIFIDEIDSIGRKRGAGIGGGHDEREQTLNQILSEMDGFDKSSSVIVLGATNRPDVLDPALLRPGRFDRQVTIDLPNLKEREAILKVHLRNKPLGEGVDVPEIAKSTPYFSGADLKNITNEAALEAARVGKTKIDMSDFYRALDKITLGLENSSLTISEPEKRAIAFHEAGHAVTAAVIPGSDKLQKVSIIPRGRALGAAFYLPEEQVLMSKERLENQLVVALGGRAAEEVFVGTITSGAADDFRKATNIARKMVLEWGMGENFRNMALQTDGGGPVFLGEDMGKPKMFSEHTAQLVDEDVKRILAAAYERSRQIVSDYKQAMQEVADALLTHELITGDVVRDAVARVGGQSVAVAPAPTV

SEQ ID NO: 18574 - protein, 659 aa, Burkholderia fungorum
MNEKSNYTGVLIPIGVVLLLLAQIFLYRQPTEAIAYSDFHRLLVARQLDNLEIGSDQITGSVRMPGAAPLLPASAASGLAANGEPWRFLTVRVSDDHLIEDLANSGVRYTGVADRIGLAAVLGWIVPILMLAAVWSVFMRRGGGGLRDFSGIGKSRPRVYVAQDTDVTFDDIAGIDEAKAELKQIVEFLRNAERYRRLGGKIPKGVLIVGAPGTGKTLLAKAVAGEAGVPFFSISGSAFVEMFVGVGAARVRDLFEQAQKKAPCIVFIDELDALGKVRGAGVTSGNDEREQTLNQLLVEMDGFQPNSGVIILAATNRPEILDPALLRPGRFDRHIAIDRPDLNGRRQILQVHVKKVTLAADVDLAEIASRTPGFAGADLANVVNEAALHAAELDKSAVGMVDFDEAIDRAMTGMERRSRVMNEQEKITIAYHEAGHALVALSRPHCDPVKKVSIIPRGVAALGYTQQVPTEDRYVLRKSELLDRLDAYLGGRVAEEIVFGDVSTGAENDLDRATALVRHMVTRYGMSERLGLFTFDSSDPGVGYPSAGGRGERFSESTAKLVDDEVRRELAEAHERVTRTLADSRAQLDRIARRLLECEVLDQATLLQLMTGDAAPPTALQQNATAAASAAGTGASGPAAPEANAAGTPSPLAQHGSVA

SEQ ID NO: 18575 - protein, 625 aa, Burkholderia fungorum
MFSKAAVWLVIALVLFTVFKQFDKPRVQEGVSYSQFMDDAKNGKVKNVIVQGRNLTVTPADGQKYQIVSPGDIWMVGDLMKYGVQVSGKADDEPNALVSALYYLGPTILIIGFWFYMMRQMQGGGKGGAFSFGKSRARLIDENNNAINFTDVAGCDEAKEEVSELVDFLRDPQKFQKLGGRIPRGVLLVGPPGTGKTLLARAIAGEAKVPFFSISGSDFVEMFVGVGAARVRDMFEQAKKHAPCIVFIDEIDAVGRHRGAGMGGGNDEREQTLNQMLVEMDGFEANSGVIVIAATNRSDVLDKALLRPGRFDRQVYVGLPDIRGREHIMKVHLRKVPISNDVDAAVIARGTPGFSGADLANLVNEAALFAARRGKRIVEMTDFEDAKDKIFMGPERKSAVIREESKRATAYHESGHAVIAKLLPKADPVHKVTIIPRGRALGVTWQLPEHDNETYSKDYLLDRLAILFGGRVAEELFLNLISTGASDDFNKATQTARAMVARFGMTDALGPMVYVDDENDATPFGRGFTRTISEATQQKVDAEIRRVLDEQYNLAKRLLDENRDKVEAMTAALMEWETIDADQINDIMAGRPPRSPKSSTPSATDASSGGSPGTEVKPGSATAPA

SEQ ID NO: 18576 - protein, 695 aa, Lactococcus lactis subsp. lactis
MNNNKQPKQGNFVKNILMWVILAIVVVVGFNFFFSSNQSSVDKISYSQLMTKLDGNKIENVTMQPSDSLITVTGEYKEPVKVKGTNNFPLLGNSSSEVKNFQAYIIPTDSVVKDIQNAAKSNDVKLSVVQASSSGMWVQILSYIIPMLLFVGIFWLMMGGMGARGGGGGGNPMSFGKSRAKQQDGKTSKVRFADVAGSEEEKQELVEVVDFLKNPKKYHDLGARIPAGVLLEGPPGTGKTLLAKAVAGEAGVPFYSISGSDFVEMFVGVGASRVRDLFENAKKTAPSIIFIDEIDAVGRQRGAGLGGGNDEREQTLNQLLVEMDGFQDDGNSVIVIAATNRSDVLDPALLRPGRFDRKVLVGAPDVKGREAVLKVHAKNKPLASDVDLHNVATQTPGYVGADLENVLNEAALVAARQNKKEINAADIDEGMDRAMAGPAKKDRIQSMREREIVAYHEAGHAIVGLVLENGSTVRKVTVVPRGRIGGYMLALPDEEIMQPTNFHLQDQLASLMGGRLGEEIVFGVATPGASNDIEKATHIARSMVTEYGMSKKLGMVSYEGDHQVFIGRDYGQTKTYSEATAVMIDDEVRRILGEAYDRAKEAIETHREQHKAIAEALLKYETLDAKQIMSLFKTGKMPDEAAAAEVPEPKTFEESLKDANANVDDFSNINIYNGDEKTDSKPEENKEKSEDETAE

SEQ ID NO: 18577 - protein, 602 aa, Clostridium acetobutylicum
MKKISSATVWIVVFLVVIFTILMLVQGGKATNTVSFDQFQKQYMGNNIKSFEMKDDKMTVDGKYKDGSSFETIVPLERLNQFLADHPTNGEIGESYAAPANIPVWISWMPTIIMILAMVVILVLFMQQTQGGTGKGVMGFGKSRAKMSSPDDLKQKVTFKDVAGADEEKGELEEIVDFLKQPKRYIEMGARIPKGVLLVGPPGTGKTLLAKAVSGEAGVPFFSISGSDFVEMFVGVGASRVRDLFEQAKKNSPCIIFIDEIDAVGRQRGAGLGGGHDEREQTLNQLLVEMDGFGVNEGIIILAATNRPDILDHALLRPGRFDRQILVGAPDVKGREEILKVHSKNKNLDDSIRLDVLAKRTPGFTGADLENLMNEAALLAVRNKKPIIGMEELEEATTRVIAGPEKKSRVISEEDRKITAYHEAGHAVLMELLPYSDPVHQISIVPRGMAGGYTMHLPEKDSSYMSKNKLKDEMVGLLGGRIAEKLVIGDISTGAKNDIDRATSIARKMVMEYGMSDKLGTITFGKDQDEVFLGRDLGTSRNFSEEIAAKIDNEVKELIDEAYTKAENLLKDNMSKLDAVAKALLEKEKLEADEFKEIFENA

SEQ ID NO: 18578 - protein, 621 aa, Clostridium acetobutylicum
MFDNKDFKDNKYKYAIFYTLGAIIFVLLVNYAASSIRTEEITYNKFLDLLNAKKVSQVNISDEKIMIVPKENAGFHKKILYTGRIEDPDLKTELKKSGAEIKPEIKNDDPIKNFLITWILPIILLAFFGKILFGKLDKKFGNGVMSFGKNNAKLYAESETGKTFEDVAGQEEAKESLVEIVDFLHNPNKYAEIGAKLPKGALLVGPPGTGKTLLAKAVAGEAKVPFFSMSGSDFVEMFVGMGAARVRDLFEQAQEKAPCIIFIDEIDAIGKSRENTLGGSNDEREQTLNQLLAEMDGFDSSKGVVILAATNRPEILDKALLRPGRFDRRVIVDRPDLKGREAILKVHAKDVKMSEDISLEEIAKATSGAVGADLANIVNEAALLAVKNGRNKVYQEDLDKAVEFIIAGKEKKDKILSDKDKKTVAYHEVGHALVAALLKHTNPVHKITIVPTTMGALGYTMQLPEEEKYLVTKDEMMDEISVLLGGRSSEEVVFGTISTGASNDIEKATQTARNMVTIYGMTDKFDMMALQSQGSRYLDGTPAKNCSNEVEYEADKEVLRIIKEAHNKAKDILKANRELLDSIAEILLVKETLTGSEFMKIVKESSAWKEMNEIQMEKLTD

SEQ ID NO: 18579 - protein, 582 aa, Clostridium acetobutylicum
MKYLKNKHFIVPAFIFLCSLTLFASSLVSINKTQYKMYINFEKDIKANKVETVYLTSSPKITVQLKSGSVYTTDNPRTDNFKENLLKNSIKVSEDDFKQSKSTVYLLILAISTLYFITSLIKVFKISIPTKKAFAVDKLETDSIENVGVKFNDVAGNEEAKESVQDIIDFLKNPEKYNLYGARMPKGVILYGEPGTGKTMLAKAIAGEANVPFYAMSGSDFIQVYVGVGASRIRQLFKKARSNGKAVIFIDEIDAIGKKRDGGKSGGSEERDQTLNALLTEMSGFKEKEGIVVIAATNRIDVLDSALLRPGRFDRHIEINLPDISARKKILSLLVKNKPVKDIDLNDLAQKTAYFSGAKLENLVNEAAILACKENSSFIENQHMDKAFSIVIAGYEKVDRSHISLTDKKITAYHESGHALVSLKVLPEEKVSKITIIPSTNGSGGYTLSIPEDKMYQNKEYIQNRIRVLLGGRAAEEIIFGKSSITTGAYNDLQKVTSAVTKLVTQYGMGSSLGLLNADALSEINYSVSTSVIDECKDLVETLYEDTKNILLNNKHILENMSNKLLDVETLNYEDIQGLNIQ

SEQ ID NO: 18580 - protein, 644 aa, Escherichia coli O157:H7 EDL933
MAKNLILWLVIAVVLMSVFQSFGPSESNGRKVDYSTFLQEVNNDQVREARINGREINVTKKDSNRYTTYIPVQDPKLLDNLLTKNVKVVGEPPEEPSLLASIFISWFPMLLLIGVWIFFMRQMQGGGGKGAMSFGKSKARMLTEDQIKTTFADVAGCDEAKEEVAELVEYLREPSRFQKLGGKIPKGVLMVGPPGTGKTLLAKAIAGEAKVPFFTISGSDFVEMFVGVGASRVRDMFEQAKKAAPCIIFIDEIDAVGRQRGAGLGGGHDEREQTLNQMLVEMDGFEGNEGIIVIAATNRPDVLDPALLRPGRFDRQVVVGLPDVRGREQILKVHMRRVPLAPDIDAAIIARGTPGFSGADLANLVNEAALFAARGNKRVVSMVEFEKAKDKIMMGAERRSMVMTEAQKESTAYHEAGHAIIGRLVPEHDPVHKVTIIPRGRALGVTFFLPEGDAISASRQKLESQISTLYGGRLAEEIIYGPEHVSTGASNDIKVATNLARNMVTQWGFSEKLGPLLYAEEEGEVFLGRSVAKAKHMSDETARIIDQEVKALIERNYNRARQLLTDNMDILHAMKDALMKYETIDAPQIDDLMARRDVRPPAGWEEPGASNNAGDNGSPKAPRPVDEPRTPNPGNTMSEQLGDK

SEQ ID NO: 18581 - protein, 561 aa, Xylella fastidiosa Dixon
PRDDKLVDVLYTKNIEMTRQKPSSGPGFWSLVLNFLPVILIIGFWVFIMRQMQGGGAKGAMSFGKSRAKLQGDDQIKITFADVAGCDEAKEEVGELVDFLRDPTKFTKLGGKIPRGVLMVGPPGTGKTLLAKAIAGEAKVPFFSISGSDFVEMFVGVGASRVRDMFEQAKKHAPCIIFIDEIDAVGRHRGAGLGGGHDEREQTLNQLLVEMDGFEGGEGVIVIAATNRPDVLDPALLRSGRFDRQVVVALPDVKGREQISRCHMRKLLLANDVEPLVIARGTPGFSGADLANLCNEAALFAARSNEKEVRMNHFDAARDKILMGTERRSMAMSEEEKTLTAYHEAGHAIVGRLVPEHDPVYKVTIIPRGRALGVTMYLPEGDKYSINKVAIQSQLCSLYGGRVAEELIFGEDKVTTGASNDIERVTKMARNMVTKWGLSDELGPVAYGEEEDEVFLGRSVTQHKNVSDETARKIDEVVRSILDKAYARTKRILADNLDKLHAMSQLLLQYETIDAPQIDAIMEGREPPPPVGWGKPSDNGSDDDMSKPRPLTTIVVPAEQV

SEQ ID NO: 18582 - protein, 697 aa, Staphylococcus aureus subsp. aureus Mu50
MQKAFRNVLVIVIIGVIIFGLFSYLNGNGNMPKQLTYNQFTEKLEKGDLKTLEIQPQQNVYMVSGKTKNDEDYSSTILYNNEKELQKITDAAKKQNGVKLTIKEEEKQSVFVSILSTLIPVVVIALLFIFFLSQAQGGGSGGRMMNFGKSKAKMYDNNKRRVRFSDVAGADEEKQELIEIVDFLKDNKKFKEMGSRIPKGVLLVGPPGTGKTLLARAVAGEAGAPFFSISGSDFVEMFVGVGASRVRDLFDNAKKNAPCIIFIDEIDAVGRQRGAGVGGGHDEREQTLNQLLVEMDGFGENEGIIMIAATNRPDILDPALLRPGRFDRQIQVGRPDVKGREAILHVHAKNKPLDETVDLKAISQRTPGFSGADLENLLNEASLIAVREGKKKIDMRDIEEATDRVIAGPAKKSRVISKKERNIVAHHEAGHTIIGMVLDEAEVVHKVTIVPRGQAGGYAMMLPKQDRFLMTEQELLDKICGLLGGRVSEDINFNEVSTGASNDFERATQIARSMVTQYGMSKKLGPLQFGHSNGQVFLGKDMQGEPNYSSQIAYEIDKEVQRIVKEQYERCKQILLEHKEQLILIAETLLTEETLVAEQIQSLFYEGKLPEIDYDAAKVVKDEDSEFNDGKFGKSYEEIRKEQLEDGQRDESEDRKEEKDIAEDKKEADKSDEKDEPAHRQAPNIEKPYDPNHPDNK

SEQ ID NO: 18583 - protein, 637 aa, Pseudomonas putida KT2440
MNDMAKNLILWLIIAAVLVTVMNNFSSPNEPQTLNYSDFIQQVKDGKVERVTVDGYIITGKRTDGDNFKTVRPAITDNGLIGDLVDNHVVVEGKQPEQQSIWTQLLVASFPILVIIAVFMFFMRQMQGGAGGKGGPMSFGKSKARLLSEDQVKTTLADVAGCDEAKEEVGELVEFLRDPGKFQRLGGRIPRGVLMVGPPGTGKTLLAKAIAGEAKVPFFTISGSDFVEMFVGVGASRVRDMFEQAKKHAPCIIFIDEIDAVGRHRGAGMGGGHDEREQTLNQLLVEMDGFEMNDGIIVIAATNRPDVLDPALLRPGRFDRQVVVGLPDIRGREQILKVHMRKVPIGENVNPAVIARGTPGFSGADLANLVNEASLFAARSNKRLVEMKEFELAKDKIMMGAERKTMVMSEKEKRNTAYHEAGHAIVGRLVPEHDPVYKVSIIPRGRALGVTMFLPEEDRYSLSKRALISQICSLYGGRIAEEMTLGFDGVTTGASNDIMRASQLARNMVTKWGLSEKLGPLMYAEEEGEVFLGRSAGSQHASVSGETAKLIDSEVRSIIDQCYATAKQLLIDNRDKLEAMTEALMKYETIDADQIDDIMAGRTPREPRDWDDDKHSGTPAAQDERPESPIGGPAAEH

SEQ ID NO: 18584 - protein, 659 aa, Streptococcus pyogenes M1 GAS
MKNNKNNGFVKNSFIYILMIIVVITGFQFYLKGTSTQSQQISYSKLIKHLKAGDIKSLSYQPSGSIIEVKGKYEKPQKVTVNSGLSFLGGRASTQVTEFSSLVLPSDTILKEMTAAADKNGTELTVKQESSSGTWITFLMSFLPIVIFAAFMMMMMNQGGGGARGAMSFGKNKAKSQSKGNVKVRFTDVAGAEEEKQELVEVVDFLKNPKKYKSLGARIPAGVLLEGPPGTGKTLLAKAVAGEAGVPFFSISGSDFVEMFVGVGASRVRSLFEDAKKAERAIIFIDEIDAVGRRRGAGMGGGNDEREQTLNQLLIEMDGFEGNENIIVIAATNRSDVLDPALLRPGRFDRKVLVGRPDVKGREAILRVHAKNKPLANDVNLKVVAQQTPGFVGADLENVLNEAALVAARRNKIKIDASDIDEAEDRVIAGPSKKDRTISQKEREMVAYHEAGHTIVGLVLSNARVVHKVTIVPRGRAGGYMIALPKEDQMLLSKEDLKEQLAGLMGGRVAEEIVFNAQTSGASNDFEQATQIARAMVTEYGMSEKLGPVQYEGNHAMMPGQISPEKAYSAQTAQMIDDEVRELLNQARNQAADIINENRDTHKLIAEALLKYETLDAAQIKSIYETGKMPVDLETDDNEAHALSYDEIKNKMTESESAE

SEQ ID NO: 18585 - protein, 645 aa, Xylella fastidiosa 9a5c
MRMNDLTKNVLLWVVVAVVLMVVFQSFSPRIGGVIGNEPITYTQFLNEVDSGRIKSVNYTDESGLTVNAIRFKRTDGSEGLVYGPRDDKLVDVLYSKNIEMTRQKPSTGPGFWSLVLNFLPVILIIGFWVFIMRQMQGGGAKGAMSFGKSRAKLQGDDQIKITFADVAGCDEAKEEVGELVDFLRDPTKFTKLGGKIPRGVLMVGPPGTGKTLLAKAIAGEAKVPFFSISGSDFVEMFVGVGASRVRDMFEQAKKHAPCIIFIDEIDAVGRHRGAGLGGGHDEREQTLNQLLVEMDGFEGGEGVIVIAATNRPDVLDPALLRPGRFDRQVVVALPDVKGREQILGVHMRKLLLANDVEPLVIARGTPGFSGADLANLCNEAALFAARSNEKEVRMNHFDAARDKILMGTERRSMAMSEEEKTLTAYHEAGHAIVGRLVPEHDPVYKVTIIPRGRALGVTMYLPEGDKYSINKVAIQSQLCSLYGGRVAEELIFGEDKVTTGASNDIERVTKMARNMVTKWGLSDELGPVAYGEEEDEVFLGRSVTQHKNVSDETARKIDEVVRSILDKAYARTKRILADNLDKLHAMSQLLLQYETIDAPQIDAIMEGREPPPPVGWGKPSDNGSDDDMSKPRPLTTIVVPAEQV

SEQ ID NO: 18586 - protein, 652 aa, Streptococcus pneumoniae TIGR4
MKKQNNGLIKNPFLWLLFIFFLVTGFQYFYSGNNSGGSQQINYTELVQEITDGNVKELTYQPNGSVIEVSGVYKNPKTSKEETGIQFFTPSVTKVEKFTSTILPADTTVSELQKLATDHKAEVTVKHESSSGIWINLLVSIVPFGILFFFLFSMMGNMGGGNGRNPMSFGRSKAKAANKEDIKVRFSDVAGAEEEKQELVEVVEFLKDPKRFTKLGARIPAGVLLEGPPGTGKTLLAKAVAGEAGVPFFSISGSDFVEMFVGVGASRVRSLFEDAKKAAPAIIFIDEIDAVGRQRGVGLGGGNDEREQTLNQLLIEMDGFEGNEGIIVIAATNRSDVLDPALLRPGRFDRKVLVGRPDVKGREAILKVHAKNKPLAEDVDLKLVAQQTPGFVGADLENVLNEAALVAARRNKSIIDASDIDEAEDRVIAGPSKKDKTVSQKERELVAYHEAGHTIVGLVLSNARVVHKVTIVPRGRAGGYMIALPKEDQMLLSKEDMKEQLAGLMGGRVAEEIIFNVQTTGASNDFEQATQMARAMVTEYGMSEKLGPVQYEGNHAMLGAQSPQKSISEQTAYEIDEEVRSLLNEARNKAAEIIQSNRETHKLIAEALLKYETLDSTQIKALYETGKMPEAVEEESHALSYDEVKSKMNDEK

SEQ ID NO: 18587 - protein, 652 aa, Streptococcus pneumoniae R6
MKKQNNGLIKNPFLWLLFIFFLVTGFQYFYSGNNSGGSQQINYTELVQEITDGNVKELTYQPNGSVIEVSGVYKNPKTSKEGTGIQFFTPSVTKVEKFTSTILPADTTVSELQKLATDHKAEVTVKHESSSGIWINLLVSIVPFGILFFFLFSMMGNMGGGNGRNPMSFGRSKAKAANKEDIKVRFSDVAGAEEEKQELVEVVEFLKDPKRFTKLGARIPAGVLLEGPPGTGKTLLAKAVAGEAGVPFFSISGSDFVEMFVGVGASRVRSLFEDAKKAAPAIIFIDEIDAVGRQRGVGLGGGNDEREQTLNQLLIEMDGFEGNEGIIVIAATNRSDVLDPALLRPGRFDRKVLVGRPDVKGREAILKVHAKNKPLAEDVDLKLVAQQTPGFVGADLENVLNEAALVAARRNKSIIDASDIDEAEDRVIAGPSKKDKTVSQKERELVAYHEAGHTIVGLVLSNARVVHKVTIVPRGRAGGYMIALPKEDQMLLSKEDMKEQLAGLMGGRVAEEIIFNVQTTGASNDFEQATQMARAMVTEYGMSEKLGPVQYEGNHAMLGAQSPQKSISEQTAYEIDEEVRSLLNEARNKAAEIIQSNRETHKLIAEALLKYETLDSTQIKALYETGKMPEAVEEESHALSYDEVKSKMNDEK

SEQ ID NO: 18588 - protein, 700 aa, Staphylococcus epidermidis ATCC 12228
MQKAFRNVLVIAIIGVIIFGLFSFLNGNGNMPKQLTYTQFVNKLNKGDLKTLEIQPEQNVYMVSGKTKKDEDYSSTILYNNEKDLQKITDTAKKQDNLKFTVKEEEKQSVFVSILTTLIPVLIIALLFIFFLSQAQGGGGGGRMMNFGKSKAKMYDSNKRRVRFSDVAGADEEKQELIEIVDFLKDNKKFKQMGSRIPKGVLLVGPPGTGKTLLARAVAGEAGAPFFSISGSDFVEMFVGVGASRVRDLFENAKKNAPCIIFIDEIDAVGRQRGAGVGGGHDEREQTLNQLLVEMDGFGENEGIIMIAATNRPDILDPALLRPGRFDRQIQVGRPDVKGREAILHVHAKNKPLDETVDLKAISQRTPGFSGADLENLLNEASLIAAREGKNKIDMRDIEEATDRVIAGPAKKSRVISEKERNIVAHHEAGHTIIGMVLDEAEIVHKVTIVPRGQAGGYAMMLPKQDRFLMTEPELLDKICGLLGGRVSEDINFGEVSTGASNDFERATQIARSMVTEYGMSKKLGPLQFSSNSGGQVFLGKDMQGEPNYSGQIAYEIDKEVQRIVKEQYERCKQILLEHEEQLKLIAKTLLSEETLVAEQIQSLFYDGVLPEVDYDSAKVVKNENSDYSDGKYGKSYNDIRKEQLEDDDKEDDDNHEKDEVNQDNTDREADNTSHTNEPGHQQSPNIDKPYNPNDPNHRQ

SEQ ID NO: 18589 - protein, 787 aa, Mycobacterium leprae
MNRKNVIRMVTAIAVVVLLGWSFFYFSDDTRGYKFVDTSVAMSQINGHNVKSAQIDDREQQLRLTLKKGNNDTDGSDKVITKYPTGYAVDLFNALSAKNTKVTTAVNEGSILGELLVYVLPLLLLVGLFVMFSRMQGGARMGFGFGKSRAKQLSKDMPKTTFADVAGVDEAVEELYEIKDFLQNPCRYQTLGAKIPKGVLLYGPPGTGKTLLARAVAGEAGVPFFTISGSDFVEMFVGVGASRVRDLFDQAKQNSPCIIFVDEIDAVGRQRGTGLGGGHDEREQTLNQLLVEMDGFGDRAGVILIAATNRPDILDPALLRPGRFDRQIPVSNPDLAGRRAVLRVHSKGKPIADDADLDGLAKRTVGMTGADLANVVNEAALLTARENGLVITGPALEEAVDRVIGGPRRKGRIISEQEKKITAYHEGGHTLAAWAMPDIEPIYKVTILARGRTGGHAVAVPEEDKGLRTRSEMIAQLVFAMGGRAAEELVFREPTTGAVSDIEKATKIARSMVTEFGMSSKLGAVRYGSEHGDPFLGRTMGTQADYSHEVARDIDDEVRKLIEAAHTEAWEILTEYRDVLDTLAGELLEKETLHRPELEGIFASVEKRPRLTMFDDFGGRIPSDKPPIKTPGELAIERGEPWPQPVPEPAFKAAIARASQAAEASHQAAQSDTDGPPGQGANGSHAGDRQRQHGPTQPDYGAPPGWHAPGWPPQQPPDYWYPPEQQPSQSPYWPQPAPSYPGQAPPPYPSYPPCPSYPPPGQSAPDAGKPPAQLDEGVSPSNPPAHG

SEQ ID NO: 18590 - protein, 790 aa, Mycobacterium leprae
MLLMNRKNVIRMVTAIAVVVLLGWSFFYFSDDTRGYKFVDTSVAMSQINGHNVKSAQIDDREQQLRLTLKKGNNDTDGSDKVITKYPTGYAVDLFNALSAKNTKVTTAVNEGSILGELLVYVLPLLLLVGLFVMFSRMQGGARMGFGFGKSRAKQLSKDMPKTTFADVAGVDEAVEELYEIKDFLQNPCRYQTLGAKIPKGVLLYGPPGTGKTLLARAVAGEAGVPFFTISGSDFVEMFVGVGASRVRDLFDQAKQNSPCIIFVDEIDAVGRQRGTGLGGGHDEREQTLNQLLVEMDGFGDRAGVILIAATNRPDILDPALLRPGRFDRQIPVSNPDLAGRRAVLRVHSKGKPIADDADLDGLAKRTVGMTGADLANVVNEAALLTARENGLVITGPALEEAVDRVIGGPRRKGRIISEQEKKITAYHEGGHTLAAWAMPDIEPIYKVTILARGRTGGHAVAVPEEDKGLRTRSEMIAQLVFAMGGRAAEELVFREPTTGAVSDIEKATKIARSMVTEFGMSSKLGAVRYGSEHGDPFLGRTMGTQADYSHEVARDIDDEVRKLIEAAHTEAWEILTEYRDVLDTLAGELLEKETLHRPELEGIFASVEKRPRLTMFDDFGGRIPSDKPPIKTPGELAIERGEPWPQPVPEPAFKAAIARASQAAEASHQAAQSDTDGPPGQGANGSHAGDRQRQHGPTQPDYGAPPGWHAPGWPPQQPPDYWYPPEQQPSQSPYWPQPAPSYPGQAPPPYPSYPPCPSYPPPGQSAPDAGKPPAQLDEGVSPSNPPAHG

SEQ ID NO: 18591 - protein, 609 aa, Mycobacterium leprae
MGESERSEAFNPPREAGMSSGDIAELEQLRREIVVLREQLEHAVGPHGSVRSVRDVHQLEARIDSLTARNSKLMDTLKEARQQLLALREEVDRLGQPPSGYGVLLAAHDDETVDVFTSGRKMRLTCSPNIEVASLRKGQTVRLNEALTVVEAGTFEAVGEVSTLREVLADGHRALVVGHADEERIVCLAEPLVAENLLDGVPGALNDDSRPRKLRPGDSLLVDPKAGYAFERVPKAEVEDLVLEEVPDVSYQDIGGLTRQIEQIRDAVELPFLHKELYREYALRPPKGVLLYGPPGCGKTLIAKAVANSLAKKMAEVRGDDAREAKSYFLNIKGPELLNKFVGETERHIRLIFQRAREKASEGTPVIVFFDEMDSIFRTRGTGVSSDVETTVVPQLLSEIDGVEGLENVIVIGASNREDMIDPAILRPGRLDVKIKIERPDAEAAQDIYSKYLTESLPVHADDLTEFDGDRAACIKAMIEKVVDRMYAEIDDNRFLEVTYANGDKEVMYFKDFNSGAMIQNVVDRAKKNAIKSVLETGQPGLRIQHLLDSIVDEFAENEDLPNTTNPDDWARISGKKGERIVYIRTLVTGKSSSASRAIDTESNLGQYL

SEQ ID NO: 18592 - protein, 645 aa, Xylella fastidiosa Temecula1
MRMNDLTKNVLLWVVVAVVLMVVFQSFSPRIGGVIGNEPITYTQFLNEVDSGRIKSVNYTDESGLTVNAIRFKRTDGSEGLVYGPRDDKLVDVLYSKNIEMTRQKPSTGPGFWSLVLNFLPVILIIGFWVFIMRQMQGGGAKGAMSFGKSRAKLQGDDQIKITFADVAGCDEAKEEVGELVDFLRDPTKFTKLGGKIPRGVLMVGPPGTGKTLLAKAIAGEAKVPFFSISGSDFVEMFVGVGASRVRDMFEQAKKHAPCIIFIDEIDAVGRHRGAGLGGGHDEREQTLNQLLVEMDGFEGGEGVIVIAATNRPDVLDPALLRPGRFDRQVVVALPDVKGREQILGVHMRKLLLANDVEPLVIARGTPGFSGADLANLCNEAALFAARSNEKEVRMNHFDAARDKILMGTERRSMAMSEEEKTLTAYHEAGHAIVGRLVPEHDPVYKVTIIPRGRALGVTMYLPEGDKYSINKVAIQSQLCSLYGGRVAEELIFGEDKVTTGASNDIERVTKMARNMVTKWGLSDELGPVAYGEEEDEVFLGRSVTQHKNVSDETARKIDEVVRSILDKAYARTKRILADNLDKLHAMSQLLLQYETIDAPQIDAIMEGRAPPPPVGWGKPSDNGSDDDMSKPRPLTTIVVPAEQV

SEQ ID NO: 18593 - protein, 447 aa, Giardia lamblia ATCC 50803
MGNAFSDSWGGMSSQASQQPGNQRGPPQGALRNRPRKTGAIHRMPAQNQVLFRIPTNMAPILPCYLKLLKQQRINALLAVENDFISNFSQSTFYKQVNKEQEQTIAKLRGTTQTIAVVQEIIDEEFLVVKKTEYSSIYTKALSFVDRELLQPNALVHLMEDAHRDIVVGVLSHDEDPNVTMMKVIERPKDTYADIGGQDEAIKELQETIQLPLTNPEYFVDLGIEPPRSCILHGPSGTGKSLLARACANETSACYMKMAGSELIQKYSGEGPRLVRELFKAAKANQPTIIFIDEVDAVGRKRYDADSGGAREIQRTMLELLNQLDGFDRTEGVKVIMATNLIESLDSALIRAGRIDRKIYVGLPDLTARRQIFKIHTRRMMLDKDIVEDEILNCKDDLSGADIKAITLEAGLLALRDRRIRVCMSDFRKARDKVLYKKIQEVGDLYT

SEQ ID NO: 18594 - protein, 659 aa, Streptococcus pyogenes MGAS8232
MKNNKNNGFVKNSFIYILMIIVVITGFQFYLKGTSTQSQQISYSKLIKHLKAGDIKSLSYQPSGSIIEVKGKYEKPQKVTVNSGLSFLGGRASTQVTEFSSLVLPSDTILKEMTAAADKNGTELTVKQESSSGTWITFLMSFLPIVIFAAFMMMMMNQGGGGARGAMSFGKNKAKSQSKGDVKVRFTDVAGAEEEKQELVEVVDFLKNPKKYKSLGARIPAGVLLEGPPGTGKTLLAKAVAGEAGVPFFSISGSDFVEMFVGVGASRVRSLFEDAKKAERAIIFIDEIDAVGRRRGAGMGGGNDEREQTLNQLLIEMDGFEGNENIIVIAATNRSDVLDPALLRPGRFDRKVLVGRPDVKGREAILRVHAKNKPLANDVNLKVVAQQTPGFVGADLENVLNEAALVAARRNKIKIDASDIDEAEDRVIAGPSKKDRTISQKEREMVAYHEAGHTIVGLVLSNARVVHKVTIVPRGRAGGYMIALPKEDQMLLSKEDLKEQLAGLMGGRVAEEIVFNAQTSGASNDFEQATQIARAMVTEYGMSEKLGPVQYEGNHAMMPGQISPEKAYSAQTAQMIDDEVRELLNQARNQAADIINENRDTHKLIAEALLKYETLDAAQIKSIYETGKMPVDLETDDNEAHALSYDEIKNKMTESESAE

SEQ ID NO: 18595 - protein, 647 aa, Yersinia pestis KIM
MSDMAKNLILWLVIAVVLMSVFQSFGPSESNGRRVDYSTFMSDVTQDQVREARINGREINVSKKDNSKYTTFIPVNDPKLLDTLLTKNVKVVGEPPEEQSLLASIFISWFPMLLLIGVWIFFMRQMQGGGGKGAMSFGKSKARMLTEDQIKTSFADVAGCDEAKEEVSELVDYLREPSRFQKLGGKIPKGVLMVGPPGTGKTLLAKAIAGEAKVPFFTISGSDFVEMFVGVGASRVRDMFEQAKKAAPCIIFIDEIDAVGRQRGAGLGGGHDEREQTLNQMLVEMDGFEGNEGIIVIAATNRPDVLDPALLRPGRFDRQVVVGLPDVRGREQILKVHMRRVPLDTDIDASVIARGTPGFSGADLANLVNEAALFAARGNKRVVSMVEFEKAKDKIMMGAERRSMVMTEAQKESTAYHEAGHAIIGRLVPEHDPVHKVTIIPRGRALGVTFFLPEGDAISASRQKLESQISTLYGGRLAEEIIYGPEKVSTGASNDIKVATSIARNMVTQWGFSEKLGPLLYAEEEGEIFLGRSVAKAKHMSDETARIIDQEVKLLVERNYQRARKLLLENMDVLHSMKDALMKYETIDAPQIDDLMNRKEVRPPAGWDNVTKNKSSDNDNTPTATMPADEPNTPTSGNTVSEQLGDK

SEQ ID NO: 18596 - protein, 410 aa, Methanothermobacter thermautotrophicus str. Delta H
MENNSQNVLKKIEDLKKEVRMLKEENSKTKRNLMWKIRKLEKDKLLIENERTRLDREVKSLRGEIERFRTPPLVIATVTEVLDDHRVAVKSTTGPHFVINYSRFIDRKQLEPGARVALNQQTFSIVDVLPSEKDPVVTGMEVEEKPDVSYEQIGGLEEQVREVKETVELPLKKPELFEKIGIEPPKGVLLYGPPGTGKTLLAKAVAHETNATFIKIVASEFVRKYIGEGARLVRGVFELAKEKSPSIIFIDEIDAVAAKRLKSSTSGDREVQRTLMQLLAELDGFESRGNVGIVAATNRPDILDPALLRPGRFDRFIEVPLPNEDGRREILKIHTSGMALAEEVDIELLARITDGASGADLKAICTEAGMFAIRDERDEVTMADFMDAVDKIMGVEKEEEYKQETGVMFG

SEQ ID NO: 18597 - protein, 648 aa, Xanthomonas campestris pv. campestris str. ATCC 33913
MRMNDLTKNLLLWVVVAVVLMVVFQSFSPRMAGGVGPDSITYTQFLKEVDSGRVKSVDYTDETNLAVNAIRFKRTDGSEATVYGPRDDKLVDVLYSKNIEMTRQKPSTGPGFWSLVLNFLPVILIIGFWLFIMRQMQGGGGGAKGAMSFGKSRAKLQGEDQVKVTFADVAGCDEAKEEVGELVDFLRDPTKFTKLGGKIPRGVLMVGPPGTGKTLLAKAIAGEAKVPFFSISGSDFVEMFVGVGASRVRDMFEQAKKHAPCIIFIDEIDAVGRHRGAGLGGGHDEREQTLNQLLVEMDGFEGGEGVIVIAATNRPDVLDPALLRPGRFDRQVVVGLPDVKGREQILRVHMRKLPLADDVVPLVIARGTPGFSGADLANLANEAALFAARGNEKEVRMDHFDRARDKILMGAERRSMAMSEDEKTLTAYHEAGHAIVGRLVPEHDPVYKVTIIPRGRALGVTMYLPEGDRYSMNRVAIESQLCSLYGGRVAEELIFGGDKVTTGASNDIERATKMARNMVTKWGLSDELGPVAYGEEEDEVFLGRSVTQHKNVSDETARKIDEVVRSILDKAYSKTKTILTENLDKLHAMSQLLLQYETIDVPQIDAIMEGRDPPPPAGWGKSDKDGGNNNDKGSPRPLPPIAGPAEQL

SEQ ID NO: 18598 - protein, 648 aa, Xanthomonas axonopodis pv. citri str. 306
MRMNDLTKNLLLWVVVAVVLMVVFQSFSPRMAGGVGADSITYTQFLKEVDSGRVKSVDYTDETNLAVNAIRFKRTDGSEATVYGPRDDKLVDVLYSKNIEMTRQKPSTGPGFWSLVLNFLPVILIIGFWLFIMRQMQGGGGGAKGAMSFGKSRAKLQGEDQIKITFADVAGCDEAKEEVGELVDFLRDPTKFTKLGGKIPRGVLMVGPPGTGKTLLAKAIAGEAKVPFFSISGSDFVEMFVGVGASRVRDMFEQAKKHAPCIIFIDEIDAVGRHRGAGLGGGHDEREQTLNQLLVEMDGFEGGEGVIVIAATNRPDVLDPALLRPGRFDRQVVVGLPDVKGREQILRVHMRKLPLADDVVPMVIARGTPGFSGADLANLCNEAALFAARGSEKEVRMDHFDRARDKILMGAERRSMAMSEDEKTLTAYHEAGHAIVGRLVPEHDPVYKVTIIPRGRALGVTMYLPEGDRYSMNRVAIESQLCSLYGGRVAEELIFGGDKVTTGASNDIERATKMARNMVTKWGLSDELGPVAYGEEEDEVFLGRSVTQHKNVSDETARKIDEVVRSILDKAYSKTKTILTENLDKLHAMSQLLLQYETIDVPQIDAIMEGREPPPPAGWGKSDKDGGNNNDKGSPRPLPPIAGPAEQL

SEQ ID NO: 18599 - protein, 626 aa, Caulobacter crescentus CB15
MNFRNLAIWLVIVAVLGGVFVVSQNSRTKSSSEISYSQLLKDVDAGKIKSAEIAGQTVLAKTADNKTLTVNAPMNSEELVNRMVAKNADVKFKSGSISFLAILVQLLPILLVVGVWLFLMRQMQGGAKGAMGFGKSKARLLTENKNRITFEDVAGVDEAKEELQEVVDFLKDPAKFQRLGGKIPKGALLVGPPGTGKTLIARAVAGEAGVPFFTISGSDFVEMFVGVGASRVRDMFEQAKKNAPCIIFIDEIDAVGRHRGAGLGGGNDEREQTLNQLLVEMDGFEANEGIILIAATNRPDVLDPALLRPGRFDRQVVVPNPDVAGREKIIRVHMKNVPLAADVDVKTLARGTPGFSGADLANLVNEAALMAARKNRRMVTMQDFEQAKDKVMMGAERRSMAMNEEEKKLTAYHEGGHAIVALNVPLADPVHKATIVPRGRALGMVMQLPEGDRYSMKYQQMTSRLAIMMGGRVAEEIIFGKENITSGASSDIKAATDLARNMVTRWGYSDILGTVAYGDNQDEVFLGHSVARTQNVSEETARLIDSEVKRLVQYGLDEARRILTDKIDDLHTLGKALLEYETLSGEEIADILKGIPPKREEEEAATAVIAPSLVPLSPGAGASVTA

SEQ ID NO: 18600 - protein, 645 aa, Campylobacter jejuni subsp. jejuni NCTC 11168
MNNNTQNNKGNPQGNNFFNKNPIFIFAIFAIIMIIIFKGFFDGNGSFGGALNGNEVNKNVPYSELKKLIESGQINQVSIGQTTIKAISSSHNTVYTAKKVNDPELVSLLDSKNIAYGAYSETNWFTDILFSWVLPVFIFFGIWMFLASRMQKNMGSSILGIGSSKKLVNSEKPKVKFSDVAGVEEAKEEVKEIVDFLKYPERYIKLGAKIPKGLLLVGPPGTGKTLLAKAVAGEADVPFFSVSGSSFIEMFVGVGASRVRDLFENAKKEAPAIVFIDEIDAIGKSRAASGMMGGNDEREQTLNQLLAEMDGFGTESSPVIVLAATNRPEVLDAALLRPGRFDRQVLVDKPDFKGRCDILKVHMKDVKISPKVKVEDIARLTAGLAGADLANIINEAALLAGRDSKKYVEQNDLVEAVERAIAGLEKKSRRINEKEKKIVTYHECGHALIAETTKGAKRVSKVSVIPRGLAALGYTLNTPEENKFLMQKHELIAEVDVLLGGRAAEEVFIGEISTGASNDLERATDIIKAMISMYGMSEIAGLMVLEKQRNTFLSGGQTIKDYSEKMAESLDDYVKKTLDERYKDVKDTLNTYKGAIETMVAALYEEETIEGNKVREIIKEFEDQNSLPTRLQELEEVKTEVKVEE

SEQ ID NO: 18601 - protein, 538 aa, Campylobacter jejuni subsp. jejuni NCTC 11168
MKNKKIILASFMVLCMLLGILYFKNEPKYIDENLYQSLLSQNLIQKAVIDKDEIWLKAEGENYVIIKDGIDIKTLLSKVPVEVKKDNTLWVFFVLLIFIIALFISLGYFARKKELAKYPISNKNQNHTQAQNSNINLESSHIKPVISNITFNDVAGVDEVKMELSELVDFLQNPKKYKEFGVKMPKGVLMVGPPGVGKTLIAKAVAGEAGVPFFYQSGSSFVEIYVGMGAKRVRELFSKAKMMAPSIVFIDEIDAVGKARGEMSNVERDSTLNQLLTQMDGFEDNSGVIVIAATNKIELMDPALLRSGRFDRRIFLSLPDFKDRLKILEIYMKDKNNNINLNKIAKASVGFSGAGLETLVNEAAINALRRNSALVEESDFYAVLNKVLLGKKKILSFNNEEKKIQATYQAAKALSAYYFDIGFEKITLIEDRFKEYEHNIRSKSELINRIKVYLAGSRAMRLIYNESYTNSQDDFLKIKELLDYMLSFDMLKESNLSEQKKEMDEFLNSMKDKILKLSELLLEKEKIEYDDVKDIMQV

SEQ ID NO: 18602 - protein, 601 aa, Clostridium perfringens str. 13
MKKLQSMITYIAIFAVVLMFAFAFYRNGTQGKVISYTEFKEAYVENKIETMTIKEDKMSVDGVFKDGKRFTSYVSNKMLDNLLQETQGVETVIKYTPPNNMGIWISFLPTILIIGVIFFGLFMFTQQAQNSGGNRGVMNFGKSKAKMANLDGKKVTFKDVAGADEEKGELEEIVDFLKQPKRYIEMGARIPKGVLLVGPPGTGKTLLAKAIAGEAGVPFFSISGSDFVEMFVGVGASRVRDLFEQAKKNAPCIIFIDEIDAVGRQRGAGLGGGHDEREQTLNQLLVEMDGFGVNEGIIMIAATNRPDILDPALLRPGRFDRRILVGAPDVKGREEVLKVHTRNKHLSEDVDLKVLAKMTPGFSGADLENLTNEAALLAVRGGKSSIDMADIEEAITRVIAGPEKKSRVVSEYDRRITAVHESGHAVVSNVLEYADPVHEISIIQRGMAAGYTMNLPEEDRTHTSKKQLKDKMVELLGGRVAEKLVIGDISAGAKNDIDRASHIARSMVMEYGMSDVIGPISFGNSDGGEVFLGRDIGKSSNISEETSAKIDEEIKKLIDEAYNRAESILRENISKLNAVTDVLLQKEKIDGDEFREIFKNS

SEQ ID NO: 18603 - protein, 812 aa, Corynebacterium efficiens YS-314
MRMKNKKFLQYGGIAAVVLITLFLFSLFTSDTRNFQEVDTSVAMEQLEANNVSEAQIDDREQRLRLTLREPIEVEEREGVEEIITQFPARTAPLIFDKVEASDAESYTTNVTQDNFLVSMLSFILPLLIVFGLLMFFLSRAQGGGMFGMGASKARQLTKDTPTNTFADVAGADEAVDELHEIKDFLEDPTRYQDLGAKIPRGVLLYGPPGTGKTLLARAVAGEAGVPFFSISGSDFVEMFVGVGASRVRDLFKQAKENSPCIIFIDEIDAVGRARGSGMGGGHDEREQTLNQLLVEMDGFGDRGSVILMAATNRPDVLDPALLRPGRFDRQIPVTAPDLKGREQILEIHAKGKPFAPDANLKALAKRTAGMSGADLGNVLNEAALLTARIGGNAITADALEEATDRVIGGPRRSSKIISEQEKKVTAYHEGGHTLSAWALSDIERVYKVTILARGRTGGHAMTVQEDDKGMYNRNELFARLVFAMGGRAAEELVFGAPTTGASADIEQATKIARAMVTEYGMSPTVGMVKYGEEQGDPFSGRGGGGTLTHSQEVAALIDTEVAYLLDKAHEVSYNILREYRDHLDRLAEKLLEKETLRRPDLEVLFSDIEPRSIDEVFPDENDRFPRQEDREPVKTPVEIAIERGEEPPKRFSIVEASKAARERRRKELEEQKGAGVSVPVGLSTGNAPTPDYGTPPPADWTVPGSGAKRPNPYAGTAAPSPEAEHPGMKAYGFGDKELMDQSTGEEHAPGNVSRKGTGPGDAPTQIIGFRLPDHERPDHDRPEGTVEERPGMMDEATEVDPGTENEGDKRG

SEQ ID NO: 18604 - protein, 853 aa, Corynebacterium glutamicum ATCC 13032
MKNKKYLQFGGIAAVILIVLFLVSLFSSDTRNFQEVDTSVAMAQLDAGNVAEAQIDDREQRVRLTLREPITVDEREGVEEILAQYPARTAPAIFEKVEASNTDSYTTNVTQESFLMSMLSFILPMVIIFGLLMFFLTRMQGGGMFGIGGSKAKQLTKDMPTNTFADVAGAEEAVDELHEIKDFLEDPTRYEALGAKIPRGVLLYGPPGTGKTLLARAVAGEAGVPFYSISGSDFVEMFVGVGASRVRDLFKQAKENSPCIIFVDEIDAVGRARGSGMGGGHDEREQTLNQLLVEMDGFGDRQGVILMAATNRPDVLDPALLRPGRFDRQIPVTNPDLRGREQILEVHAKGKPFAPDADIKALAKRTAGMSGADLANVLNEAALLTARVGGNVITADALEEATDRVVGGPRRSGKVISEKEKKVTAYHEGGHTLSAWALEDIERVYKVTILARGRTGGHAMTAQEDDKGMYNRNELFARLVFAMGGRSAEELVFGEPTTGASADIEMATKIARSMVTEYGMSPAVGMVKYGQEQGDPFSGRGGGGNLDHSQEVAATIDTEVQFLLDKAHEVSYSILAEYRDHLDRLAEKLLEKETLRRPDLEALFDDIVPRKVAEVFPDESTRFPRQENREPVKTPVELALERGEEPPKKFSILEASRATRERRRKELEAQGKLPVQPASSAGVAPAAGAAAGSYGTPPPADWSVPGSAGKHRSRAEEQPAEQGFPAQTPAQAPEQSPDSSGGRPNPYATPTASGEHPGMKAYGFGDSELMDQSTGAEHTPGNVSQESPTEMIGFRLPDHERSDYPEKAQKESVLDASETTEMPVVPDQPIDGDSGKSAEGTQENPENEGDNRG

SEQ ID NO: 18605 - protein, 860 aa, Corynebacterium glutamicum ATCC 13032
MSRLPLRMKNKKYLQFGGIAAVILIVLFLVSLFSSDTRNFQEVDTSVAMAQLDAGNVAEAQIDDREQRVRLTLREPITVDEREGVEEILAQYPARTAPAIFEKVEASNTDSYTTNVTQESFLMSMLSFILPMVIIFGLLMFFLTRMQGGGMFGIGGSKAKQLTKDMPTNTFADVAGAEEAVDELHEIKDFLEDPTRYEALGAKIPRGVLLYGPPGTGKTLLARAVAGEAGVPFYSISGSDFVEMFVGVGASRVRDLFKQAKENSPCIIFVDEIDAVGRARGSGMGGGHDEREQTLNQLLVEMDGFGDRQGVILMAATNRPDVLDPALLRPGRFDRQIPVTNPDLRGREQILEVHAKGKPFAPDADIKALAKRTAGMSGADLANVLNEAALLTARVGGNVITADALEEATDRVVGGPRRSGKVISEKEKKVTAYHEGGHTLSAWALEDIERVYKVTILARGRTGGHAMTAQEDDKGMYNRNELFARLVFAMGGRSAEELVFGEPTTGASADIEMATKIARSMVTEYGMSPAVGMVKYGQEQGDPFSGRGGGGNLDHSQEVAATIDTEVQFLLDKAHEVSYSILAEYRDHLDRLAEKLLEKETLRRPDLEALFDDIVPRKVAEVFPDESTRFPRQENREPVKTPVELALERGEEPPKKFSILEASRATRERRRKELEAQGKLPVQPASSAGVAPAAGAAAGSYGTPPPADWSVPGSAGKHRSRAEEQPAEQGFPAQTPAQAPEQSPDSSGGRPNPYATPTASGEHPGMKAYGFGDSELMDQSTGAEHTPGNVSQESPTEMIGFRLPDHERSDYPEKAQKESVLDASETTEMPVVPDQPIDGDSGKSAEGTQENPENEGDNRG

SEQ ID NO: 18606 - protein, 613 aa, Buchnera aphidicola str. Sg (Schizaphis graminum)
MVKNLIFWLVITVVLMSVFQNFNSSDTSNHRVDYSTFLSEVNQDQVREAYINGRIISVTKKDSSKYITYIPINDPKLLDNLLTKNVKIVGEIPEEPSLLISIFISWFPMLLLIGVWIFFMRQMQMGGGKGAMSFGKSKARMLSEDQIQTTFADVAGCDEAKEEVSELVEYLKEPSRFQKLGGKIPKGILMVGPPGTGKTLLAKAIAGEAKVPFFTISGSDFVEMFVGVGASRVRDMFEHARKSAPCIIFIDEIDAVGRQRGAGLGGGHDEREQTLNQMLVEMDGFDGNEGVILIAATNRPDVLDPALLRPGRFDRQVIVALPDVRGRKQILKVHMRKVPLSEDVDPMIIARGTPGFSGADLANLVNEAALFAARFNNRVVSMIHFEKAKDKIMMGSERRSMVMSDFQKESTAYHEAGHVIIGRLVPDHDPAHKVTIIPRGQALGITFFLPESDILSISRQKLESQISTLYGGRLAEEIIYGSQNVSTGAFNDIKVATNLARNMVTQWGFSDKLGPLLYAEEEGEVFLGRSVAKAKHMSDETARIIDEEVKLLIEVNYNRARKILNENLDILHAMKDALIKYETIDSLQIDDLMERREVRKPKGWLEVDQKKDI

SEQ ID NO: 18607 - protein, 682 aa, Thermobifida fusca
MNLKRLYRGPWLWFIAILLMLLVTSQFMGWGSGPEHVKTDTSKVFTLIEQDQVRDAKIIDKDQRIELTTVDGKLYEAYWVDGQGAELAEALRANQGGNLEAYDVEVPGDNIWLSLLFSFLPLLLVIAVFFFIMNQMQGGGSRVMNFGKSRAKLISKDTPKTTFADVAGADEAIEELKEIKDFLQNPGKFQSLGAKIPKGVLLYGPPGTGKTLLARAVAGEAGVPFYSISGSDFVEMFVGVGASRVRDLFEQAKANAPAIIFIDEIDAVGRHRGAGMGGGHDEREQTLNQLLVEMDGFDSRGGVILIAATNRPDILDPALLRPGRFDRQIVVDRPDLEGRKGILRVHAQGKPLGPDVDLDVIARRTPGFTGADLANVINEGALLTARRGKQQIDMATLEEAIDRVIAGPERKSRVMSEAEKKIIAYHEGGHALVGHALPNADPVHKVTILPRGRALGYTMSLPTEDKFLTSRSEMMDQLAMMLGGRAAEELVFHEPTTGAANDIEKATNLARSMVTEYGMSERLGARKFGNSNTEPFLGREMAHSREYSEEIAALIDEEVRRLIEAAHDEAWEILVEYRDVLDELVLQLLDKETLSKEEVLEIFAPVRKRPSRGSYKGYGKRIPSDKPPVLTPKELALMGPKDVEDLVGGSNGQANTAGELSWEQKHDRKAGPGDANPGADRD

SEQ ID NO: 18608 - protein, 638 aa, Microbulbifer degradans 2-40
MAKNLVLWLVIATVLFMVFKNFNEPAVQQEMAYSDFVTEVRAGNVREVVFEGNIIRGVGYNNQPFRVVMLPTIDLDLRSELVENGVAFKAEKKEEAGFFENLLLATVPVLLFIAVFIFFMRQMQGGSGGRGGPMSFAKSKARLLGEDQVKTTFADVAGVDEAKEEVSELVEYLRDPSKFQRLGGRIPRGVLMSGPPGTGKTLLAKAIAGEAKVPFFSISGSDFVEMFVGVGASRVRDMFEQAKKQAPCIIFIDEIDAVGRHRGGGGHGGGHDEREQTLNQLLVEMDGFEGNEGVIVIAATNRSDVLDKALLRPGRFDRQVNVGLPDVRGREQILKVHMRKVPISDAVKASIIARGTPGFSGADLANLVNEAALLAARGNKRLVTEEEFENARDKILMGTERRTLVMTEQEKESTAYHEAGHAIVGYLSPEHDPIHKVTIIPRGRALGVTHFLPEGDRISESKRKMMGDIACAYGGRIAEEMIYGADGVSTGAYGDIRGATAIARAMVVNYGLSDTLGPLDYDARDSDGIGSKKISGHTARLIDEEVKNITDACYKRAEQILEENRDILEAMKDALMEYETLDSDQVSDLMARRKIRPPKSWSDDLTDGGASAGETDSGSTAEKTKASDSSLGGPASEH

SEQ ID NO: 18609 - protein, 697 aa, Bifidobacterium longum DJO10A
MSFPQGPGNGNNPNPNNNRNNGNPFTNPFNRGNNGNNGKGNNNENRPIWQSPWLWGAVLVVMVVLMFQMFAGGGTKTIDTKDGFALINQGKATYAEITDNKQVVRLKLKNDYTKKNADTGKVTNYGKNVQFYYTFAQGAQVAKAVENGNLEKGWTSNIEQTSMLSYLVTSILPFIIFFALFWWLMSRMGGAGGMLGMGGRKNSGKLLEGQTPTTKFADVAGEDEAVAEVEEIKDFLKDPSKYKALGARIPRGVLLYGPPGTGKTLLARAIAGEAGVPFYSMAGSDFVEMFVGLGASRVRDLFDEAKKNAPAIIFIDEIDAVGRKRGSGMGGGHDEREQTLNQLLVEMDGFDNDTNLIIIAATNRPDVLDPALLRPGRFDRQVGVAAPDLEGREAILRVHAKGKPFVPDVDLHMVAVRTPGFTGADLANVLNEAALLCARAGAQLIDNRAIDEAIDRVQAGPKRKSKGMALEELRNTAYHEGGHALVAAALNNTDPVTKVTILPRGRALGYTAVMPTSDRYSQSRNQLLDQMAYAMGGRTAEEIVFHDPTTGASNDIEKATNIARTMVIEYGFSDKLGAIKWGSDDDQTTVMDGLQPRKYSDRTAEVIDDEVLKLVETAHTEAWTIINDNREILDELVRQLLVKETLNEKELAAIFAPIKKAPVRPVWLSNDRRPDSDKPPVEIPESLKRSVGMKPEE

SEQ ID NO: 18610 - protein, 521 aa, Bifidobacterium longum DJO10A
MSDTEDLAALNDRLMAKNHALAEALSRAGKELTKAKSQLAQLAQPPLTFATMVKVDSTRTDEDGIQHASAEVISGTRRMVVPVASNVNAARLTAGATVMLNEKLVLVEQRDADTVGQIRSVKQVLDDGRLIVTDASGNPVLIRRSGALAYAGINQGDRIIIDPSVRLAIEALPAEGDKDLVLEETPDVTFADIGGLDSEIGRIRDAVQLPFQHRALFERYDLKPPKGVLLYGPPGNGKTMIAKAVANALCEGGYDSNGDGAISPAETHVKGVFLSVKGPELLNKYVGESERLIRLIFQRARERAADGNPVVVFIDEMDSLLRTRGSGVSSDVETTIVPQFLSELDGVESLDNVMVIGASNRVDMIDPAVLRPGRLDVKIRVGRPKTNQAIAIVDHYLTDDLPLEDGVDAHALSAVLVHDIYGTSERRHLCDVQEENGQWHALFLADVVSGAMLKNIVDRAKTRAVKESIETGLDVALTVPLLAAAVEDEYRETRDSMADVDPEQWSRINGMDPIRRIRTAE

SEQ ID NO: 18611 - protein, 609 aa, Haemophilus somnus 129PT
MVKNIVLWIVVAVVMMTAYQSFSGNSSNNAIDYTTFISDVENNQVSATKFNEVGEIFVTKKDGSKYTTVLPTPLEDRKLLDDLIKSKVKIDGALPEQRGFLSQILISWFPMILLIGVWFFFMRQMQGGGGKAMSFGKSRAKMLTKEQIKTTFADVAGCDEAKEEVGEIVDFLRDPSKFQKLGGKIPKGILMVGPPGTGKTLLAKAIAGEAQVPFFTISGSDFVEMFVGVGASRVRDMFEQAKKNAPCLIFIDEIDAVGRQRGAGLGGGHDEREQTLNQMLVEMDGFEGNEGVIVIAATNRPDVLDPALTRPGRFDRQVVVGLPDVRGREHILKVHMRKVPVADDVDAMTLARGTPGYSGADLANLVNEAALFAARTNKKLVTMLEFEKAKDKINMGPERRSMIMTDKVKESTAYHEAGHAIVGYLVPEHDPVHKVTIIPRGRALGVTFFLPEGDQVSISQKQLESKLSTLYAGRLAEELIYGEENISTGASNDIKVATNIARNMVTQWGFSDKLGPILYSEDEGEVFLGRSMAKAKHMSDETAHTIDEEVRSIVNRNYQRARQILTDNMDILHAMKDALVKYETIEEEQIKQLMNREPVVAPPGWTNNE

SEQ ID NO: 18612 - protein, 634 aa, Pseudomonas syringae pv. syringae B728a
MAKNLILWLIIAAVLVTVMNNFSSPNEPQNLNYSEFIQQVKDGKVEKVSVDGYVITGKRSDGDTFKTIRPNIPDNGLIGDLVSNNVVIEGKQPEQQSIWTQLLVASFPILVIIAVFMFFMRQMQGGAGGKGGPMSFGKSKARLLSEDQVKTTLADVAGCDEAKEEVGELVEFLRDPGKFQRLGGRIPRGVLMVGPPGTGKTLIAKAIAGEAKVPFFTISGSDFVEMFVGVGASRVRDMFEQAKKHAPCIIFIDEIDAVGRHRGAGMGGGHDEREQTLNQLLVEMDGFEMNDGIIVIAATNRPDVLDPALLRPGRFDRQVVVGLPDIRGREQILKVHMRKVPMGEDVNPGVIARGTPGFSGADLANLVNEASLFAARSGKRVVEMKEFELAKDKIMMGAERKSMVMSDKEKRNTAYHEAGHAIVGRLVPEHDPVYKVSIIPRGRALGVTMFLPEEDRYSLSKRALISQICSLYGGRIAEEMTLGFDGVTTGASNDIMRASQIARNMVTKWGLSEKLGPLMYSEDEDAGYLGRGGSQNSSVSGDTAKLIDSEVRSIIDHCYGTAKQLLTDNRDKLEAMADALMKYETIDADQIDDIMTGRTPREPRDWGGGSGTNGTPITPDPRPETPIGGPAAEH

SEQ ID NO: 18613 - protein, 635 aa, Pseudomonas fluorescens PfO-1
MAKNLILWLIIAAVLVTVMNNFSSPNEPQTLNYSDFIQQVKDGKVERVAVDGYVITGKRNDGDSFKTIRPAIQDNGLIGDLVDNHVVVEGKQPEQQSIWTQLLVASFPILVIIAVFMFFMRQMQGGAGGKGGPMSFGKSKARLLSEDQVKTTLADVAGCDEAKEEVGELVEFLRDPGKFQRLGGRIPRGVLMVGPPGTGKTLLAKAIAGEAKVPFFTISGSDFVEMFVGVGASRVRDMFEQAKKHAPCIIFIDEIDAVGRHRGAGMGGGHDEREQTLNQLLVEMDGFEMNDGIIVIAATNRPDVLDPALLRPGRFDRQVVVGLPDIRGREQILKVHMRKVPMGDDVAPAVIARGTPGFSGADLANLVNEASLFAARAGKRIVEMKEFELAKDKIMMGAERKSMVMSEKEKQNTAYHEAGHAIVGRVVPEHDPVYKVSIIPRGRALGVTMFLPEEDRYSLSKRALISQICSLYGGRIAEEMTLGFDGVTTGASNDIMRASQIARNMVTKWGLSEKLGPLMYAEEEGEVFLGRGGGGQNASFSGETAKLIDSEVRSIIDQCYGTAKQILTDNRDKLDAMADALMKYETIDAEQIDDIMAGRTPREPRDWSGGTGTGTPPVIQGERPETPIGGPAADV

SEQ ID NO: 18614 - protein, 696 aa, Bifidobacterium longum NCC2705
MSFPQGPGNGNNPNPDNNRNNGNPFTNPFNRGNNGNNGKGNKENRPIWQSPWLWGAVLVVMVVLMFQMFAGGGTKTIDTKDGFALINQGKATYAEITDNKQVVRLELKNDYTKKNADTGKVTNYGKNVQFYYTFAQGAQVAKAVENGDLEKGWTSNIEQTSVMSYLITSILPFVIILALFWWLMSRMGGAGGMLGMGGKKNSGKLLDGQTPTTKFADVAGEDEAVAEVEEIKDFLKDPSKYKALGARIPRGVLLYGPPGTGKTLLARAIAGEAGVPFYSMAGSDFVEMFVGLGASRVRDLFDEAKKNAPAIIFIDEIDAVGRKRGSGMGGGHDEREQTLNQLLVEMDGFDNDTNLIIIAATNRPDVLDPALLRPGRFDRQVGVAAPDLEGREAILRVHAKGKPFVPDVDLHMVAVRTPGFTGADLANVLNEAALLCARAGAQLIDNRAIDEAIDRVQAGPKRKSKGMALEELRNTAYHEGGHALVAAALNNTDPVTKVTILPRGRALGYTAVMPTSDRYSQSRNQLLDQMAYAMGGRTAEEIVFHDPTTGASNDIEKATSIARTMVIEYGFSDKLGAIKWGSDDDQTTVMDGLQPRKYSDRTAEVIDDEVLKLVETAHTEAWTIINDNRDILDELVRQLLVKETLNEKELAEIFAPIKKAPVRPVWLSNDRRPDSDKPPVEIPESLKRSVGMKPEE

SEQ ID NO: 18615 - protein, 521 aa, Bifidobacterium longum NCC2705
MSDTEDLAALNDRLMAKNHALAEALSRAGKELTKAKSQLAQLAQPPLTFATMVKVDSTRTDEDGIQHASAEVISGTRRMVVPVASNVNAARLTAGATVMLNEKLVLVEQRDADTVGQIRSVKQVLDDGRLIVTDASGNPVLIRRSGALAYAGINQGDRIIVDPSVRLAIEALPAEGDKDLVLEETPDVTFADIGGLDSEIGRIRDAVQLPFQHRALFERYDLKPPKGVLLYGPPGNGKTMIAKAVANALCEGGYDTNGDGSISPAETHVKGVFLSVKGPELLNKYVGESERLIRLIFQRARERAADGNPVVVFIDEMDSLLRTRGSGVSSDVETTIVPQFLSELDGVESLDNVMVIGASNRVDMIDPAVLRPGRLDVKIRVGRPKTNQAIAIVDHYLTDDLPLEDGVDAHALSAVLVHDIYGTSERRHLCDVQEENGQWHALFLADVVSGAMLKNIVDRAKTRAVKESIETGLDVALTVPLLAAAVEDEYRETRDSMADVDPEQWSRINGMDPIRRIRTAE

SEQ ID NO: 18616 - protein, 725 aa, Desulfovibrio desulfuricans G20
  unsure (1)..(725): unsure at all Xaa locations
MQVVQLSEKPEKACCRHCQTVRTTLNFLARKQYPSCTEWRLLALNQFSRNLVLWAVISLLMVVLFNLFSQPPGPQAQMSYTEFLNKVTQGEVVQVTIQGEKLKGQTAEGQSFQTIAPNDPDLVNRLLEKGVQVKAEPKEEAPWYMTLLVSWFPMLLLIGVWIFFMRQMQGGGGKAMSFGRSRARMISHESAKVTFDDVAGVDEAKEELTEVVDFLSNPKKFTRLGGRIPKGVLLVGPPGTGKTLLARAVAGEAGVPFFSISGSDFVEMFVGVGASRVRDLFVQGXXXXXXXXXXXXXXXXXKKNAPCLIFIDEIDAVGRQRGAGLGGGHDEREQTLNQLLVEMDGFESNEGVILIAATNRPDVLDPALLRPGRFDRQVVVPTPDLRGRKRILEVHSKRTPLARDVDMEMLAKGTPGFSGADLENLVNEAALQAAKMNKDQVNMLDFETAKDKLLMGKERRSLVMSDKEKRVTAYHEGGHALTARLLPGTDPVHKVSIIPRGRALGVTMQLPDEDRHGYSRTYLLNNLVVLLGGRLAEEVVFGEITTGAGNDIERATKMARKMVCEWGMSDAIGPMNIGEQGEEVFIGREWAHSRNYSEETARMVDAEVKRIIDEAREKARTLLQENLDTLHRIAEALLERETINADDLERLIEGRPLLPVPEITATHPEGDAENAGPEDSVAAAPAEHAGDEFLLESDEAARPAAKDGEDAPDGQEEDTTDRREK

SEQ ID NO: 18617 - protein, 627 aa, Desulfovibrio desulfuricans G20
MEKKDQWNIGYWIVAGLLLLTLQNYWQAAKTVEPVPYSEFEKALAEGRVAEVLVSDRTVTGRLKSPDSRGKTTIVATRVEPDLAERLSKYDVPYARVVESTWLRDVLSWILPAVAFFGVWFFLFRRFAEKQGMGGFLSIGKSRAKVFMEKNTGVTFADVAGVDEAKADLVEIVDFLKNPQEYGRLGARIPKGVLLAGPPGTGKTLLAKAVAGEAAVPFFSISGSEFVEMFVGVGAARVRDLFEQARVQAPAIIFIDELDALGRARGVGGPIGGHDEREQTLNQLLTEMDGFDSSVGLIILAATNRPEILDQALLRAGRFDRQVLVDRPDKKGRLDILKVHVKKITLAHGVDLEQVAALTTGFSGADLANLVNEAALNATRRKAQAVELQDFTAAIERIVAGLERKNRVLNPKERETVAYHEMGHALVALALPGTDPVHKISIVPRGIGALGYTLQRPTEDRFLMTRADLEHKIAVLLGGRAAEKLVFGELSTGASDDLARATDIARDMITRFGMDEGLGYVAFEAQRPRFLDAPELVQGGCRVAESTQTRIDQAIRDIVMGVFDRAYRILEINREVLERCARELLARETLDEYSIRQLTQGLQLESPCHSGPTAGAITSSVSKGAAS

SEQ ID NO: 18618 - protein, 658 aa, Streptococcus agalactiae 2603V/R
MKNNKNNGFLKNSFIYILLIIAVITTFQYYLKGTSSQNQQISYTKLVKQLKAGEIKSISYQPSGGVVEVSGTYKKAKTIKSANSFTFLGGSVATKVTGFNSVILPNDSSIKSLVSAAEENNTNIQVKHESSSGTWISYIASFLPLVIMIGFFMMMMNQGGGGGARGAMSFGKNKARSSSKDEVKVRFSDVAGAEEEKQELIEVVDFLKDPKRYKSLGARIPAGVLLEGPPGTGKTLLAKAVAGEAGVPFFSISGSDFVEMFVGVGASRVRSLFEDAKKAERAIIFIDEIDAVGRRRGAGMGGGNDEREQTLNQLLIEMDGFEGNESIIVIAATNRSDVLDPALLRPGRFDRKVLVGQPDVKGREAILRVHAKNKPLADNVDLKVVAQQTPGFVGADLENVLNEAALVAARRNKKVIDASDIDEAEDRVIAGPSKKDRTISERERAMVAYHEAGHTIVGLILSNARVVHKVTIVPRGRAGGYMIALPKEDQMLLSKDDMKEQLAGLMGGRVAEEIIFNAQTTGASNDFEQATAMARAMVTEYGMSEKLGPVQYEGNHAMMAGQMSPEKSYSAQTAQLIDDEVRHLLNEARNKAADIINENRDTHKLIAEALLKYETLDAAQIKSIFETGKMPETENDEDKARALSYDEIKEKMQEEDKK

SEQ ID NO: 18619 - protein, 639 aa, Pseudomonas aeruginosa PAO1
MAKNLILWLIIAAVLVTVMNNFSSPSEPQTLNYSDFIQQVKDGKVERVTVDGYVITGKRSDGDTFKTIRPAIQDNGLIGDLVNNNVVVEGKQPEQQSIWTQLLVASFPILVIIAVFMFFMRQMQGGGGGRGGPMSFGKSKARLLSEDQVKTTFADVAGCDEAKEEVSELVEFLRDPGKFQRLGGRIPRGVLMVGPPGTGKTLLAKAIAGEAKVPFFTISGSDFVEMFVGVGASRVRDMFDQAKKHAPCIIFIDEIDAVGRHRGAGLGGGHDEREQTLNQLLVEMDGFEMNDGIIVIAATNRPDVLDPALLRPGRFDRQVVVGLPDIRGREQILKVHMRKVPLGDHVDPAVIARGTPGFSGADLANLVNEASLFAARSNKRIVDMREFELAKDKIMMGAERKTMVMSEKEKRNTAYHEAGHAIVGRLVPEHDPVYKVSIIPRGRALGVTMFLPEEDRYSLSKRALESQICSLFGGRIAEEMTLGFEGVTTGASNDIMRATQLARNMVTKWGLSEKLGPLMYAEEEGEVFLGRSAGSQHANVSGETAKMIDQEVRRIIDDCYGTAKRLLDENRDKLEMMADALMKYETIDSDQIDDIMAGRVPREPRDWQGGSGTGTPPANLEESGRRENTPPIGGPAGEH

SEQ ID NO: 18620 - protein, 702 aa, Mycoplasma genitalium
MKKRNKGLVEQTTTEKNNFSRKTAWKVFWWVIILAVVIGVLAYIFSPRAATAVVESWKLNGGSNSTLTAKVSGFSNELTFKQINGSTYVTDTILQVSITFDGLNSPLTVTAHKTVNSNGNVIFNIANLSINQSNGQITVNSNGTMMNGGSSNNTKSIAGFETLGTFIAPDTRARDVLNGLFGLLPIIIFVVFFLLFWRSARGISAGGREEDNIFSIGKTQAKLAKSTVKFTNIAGLQEEKHELLEIVDYLKNPLKYAQMGARSPRGVILYGPPGTGKTLLAKAVAGEAGVPFFQSTGSGFEDMLVGVGAKRVRDLFNKAKKAAPCIIFIDEIDSVGSKRGRVELSSYSVVEQTLNQLLAEMDGFTSRTGVVVMAATNRLDVLDDALLRPGRFDRHIQINLPDIKEREGILKVHAENKNLSSKISLLDVAKRTPGFSGAQLENVINEATLLAVRDNRTTININDIDEAIDRVIAGPAKKSRVISDEDRKLVAYHEAGHALVGLHVHSNDEVQKITIIPRGQAGGYTLSTPKSGDLNLKRKSDLLAMIATAMGGRAAEEEIYGNLEITTGASSDFYKATNIARAMVTQLGMSKLGQVQYVPSQGTLPSNVKLYSEQTAKDIDNEINFIIEEQYKKAKTIIKSNRKELELLVEALLIAETILKSDIDFIHKNTKLPPEILLQKQEQQAKQKLNKSEVKPESETNS

SEQ ID NO: 18621 - protein, 632 aa, Helicobacter pylori
MKPTNEPKKPFFQSPIILAVLGGILLIFFLRSFNSDGSFSDNFLASSTKNVSYHEIKQLISNNEVENVSIGQTLIKASHKEGNNRVIYIAKRVPDLTLVPLLDEKKINYSGFSESNFFTDMLGWLMPILVILGLWMFMANRMQKNMGGGIFGMGSAKKLINAEKPNVRFNDMAGNEEAKEEVVEIVDFLKYPERYANLGAKIPKGVLLVGPPGTGKTLLAKAVAGEAHVPFFSMGGSSFIEMFVGLGASRVRDLFETAKKQAPSIIFIDEIDAIGKSRAAGGVVSGNDEREQTLNQFLAEMDGFGSENAPVIVLAATNRPEILDPALMRPGRFDRQVLVDKPDFNGRVEILKVHIKGVKLANDVNLQEVAKLTAGLAGADLANIINEAALLAGRNNQKEVKLQHLKEAVERGIAGLEKKSRRISPKEKKMVAYHESGHAVISEMTKGSGRVNKVYIIPRGMAALGYTLNTPEENKYLMQKHELIAEIDVLLGGRAAEDFFLEEISTGASNDLERATDIIKGMVSYYGMSSVSGLMVLEKQRNAFLGGGYGSSREFSEKTAEEMDLFIKNLLEERYKHVKQTLSDYREAIEIMVKELFDKEVITGERVREIISEYEVANNLESRLIPLEEQAS

SEQ ID NO: 18622 - protein, 632 aa, Helicobacter pylori
MKPTNEPKKPFFQSPIILAVLGGILLIFFLRSFNSDGSFSDNFLASSTKNVSYHEIKQLISNNEVENVSIGQTLIKASHKEGNNRVIYIAKRVPDLTLVPLLDEKKINYSGFSESNFFTDMLGWLMPILVILGLWMFMANRMQKNMGGGIFGMGSAKKLINAEKPNVRFNDMAGNEEAKEEVVEIVDFLKYPERYANLGAKIPKGVLLVGPPGTGKTLLAKAVAGEAHVPFFSMGGSSFIEMFVGLGASRVRDLFETAKKQAPSIIFIDEIDAIPKSRAAGGMISGNDEREQTLNQLLAEMDGFGSENAPVIVLAATNRPEILDPALMRPGRFDRQVLVDKPDFNGRVEILKVDIKGVKLANDVNFEEVAKLTAGLAGADLANIINEAALLAGRNNQKEVKQQHLKEAVERGIAGLEKKSRRISPKEKKIVAYHESGHAVISEMTKGSARVNKVSIIPRGMAALGYTLNTPEENKYLMQKHELIAEIDVLLGGRAAEDVFLEEISTGASNDLERATDIIKGMVSYYGMSSVSGLMVLEKQRNAFLGGGYGSSREFSEKTAEEMDLFIKNLLEERYEHVKQTLSDYREAIEIMVKELFDKEVITGERVREIISEYEAANNLESRLIPLEEQAS

SEQ ID NO: 18623 - protein, 656 aa, Streptococcus mutans UA159
MKNNRNNGFVRNSLVYIILILAIVTGFQYFFRGTGSQSEKISYTTLVKRVKSGDIKSITYQPSGSIVQVTGDYTKSREIKTNSDLAFFNGTTTKVKKFTSIVLPNSTSIEKIEKLAEDKGTKISVKQESSSGAWISFLMSFLPIFIMIFFFTMMLNQSGGGARGAMSFGKNKARSSSKSDVKVRFSDVAGAEEEKQELIEVVDFLKDPKRYNALGARIPAGVLLEGPPGTGKTLLAKAVAGEAGVPFFSISGSDFVEMFVGVGASRVRSLFEDAKKAERAIIFIDEIDAVGRRRGAGMGGGNDEREQTLNQLLIEMDGFEGNENIIVIAATNRSDVLDPALLRPGRFDRKVLVGQPDVKGREAILRVHAKNKPLASDVNLKVVAQQTPGFVGADLENVLNEAALVAARRSKKIIDASDIDEAEDRVIAGPSKKDKTVSEHERQMIAYHEAGHTIVGLVLSNARVVHKVTIVPRGRAGGYMIALPKEDQNLLSKSDLKEQLAGLMGGRVAEEIIFNAQTTGASNDFEQATQLARSMVTEYGMSEKLGPVQYEGNHSMMPGQFASEKTYSAQTALLIDEEVRELLNEARNKAAGIINDNRETHKLIAEALLKYETLDAAQIKSIYETGKMPEKSEDSKDAHALSYDEIKEKMSEDNTD

SEQ ID NO: 18624 - protein, 709 aa, Mycoplasma pneumoniae
MKKNKGLNEATTSEKPQFPKRTAWKIFWWVVILAIIIGILVYILMPRATTAVIEKWELSGTTLSAQIKGLSGKHTFQRINNSTYVTDDILQVSISFQGINPIVVTAHKATNGSGETIFNIANLSINQSTGKAIVNGMMTQDQKSNNGTELASIKGLHDIGTFVAPDTRARDVLNIFFGLLPIIIFVIFFLLFWRSARGISGGGRSEEDNIFSIGKTQAKLAKSSVRFDNIAGLQEEKHELLEIVDYLKNPLKYAQMGARSPRGVILYGPPGTGKTLLAKAVAGEAGVPFFQSTGSGFEDMLVGVGAKRVRDLFNKAKKAAPCIIFIDEIDSVGSKRGRVELSSYSVVEQTLNQLLAEMDGFTSRTGVVVMAATNRLDVLDDALLRPGRFDRHIQINLPDIKEREGILQVHAKNKNLSSKISLLDVAKRTPGFSGAQLENVINEATLLAVRDNRTTINMNDIDEAIDRVIAGPAKKSRVVSDADRKLVAYHEAGHALVGLHVHSNDEVQKITIIPRGQAGGYTLSTPKSGDLNLKRKSDLLAMIATAMGGRAAEEEIYGPLEITTGASSDFYKATNIARAMVTQLGMSKLGQVQYVPSQGTVPPGTKLFSEQTAKDIDFEINAIIEEQYKKARTIIKTNRKELELLVEALLIAETILKSDIDYIHEHTKLPPEILAQKQEQQAKQKAEAKEAKLNKKTEKDTEKDSETNS

SEQ ID NO: 18625 - protein, 725 aa, Mycoplasma pulmonis
MDKMKKPKINWLLIVIVGIIAALLITVLVLLFSPKTQPKSFDYLLKHFEEAAKSTTDDIYFETIKINSLDNTIGVIFRNGAMREEYFVAASAAQANFLTSGNVEVREILQLANVQAYIQSIKTLNGTISWFTFMNKFLAQHPGYDASKAGLFGQHIVQENGFITFIKAIWFPALIAIIIFLGYKAQSRAASGGIFNPGKNQAVIVKTDKKFTDIAGNKEPIEEVQELVDYLKNPKKYAAAGARFPKGILLGGPPGTGKTLLAKATAGEANVPFFFISASSFVELYVGLGAKRVREMFKEARKLAPAIIFIDELDAVGRSRGSGIGGGNDEREQTLNQILVEMDGINENAGILIMGATNRTDVLDPALLRPGRFDRIITVGLPDIKEREEILKLHSKGKRLSKEIKFDKIAKRTPGYSGAQLENVINEASLLSVREKTDVIISTQIDEAIDRVMAGPAKKSRVISQEELKAVAYHEAGHAVVGLKVKGGNKVQKITIIPRGNAGGYNLMTPEEEKYNASKKELLATIASYMGGRAAEMIIYGKENISTGASDDISRATKIARKMVTEWGMSALGPIKYEEDTENPFLGRDYSKGTFGSKMAHEIDLEIRKIISASEEIAIKAIEQNLELLELIKDSLLENETIVAEEIEYIEKNMKLPPNNEKIKPDGESKKVNIEDLINQVNESQEKDKQKNAQIKEDLSKMDKKDNLTKAKDKGEEETLAEKAE

SEQ ID NO: 18626 - protein, 649 aa, Shewanella oneidensis MR-1
MAKNLILWVVIAVVLMSVFQGYSPSSSSSQKMDYSTFLDNVRDGQVATVEVKSDQRTIEGSKRTGEKFTTIMPLYDQDLINDLDRKGITMKGQEAEESGFLTQIFISWFPMLLLIGVWIFFMRQMQGGGGKGAMSFGKSKAKLMSEDQIKTTFADVAGCDEAKEEVKELVDYLRDPTKFQKLGGRIPTGVLMVGPPGTGKTLLAKAIAGESKVPFFTISGSDFVEMFVGVGASRVRDMFEQAKKSAPCIIFIDEIDAVGRQRGAGLGGGHDEREQTLNQMLVEMDGFEGNEGIIVIAATNRPDVLDSALLRPGRFDRQVVVGLPDVRGREQILKVHMRKVPLSEDVKASVIARGTPGFSGADLANLVNEAALFAARGNRRVVGMEEFERAKDKIMMGAERRSMVMSEAEKEMTAYHEAGHAIVGCLVPEHDPVHKVTIIPRGRALGVTFFLPEADAISQSRRKLESQISVAYGGRLAEELIYGTEKVSTGASQDIKYATSIARNMVTQWGFSDKLGPLLYAEEEGEVFLGRSMGKAKAMSDETATLIDTEVKAFIDKNYSRAKQILQDNVDILHSMKDALMKYETIDSLQIDDLMNRREVRQPADWQADENGSNDKGNGKGEPAVKVDEVVKSAPAEAELKDADESPVK

SEQ ID NO: 18627 - protein, 721 aa, Ureaplasma urealyticum
MYFLKKIVNLFSSKIESEDNNVKKDDLTQPRKQSPEARKRRNRRIIFWLIILLIIGTIIGVIIYFSVRKEYDNVIVKSAQTEVVNNKKVLYLNTIRPNSTQITRYTIDEDQLLTARVNILNNTNFQIISNASSLGLSRISFNIVREGVEKFKLGETNIYAPISGNTNNQWNWLTSIITQNAGIPSSGFNPQVIISPLISIIFFIIFLYIILRVSKAQSDSLLGTNKANAKLTKSGVRFSDVAGIAEVKEELIEIVDFLKEPKKYVAAGARIPKGVMLYGPPGTGKTLIAKAVAGEANVPFFQTTGSSFEDTFVGVGARRVRELFEKARKSAPAIIFIDEIDSVAKKRGNSLTAVQDQTINQLLSELDGFDTSSGVIVMAATNRLDTLDDAILRPGRFDRQISVNLPDILEREQILRIHSRNKNLSAKVSLEDIARRTAGFSGAQLENVLNEAALLSVRDKATSIHMNHLDEAIDRVIAGPSRPNKVISEREREQVSYHEAGHALIGLYSPGADVVQKITIVARGRAAGYTLQTPERNENILQNKTELISRVRTALGGRAAEELIYGPNEITTGAANDFYKITNIVRAMVASFGMTDVGLTQYIATEGVDNPYRNSYSEQTALAIDIEIEKIIQREYKIVKEMINEHREELELIVQTLLELETILKPQIDYIHQYKQLPPEVIANKNKREASQKQANSSVEEAKVVDDEESIKDKEKDQKSN

SEQ ID NO: 18628 - protein, 638 aa, Helicobacter felis
MDNNHKGPNDPNSKKPLLQNPLLLIAIFGIIIFVAMRVMNSDEGFGDRFLSTSTKNISYHEMKELIEKKEVDSVSIGQTLIKAISKEGNNKTIYVAKRVPDLSLVPLLDSQKINYSGFSESNFFADILGWLLPVLVILGLWMFMASRMQKNMGGGIFGMGSSKKLINAEKPKVRFNDMAGNEEAKEEVVEIVDFLKYPDRYASLGAKIPKGVLLVGPPGTGKTLLAKAVAGEASVPFFSMGGSSFIEMFVGLGASRVRDLFDIAKKEAPSIIFIDEIDAIGKSRAAGGMISGNDEREQTLNQLLAEMDGFGSENAPVIVLAATNRPEILDPALLRPGRFDRQVLVDKPDFKGRVEILKVHIKPVKLANDVDLQEIAKLTAGLAGADLANIINEAALLAGRNNQKEVKQQHLKEAVERGIAGLEKKSRRISPKEKKIVAYHESGHAVISEMTKGSARVNKVSIIPRGMAALGYTLNTPEENKYLMQKHELIAEIDVLLGGRAAEDVFLQEISTGASNDLERATDIIKGMVSYYGMSDVSGLMVLEKQRNSFLGGGFGSGREFSEKMAEEMDSFIKNLLEERYVHVKQTLSDYKDAIEVMVNELFEKEVITGERVREIISEYEVSHNLQTRLVPLEEHAS

SEQ ID NO: 18629 - protein, 644 aa, Yersinia pestis CO92
MAKNLILWLVIAVVLMSVFQSFGPSESNGRRVDYSTFMSDVTQDQVREARINGREINVSKKDNSKYTTFIPVNDPKLLDTLLTKNVKVVGEPPEEQSLLASIFISWFPMLLLIGVWIFFMRQMQGGGGKGAMSFGKSKARMLTEDQIKTSFADVAGCDEAKEEVSELVDYLREPSRFQKLGGKIPKGVLMVGPPGTGKTLLAKAIAGEAKVPFFTISGSDFVEMFVGVGASRVRDMFEQAKKAAPCIIFIDEIDAVGRQRGAGLGGGHDEREQTLNQMLVEMDGFEGNEGIIVIAATNRPDVLDPALLRPGRFDRQVVVGLPDVRGREQILKVHMRRVPLDTDIDASVIARGTPGFSGADLANLVNEAALFAARGNKRVVSMVEFEKAKDKIMMGAERRSMVMTEAQKESTAYHEAGHAIIGRLVPEHDPVHKVTIIPRGRALGVTFFLPEGDAISASRQKLESQISTLYGGRLAEEIIYGPEKVSTGASNDIKVATSIARNMVTQWGFSEKLGPLLYAEEEGEIFLGRSVAKAKHMSDETARIIDQEVKLLVERNYQRARKLLLENMDVLHSMKDALMKYETIDAPQIDDLMNRKEVRPPAGWDNVTKNKSSDNDNTPTATMPADEPNTPTSGNTVSEQLGDK

SEQ ID NO: 18630 - protein, 650 aa, Vibrio vulnificus CMCP6
MAKNLILWLVIAVVLMSVFQSFGPGESNGRAVDYTTFVQEVGQGQIQEATFKDGEITFVRRGGGGKFVTYMPVYDQKLLDDLINQNVKVQGTPPEEQSLLGTIFISWFPMILLIGVWIFFMRQMQGGGGKGAMSFGKSKARMMSEEQIKTTFGDVAGCDEAKEDVKELVDYLRDPSRFQKLGGKIPTGVLMVGPPGTGKTLLAKAIAGEAKVPFFTISGSDFVEMFVGVGASRVRDMFEQAKKASPCIIFIDEIDAVGRQRGAGVGGGHDEREQTLNQMLVEMDGFEGNEGIIVIAATNRPDVLDPALLRPGRFDRQVVVGLPDVRGREQILKVHMRKVPLAGDVEPSLIARGTPGFSGADLANLVNEAALFAARGNKRNVSMVEFELAKDKIMMGAERRSMVMSEEIKESTAYHEAGHAIVGRLVPEHDPVYKVSIIPRGRALGVTMYLPEQDRVSMSRQHLESMISSLYGGRLAEELIYGVDRVSTGASNDIERATDIARKMVTQWGFSEKLGPMLYAEEEGEVFLGRSVTQTKHMSDDTAKLIDDEVRKLIDRNYERARQILIDNMDIMHAMKDALMKYETIDAGQIDDLMARKETIREPAGWGDQAATEKTEKSEAKAEEKTAEPEVTAQSQPDEVQQPTDKKDAE

SEQ ID NO: 18631 - protein, 745 aa, Lactobacillus plantarum WCFS1
MNNRRNGLFRNSLFYILMFLSLMGIIYFFFGGNSGSQTQNIRYSEFVKQLDKNNVKNVSIQPSGGVYKVTGSYRKARTTSSANALGIKSASTKTTSFSTTMLENNSTVDQVSKLAAKHDVKVTAKAEESSGIWVTLLMYIAPVILMLFLFYMMMGQAGQGGGNNRVMNFGKTKAKPADSKQNKVRFSDVAGEEEEKQELVEVVEFLKDPRKFVSLGARIPSGVLLEGPPGTGKTLLAKAVAGEAGVPFFSISGSDFVEMFVGVGASRVRDLFEQAKKNAPSIIFIDEIDAVGRQRGNGMGGGHDEREQTLNQLLVEMDGFTGNEGVIVMAATNRSDVLDPALLRPGRFDRKILVGRPDVKGREAILKVHAKNKPLAADVDLKEIAKQTPGFVGADLENLLNEAALLAARRNKKQVDAADLDEAEDRVIAGPAKHDRVVNKHERETVAYHEAGHTIVGLVLNDARVVHKVTIVPRGRAGGYAIMLPREDQMLMSKRDAKEQMAGLMGGRAAEEIIFGAQSSGASNDFEQATQIARAMVTQYGMSEKLGPVELENANQQAAYQQGMGASAFSQHTAQLIDDEVRRLSQEAHQTATDIIESHREQHKLIAEALLKYETLDEKQILSLFKTGKMPEKDSNEFPSEKAATFEESKRELERREAEKHAQNQSADDKQADSADTTTNVSVAEPSFPSESDASSEVSADSSVNSTANSATESATDSDVATSATGLPNAESATPSSQDDTNSQA

SEQ ID NO: 18632 - protein, 634 aa, Pseudomonas syringae pv. tomato str. DC3000
MAKNLILWLIIAAVLVTVMNNFSSPNEPQNFNYSEFIQQVKDGKVEKVSVDGYVITGKRSDGDTFKTIRPNIPDNGLIGDLVSNNVVVEGKQPEQQSIWTQLLVASFPILVIIAVFMFFMRQMQGGAGGKGGPMSFGKSKARLLSEDQVKTTLADVAGCDEAKEEVGELVEFLRDPGKFQRLGGRIPRGVLMVGPPGTGKTLIAKAIAGEAKVPFFTISGSDFVEMFVGVGASRVRDMFEQAKKHAPCIIFIDEIDAVGRHRGAGMGGGHDEREQTLNQLLVEMDGFEMNDGIIVIAATNRPDVLDPALLRPGRFDRQVVVGLPDIRGREQILKVHMRKVPMGEDVNPGVIARGTPGFSGADLANLVNEASLFAARSGKRVVEMKEFELAKDKIMMGAERKSMVMSDKEKRNTAYHEAGHAIVGRLVPEHDPVYKVSIIPRGRALGVTMFLPEEDRYSLSKRALISQICSLYGGRIAEEMTLGFDGVTTGASNDIMRASQIARNMVTKWGLSEKLGPLMYSEDEDGGYLGRGGSQNSSVSGDTAKLIDSEVRSIIDHCYGTAKQLLTDNRDKLEAMADALMKYETIDADQIDDIMTGRPPREPRDWDGGSGTNGTPITPDPRPETPIGGPAAEH

SEQ ID NO: 18633 - protein, 662 aa, Vibrio parahaemolyticus RIMD 2210633
MSDMAKNLILWLVIAVVLMSVFQSFGPGESNGRTVDYTTFVQEVGQGQIQEATFKDGEISFVRRGGGAKMVTYMPVYDQKLLDDLINQNVKVQGTPPEEQSLLGTIFISWFPMILLIGVWIFFMRQMQGGGGKGAMSFGKSKARMMSEEQIKTTFADVAGCDEAKEDVKELVDYLRDPSRFQKLGGKIPTGVLMVGPPGTGKTLLAKAIAGEAKVPFFTISGSDFVEMFVGVGASRVRDMFEQAKKAAPCIIFIDEIDAVGRQRGAGVGGGHDEREQTLNQMLVEMDGFEGNEGIIVIAATNRPDVLDPALLRPGRFDRQVVVGLPDVRGREQILKVHMRKVPLAGDVEPSLIARGTPGFSGADLANLVNEAALFAARGNKRNVSMVEFELAKDKIMMGAERRSMVMSEETKESTAYHEAGHAIVGRLVPEHDPVYKVSIIPRGRALGVTMYLPEQDRVSMSRQHLESMISSLYGGRLAEELIYGPEKVSTGASNDIERATDIARKMVTQWGFSEKLGPLLYAEDEGEVFLGRSVTQTKHMSDDTAKLIDDEVRQIIDRNYDRAKKILEDNMDIMHAMKDALMKYETIDARQIDDLMERKAEIREPAGWGDNPMNKPKDDDKSQATPEVKEEEKATDSANAAEQVTSQDSASSEVPEKKDSE

SEQ ID NO: 18634 - protein, 398 aa, Archaeoglobus fulgidus DSM 4304
MGDSEIQYLLEKLKKLEEDYYKLRELYRRLEDEKKFIESERIRYEREVRRLRSEVERLRSPPLLVGVVSDILEDGRVVVKSSTGPKFVVNTSQYINEEELKPGARVALNQQTLAIVNVLPTSKDPMVYGFEVEEKPEVSYEDIGGLDVQIEEIREAVELPLLKPELFAEVGIEPPKGVLLYGPPGTGKTLLAKAVANQTRATFIRVVGSEFVQKYIGEGARLVREVFQLAKEKAPSIIFIDELDAIAARRTNSDTSGDREVQRTMMQLLAELDGFDPRGDVKVIGATNRIDILDPAILRPGRFDRIIEVPLPTFEGRIQIFKIHTRKMKLAEDVDFKELARITEGASGADIKAICTEAGMFAIREERAKVTMLDFTKAIEKVLKKTTPIPDLKGVMFV

SEQ ID NO: 18635 - protein, 639 aa, Borrelia burgdorferi B31
MNGNNNMNNNGKSNNKKKNKNWILGLVVVFLISAIFMSYFIRGGESYKNVPYSTFQSYLDNGLVESVVIIDKNLIQFVVKGSNFAKSYFSTSIPYLDINLLSELKNKKVELSSGKSQASLIGVLLQTLPWILFFIFFFFIFRQTQGGGGKVFTFGKSNAQKYEAGKNKITFKDVAGQEEVKQELREVVEFLKNPKKFEKIGAKIPKGVLLVGSPGTGKTLLAKAVAGEAGVSFFHMSGSDFVEMFVGVGASRVRDLFDNARKNSPCIIFIDELDAVGRSRGAGLGGGHDEREQTLNQLLVEMDGFGTHTNVIVMAATNRPDVLDSALLRPGRFDRQVTVSLPDIKEREAILNIHSLKTKLSKDINLQVIARATPGASGADLANLINEGALIAARNNQDEILMKDMEEARDKILMGVAKKSMTITDRQKLETAYHEAGHALLHYYLEHADPLHKVTIIPRGRALGVAFSLPREDRLSINKHQILDKIKICYGGYASEQINLGVTTAGVQNDLMQATSLAKKMVTEWGMGEEVGPIFLVDDEAPIFLPKEFSKAKAYSENTADKVDREVKRILEECLKEASDILLKHKDQLVKLAKELVLKETLTDKEVRELLGFEANKDEYDLFSSDSTTKEVKGEDVKG

SEQ ID NO: 18636 - protein, 610 aa, Buchnera aphidicola str. Bp (Baizongia pistaciae)
MAKNLMLWLVIAVVLMSIFQNFSANNINNRKIDYSTFLSDVNQDQVREVHISGREMNIIRKDNGRYITYIPISDPKLLDNLLVKNVKIIGAAPEEQSFFTAIFISWFPMLLLIGVWVFFMRQMQVGGGKGAMSFGKSKARMLPEDQVKITFSDVAGCDEAKEEVQELVEYLKEPSRFQKLGGKIPKGILMVGPPGTGKTLLAKAIAGEAKVPFFTISGSDFVEMFVGVGASRVRDMFEHSRKVAPCIIFIDEIDAVGRQRGAGLGGGHDEREQTLNQMLVEMDGFDGNEGIILIAATNRPDVLDPALLRPGRFDRQIFVALPDIRGREKIIQVHMKKVPLGNNVDPMIIARGTPGFSGADLANLVNEAALFAARNNRDVVMMSDFESAKDKITMGSERRSMVMTEKQKESTAYHEAGHVIVGRLVPEHDPAHKVTIIPRGRALGVTFFLPKDDVLSINKNKLESQISTLYGGRLAEEIIYGVNNVSTGAHNDIKVATNLARNMVTQWGFSKKLGPLLYSEEEGEIFLGRTVTKSKHMSDETARIIDEEVKLLVEKNYNRAKKILEENLDILHAMKDALIKYETINSRQIDDLMKRKSIQSSNICTDDDNN

SEQ ID NO: 18637 - protein, 647 aa, Coxiella burnetii RSA 493
MNSMIKNLLLWLVIAVVLITVFSNFGSRQSDVQPYSYSQFVQAVNNDKVSSVVIQGHEIKGVTKDNKHFTTYLPMEDQALLNQLMAKGVSVKGEPPKQQSMFLHILISWLPFLILIFVWILFMRQMQGGGRGGGPMSFGRSKARLLSQDQVKVTFDDVAGVDEAKEEVKELVEFLRDPGKFQRLGGKMPCGVLLVGPPGTGKTLLAKAVAGEAKVPFFTISGSDFVEMFVGVGASRVRDMFDQAKKQAPCIIFIDEIDAVGRHRGAGLGGGHDEREQTLNQLLVEMDGFEGKEGIIVMAATNRPDVLDPALLRPGRFDRQVVVPLPDIKGREYILKVHMNKLPLAKDVKASVIARGTPGFSGADLANIVNEAALFAARENKKDVSMSEFERAKDKIMMGAERRSMVMSDDEKKLTAYHEAGHAIVGLHMLEHDPVYKVTIIPRGRALGVTMFLPEHDRYSMTKRRLECQLAGLFGGRIAEEIIFGPDLVTTGASNDIEKATEIARNMVTKWGLSQKLGPLTYREEEGEVFLGRSVTQRKDISDATNKEIDSEVRRIVDTAYTTAKQTLEEHIEQLHLMAKALIKYETIGEAQIKEILAGKEPSPPPDWKEENGSASAHKENSEKELSEEKGEEKTVNPSRPRPAEDG

SEQ ID NO: 18638 - protein, 664 aa, Streptomyces avermitilis MA-4680
MWIVLAVLAVVVLMQVVGSSGGYKTVDTGQVVQAINENKVQQAKITTGDEQVIKVELKDGQKVDGSSKIQASYIGDQGVTLAGTLQDKYQNKQIPDGYTVSPSKQNPFVGILLSLLPFVLIVVVFLFLMNQMQGGGSRVMNFGKSKAKLITKDTPKTTFSDVAGSDEAVEELHEIKEFLQEPAKFQAVGAKIPKGVLLYGPPGTGKTLLARAVAGEAGVPFYSISGSDFVEMFVGVGASRVRDLFEQAKANAPAIVFVDEIDAVGRHRGAGLGGGHDEREQTLNQLLVEMDGFDVKGGVILIAATNRPDILDPALLRPGRFDRQIAVDRPDMQGRLEILKVHQKGKPVAPDVDLSAVARRTPGFTGADLANVLNEAALLTARSDKKLVDNSMLDEAIDRVVAGPQKRTRIMSDKEKKITAYHEGGHALVAAASPNSDPVHKITILSRGRALGYTMVLPDEDKYSTTRNEMLDQLAYMLGGRAAEELVFHDPTTGAANDIEKATATARAMVTQYGMTERLGAIKFGGDNTEPFLGREMSHPRDYSEEVAALVDEEVKKLIENAHNEAWEILVENRDVLDALVLQLLEKETLSKEQIAEVFAPIVKRPARPAWTGSSRRTPSTRPPVLSPKELSLTNGANGASPAIANATESVPAAESAPEDRTEG

SEQ ID NO: 18639 - protein, 588 aa, Streptomyces avermitilis MA-4680
MAAHDDDMNRGIRPGRGSDDPAGQIAYLEQEIAVLRRKLADSPRHTRILEERIVELQTNLAGVSAQNERLANTLREARDQIVALKEEVDRLAQPPAGFGVFLTANEDGTADIFTGGRKLRVNVSPSVELEELRRGQELMLNEALNVVEAMEYESVGDIVTLKEILEDGERALVVGHTDEERVVRLAEPLLDVTIRPGDALLLEPRSGYVYEVVPKSEVEELVLEEVPDIGYEQIGGLGNQIEMIRDAVELPYLYPDLFKEHELRPPKGVLLYGPPGCGKTLIAKAVANSLAKKVAEVTGQATGKSFFLNIKGPELLNKYVGETERQIRLVFQRAREKASEGTPVIVFFDEMESLFRTRGSGVSSDVENTIVPQLLAEIDGVEGLQNVVVIGASNREDMIDPAILRPGRLDVKIKIERPDAEAAKDIFGKYLTERLPLHTEDVGEHGGDRSATVHGMIQTAVEQMYAESEENRFLEVTYANGDKEVLYFKDFNSGAMIENIVGRAKKMAIKDFLEHSQKGLRVSHLLQACVDEFKENEDLPNTTNPDDWARISGKKGERIVYIRTLITGKQGADTGRSIDTVANTGQYL

SEQ ID NO: 18640 - protein, 628 aa, Porphyra purpurea
MKLSWKTLLLWSLPIFVVGFFFWQGFLGPTTTDVGSNIASSRMTYGRFLEYLDMGWVKRVDLYENNHTAIVEAVGPELGNRVQRIRVELPASAPELITKLRKANVDLDAHPPKSTSAVWGLLGNLLFPLILVGGLAFLFRRSNNASGGPGQAMSFGKSKALFQMEAKTGVVFNDVAGVEEAKEEFQEVVTFLKQPESFTAVGAKIPKGVLLVGPPGTGKTLLAKAIAGEAGVPFFSISGSEFVEMFVGVGASRVRDLFKKAKDNAPCIVFIDEIDAVGRQRGTGVGGGNDEREQTLNQLLTEMDGFEGNTGVIVIAATNRADILDSALLRPGRFDRQVSVDVPDFRGRLAILEVHAKNKKMESKVSLETIARRTPGFSGADLANLLNEAAILTARRRKSAMTMSEIDTSIDRVVAGLEGTPLIDSKSKRLIAYHEVGHAIIGSLLEHHDPVQKVTLIPRGQARGLTWFTPSDDQSLISRSQILARIVGALGGRAAEEIIFGDAEVTTGASNDLQQVTSMARQMVTRFGMSKIGPLSLESQGSDPFLGRGMGGGSEYSDEVATNIDKQVREIVSECYKEAKKIVKDNRVVMDRLVDLLIEKETIEGNEFRHIVKEYTAIPEKNYYISQF

SEQ ID NO: 18641 - protein, 644 aa, Odontella sinensis
MNDNKNNTVRNLLIGIALLSGISLTAKKFDLIGVQGSESGKNINQVNPNVISSKMTYGRFLEYLEMGWVNQVDLYDNSRNAIVQASSPELGNRPQTIRVEIPVGASQLIQKLKEYNIDFDAHPAEQKNIFVNILSNILLPIIFITGLVYLFQNSENFGGGSGQSPMSLGKSTARFERRPDTGVSFKDIAGIDEAKTEFEEIVSFLKEPDKYTIVGAKIPKGILLVGPPGTGKTLLAKAIANEADVPFFSVAGSEFVEMFIGIGAARVRDLFKKASENAPCIVFIDEIDAVGRERGAGVGGGNDEREQTLNQLLTEMDGFKENKGVIVVGATNRADILDAALLRPGRFDRQVTVNLPDRLGRVGILKVHARNKPLGEDVSLVQLANRTPGFSGADLANLLNEAAILATRYKKSSITKNEVNEAADRIIGGIAGAPMEDTKNKRLIAYHEVGHAITGSVLKSHDEVEKITLTPRGGAKGLTWFTPEEDQSLLSRSALLARIITTLGGRAAEQVIFGEPEVTTGASSDLQQVTNLARQMVTRFGMSNIGPLALEDESTGQVFLGGNMASGSEYAENIADRIDDEVRKIITYCYEKAIEIVLDNRVVIDLIVEKLLDKETMDGDEFRELLSTYTILPNKNIPYVSKFN

SEQ ID NO: 18642 - protein, 399 aa, Pyrococcus abyssi
MNIMSGDEVQFHENYDDYITYLKRRIRQLELQVRMLEADKERLERELSRLRSEMSRLRQPPAFAGTVIEVLDDDRAIVQNYNGPRFVVRIAPWIERDKLRPGARVALDQRTMAIIELLPSSKDPTVLGFEVIERPNVTYNDIGGLKKQLQELREAIELPLKHPELFEEVGIDPPKGVLLYGPPGCGKTLMAKALAHEVNATFIRVVGSELVRKYIGEGARLVHELFELAKEKAPTIIFIDEIDAIGAKRMDETTGGEREVNRTLMQLLAEMDGFDPRGNVKVIAATNRPDILDPALLRPGRFDRLIEVPLPDFEGRLEILKVHTRRMKLKNVDLRVIAEITEGASGADLKAIATEAGMFAIRERRTYVTQEDFLKAVDKVLGNERKLLQQITSHEIIYG

SEQ ID NO: 18643 - protein, 628 aa, Ralstonia solanacearum
MNNNWFQKAAIWLVIALVLFTVFKQFDKPRAQEGVTYSQFMDDAKGGKIKRVEVQGRNLLVTPNEGGKYTIISPGDIWMVGDLMKYGVQVTGKAEEEQGVLLSALYYLGPTLLIIVFWFYMMRQMQGGGKGGAFSFGKSRARLIDENNNSVTFADVAGCDESKEEVVELVDFLKDPQKFQKLGGRIPRGVLLVGPPGTGKTLLARAIAGEAKVPFFSISGSDFVEMFVGVGAARVRDMFENAKKQAPCIVFIDEIDAVGRHRGAGMGGGNDEREQTLNQMLVEMDGFEANSGVIVIAATNRADVLDKALLRPGRFDRQVYVGLPDIRGREQILKVHMRKVPIGNDVDASVLARGTPGFSGADLANLVNEAALFAARRNKRVVDMQDFEDAKDKIYMGPERKSAVIREEERRATAYHESGHAVVAKLLPKADPVHKVTIMPRGWAGGLTWQLPEHDKHYAYKDTMLEEIAILFGGRAAEEVFLGAMSTGASNDFERATKMARDMVTRYGMSDSLGTMVYVDTEQDGFFGRMSSKTVSEATQQKVDSEIRRIVDEQYALAKRLLEENREKVEAMTAALLEWETIDADQVNDIMAGKPPRPPRYGSSGGGSTPPNGGTPAGVTPGNVPATA

SEQ ID NO: 18644 - protein, 397 aa, Rhipicephalus appendiculatus
MPSPEPPLSYPQLHKLRIDYRKKLTECKEVESKLKDVREQLKELNKQYEKSENDLKALQSVGQIVGEVLKQLTEEKFIVKATNGPRYVVGCRRQLDKAKLKSGTRVALDMTTLTIMRYLPREVDPLVYNMSHEDPGNISYSMIGGLAEQIRELREVIELPLLNPELFQRVGITPPKGCLLYGPPGTGKTLLARAVASQIEANFLKVVSSAIVDKYIGESARLIREMFNYARDHQPCVIFMDETMPLVAVGSRKGRGGDREIQRTLMELLNQMDGFDSLGQVKIIMATNRPDTLDPALLRPGRLDRKIEIPLPNEQARLDIVKIHATPITKHGEVDWEAVVKLSDGFNGADLRNVCTEAGMFAIRADREFVIEEDFMKAVRKVADNKKLESKLDYKPV

SEQ ID NO: 18645 - protein, 630 aa, Azotobacter vinelandii
MSLAGSGRTSIGGIVKQQAQFHIGYWFLAVLGFVLIQSLLTEHQQVAQIPYSEFEQYLKEGRVEELAITDRQIQGTLKEPLPGGQTRFVAIRIEPQLAEHLQQYPVRYAGKVESTLLRDLLSWTLPALIFFSLWLFLLKRIGGGLGGGMMQIGKSKAKVYVETDMKVTFADVAGVDEAKDELKEIVDFLKDPQTYGRLGGRMPKGVLLVGPPGTGKTLLARAVAGEAKVPFFSISGSEFVEMFVGVGAARVRDLFEQARAQAPAIIFIDELDALGRARGVGPLGGGHDEKEQTLNQLLVELDGFDTSTGLVLLAATNRPEILDPALLRAGRFDRQVLVDRPDKAGRVQILQVHLKRARLSADVDPQQIAALTPGFTGADLANLVNEAALLATRRRADAVTMDDFTAAIERIIAGLEKRNRLLNPKEREIVAHHEMGHALVAMALPGMDPVHKVSIIPRGMGALGYTIQRPIEDRFLMTREELENKMAVLLGGRAAEWIVFSHFSTGAADDLAKVTDIARAMVTRYGMSERLGHVSLEREQRSFLGAEQMYGLPPRHEYGETTATAIDTEVQAIVEHAFQRTVTLLEERRALLERSARRLLEEETLDAEQLAELVGKAQGTTAERSGAIPQ

SEQ ID NO: 18646 - protein, 637 aa, Azotobacter vinelandii
MAKNLILWLIIAAVLVTVMNNFTNPSEPQTLNYSDFIQQVKDGKVERVTVDGYIITGQRIDGDNFKTIRPAIQDGGLIGDLIDNNVQIEGKQPEQQSIWSQLLVASFPILVIIAVFMFFMRQMQGGAGGKGGPMSFGKSKARLLSEDQVKTTFADVAGCDEAKEEVSELVEFLRDPGKFQRLGGRIPRGVLMVGPPGTGKTLLAKAIAGEAKVPFFTISGSDFVEMFVGVGASRVRDMFDQAKKHAPCIIFIDEIDAVGRHRGAGLGGGHDEREQTLNQLLVEMDGFEMNDGIIVIAATNRPDVLDPALLRPGRFDRQVVVGLPDIRGREQILKVHMRKVPVSEDVNPAVIARGTPGFSGADLANLVNEASLFAARANKRIVEMREFELAKDKIMMGAERKTMVMSEKEKLNTAYHEAGHAIVGRLVPEHDPVYKVSIIPRGRALGVTMFLPEEDRYSLSKRALISQICSLFGGRIAEEMTLGFEGVTTGASNDIMRATQIARNMVTKWGLSEKLGPLMYAEEEGEVFLGRTAGTQHSNVSAETARLIDQEVRSIIDQCYATATKLLTDSRDKLDMMAEALLKYETIDADQIDDIMAGRVVREPKDWQGGGSGTSGTPASQGTSRPEAPIGGPAGEH

SEQ ID NO: 18647 - protein, 426 aa, Spinacia oleracea
MAIEHEDDLKDEKNPRPLDEDDIALLKTYGLGPYSASIKKVEKEIKDMSKKVNDLIGIKESDTGLAAPSQWDLVSDKQMMQEEQPLQVARCTKIINPNTEDAKYVINVKQIAKFVVGLGDKVSPTDIEEGMRVGVDRNKYQIQIPLPPKIDPSVTMMTVEEKPDVTYNDVGGCKEQIEKMREVVELPMLHPEKFVKLGIDPPKGVLCYGPPGTGKTLLARAVANRTDACFIRVIGSELVQKYVGEGARMVRELFQMARSKKACIVFFDEVDAIGGARFDDGVGGDNEVQRTMLEIVNQLDGFDARGNIKVLMATNRPDTLDPALLRPGRLDRKVEFGLPDLEGRTQIFKIHTRTMNCERDIRFELLARLCPNSTGADIRSVCTEAGMYAIRARRKTVTEKDFLDAVNKVIKGYQKFSATPKYMVYN

SEQ ID NO: 18648 - protein, 638 aa, Wigglesworthia glossinidia endosymbiont of Glossina brevipalpis
MSDMAKNLILWLIIAVVLMSIFQSFGPNDSNRRKVEYSAFISELNQDQIKETRINGREIFALKKDGSRYVTYIPINDSKLLDILLSKNVKIIGEPPEEPSLLTSIFISWFPMLLLIGVWIFFMRQMQGGGGKGAMSFGKSKAKMLTEDQIKTTFSDVAGCDEAKEEVSELVDYLKEPSRFQKLGGKIPKGILMVGPPGTGKTLLAKAIAGEAKVPFFTISGSDFVEMFVGVGASRVRDMFDQAKKTAPCIIFIDEIDAVGRQRGAGLGGGHDEREQTLNQMLVEMDGFEGNEEIIVIAATNRPDVLDPALLRPGRFDRQVVVGLPDVRGREQILKVHMKAIPLSSDIDAAVIARGTPGFSGADLANLVNEAALFAARKNKKNVSMMEFEKAKDKIMMGAERKSLVMTEKQKEATAYHEAGHAIVGRLVPGHDPVHKVTIIPRGRALGITFFLPKGDVISISRQKLESQISTLYGGRLAEEIIYGLSNVSTGASNDIKVATSIARNMITQWGFSDKLGPLLYSEEEGEIFLGRSVTKSQNISDKTARIIDQEIKILIEKNYLRAKNLIIDNIDILHAMKDALMKYETINAYQIDDLMKRKPVRPPCDNQDSKRHNNKDDIINKSKNNISNNTSVTNNIQ

SEQ ID NO: 18649 - protein, 635 aa, Wigglesworthia glossinidia endosymbiont of Glossina brevipalpis
MAKNLILWLIIAVVLMSIFQSFGPNDSNRRKVEYSAFISELNQDQIKETRINGREIFALKKDGSRYVTYIPINDSKLLDILLSKNVKIIGEPPEEPSLLTSIFISWFPMLLLIGVWIFFMRQMQGGGGKGAMSFGKSKAKMLTEDQIKTTFSDVAGCDEAKEEVSELVDYLKEPSRFQKLGGKIPKGILMVGPPGTGKTLLAKAIAGEAKVPFFTISGSDFVEMFVGVGASRVRDMFDQAKKTAPCIIFIDEIDAVGRQRGAGLGGGHDEREQTLNQMLVEMDGFEGNEEIIVIAATNRPDVLDPALLRPGRFDRQVVVGLPDVRGREQILKVHMKAIPLSSDIDAAVIARGTPGFSGADLANLVNEAALFAARKNKKNVSMMEFEKAKDKIMMGAERKSLVMTEKQKEATAYHEAGHAIVGRLVPGHDPVHKVTIIPRGRALGITFFLPKGDVISISRQKLESQISTLYGGRLAEEIIYGLSNVSTGASNDIKVATSIARNMITQWGFSDKLGPLLYSEEEGEIFLGRSVTKSQNISDKTARIIDQEIKILIEKNYLRAKNLIIDNIDILHAMKDALMKYETINAYQIDDLMKRKPVRPPCDNQDSKRHNNKDDIINKSKNNISNNTSVTNNIQ

SEQ ID NO: 18650 - protein, 446 aa, Tortula ruralis
MGQGQSGGLPKQGPGGERNKGDGQKKEKKYEPAAPPTRVGRKQRKQKGSEAAARLPVVTPATKCNLRLLKLDRAKDYLLMKEEFVRTQKRLNPQEDKTEKDRSKVDDLRGSPMSVGNLEEIIDENHAIVSSSVGPEYYVNILSFVDKDQPGPGCAILMHNKVLSVVGLLQDDVDPMVSVMKVEKAPLESYADIGGLDPQIQEIKEAVELPLTHPELYEDIGIKPLKGVILYGEPGTGKTLLAKAVANSTSATFLRVVGSELIQKYLGDGPKLVRELFRVADELSPTIVFIDEIDAIGTKRYDAHSGGEREIQRTMLELLNQLDGFDSRGDVKVILATNRIESLDPALLRPGRIDRKIEFPLPDTKTRRRIFQIHTSRMTMADDVNLEEFVMTKDEFSGADIKAICTEAGLLALRERRMKVTHADFKKAKEKVMYKKKEGVPEGLYM

SEQ ID NO: 18651 - protein, 706 aa, Medicago sativa
MAFSTSSLLSTNFLGARNIPTPKTTKPSISLPLFFKTKFFNSQNDNNNNNSEPIKSAAVSALILSSMFTPAALAADNLPPPPPPVLEAQPNQLNPANSTSPFSQNISLTAPKPQAQSSTDLPDGSQWRYSEFLNAVKKGKVERVRFSKDGSVLQLTAVDGRRANVIVPNDPDLIDILAMNGVDISVSEGEQGNGLFSFVGSLLLPFLAFAGLFLIFRRGQGGPGGPGGLGGPMDFGRSKSKFQEVPETGVTFADVAGADQAKLELQEVVDFLKNPDKYTALGAKIPKGCLLVGPPGTGKTLLARAVAGEAGTPFFSCAASEFVELFVGVGASRVRDLFEKAKSKAPCIVFIDEIDAVGRQRGAGLGGGNDEREQTINQLLTEMDGFSGNSGVIVLAATNRPDVLDSALLRPGRFDRQVTVDRPDVAGRVKILQVHSRGKALAKDVDFDKIARRTPGFTGVDLQNLMNEAAILAARRDLKEISKDEIADALERIIAGPEKKNAVVSEEKKKLVAYHEAGHALVGALMPEYDPVAKISIIPRGQAGGLTFFAPSEERLESGLYSRSYLENQMAVALGGRVAEEVFGQDNVTTGASNDFMQVSRVARQMVERFGFSKKIGQVAIGGGGGNPFLGQQMSSQKDYSMATADIVDKEVRELVDKAYERATQIINTHIDILHKLAQLLIEKETVDGEEFMSLFIDGKAELYVS

SEQ ID NO: 18652 - protein, 949 aa, Oryza sativa (indica cultivar-group)
MVEATRQRRKPLVLASTQALLDSLPGDRRGSALPPPPPPEPVRIRAGVLRFPNSSSSSSSAGGGEFGEAASFVALPSSALRRLAVVTGTPVLVKNADNNVGRIAKAVVLDHPCLDDSLTEHTEPVDAASPLDNAMGILPCRSFPTNGFLPLDEEVAYVSPLLAFNLGVHVSCLKLLVQKGEKPFKFCSKVEDSDLAAGEESNPILHLEILPSPQVPKHALHLRVSVVRIPECGVFASLKANSAIGGSDYQDMIDQALNEHFKFDRFLARGDVFCIRNNWNCGATSCLACNREDNRLHPHDMIYFKVTGMEPSDEPVHRVNCNQTALVLGGGASASIPPYSLFASPGASVPLHSEIVEHLASIIAPALCPSNILPKVKFSTFLYGPSANIESVIKQYIGQHWVATESLPARDINGNPYLVEPECVSPLQVILVATADRAEGMPQSIRRCFRHEINMKSINEEQRRNLISETLHCVSTSADESINDKFVKDLAVQTSGFMPRDILALVADAGISFAHKVETDKNNSEGDKLKGILPTSSSSSQNEEKTFCKEYILSSLERAKKRNRAALGTPKVPNVKWEDVGGLEEVKKVILDTIQLPLLYKHLFSSKLGKRSGVLLYGPPGTGKTLLAKAVATECSLNFLSVKGPELINMYVGESEKNVRDIFEKARSARPCVIFFDELDSLAPARGSSSDSAGVMDRVVSQLLVEIDGLSDNSQDLFIIGATNRPDLLDSALLRPGRFDKLLYVGVNSDASYRERILKAQTRKYKLHENVSLLSIAQQCPPNFTGADIYALCADAWYHAAKNLAKTLEADPSRTSEASADDVIVEINDFMTQFTLAGRTTRLMRSPHHGVQTVRPFTQYSRWPPRRRRRRLHVWLWARLESAEQGFATAGAAEIDRPIRRRTAGRHARPARGPARRCSRRERRAPQLAAASARAREGDDGDLRNQDCA

SEQ ID NO: 18653 - protein, 662 aa, Capsicum annuum
KYFNFHSKRKCIITQSTLNKKPNSDNFKNAQSKAALAALLFSSITPHAIALDDAAPIASPPQVMEVEAPNPNTSNPLPFSQNLVLNAPKTQASPVSDLPESTQWRYSEFLNAVKKGKVERVRFSKDGSALQLTAVDGRRANVIVPNDPDLIDILAMNGVDISVSEGEGGNGLFSVIGNLLFPFIAFAGLFFLFRRSQGGPGGPGGLGGPMDFGRSKSKFQEVPETGVTFADVAGADQAKLELQEVVDFLKNPDKYTALGAKIPKGCLLVGPPGTGKTLLARAVAGEAGVPFFSCAASEFVELFVGVGASRVRHLFENAKSKAPCIVFIDEIDAVGRQRGAGLGGGNDEREQTINQLLTEMDGFSGNSGVIVLAATNRPDVLDSALLRPGKFDRQVTVDRPDVAGRVRILQVHSRGKALAKDVDFDKIARRTPGFTGADLQNLMNEAAILAARRDLKEISKDEISDALERIIAGPEKKNAVVSDEKKKLVAYHEAGHALVGALMPEYDPVAKISIIPRGQAGGLTFFAPSEERLESGLYSRSYLENQMAVALGGRVAEEVIFGEDNVTTGASNDFMQVSRVARQMVERLGFSKKIGQVAIGGGGGNPFLGQQMSTQKDYSMATADVVDSEVRELVEKAYERAKQIITTHIDILHKLAQLLIEK

SEQ ID NO: 18654 - protein, 603 aa, Cyanidioschyzon merolae
MKNLWIWSLPLIVLAFIGWQELANQMPVATSRMTYGRLLEYMQMGWVKRIDVYDRTALIEASSPETGWQWIRVDLPANSSDWLEQAKTLHIDVDVHAVSNWINVASNWIIPLIIIGVVIWLLSRSASSNTTGALNFGKSKARFQMVAKTGIMFDDVAGIEEAKEELAEVVAFLKNPSKFLAVGASIPKGVLLVGPPGTGKTLLAKAIAGEASVPFFSISGSEFVEMFVGVGASRVRDLFKKAKQNAPCLVFIDEIDAVGRQRGAGIGGGNDEREQTLNQLLTEMDGFEGNTGVIVIAATNRVDVLDAALLRPGRFDRQIMVSMPDVKSRIAILKVHANQKKLHPQVSLEAVARRTAGFAGADLANLLNEAAILAVRRGLKQITWKEIDDAIDRVIAGMEGTPIMDGKIKRLIAYHETGHALTATLLPNHPPVQKVTLIPRRQAKGLTWFMQDNERDLLSKSQLMSMIMVALGGRAAEEAVFGNAEVTTGASNDLQQVTNLARQMVTRFGMSSLGPLCLETGNEEIFLGRDMRLMPEVSEEVIAQIDAQVRGMIEACYEKVLELMQANRVVMDRIVEELMEKETLDGKEFRQLVSQAARLTAVN

SEQ ID NO: 18655 - protein, 437 aa, Pneumocystis carinii
MFMTGQCSKKESKYEPLVMSTRIGRRYNRNKGPDASYKFPMVYPTTRCRLKLLKMERIKDYLLLEQEFVSNQELLKLDSEKRDQKGEEEDDDKLQSLIGSPMGVGTLEEMIDDDHAIVSSATGPEYYVSIMSFVNKDLLEPGCSVLLHHKAVSIVGVLSDDIDPMVSVMKLDKAPTESYADIGGLESQIQEIKETVELPLTHPELYEEIGIRPPKGVILYGEPGTGKTLLAKAVANQTSATFLRIVGSELIQKYLGDGPKFVRELFQTAQDNSPSIVFIDEIDAIGTKRYDSTSSGEREIQRTMLELLNQLDGFDDRGDVKVIMATNRINDLDPALIRPGRMDRKILFETPDQNTKRKIFQIHTSKMNLGDDVLIEEFITAKDEMSGADVKVIAICTEAGLLALRERRMRVVADDFRKAKEHVLKTKQKNIQGELYI

SEQ ID NO: 18656 - protein, 1135 aa, Pichia angusta
MPGLVEAPVEPYARPVRTLVQLALDPDDGLEYVSLNSQVYELIYGDLSDNKTRFVSLQLLGSPLFVEYQLFRAELDSELPQDSIELHSPRLSSKYGSDFTLEKCIVVPVTKVLSLTSVIMSFPHDVYRLIEGISKERLLEIVASERGSDAGHILIRKTDFLKTLHGEVIHCEPVDQGFLSSDTNLVIVKQEGLKRGVNGNVNGSHPDPSEIPVSTPVDFSVSHLGLGDLTFDDTSIFSNLTLQPLELQIGFLKYSMLMDCTHILESSHEFDHEDDQLFACVCSSVLQKLGCFSGDLVQIQTCDCGAGIVCACDKSARRKITIRVFSLADPNDFDPEKLYLSPIFLNSIGNPRIVFVKRLASQRPNGDFVCEKLENHVPVAKEVVIARVASPITLDRTMQHLFLSNLKTYFESKHRVIVKDQYIPVPIDTVLAKSLFSTYNASGDETQPEIIPQGIPNELAWFKITDGTTETDDGKSLVAGKQYIIDPAKTRMIQSGVCSDKVPLSDGISYSQLRDYFELPRQFAYPCLRISNVLTFPYANQLRKIVSVAFRIRDNSYSRSRVQTTILLSSMARCVGKATLVRRIATEFGANLLELDAYDLLNQASVSKTIGTIRGKSDRVVDSCCSVILYIRHIEALAKKPDPNQQQKDSMSLRLAELIDEYTSKGAIFIGSTNDADAISELIRSKFKFDISINVPTEPERKLILTDLLDDMKTKDKTPVVLRPDVSLDTLALQSAGLTANDLVSIVDNTITIAIERLERLSEEQKVNWDQLLSFNGGRIKLTPEDFETSINDARNKFSDMIGAPRIPDVKWEDVGGLDVVKDEILDTIEMPLKHPELFSKGMKKRSGILFYGPPGTGKTLLAKAIATNFALNFFSVKGPELLNMYIGESEANVRRVFQKARDAKPCVIFFDELDSVAPKRGNQGDSGGVMDRIVSQLLAELDGMSGAEGGDGVFVVGATNRPDLLDEALLRPGRFDKMLYLGIADTHEKQAKIIQALTRKFQLDPSVDLGRIAETCPFTYTGADFYALCSDAMLNAMTRTAGAVEKKINEYNCNREEGDKISTRFWFDNIAKPEDTQVLVKSEDFAKARDELVPSVSAEELQHYLSVRENFEGGKTQDVMHTVPDGADIIISHD

SEQ ID NO: 18657 - protein, 1074 aa, Pichia angusta
MDSQEVTVVFRPLNNCLINLPAPLINPFLANNILIQNIAVELNFRPSGAKKDTKWLVGWNGYFSSDPKTIEIDSVYASSLGLRESRKIVIRLSLSLPKIQSVELEPETSSDWELTEMYAQTVEDRFLNQVRCAVVGQKLAVYPSSSPNNVIKFVVKKIKSETDEIERGILVNDSELHIIPKVHRRDKQQSDGASRRRRSVSGRRSSQFDPVPSCLLRSISLPHYTFQHVNHSSANYEIYVNLDQNFINHQFKSIKYVQVSVITGPGTPAKASSVAEQTKNHDTGSSGSSRKNSSSVVDHKSVNGSVAQTDTEQRKVVAILVHDPLAPQRSAGVSPLLAIALGIEHRCGDMVCIEAAPQKYGTDVHTVILHKIVTQTSTVNELAFKQDQDRQLKQAEANKELSAKFQEHFKRLNFTKCPITNGMKVPVIPDLLPQGGFLELRDGCQWALLGEKLPNFELGDERLKPESFVERQYEQKDLPIVGHKELIARMVRSVRHGHNCVLSGASGSGKTTLINEVAHRLVTLHGYYSKNINCETISNDNFHAIKTLLEEAVKEVNWHSPSVLVLENLDSLIPQEMEHGDSGLSRQVSEFLVNSLKVLTRERAISLLCSSKSKEALNATVFQTHLIQQEFSLKAPDKELRKELLRSFINDYNMDLEKEEILNDITVETEGYLPSDLKVLADRTFHDYISSKIDKDDFHLRASNFERALQGFVPSSLRGVKLQKSGVAWSDIGGLKDAKRVLLETLEWPTKYAPIFANCPLRLRSGILLYGYPGCGKTLLASAVVSQCGLNFISIKGPEILNKYIGASEQSIRELFDRAQSAKPCVLFFDEFDSIAPKRGHDSTGVTDRVVNQLLTQMDGAEGLDGVYVLAATSRPDLIDSALLRPGRLDKSILCDLPDYENRLDILQTVASKFHVSEECRLDHFARKLEGYSGADLQAFVYNAYLKAVHDNLDQLTHANEGTTERKIEFFSMLKNLQPSGNIAGKIDTICKNLHVTDLSSWDDAEQDSDRKPNQIVICNSHFETALEETKKSISNKELRNFARIYSQFVDGKREGHLPDGQASTDIGGRTTLM

SEQ ID NO: 18658 - protein, 434 aa, Saccharomyces cerevisiae; identical to SEQ ID NO: 464

SEQ ID NO: 18659 - protein, 645 aa, Desulfitobacterium hafniense
MILIAIMLIRFANPPATQPLDMDYTKFYEAVVTGQVEEVVISTDDNVNTYEVKTKDGQQYVVLGEAKDVDLSAQMNEHKVNVRVNPPVTTPWWAGLITTVLPFLLIGGFIFFMMQQSQGGGNRVMQFGKSRAKLVTDEKKKVTFADVAGADEVKEELEEVVEFLKFPKKFNELGAKIPKGVLLFGPPGTGKTLLARAVAGEAGVPFFSISGSDFVEMFVGVGASRVRDLFEQAKKNAPCIVFIDEIDAVGRQRGAGLGGGHDEREQTLNQLLVEMDGFNGNEGIIIIAATNRPDILDPALLRPGRFDRQVVVDVPDVKGREEILKVHVKGKPMHNDVELDVLARRTPGFTGADLANLVNEAALLSARRNEKEIKMNALEDSVERVIAGPEKKARVISDYEKKLVSYHEAGHALVGEMLTHTDPLHKVSIIPRGRAGGYTLLLPKEDRNYMTKSHLLDQVTMLLGGRVAEALVLHEISTGASNDLERATGLVRKMITELGMSEELGPLTFGQKEGQVFLGRDIARDRNYSEAVAYSIDKEARRMIDECYLKAQTIIQENMHKLNAIAQTLMEKETIEAKEFAELMARFDQPVETAQVSEPSETENNTTEHDDLLPATGETSVEGEDRTEAEGLSGSTLEEEKNKID

SEQ ID NO: 18660 - protein, 1025 aa, Yarrowia lipolytica
MPSISHKPITAKLVAAPDATKLELSSYLYQQLFSDKPAEPYVAFEAPGIKWALYPASEDRSLPQYTCKADIRHVAGSLKKFMPVVLKRVNPVTIEHAIVTVPASQYETLNTPEQVLKALEPQLDKDRPVIRQGDVLLNGCRVRLCEPVNQGKVVKGTTKLTVAKEQETIQPADEAADVAFDIAEFLDFDTSVAKTRESTNLQVAPLEGAIPTPLSDRFDDCESRGFVKSETMSKLGVFSGDIVSIKTKNGAERVLRLFAYPEPNTVKYDVVYVSPILYHNIGDKEIEVTPNGETHKSVGEALDSVLEAAEEVKLARVLGPTTTDRTFQTAYHAGLQAYFKPVKRAVRVGDLIPIPFDSILARTIGEDPEMSHIPLEALAVKPDSVAWFQVTSLNGSEDPASKQYLVDSSQTKLIEGGTTSSAVIPTSVPWREYLGLDTLPKFGSEFAYADKIRNLVQISTSALSHAKLNTSVLLHSAKRGVGKSTVLRSVAAQCGISVFEISCFGLIGDNEAQTLGTLRAKLDRAYGCSPCVVVLQHLESIAKKSDQDGKDEGIVSKLVDVLADYSGHGVLLAATSNDPDKISEAIRSRFQFEIEIGVPSEPQRRQIFSHLTKSGPGGDSIRNAPISLRSDVSVENLALQSAGLTPPDLTAIVQTTRLRAIDRLNKLTKERPIATLDDLLTLSHGTLQLTPSDFDDAIADARQKYSDSIGAPRIPNVGWDDVGGMEGVKKDILDTIETPLKYPHWFSDGVKKRSGILFYGPPGTGKTLLAKAIATTFSLNFFSVKGPELLNMYIGESEANVRRVFQKARDAKPCVVFFDELDSVAPQRRNQGDSGGVMDRIVSQLLAELDGMSTAGGEGVFVVGATNRPDLLDEALLRPGRFDKMLYLGISDTHEKQQTIMEALTRKFRLAADVSLEAISKRCPFTFTGADFYALCSDAMLNAMTRTANEVDAKIKLLNKNREEAGEEPVSIRWWFDHEATKSDIEVEVAQQDFEKAKDELSPSVSAEELQHYLKLRQQFEGGKK

SEQ ID NO: 18661 - protein, 1023 aa, Yarrowia lipolytica
MTSKSDYSGKDKIELDPVFAKSIDLLPNTQVVIDIQLNPKIAHTIHLEPVTVADWEIVELHAAYLESRMINQVRAVSPNQPVTVYPSSTTSATLKVIRIEPDLGAAGFAKLSPDSEVVVAPKQRKKEEKQVKKRSGSARSTGSQKRKGGRGPHALRRAISEDFDGHLRLEVSLDVSQLPPEFHQLKNVSIKVITPPNLASPQQAASIAVEEKSEESLSQNKPPSSEPKVEVLPDIINPASEIVATLVNDTTSPTGHAKLSYALADALGIPSSVGHVIRFESASKPLSQKPGALVIHRFITKTVGAAEQKSLRLKGEKNADDGVSADDQFSLLEELKKLQMLEGPITNFQRLPPIPELLPLGGVIGLQNSEGWIQGGYLGEEPIPFVSGSEILRSESSLSPSNIESEDKRVVGLDNMLNKINEVLSRDSIGCLDYGSRGSGKSAVLNHIKKECKVSHTHTVSIACGLIAQDRVQAVREILTKAFLEASWFSPSVLFLDDIDALMPAEVEHADSSRTRQLTQLFLELALPIMKSRHVSVVASAQAKESLHMNLVTGHVFEELFHLKSPDKEARLAILSEAVKLMDQNVSFSQNDVLEIASQVDGYLPGDLWTLSERAQHEMALRQIEIGLENPSIQLADFMKALEDFVPSSLRGVKLQKSNVKWNDIGGLKETKAVLLETLEWPTKYAPIFASCPLRLRSGLLLYGYPGCGKTYLASAVAAQCGLNFISIKGPEILNKYIGASEQSVRELFGAQAAKPCILFFDEFDSIAPKRGHDSTGVTDRVVNQMLTQMDGAEGLDGVYVLAATSRPDLIDPALLRPGRLDKMLICDLPSYEDRLDILRAIVDGKMHLDGEVELEYVASRTDGFSGADLQAVMFNAYLEAIHEVVDVADDTAADTPALEDKRLEFFQTTLGDAKKDPAAVQNEVMNARAAVAEKARVTAKLEALFKGMSVGVDNDDDKPRKKAVVVIKPQHMNKSLDETSPSISKKELLKLKGIYSQFVSGRSGDMPPGTASTDVGGRATLA

SEQ ID NO: 18662 - protein, 423 aa, Aspergillus niger
MGDVAVETPANNVTPLTKAAPLDTIPNIDSLEGTGNDGSDEYATLKRLQRHLEYIQLQEEYIKDEQRSLKRELVRAQEEIKRIQSVPLVIGQFMEAIDQNTGIVQSSTGSNYVVRILSTLDREKLKPSSSVALHRHSNALVDILPPEADSSIAMLGENEKPDVTYADVGGLDMQKQEIREAVELPLTQFDLYKQIGIDPPRGVLLYGPPGTGKTMLVKAVANSTTASFIRVNGSEFVQKYLGEGPRMVRDVFRMARENSPAIIFIDEIDAIATKRFDAQTGADREVQRILLELLNQMDGFEQSSNVKVIMATNRADTLDPALLRPGRLDRKIEFPSLRDRRERRLIFSTIASKMSLSPEVDLDSLIVRNEPLSGAVIAAIMQEAGLRAVRKNRYNIIPRSDLEDAYAAQVKTGQEADRLEFYR

SEQ ID NO: 18663 - protein, 647 aa, Escherichia coli
MSDMAKNLILWLVIAVVLMSVFQSFGPSESNGRKVDYSTFLQEVNNDQVREARINGREINVTKKDSNRYTTYIPVQDPKLLDNLLTKNVKVVGEPPEEPSLLASIFISWFPMLLLIGVWIFFMRQMQGGGGKGAMSFGKSKARMLTEDQIKTTFADVAGCDEAKEEVAELVEYLREPSRFQKLGGKIPKGVLMVGPPGTGKTLLAKAIAGEAKVPFFTISGSDFVEMFVGVGASRVRDMFEQAKKAAPCIIFIDEIDAVGRQRGAGLGGGHDEREQTLNQMLVEMDGFEGNEGIIVIAATNRPDVLDPALLRPGRFDRQVVVGLPDVRGREQILKVHMRRVPLAPDIDAAIIARGTPGFSGADLANLVNEAALFAARGNKRVVSMVEFEKAKDKIMMGAERRSMVMTEAQKESTAYHEAGHAIIGRLVPEHDPVHKVTIIPRGRALGVTFFLPEGDAISASRQKLESQISTLYGGRLAEEIIYGPEHVSTGASNDIKVATNLARNMVTQWGFSEKLGPLLYAEEEGEVFLGRSVAKAKHMSDETARIIDQEVKALIERNYNRARQLLTDNMDILHAMKDALMKYETIDAPQIDDLMARRDVRPPAGWEEPGASNNSGDNGSPKAPRPVDEPRTPNPGNTMSEQLGDK

SEQ ID NO: 18664 - protein, 257 aa, Escherichia coli
MLTEDQIKTTFADVAGCDEAKEEVAELVEYLREPSRFQKLGGKIPKGVLMVGPPGTGKTLLAKAIAGEAKVPFFTISGSDFVEMFVGVGASRVRDMFEQAKKAAPCIIFIDEIDAVGRQRGAGLGGGHDEREQTLNQMLVEMDGFEGNEGIIVIAATNRPDVLDPALLRPGRFDRQVVVGLPDVRGREQILKVHMRRVPLAPDIDAAIIARGTPGFSGADLANLVNEAALFAARGNKRVVSMVEFEKAKDKIMMGLE

SEQ ID NO: 18665 - protein, 438 aa, Leishmania major
MGQNMPKPPGAGKPEKWEPPVAPEIGKRKKKRGPDAATRIPKVYPNRACLLRKYRLERCKDYLLLEEEFLRTINAQRDAQSNLEEGAMGHYEAELKRVEDIRGTPLEVATLEEAVDDSHAIVSISGTEYYVPLMSFVDKEQLELGCSVLLHDRQHSIVGVLKDDVDPLVSVMKVDKAPEDTYADIGGLEQQIQEIKEAVEFPLSHPELYDEIGIKPPKGVILYGVPGTGKTLLAKAVANRTSATFLRVVGSELIQKYSGEGPKLVRELFRVAEEHSPAIVFIDEIDAIGTKRYDTDSSGTKEVQRTMLELLTQLDGFDSSNDVKVIMATNRIDTLDPALIRPGRIDRKIEFPFPDEKTKRRIFEIHTSRMSLAEDVDISEFIHAKDEMSGADVKAICTEAGLLALRERRMKVCQADFIKGKENVQYRKDKSTFSRFYL

SEQ ID NO: 18666 - protein, 772 aa, Entamoeba histolytica
MSQDVQVQVPMNEEEPKKIIVKKHRLIVEESKEDDMSIVYMNPQRMEELNFFEGDSILIKGKRRKSTVCIVMAEEGLTENMIRLHRMTRYNLRVKLGDVVGVETPQNVPYAIKIHVLPIDDTVEGITGDLFETYIRPYFSDVFRPIKKDDHFLCHGGMRTVEFKVVDIDPSPYALVVNDTIIHCEGEPIKREDEERPDDLGYDDIGGCRRQLGQIREMVELPLRHPQLFQAIGIKPPKGVLLYGPPGCGKTMIARAVANETGVFLILINGPEIMSKMAGESEGNLREAFAEAEKNAPALIFIDEIDSIAPKRDKAQGEVERRVVAQLLTLMDGMKSRSNVIVMAATNRPNAIDSALRRFGRFDREIDIGVPDETGRLEILNIHTKKMKIADDVDLLQIAKETHGYVGADLAQLCTEAAMLCIRENMAHVDVEADSIPVEVLNGMKVTMEHFRNVMKTCTPSALRETVVEIPNVKWEDIGGLEDVKRELKEVVQYPVEFPDKFTKFGMEPSKGVLFFGPPGCGKTLLAKAVASQCKANFISIKGPELLTMWYGESEANVRDVFDKARQAAPCVLFFDELDSIGRARGGGAGDAGGSADRILNQLLTEMDGVGKKKQVFIIGATNRPDILDPALLRPGRLDQLLFIPLPDKASRISILQAKLRNSPVAPDVDLDWIAEHTENFSGADLAEIVQRACKEAIRDTINELAVAEAEKAAQPEDQKMEIEVKPMIKVKHFNAALRDARRSVSDIEIQRYNMYAETLLQRRSIGNFSFN

SEQ ID NO: 18667 - protein, 414 aa, Naegleria fowleri
MLNTSTSGGSGVHVVLASSSSASVNGLKNYYIAKIQEKEIVLRDKIENLRRLQAQRNELNGRVRSLKEELQQLQEPGSHVGEVVKVMGKKKVLIKISQEGKYIVDIDKSIELKDLTPGVRVALRNDSYALHKILPNKIDPLVSLMKVEKVPDATYEMVGGLDEQIKEIKEVIELPIKHPELFESLGIAQPKGVIMYGPPGTGKTLLARAVAHHTDCTFIRVSGSELVQKYIGEGSKMVRELFVMAREHAPSIIFMDEIDSIGSTRTEGGKGGGDSEVQRTMLELLNQLDGFESTQNIKIIMATNRIDILDPALLRPGRIDRKIEFPNPNELARLDILKIHSRRMNLTRGINLRKIASMLGGASGAEIKATCTEAGMFALRERRVHVTQEDLEMAVAKVMKRGDESNMSFKKLFK

SEQ ID NO: 18668 - protein, 618 aa, Prochlorococcus marinus subsp. pastoris str. CCMP1378
MNKRWRNVGLYVLAVITVIFIGTSVFDKPKTENATKTLRYSDFIEAVQDKEVSRVLLSPDSGTAQVVENDGSRSEVNLAPDKDLLKILTENDVDIAVTPTKLANPWQQAISSLIFPVLLIGGLFFLFRRSQNGSGGGGGNPAMSFGKSKARLQMEPSTQVTFSDVAGVEGAKLELTEVVDFLKSPDRFTAVGAKIPKGVLLVGPPGTGKTLLAKAVAGEAGVPFFSISGSEFVEMFVGVGASRVRDLFEQAKKNAPCIVFIDEIDAVGRQRGAGMGGGNDEREQTLNQLLTEMDGFEGNSGIIIVAATNRPDVLDSALMRPGRFDRQVTVDRPDYAGRLQILNVHAKDKTLSKDVDLDKVARRTPGFTGADLANLLNEAAILAARKDLDTVSNDEVGDAIERVMAGPEKKDRVISDRKKELVAYHEAGHALVGACMPDYDAVAKVSIIPRGQAGGLTFFTPSEERMESGLYSRSYLQNQMAVALGGRVAEEIVYGEEEVTTGASNDLQQVANVARQMITKFGMSDKIGPVALGQSQGGMFLGRDMSATRDFSEDTAATIDVEVSELVDTAYKRATKVLSDNRSVLDEMASMLIERETIDTEDIQDLLNRSEVKVANYI

SEQ ID NO: 18669 - protein, 596 aa, Buchnera sp.
MSIFQNFNTNDVNNHKVDYSTFLSEVNQDQIREAYINGRMISVTKKDSSKYTTYIPINDPKLLDNLLVKRVKIIGAIPEEPSLFISILISWFPMLLLIGVWIFFMRQMQMGGGKGAMSFGKSKARMLSEDQIQTTFADVAGCDEAKEEVSELVEYLKEPSRFQKLGGKIPKGILMVGPPGTGKTLLAKAIAGEAKVPFFTISGSDFVEMFVGVGASRVRDMFEHSRKSAPCIIFIDEIDAVGRQRGAGLGGGHDEREQTLNQMLVEMDGFDGNEGIILIAATNRPDVLDPALLRPGRFDRQVIVALPDIRGREQILKVHMRKVPLSKDVDPMIIARGTPGFSGADLANLVNEAALFAARLDKRVVSMLEFERAKDKMMMGSERRSMVMSDFQKESTAYHEAGHVIIGRLVPDHDPAHKVTIIPRGRALGVTFFLPESDTLSISRQKLESQISTLYGGRLAEEIIYGAKNVSTGAYNDIKIATSLAKNMVTQWGFSEKLGPLLYAEEEGEIFLGRSVAKAKHMSDETARIIDEEVKLLIEINYSRARNILNENIDILHAMKEALIKYETIDAFQIDDLMKRREVRQPKGWIETDTNK

SEQ ID NO: 18670 - protein, 651 aa, Vibrio cholerae
MSDMAKNLILWLVIAVVLMSVFQSFGPGENNGRAVDYTTFVKEVGQGQIQEAQFNNGEITFMRRGGGSRYVTYMPVYDQKLLDDLINQDVKVQGTPPEEQSLLGTIFISWFPMILLIGVWIFFMRQMQGGGGKGAMSFGKSKARMMSEDQIKTTFSDVAGCDEAKEDVKELVDYLRDPSRFQKLGGKIPTGVLMVGPPGTGKTLLAKAIAGEAKVPFFTISGSDFVEMFVGVGASRVRDMFEQAKKASPCIIFIDEIDAVGRQRGAGVGGGHDEREQTLNQMLVEMDGFEGNEGIIVIAATNRPDVLDPALLRPGRFDRQVVVGLPDVRGREQILKVHMRKVPLANDVEPSLIARGTPGFSGADLANLVNEAALFAARGNKRNVSMVEFELAKDKIMMGAERRSMVMSEEIKESTAYHEAGHAVVGRLVPEHDPVYKVSIIPRGRALGVTMYLPEQDRVSMSKQHLESMISSLYGGRLAEELIYGKEKVSTGASNDIERATEIARKMVTQWGFSEKLGPMLYAEDEGEVFLGRSVTQTKHMSDDTAKLIDDEVRQIIDRNYERARQIIMDNMDIMHAMKDALMKYETIDAGQIDDLMARKPVIREPAGWGEQSKTPSAPEVKAEPEAKAEESTAETASSDVATASEKKDAE

SEQ ID NO: 18671 - protein, 635 aa, Haemophilus influenzae Rd
MVKNLVLWVVVAVIMMTAYQSFNSSSVENSTDYTTFVYDVSNGQVTAARFDANEITVTKTDGSKYSTVMPPLEDKKLLDDLLSKKVKVEGTPFERRGFLSQILISWFPMLFLVGVWVFFMRQMQGGGGKAMSFGKSRAKMLNQDQIKVTFADVAGCDEAKEEVGEIVDFLRDPNKFQNLGGKIPKGILMVGPPGTGKTLLARAIAGEAKVPFFTISGSDFVEMFVGVGASRVRDMFEQAKKNAPCLIFIDEIDAVGRQRGAGLGGGHDEREQTLNQMLVEMDGFSGNDGVIVIAATNRPDVLDPALTRPGRFDRQVVVGLPDVKGREQILKVHMRKVSVAQDVDAMTLARGTPGYSGADLANLVNEAALFAARVNKRTVTMLEFEKAKDKINMGPERRTMIMTDKQKESTAYHEAGHAIVGYLVPEHDPVHKVTIIPRGRALGVTFFLPEGDQISISQKQLESKLSTLYAGRLAEDLIYGEENISTGASNDIKVATNIARNMVTQWGFSEKLGPILYTEDEGEVFLGRSMAKAKHMSDETAHSIDEEVRAIVNRNYARAREILIDNMDILHAMKDALVKYETIEEEQIKQLMNREPVTPPSGWGEPKTQQAAYANSTTNDTKPESAVENTDDFNV

SEQ ID NO: 18672 - protein, 639 aa, Pasteurella multocida
MVKNLVLWIVVAVVMMTAYQGFNSSSSGNTTDYTTFITDLGNDQIRQARFDYNEIFVTKTDGSKYTTVMPLNDDKLLNDLLNKKVKVEGTLPEKRGLFSQILISWFPMLLLIGVWFFFMRQMQGGGSKAMSFGKSRARMMTQEQIKTTFADVAGCDEAKEEVGEIVDFLRDPGKFQKLGGKIPKGILMVGPPGTGKTLLAKAIAGEAKVPFFTISGSDFVEMFVGVGASRVRDMFEQAKKNAPCLIFIDEIDAVGRQRGAGLGGGHDEREQTLNQMLVEMDGFEGNEGVIVIAATNRPDVLDPALTRPGRFDRQVVVGLPDVRGREQILKVHMRRVPIAPDVDAMTLARGTPGYSGADLANLVNEAALFAARTNKRLVTMLEFEKAKDKINMGPERRTMIMTEKQKESTAYHEAGHAIVGYLVPEHDPVHKVTIIPRGRALGVTFFLPEGDQVSISQKQLESKLSTLYAGRLAEDLIYGEENISTGASNDIKVATNIARNMVTQWGFSEKLGPILYSEDDGEVFLGRSMAKAKHMSDETAHLIDEEVRTIVTRNYERARQILIDNMDILHAMKDALVKYETIEEEQIEQLMKRQPVTPPSGWDENEPTTQNNAGTKASPEPKSAVETEQDSDHQSPSDK

SEQ ID NO: 18673 - protein, 440 aa, Danio rerio
MGQSQSGGQGPGGGKKDDKDKKKKYEPPIPTRVGKKKKKVKGPDAASKLPLVTPHTQCRLKLLKQERIKDYLLMEEEFIRDQEQMKPLEEKQEEERSKVDDLRGTPMSVGTLEEIIDDNHAIVSTSVGSEHYVSILSFVDKDLLEPGCSVLLNHKVHAVIGVLMDDTDPLVTVMKVEKAPQETYADIGGLDSQIQEIKESVELPLTHPEYYEEMGIKPPKGVILYGAPGTGKTLLAKAVANQTSATFLRVVGSELIQKYLGDGPKLVRELFRVAEEHAPSIVFIDEIDAIGTKRYDSNSGGEREIQRTMLELLNQLDGFDSRGDVKVIMATNRIETLDPALIRPGRIDRKIEFPLPDEKTKRRIFQIHTSRMTVADDVTLDDLILAKDDLSGADIKAICTEAGLMALRERRMKVTNEDFKKSKENVLYKKQEGTPEGLYL

SEQ ID NO: 18674 - protein, 913 aa, Chlamydia trachomatis
MAKDKKTNPESKKSFPTAFFFLLFGVIFGVVTVQNFFSAKKASVGFSHQLEHLVNLKLLIPEESRKTALNDNLVSFSGRFREVVPAEGQVRYQYLDLIERKHQIDFELEEASKSLTVLSKEVRNAITWFSAISGMPIPEAGYTISPRTDVGLSVLEPLVVYGPVDAQIVNLAALENRVRSLPKSTESLRVFGSDLYALIGKYLSPALGIGSESLKKEIKDLHQQVENSLTQVIEGDQAVALYKTVLETLHRISLALVSPEEGTRFHQLRSVRLYREDFNRCVKLLGESDETQVQLDKLRGELVQAVWYFNNQELSSRALEKQDPEVFSRWFEGAKQEWAAFSSNKSLSFRAPDQPRNLVLEKTFRSEEPTPHYSGYLFTFMPIILVLLFIYFIFSRQVKGMNGSAMSFGKSPARLLAKGQNKVTFADVAGIEEAKEELVEIVDFLKNPTKFTSLGGRIPKGILLIGAPGTGKTLIAKAVAGEADRPFFSIAGSDFVEMFVGVGASRIRDMFEQAKRNAPCIIFIDEIDAVGRHRGAGIGGGHDEREQTLNQLLVEMDGFGTNEGVILMAATNRPDVLDKALLRPGRFDRRVVVNLPDIKGRFEILAVHAKRIKLDPTVDLMAVARSTPGASGADLENLLNEAALLAARKDRTAVTAVEVAEARDKVLYGKERRSLEMDAQEKKTTAYHESGHAIVGLCVEHSDPVDKVTIIPRGLSLGATHFLPEKNKLSYWKKELYDQLAVLMGGRAAEQIFLGDVSSGAQQDIAQATKIVRSMICEWGMSDHLGTVAYDERSEAAPTGYGSCHEKNYSEETAKAIDNELKTLLDAAYQRALDIINSHKEELELMTQMLIEFETLDSKDVKEIMDHSWDADKKQARMKEEGMLYKKISEDLPPPPPQENVQDGTSLKFNTST

SEQ ID NO: 18675 - protein, 760 aa, Mycobacterium tuberculosis CDC1551
MNRKNVTRTITAIAVVVLLGWSFFYFSDDTRGYKPVDTSVAITQINGDNVKSAQIDDREQQLRLILKKGNNETDGSEKVITKYPTGYAVDLFNALSAKNAKVSTVVNQGSILGELLVYVLPLLLLVGLFVMFSRMQGGARMGFGFGKSRAKQLSKDMPKTTFADVAGVDEAVEELYEIKDFLQNPSRYQALGAKIPKGVLLYGPPGTGKTLLARAVAGEAGVPFFTISGSDFVEMFVGVGASRVRDLFEQAKQNSPCIIFVDEIDAVGRQRGAGLGGGHDEREQTLNQLLVEMDGFGDRAGVILIAATNRPDILDPALLRPGRFDRQIPVSNPDLAGRRAVLRVHSKGKPMAADADLDGLAKRTVGMTGADLANVINEAALLTARENGTIITGPALEEAVDRVIGGPRRKGRIISEQEKKITAYHEGGHTLAAWAMPDIEPIYKVTILARGRTGGHAVAVPEEDKGLRTRSEMIAQLVFAMGGRAAEELVFREPTTGAVSDIEQATKIARSMVTEFGMSSKLGAVKYGSEHGDPFLGRTMGTQPDYSHEVAREIDEEVRKLIEAAHTEAWEILTEYRDVLDTLAGELLEKETLHRPELESIFADVEKRPRLTMFDDFGGRIPSDKPPIKTPGELAIERGEPWPQPVPEPAFKAAIAQATQAAEAARSDAGQTGHGANGSPAGTHRSGDRQYGSTQPDYGAPAGWHAPGWPPRSSHRPSYSGEPAPTYPGQPYPTGQADPGSDESSAEQDDEVSRTKPAHG

SEQ ID NO: 18676 - protein, 760 aa, Mycobacterium tuberculosis H37Rv
MNRKNVTRTITAIAVVVLLGWSFFYFSDDTRGYKPVDTSVAITQINGDNVKSAQIDDREQQLRLILKKGNNETDGSEKVITKYPTGYAVDLFNALSAKNAKVSTVVNQGSILGELLVYVLPLLLLVGLFVMFSRMQGGARMGFGFGKSRAKQLSKDMPKTTFADVAGVDEAVEELYEIKDFLQNPSRYQALGAKIPKGVLLYGPPGTGKTLLARAVAGEAGVPFFTISGSDFVEMFVGVGASRVRDLFEQAKQNSPCIIFVDEIDAVGRQRGAGLGGGHDEREQTLNQLLVEMDGFGDRAGVILIAATNRPDILDPALLRPGRFDRQIPVSNPDLAGRRAVLRVHSKGKPMAADADLDGLAKRTVGMTGADLANVINEAALLTARENGTVITGPALEEAVDRVIGGPRRKGRIISEQEKKITAYHEGGHTLAAWAMPDIEPIYKVTILARGRTGGHAVAVPEEDKGLRTRSEMIAQLVFAMGGRAAEELVFREPTTGAVSDIEQATKIARSMVTEFGMSSKLGAVKYGSEHGDPFLGRTMGTQPDYSHEVAREIDEEVRKLIEAAHTEAWEILTEYRDVLDTLAGELLEKETLHRPELESIFADVEKRPRLTMFDDFGGRIPSDKPPIKTPGELAIERGEPWPQPVPEPAFKAAIAQATQAAEAARSDAGQTGHGANGSPAGTHRSGDRQYGSTQPDYGAPAGWHAPGWPPRSSHRPSYSGEPAPTYPGQPYPTGQADPGSDESSAEQDDEVSRTKPAHG

SEQ ID NO: 18677 - protein, 728 aa, Mycobacterium tuberculosis H37Rv
MTHPDPARQLTLTARLNTSAVDSRRGVVRLHPNAIAALGIREWDAVSLTGSRTTAAVAGLAAADTAVGTVLLDDVTLSNAGLREGTEVIVSPVTVYGARSVTLSGSTLATQSVPPVTLRQALLGKVMTVGDAVSLLPRDLGPGTSTSAASRALAAAVGISWTSELLTVTGVDPDGPVSVQPNSLVTWGAGVPAAMGTSTAGQVSISSPEIQIEELKGAQPQAAKLTEWLKLALDEPHLLQTLGAGTNLGVLVSGPAGVGKATLVRAVCDGRRLVTLDGPEIGALAAGDRVKAVASAVQAVRHEGGVLLITDADALLPAAAEPVASLILSELRTAVATAGVVLIATSARPDQLDARLRSPELCDRELGLPLPDAATRKSLLEALLNPVPTGDLNLDEIASRTPGFVVADLAALVREAALRAASRASADGRPPMLHQDDLLGALTVIRPLSRSASDEVTVGDVTLDDVGDMAAAKQALTEAVLWPLQHPDTFARLGVEPPRGVLLYGPPGCGKTFVVRALASTGQLSVHAVKGSELMDKWVGSSEKAVRELFRRARDSAPSLVFLDELDALAPRRGQSFDSGVSDRVVAALLTELDGIDPLRDVVMLGATNRPDLIDPALLRPGRLERLVFVEPPDAAARREILRTAGKSIPLSSDVDLDEVAAGLDGYSAADCVALLREAALTAMRRSIDAANVTAADLATARETVRASLDPLQVASLRKFGTKGDLRS

SEQ ID NO: 18678 - protein, 644 aa, Escherichia coli K12
MAKNLILWLVIAVVLMSVFQSFGPSESNGRKVDYSTFLQEVNNDQVREARINGREINVTKKDSNRYTTYIPVQDPKLLDNLLTKNVKVVGEPPEEPSLLASIFISWFPMLLLIGVWIFFMRQMQGGGGKGAMSFGKSKARMLTEDQIKTTFADVAGCDEAKEEVAELVEYLREPSRFQKLGGKIPKGVLMVGPPGTGKTLLAKAIAGEAKVPFFTISGSDFVEMFVGVGASRVRDMFEQAKKAAPCIIFIDEIDAVGRQRGAGLGGGHDEREQTLNQMLVEMDGFEGNEGIIVIAATNRPDVLDPALLRPGRFDRQVVVGLPDVRGREQILKVHMRRVPLAPDIDAAIIARGTPGFSGADLANLVNEAALFAARGNKRVVSMVEFEKAKDKIMMGAERRSMVMTEAQKESTAYHEAGHAIIGRLVPEHDPVHKVTIIPRGRALGVTFFLPEGDAISASRQKLESQISTLYGGRLAEEIIYGPEHVSTGASNDIKVATNLARNMVTQWGFSEKLGPLLYAEEEGEVFLGRSVAKAKHMSDETARIIDQEVKALIERNYNRARQLLTDNMDILHAMKDALMKYETIDAPQIDDLMARRDVRPPAGWEEPGASNNSGDNGSPKAPRPVDEPRTPNPGNTMSEQLGDK

SEQ ID NO: 18679 - protein, 920 aa, Chlamydia muridarum
MISIVVSFMAKDKKTNPESKKSFPTAFFFLLFGVIFGVVTVQNFFSAKKASVGFSHQLEHLVNLKLLIPEESRKIALNDNLVSFSGRFRESVPAEGQVRYQYLNLIDRKHQIDFELEETTTSLSVLSKEVRNAVTWFSAISGMPIPESGYTISPRTDVGLSVLEPLVIHGPVSVQIVNLATLEDRVRSLPRSAESLRVFGSDLYALIGKYLSPALGIGSESLKKEIKDLYQQVESSLTQVVEGEQAITLYKTVLETLHRISLSLVSPEDGARFNQLRSVRLYREDFNRCMKLLGESDEIQAQLDKIRGELVQAVWYFNNQELSSRALEKQDPEVFSRWFEGAKQEWAAFSGNKSLSFRAPDQPRNLVLEKTFRSEEPTPHYSSYLFTFMPIILVLLFIYFIFSRQVKGMNGSAMSFGKSPARLLTKGQNKVTFADVAGIEEAKEELVEIVDFLKNPTKFTSLGGRIPKGILLIGAPGTGKTLIAKAVAGEADRPFFSIAGSDFVEMFVGVGASRIRDMFEQAKRNAPCIIFIDEIDAVGRHRGAGIGGGHDEREQTLNQLLVEMDGFGTNEGVILMAATNRPDVLDKALLRPGRFDRRVVVNLPDIKGRFEILSVHAKRIKLDPTVDLMAVARSTPGASGADLENLLNEAALLAARKDRTAVTAVEVAEARDKVLYGKERRSLEMDVQEKKTTAYHESGHAIVGLCVEHSDPVDKVTIIPRGLSLGATHFLPEKNKLSYWKKELYDQLAVLMGGRAAEQIFLGDVSSGAQQDIAQATKIVRSMICEWGMSDQLGTVAYDERSDAAPTGYGSYHEKNYSEETAKSIDNELKTLLDAAYQRALDIINSHKEELELMTQMLIEFETLDSKDVKEIMDHSWDAEKKRARMKEEGMLYKKVSEDLPPPPPQEDVQDGTLKFNIGT

SEQ ID NO: 18680 - protein, 632 aa, Helicobacter pylori 26695
MKPTNEPKKPFFQSPIILAVLGGILLIFFLRSFNSDGSFSDNFLASSTKNVSYHEIKQLISNNEVENVSIGQTLIKASHKEGNNRVIYIAKRVPDLTLVPLLDEKKINYSGFSESNFFTDMLGWLMPILVILGLWMFMANRMQKNMGGGIFGMGSAKKLINAEKPNVRFNDMAGNEEAKEEVVEIVDFLKYPERYANLGAKIPKGVLLVGPPGTGKTLLAKAVAGEAHVPFFSMGGSSFIEMFVGLGASRVRDLFETAKKQAPSIIFIDEIDAIGKSRAAGGVVSGNDEREQTLNQLLAEMDGFGSENAPVIVLAATNRPEILDPALMRPGRFDRQVLVDKPDFNGRVEILKVHIKGVKLANDVNLQEVAKLTAGLAGADLANIINEAALLAGRNNQKEVRQQHLKEAVERGIAGLEKKSRRISPKEKKIVAYHESGHAVISEMTKGSARVNKVSIIPRGMAALGYTLNTPEENKYLMQKHELIAEIDVLLGGRAAEDVFLEEISTGASNDLERATDIIKGMVSYYGMSSVSGLMVLEKQRNAFLGGGYGSSREFSEKTAEEMDLFIKNLLEERYKHVKQTLSDYREAIEIMVKELFDKEVITGERVREIISEYEVANNLESRLIPLEEQAS

SEQ ID NO: 18681 - protein, 550 aa, Helicobacter pylori 26695
MPFSKNLENLTAPFKRIKNRSLVLALGFLILTFCLLLFLILSDVSRLISGKDFFYVIQSHPKQTLIEDENYFYANKGLYKTNKEAFLRVYKIPESMPIERRENLSKVSKIFLALLFFISSMLFGIFWRLPKRLDTKMSLESAHKNELENAFQRYDALGVRFEDIAGVDEVKEELLEVIDYLKNPKKYQDLGIFLPKGVLLIGPPGVGKTMIAKALASEARVPFFYESGSAFSQIYVGAGAKKVHELFMHAKRHAPSIIFIDEIDALGKARGGHRSDEREATLNQLLTEMDGFLQNDEVVVIGATNQMEVMDEALLRSKRFDRRIFISLPDLLERQSILEKLLENKKHALNYLKIAKICVGFSGAMLATLINESALNALKHQRTEIAESDILEVKDKIAYGKKKPQTLDENQKELVALYQSAKALSAYWLEIEFDKAPILGEFIAFNENKIHSESEIKNYIKVYLSGTIILELLYKERYSLSKQDLQKAKFLNEFMASELLLAPTKESLSVLYEEQLEFLKPQIAACKRLSVLLLEQEYLEHSNLYDLLNG

SEQ ID NO: 18682 - protein, 632 aa, Helicobacter pylori J99
MKPTNEPKKPFFQSPIVLAVLGGILLIFFLRSFNSDGSFSDNFLASSTKNVSYHEIKQLISNNEVENVSIGQTLIKASHKEGNNRVIYIAKRVPDLTLVPLLDEKKINYSGFSESNFFTDMLGWLMPILVILGLWMFMANRMQKNMGGGIFGMGSAKKLINAEKPNVRFNDMAGNEEAKEEVVEIVDFLKYPERYANLGAKIPKGVLLVGPPGTGKTLLAKAVAGEAHVPFFSMGGSSFIEMFVGLGASRVRDLFETAKKQAPSIIFIDEIDAIGKSRAAGGMISGNDEREQTLNQLLAEMDGFGSENAPVIVLAATNRPEILDPALMRPGRFDRQVLVDKPDFNGRVEILKVHIKGVKLANDVNLQEVAKLTAGLAGADLANIINEAALLAGRNNQKEVKQQHLKEAVERGIAGLEKKSRRISPKEKKIVAYHESGHAVISEMTKGSTRVNKVSIIPRGMAALGYTLNTPEENKYLMQKHELIAEIDVLLGGRAAEEVFLEEISTGASNDLERATDIIKGMVSYYGMSSVSGLMVLEKQRNAFLGGGYGSSREFSEKTAEEMDLFIKNLLEERYQHVKQTLSDYREAIEIMVKELFDKEVITGERVREIISEYEAANNLESRLIPLEEQAS

SEQ ID NO: 18683 - protein, 550 aa, Helicobacter pylori J99
MPFSKFLENLTAPFKRIKNRSLVLALGFLILTFCLLLFLILSDVSRLISSKDFLYVIQSHPKQTLIEDENYFYANKGLYKTNKEAFLRVYKIPESMPIEKRESLSKVSKIFLALLFFISSMLFGIFWRLPKRLDTKMSLESAHKNELENAFQRYDALGVRFEDIAGVNEVKEELLEVIDYLKNPKKYQDLGIFLPKGVLLVGPPGVGKTMIAKALASEARVPFFYESGSAFSQIYVGAGAKKVHELFMHAKKHAPSIIFIDEIDALGKARGGHRSDEREATLNQLLTEMDGFLQNDEVVVIGATNQMEVMDEALLRSKRFDRRIFISLPDLLERQSILEKLLENKKHALDYLKIAKICVGFSGAMLATLINESALNALKHQRKEITHGDILEVKDKIAYGKKKPQTLDENQKELVALYQSAKALSAYWLEIEFDKASLLGEFIAFNENKIHSESEIKNYIKVYLSGTIILELLYKERYSLSKQDLQKAKFLNEFMASELLLAPTKESLSVLYEEQLEFLKPQIAACKRLSALLLEQECLEHANFYDLLNG

SEQ ID NO: 18684 - protein, 440 aa, Gallus gallus
MGQSQSGGHGPGGGKKDDKDKKKKYEPPVPTRVGKKKKKTKGPDAASKPPLVTPHTQCRLKLLKLERIKDYLLMEEEFIRNQEQMKPLEEKQEEERSKVDDLRGTPMSVGTLEEIIDDNHAIVSTSVGSEHYVSILSFVDKDLLEPGCSVLLNHKVHAVIGVLMDDTDPLVTVMKLEKAPQETYADIGGLDNQIQEIKESVELPLTHPEYYEEMGIKPPKGVILYGPPGTGKTLLAKAVANQTSATFLRVVGSELIQKYLGDGPKLVRELFRVAEEHGPSIVFIDEIDAIGTKRYDSNSGGEREIQRTMLELLNQLDGFDSRGDVKVIMATNRIETLDPALIRPGRIDRKIEFPLPDEKTKKRIFQIHTSRMTLADDVTLDELIMAKDDLSGADIKAICTEAGLMALRERRMKVTNEDFKKSKENFLYKKTEGTPEGLYL

SEQ ID NO: 18685 - protein, 644 aa, Salmonella enterica subsp. enterica serovar Typhi
MAKNLILWLVIAVVLMSVFQSFGPSESNGRKVDYSTFLQEVNQDQVREARINGREINVTKKDSNRYTTYIPINDPKLLDNLLTKNVKVVGEPPEEPSLLASIFISWFPMLLLIGVWIFFMRQMQGGGGKGAMSFGKSKARMLTEDQIKTTFADVAGCDEAKEEVAELVEYLREPSRFQKLGGKIPKGVLMVGPPGTGKTLLAKAIAGEAKVPFFTISGSDFVEMFVGVGASRVRDMFEQAKKAAPCIIFIDEIDAVGRQRGAGLGGGHDEREQTLNQMLVEMDGFEGNEGIIVIAATNRPDVLDPALLRPGRFDRQVVVGLPDVRGREQILKVHMRRVPLATDIDAAIIARGTPGFSGADLANLVNEAALFAARGNKRVVSMVEFEKAKDKIMMGAERRSMVMTEAQKESTAYHEAGHAIIGRLVPEHDPVHKVTIIPRGRALGVTFFLPEGDAISASRQKLESQISTLYGGRLAEEIIYGVEHVSTGASNDIKVATNLARNMVTQWGFSEKLGPLLYAEEEGEVFLGRSVAKAKHMSDETARIIDQEVKALIERNYNRARQILTDNMDILHAMKDALMKYETIDAPQIDDLMARREVRPPAGWEDPNGTNNSDSNGTPQAPRPVDEPRTPNPGNTMSEQLGDK

SEQ ID NO: 18686 - protein, 643 aa, Nitrosomonas europaea
MNNLIKNMAIWLVIALVLMTVFNQFSTRQPSQPPMEYSQFISEMHQGRIAKVVIDGRTLRGSKTDGRQFIVHSPSDPWLVSDLLKAGVSVEAKPEEEPSMLMSILVSWFPMLLLIAVWIFFMRQMQGGGRNGGAFSFGKSKARMLDHKNNNVTFADVAGCEEAKEEVAELVEFLRDPSRFQKLGGRIPRGVLMCGSPGTGKTLLARAIAGEAKVPFFSISGSDFVEMFVGVGASRVRDMFEQAKKHAPCIIFIDEIDAVGRQRGAGLGGGNDEREQTLNQLLVEMDGFEGNMGVIVIAATNRPDVLDPALLRPGRFDRQVVVPLPDIRGREQILQVHMRKVPVSPDVKAGILARGTPGMSGADLANLVNEAALFAARAGKRLVDMDDFERAKDKILMGAERRSVVMPENERRNTAYHESGHAVVAYLLPKTDPVHKVSIIPRGRALGVTMQLPSEDRYSMDRDQILQTIAVMFGGRIAEEVFMSQMTTGASNDFERATDTARKMVMQWGMSETLGPMVYGENEGEVFLGRSVTTHKNLSEATMQKVDAEIRRIIDEQYALARKLIEENKDKIEAMTQALLEWETIDSDQIKDIMEGRPPRPPQAPTSSARQDKGSAGSAASEVKQPAGEPATTEAPAAQKVEI

SEQ ID NO: 18687 - protein, 619 aa, Nitrosomonas europaea
MNNQSPMDKKAQINFWYVLIAVLSILFIQNLYNQYTRIEPIPYSRFQSLLEQDKVSEVAITDQQIFGKLKESTSEKFTEFVTTRVESDLAEMLDKHNVTYTGVVQSTWLRDLLSWIVPMAVFVGIWLFIIRRMNKGMMGSGLMSIGKSRAKVYVEKETKVTFANVAGVDEAKEELVEIVNFLKNPKEYSRLGGRAPKGILLVGPPGTGKTLLARAVAGEAGVPFFSISGSEFVEMFVGVGAARVRDLFEQARQMAPAIIFIDELDSLGRARGAGGFGGHDEKEQTLNQLLAELDGFDPSSGIVLLAATNRPEILDAALLRAGRFDRQVLVDRPDKKGRQQILGVHIGKITLAPDVDTEQIAALTPGFTGADLANLINEAALLATRRGGQAVSMDDFNNAIERIVAGLEKKNRLLNPEERRTVAYHELGHTMVALALPGSDEVHKVSIIPRGIGALGYTIQRPTEDRFLMTRKELENKMAVLLGGRAAERLVFDEISTGASDDLARATDIARAMVLRYGMSEAIGNVVYDREQMAFLQPGFPMPQSRDYSEETANKIDQTVRSLLDLALERAIKILDKNRELLDRTAQQLLETETLNQPELLELKRNLRAEETNPSTQQN

SEQ ID NO: 18688 - protein, 398 aa, Sus scrofa
MELEEGKAGSGLRQYYLSKIEELQLIVNDKSQNLRRLQAQRNELNAKVRLLREELQLLQEQGSYVGEVVRAMDKKKVLVKVHPEGKFVVDVDKNIDINDVTPNCRVALRNDSYTLHKILPNKVDPLVSLMMVEKVPDSTYEMIGGLDKQIKEIKEVIELPVKHPELFEALGIAQPKGVLLYGPPGTGKTLLARAVAHHTDCTFIRVSGSELVQKFIGEGARMVRELFVMAREHAPSIIFMDEIDSIGSSRLEGGSGGDSEVQRTMLELLNQLDGFEATKNIKVIMATNRIDILDSALLRPGRIDRKIEFPPPNEEARLDILKIHSRKMNLTRGINLRKIAELMPGASGAEVKGVCTEAGMYALRERRVHVTQEDFEMAVAKVMQKDSEKNMSIKKLWK

SEQ ID NO: 18689 - protein, 806 aa, Sus scrofa domestica
MASGADSKGDDLSTAILKQKNRPNRLIVDEAINEDNSVVSLSQPKMDELQLFRGDTVLLKGKKRREAVCIVLSDDTCSDEKIRMNRVVRNNLRVHLGDVISIQPCPDVKYGKRIHVLPIDDTVEGITGNLFEVYLKPYFLEAYRPIRKGDIFLVRGGMRAVEFKVVETDPSPYCIVAPDTVIHCEGEPIKREDEEESLNEVGYDDIGGCRKQLAQIKEMVELPLRHPALFKAIGVKPPRGILLYGPPGTGKTLIARAVANETGAFFFLINGPEIMSKLAGESESNLRKAFEEAEKNAPAIIFIDELDAIAPKREKTHGEVERRIVSQLLTLMDGLKQRAHVIVMAATNRPNSIDPALRRFGRFDREVDIGIPDATGRLEILQIHTKNMKLADDVDLEQVANETHGHVGADLAALCSEAALQAIRKKMDLIDLEDETIDAEVMNSLAVTMDDFRWALSQSNPSALRETVVEVPQVTWEDIGGLEDVKRELQELVQYPVEHPDKFLKFGMTPSKGVLFYGPPGCGKTLLAKAIANECQANFISIKGPELLTMWFGESEANVREIFDKARQAAPCVLFFDELDSIAKARGGNIGDGGGAADRVINQILTEMDGMSTKKNVFIIGATNRPDIIDPAILRPGRLDQLIYIPLPDEKSRVAILKANLRKSPVAKDVDLEFLAKMTNGFSGADLTEICQRACKLAIRESIESEIRRERERQTNPSAMEVEEDDPVPEIRRDHFEEAMRFARRSVSDNDIRKYEMFAQTLQQSRGFGSFRFPSGNQGGAGPSQGSGGGTGGSVYTEDNDDDLYG

SEQ ID NO: 18690 - protein, 414 aa, Matricaria chamomilla
MKPASSSADSGTESCSSKGVAKTGEGLRQYYLQHIHDAQLQVRQKTHNLNRLEAQRNELNSRVGMLKEELQLLQEPGSYVGEVVKVMGKSKVLVKVHPEGKYVVDIDKSIDITKITPSTRVALRNDSYVLHLVLPSKVDPLVNLMKVEKVPDSTYDMIGGLDQQIKEIKEVIELPIKHPELFESLGIAQPKGVLLYGPPGTGKTLLARAVAHHTDCAFIRVSGSELVQKYIGEGSRMVRELFVMAREHAPSIIFMDEIDSIGSARMESGSGNGDSEVQRTMLELLNQLDGFESSTKIKVLMATNRIDILDPALLRPGRIDREIEFPNPNEDSRFDILKIHSRKMNLMRGIDLKKIAEKMNGASGAELKAVCTEAGMFALRERRVHVTQEDFEMAVAKVMKKETEKNMSLRKLWK

SEQ ID NO: 18691 - protein, 70 aa, Oryza sativa
RAFIEDASGKDVLVLNVQDPFQRLLLHGVCEVNIFSTILENLNLHPNILSSSHNLSVCSSITYHLQPRLP

SEQ ID NO: 18692 - protein, 431 aa, Arabidopsis thaliana
MSLHVKGPVCQTCGDIGFEEALVFCDSCMFESIHRYCLGITPIPFTEYITWICEDCDNSESDSDCNEVDQTVKKKKKSRNQPLVVLAEDNVLQEPLEGSKREESSCSRKPHELTCLDGNGESVLEAADSSSVPDHSSCTSKRKEVDQTANLGHILERSEKKKKKKKKKKSINHSPPVLAVEDHELQGTTNVVEPVEVSSSSPTKETMESKRQESSDSRKPHELTCLVGDSETANSSSVPEHNSCAVKKRKLSSGNKQIQLADGSSSCRVAESNMPLTLTSRNYRAQPIKIPIWRGLMSVKGGNSCTMDGIVAHVSSLACPKVHETASSLKGRLSAEILPRLEVWPKTFLKNGGPKDESVALFFFPSSESNDEKVFDSLVDKMKKNDSAMRCVLNDAELLLFTSYMLPKDSWTFNSKYYLWGVFKPRQTSRY

SEQ ID NO: 18693 - protein, 168 aa, Glycine max
  unsure (1)..(168): unsure at all Xaa locations
XKTLPIFTTXSNVYAQPTINPIWRGSMYFCNETNGTVNGLLAHMSDLACSKVVEETGHFPEVLHAELLPRDKVWPESFKSRRPTDQDIALFIFPDGEGRSEKDFDKVVEDIMIHEHAIKIVAKKAELLIFHSIELPIKYWRFEAKYYLWGVFRRKQISEETNDAVCRD

SEQ ID NO: 18694 - protein, 171 aa, Glycine max
VQQSLGCHLLLTNLHLSQVDGHVYAQPTNEPIWRGSMYFCNGTIRTVSGLLAHISNLACSQVAEETGHFPEVLHAEFLPRDKVWAESFKRGDPTDQDIALFFFPDSEGSEKDFDVLVEDIMICKHVIRFVGKNAELLIFPSTELPVQNWRYEAKYYLWGVFRKKANLRRDK

SEQ ID NO: 18695 - protein, 948 aa, Oryza sativa (japonica cultivar-group)
SLDKRSQSSEVLLKRKKLRVATDMESPLSNDGVRSPPKSCKRYAENTLSSTPRLLKADSPRNHDVFSRENSFKSSNKGSIKSPDNAPMRSQAVNSSVTLPRSYSLGNLANVKTPGPSPRGLLSKQPSFNNSSNEPKVKQLAEPVLSKLKPSKHSPRDPRESIRKVMKSGPLKHEASICKGSSSSKQKQSVHSSQNEQPRILKPVKPTILLERGASFNLQKPNISSSPRPDSSIKSGDPRNDQDSPRPGPSILKSSKKPGIVENKHSSILSKSDEQGITSTGVVCSKDTCVVKASDPLIPMDKIKNDSTDGACESPLILVNNDNEMSTKPEVLSIPRASKTCGSDFQDIAPTSSSEDLPPEEVQYEQKVVESDGNISCKSAAAIQASEDLLPESPQGCLVAQNPYSPDTKSNDLNLKQQALVDQSSTVGSSLGALVIPEQSYIWQGTFEVSRPGSSPEMYDGFQAHLSTCASLKVLEIVKQLPQRIQLVEVPRHSSWPLQFKEVKPNEDNIALYFFAKDVESYERAYGKLLENMLAGDLSLTANICGIELLIFTSDKLPERTQRWNGLLFFWGVLYARKASSSTELLVKGMNHSPLEQINGPVNQLVCSPKMPQSLGIDLNECPVDELYDPAVSVQTEMENRGASVNHETLLRSNHEAERLNLCEIHFPETAGTGKILLGTPTAVPYGVHVHTSSKRECLNIKPEYPSDIIGSEGTAGRDNMEEEESFTKNGVPCFTKQHTGATTRSVSDEILANTQARVSFQEVSPQHSVRPKLSDDPSDSVLKDFVLPDSSSIYKRQKTSEGKYSTCSFGDGQLTSKCLSKIPLPADQHTSLDDVQYIGRVPADPCSPTKPILDHVIHVLSSDDEDSPEPRNNLNKTSLKEEEGPSPLLSLSLSMASKKHNLTGSDTGDDGPLSLSLGLPGVVTSNQALEMKQFLPEKPGMNTSLLL

SEQ ID NO: 18696 - protein, 460 aa, Lycopersicon esculentum
MAAKPIDDTIWRGSFMISRPEMRLNLTAHLSSKACAKVWLAAKEMAEVIYPEFLPKRDVWPKSFKSAKLIDDNIAIYFFSVKGRDDQVFENLLYNLRHYDIALRALVGDSELLIFTSAHLPEKHHIAGFEGKVYLWGVFSGRQAPPQESPDDCFIHNTRVTQASIPNSANDGKDRSCKEFSNRKDPSTASKSARKGRPLDDAWQHATPVDGKKQRTVCNYCGFISSSGGITYLKTHLGGGDPTGSLKGCPNVPPEVKRVMKEWLLGTIRGGKAPQLQEIRTDFEVPASKKSVRRGRPLDAAWDYATPVDAKRQRAVCKYCGFISSSGGITHLKAHLAGGDPKGPSKGCPNVPPEVKRAMAESLNRTVKGAKSMQPDEIRRYMKAENDWSPPRSDDYSLNQHRIVKNAQYSHFANGNSVNDMTLSKQSETAHVDSYMEVMSSHNACKSSFLSKPSTRVGFI

SEQ ID NO: 18697 - protein, 168 aa, Oryza sativa
FLNTKIGTNYIPVGAHFSNKACKKVCELSMSLPQIMKVTELPKLKAWPKSWEKASVPSAESIGLFFFSQNTRSNKEFDDLVKHVIDYDIVLETDVSFAKLLVFPSVVLPAEYRVFQGKHYLWGVFKRSKDMAERDALVEQNCTTCLADEDVPEQNALILCHVKPWIKK

SEQ ID NO: 18698 - protein, 171 aa, Triticum aestivum
MAFDSEFANQQSSMYSQPTDEPIWSGILKINNEVYISLTAHLSTTACGFVREFSRSLQPVVKVIKLPRLEAWPESWRTSRPTDGDIALYFFPPSASPNEESDGPVEEIIDSGAVLQAVIGVAELLIFPSTMLPAQYHLCQGKRYLWGMFKRREDESDNHETSAVKHVVHVE

SEQ ID NO: 18699 - protein, 214 aa, Triticum aestivum
RHEVSMSLPQIMKVTELPKLKAWPKSWEKASVPSAESIGLFFFSQNTRSNKEFDDLVKHVIDYDIVLETDVSFAKLLVFPSVVLPAEYRVFQGKHYLWGVFKRSKDMAERDALVEQNCTTCLADEDVPEQNALDIVPCKALDQEMALVVSDIHHDNQPSLTTSQVVESEASSDKGPSHPVINSPERPMYLILDTSCKVLKKWSCERMDTKLSML

SEQ ID NO: 18700 - protein, 232 aa, Triticum aestivum
PRVRYDEEEDAEALQAEDLNSRSCDDDEHVMKQRKCMENAAENQRRSIVEGKEALGSGNLNQYSKNHKQVKKQRSIEAEEDENASVRNPNAGCSRMPVISECIGGQPLDIPYWTGIMKINNNYIPLAAHLSTKAGKKVQELSRSLPPIMKVAKLSTSKSCPHFEASIPTADSIGLYFFSGDIRPNKELDELVKHLADSGSVLEAVVGLRKAVSLSFWCTTSATSDVPRETLS

SEQ ID NO: 18701 - protein, 116 aa, Triticum aestivum
SAHASGKTNNKSRFVVLDDEDDDDGDQNLIGSKSGAAGLKTQNYGSEPSKPHHYCSLPIDEPIWSGIIRIGSGKFVSLAAHLSTKYCEKVWKLSRSLEPVVEVSKLFRLEGWSKSF

SEQ ID NO: 18702 - protein, 217 aa, Hordeum vulgare subsp. vulgare
MDVGALSSDYSSGTPSPVGADGGNSEGFSTYMTVSSAPPKRRAGRTKFKETRHPVYKGVRRRNPGRWVCEVREPHSKQRIWLGTFETAEMAARAHDVAALALRGRAACLNFADSPRRLRVPAVGASPDEIRRAAVEAAEAFLPAPDQSNAPAEEVAAAPTMQFAGDPYYGMDDGMDFGMQGYLDMAQGMLIAPPPLVGPSATAGDGDDDGEVSLWSY

SEQ ID NO: 18703 - protein, 214 aa, Brassica napus
  unsure (1)..(214): unsure at all Xaa locations
MTSFSAFSEMMGSENESPALSGEYCPTLAASCPKKPAGRKKFRETRHPIYRGVRQRHSGKWVCEVREPNKKSRIWLGTFLTAEIAARAHDVAAIALRGKSACLNFADSAWRLRIPETTCPKDIQKAAAEAAVAFQAEINDTTTDHGLDVEETIVEAIFTEENNDGFYMDEEESMFGMPSLLASMAEGMLLPPPSVRFEHXYDFDGDAXVSLWSY

SEQ ID NO: 18704 - protein, 251 aa, Brassica napus
MNSVSTFSELLRSENESPVNTEGGDYILAASCPKKPAGRKKFQETRHPIYRGVRLRKSGKWVCEVREPNKKSRIWLGTFKTAEIAARAHDVAALALRGRGACLNFADSAWRLRIPETTCAKDIQKAAAEAALAFEAEKSDTTTNDHGMNMASQVEVNDTTDHDLDMEETIVEAVFREEQREGFYMAEETTVVGVVPEEQMSKGFYMDEEWMFGMPTLLADMAAGMLLPLPSVQWGHNDDFEGDADMNLWNY

SEQ ID NO: 18705 - protein, 250 aa, Brassica napus
MNSVSTFSELLGSENESPVGGDYCPMLAASCPKKPAGRKKFRETRHPIYRGVRLRKSGKWVCEVREPNKKSRIWLGTFKTAEIAARAHDVAALALRGRGACLNFADSAWRLRIPETTCAKDIQKAAAEAALAFEAEKSDTTTNDHGMNMASQAEVNDTTDHGLDMEETMVEAVFTEEQRDGFYMAEETTVEGVVPEEQMSKGFYMDEEWMFGMPTLLADMAAGMLLPPPSVQWGHNDDFEGDVDMNLWNY

SEQ ID NO: 18706 - protein, 250 aa, Brassica napus
MNSVSTFSELLGSENESPVGSDYCPMLAASCPKKPAGRKKFRETRHPIYRGVRLRKSGKWVCEVREPNKKSRIWLGTFKTAEIAARAHDVAALALRGRGACLNFADSAWRLRIPETTCAKDIQKAAAEAALAFEAEKSDTTTNDHGMNMASQVEVNDTTDHDLDMEETIVEAVFREEQREGFYMAEETTVVGVVPEEQMSKGFYMDEEWMFGMPTLLADMAAGMLLPLPSVQWGHNDDFEGVADINLWSY

SEQ ID NO: 18707 - protein, 214 aa, Brassica napus
MTSFSTFSEMLGSEYESPVTLGGEYCPKLAASCPKKPAGRKKFRETRHPVYRGVRLRNSGKWVCEVREPNKKSRIWLGTFLTAEIAARAHDVAAIALRGKSACLNFADSAWRLRIPETTCPKEIQKAAAEAALAFQAEINNTTTDHGLDMEETIVEAIFTEENNDVFYMDEESMLEMPALLASMAEGMLLPPPSVHFGHNYDFDGDADVSLWSY

SEQ ID NO: 18708 - protein, 215 aa, Brassica napus
  unsure (1)..(215): unsure at all Xaa locations
MTSFSTFSELLGSEHESPVTLGEEYCPKLAASCPKKPAGRKKFRETRHPVYRGVRLRNSGKWVCEVREPNKKSRIWLGTFLTAEIAARAHDVAAIALRGKSACLNFADSAWRLRIPETTCPKEIQKAAAEAAVAFKAEINNTTADHGIDVEETIVEAIFTEENNDGFYMDEEESMFGMPALLASXAEGMLLPPPSVQFGHTYDFDGDADVSLWSY

SEQ ID NO: 18709 - protein, 214 aa, Brassica napus
  unsure (1)..(214): unsure at all Xaa locations
MTSFSTFSEMLGSEYESPVTLGGEYCPKLAASCPKKPAGRKKFRETRHPVYRGXRLRNSGKWVCEVREPNKKSRIWLGTFLTAEIAARAHDVAAIALRGKSACLNFADSAWRLRIPETTCPKEIQKAAAEAALAFQAEINNTTTDHGLDMEETIVEAIFTEENNDVFYMDEESMLEMPALLASMAEGMLLPPPSVHFGHNYDFDGDADVSLWSY

SEQ ID NO: 18710 - protein, 268 aa, Secale cereale
MDVADIASRSGQQQQGHRTVSSEPPKRPAGRTKFHETRHPLYRGVRRRGRVGQWVCEVRVPGIKGSRLWLGTFNTAEMAARAHDAAVLALSGRAACLNFADSAWRMLPVLAAGSFGFDSAREVKAAVAVAVVAFQRKQIIPVAVAVVALQKQQVPVAVAVVALQQRQVPVTVAVVALQKLQVPVAVAVVALQKKQIILPAACLAPEFYMSSGDLLELDEEQWFGGMDAGSYYASLAQGMLVAPPDDRARPENGEQSGVQTPLWSCLFD

SEQ ID NO: 18711 - protein, 47 aa, Triticum aestivum
STSTTGSPPETMEDERIALQMIEELLSRSSPASPSHGLLHGEEGSLV

SEQ ID NO: 18712 - protein, 579 aa, Brassica napus
MNNNWLGFSLSPYEQNHHRKDVCSSTTTTAVDVAGEYCYDPTAASDESSAIQTSFPSPFGVVLDAFTRDNNSHSRDWDINGSACNNIHNDEQDGPKLENFLGRTTTIYNTNENVGDIDGSGCYGGGDGGGGSLGLSMIKTWLRNQPVDNVDNQENGNGAKGLSLSMNSSTSCDNNNYSSNNLVAQGKTIDDSVEATPKKTIESFGQRTSIYRGVTRHRWTGRYEAHLWDNSCKREGQTRKGRQVYLGGYDKEEKAARAYDLAALKYWGTTTTTNFPMSEYEKEIEEMKHMTRQEYVASLRRKSSGFSRGASIYRGVTRHHQHGRWQARIGRVAGNKDLYLGTFGTQEEAAEAYDIAAIKFRGLTAVTNFDMNRYNVKAILESPSLPIGSAAKRLKEANRPVPSMMMISNNVSESENNASGWQNAAVQHHQGVDLSLLQQHQERYNGYYYNGGNLSSESARACFKQEDDQHHFLSNTQSLMTNIDHQSSVSDDSVTVCGNVVGYGGYQGFAAPVNCDAYAASEFDYNARNHYYFAQQQQTQHSPGGDFPAAMTNNVGSNMYYHGEGGGEVAPTFTVWNDN

SEQ ID NO: 18713 - protein, 579 aa, Brassica napus
MNNNWLGFSLSPYEQNHHRKDVYSSTTTTVVDVAGEYCYDPTAASDESSAIQTSFPSPFGVVVDAFTRDNNSHSRDWDINGCACNNIHNDEQDGPKLENFLGRTTTIYNTNENVGDGSGSGCYGGGDGGGGSLGLSMIKTWLRNQPVDNVDNQENGNAAKGLSLSMNSSTSCDNNNDSNNNVVAQGKTIDDSVEATPKKTIESFGQRTSIYRGVTRHRWTGRYEAHLWDNSCKREGQTRKGRQVYLGGYDKEEKAARAYDLAALKYWGTTTTTNFPMSEYEKEVEEMKHMTRQEYVASLRRKSSGFSRGASIYRGVTRHHQHGRWQARIGRVAGNKDLYLGTFGTQEEAAEAYDIAAIKFRGLTAVTNFDMNRYNVKAILESPSLPIGSAAKRLKEANRPVPSMMMISNNVSESENSASGWQNAAVQHHQGVDLSLLHQHQERYNGYYYNGGNLSSESARACFKQEDDQHHFLSNTQSLMTNIDHQSSVSDDSVTVCGNVVGYGGYQGFAAPVNCDAYAASEFDYNARNHYYFAQQQQTQQSPGGDFPAAMTNNVGSNMYYHGEGGGEVAPTFTVWNDN

SEQ ID NO: 18714 - protein, 367 aa, Hyacinthus orientalis
MGDPVTFQFFPVGEPEEEESPGGESTVAAGGAPRGHWAEVKFVEKEADVSPAIKKSRRGPRSRSSQYRGVTFYRRTGRWESHIWDCGKQVYLGGFDTAHAAARAYDRAAIKFRGVDADINFNLSDYNEDLKQMMNLAKEEFVHILRRQSTGFSRGSSKYRGVTLHKCGHWEARMGQFLGKKAYDKAAIKSSGREAVTNFEPSSYEREVLTEADSDAIGHDIDLNLRISQPNVSSPKRRDNPVGVQFHLGSFESSDAKKAMIDTHSSILVGQPHTAAMTSEASRVWSALYPGFYPPIELRAKDKMSMVGSAALPNWTWQLHGPMPSPMFTSAASSGFATTHATSSITPPASHHLQFPPPPNTNYYSRS

SEQ ID NO: 18715 - protein, 546 aa, Giardia lamblia ATCC 50803
MAGWSWLHAAEYAWDWAADGINYRVIPELQSSPLVLCCLCVTTVLLITVAYMRAAAADARALYLLDFAVFQPDEEIYKTTNEQLLNLALESFHYPAESMKFMRRICEGTGLGPSTHIPRSLRDFNCTIKTAREEAELVIFGAIDALLEKTGIDPKAISGVVTNCSLFCPTPSFSAMIVNKYGLNKNVRSFSLGGMGCSASIIGVDLIRAIMHDSPGLILLVSTENMTQNFYRGEERSMLMQNVLFRMGCSAVLFSNNPSYRIKGSRSDARDPKTIYAKYKLLGLVRTHHGGSDDSYRCVYQTADQKGNIGVIINKSVPRCAGKALHDNMKIVFKKFMPVTEICRFLWHQMLSNVRKTSRKDAAPFMPNVGKIFNHLCFHTGGRAVLDEMERLLHLSEQQMAASRATLYRYGNTSSSSVWYELAYHECQSGVKPGHKVWQIAFGSGFKCNSVVWQATDAYHMTVPTTFDKTNPDFSWDLAKQTSHLLSDYEKARDYDKECAINTQKDDDKDYKGFCSRFKDRLERDFGTKGCDVKEILAKTCTEMVN

SEQ ID NO: 18716 - protein, 505 aa, Limnanthes douglasii
MSETKPEKPLIATVKNTLPDLKLSINLKHVKLGYHYLITHGMYLCLPPLALVLFAQISTLSLKDFNDIWEQLQFNLISVVVSSTLLVSLLILYFMTRPRPVYLMDFACYKPDETRKSTREHFMKCGESLGSFTEDNIDFQRKLVARSGLGDATYLPEAIGTIPAHPSMKAARREAELVMFGAIDQLLEKTKVNPKDIGILVVNCSLFSPTPSLSSMIVNHYKLRGNIISYNLGGMGCSAGLISVDLAKRLLETNPNTYALVMSTENITLNWYMGNDRSKLVSNCLFRMGGAAVLLSNKTSDKKRSKYQLVTTVRSHKGADDNCYGCIFQEEDSNGKIGVSLSKNLMAVAGDALKTNITTLGPLVLPMSEQLLFFATLVARKVFKKKIKPYIPDFKLAFDHFCIHAGGRAVLDELEKNLQLSSWHLEPSRMTLYRFGNTSSSSLWYELAYSEAKGRIRKGERVWQIGFGSGFKCNSAVWKALKSVDPKKEKNPWMDEIHQFPVAVV

SEQ ID NO: 18717 - protein, 621 aa, Dunaliella salina
MSYHSIDGIGNSRHPLMQLRSVLVGGVKIASLDVWKTQLLLFSHTVSQPSHNTNPVLTDGPGAMGEPAKADEHRDSNGENGNGKPAPGQLFPDYRRTVALKYVSRGLQVAFSYISLTMLATPFVVFGSLELFNLYRQGELQKLVEVAKQTEMTFDMITVMGCIAMMVVGLLLYFFLRKNPVYLVDFSVFRANDSSWNATYKRFMNGSFMTRRFTEDSLNFQKKILERSGLGQDTMLPPAMQTMCSLDWKTLELSHDPAQTLASVAPRPGMKLAREEFEVVIFSTVQDLLNKTGVRAKDIGILVVNCSLFNPTPSLCAMVINHFKMRSNIISYNLSGMGCSASPIAIDLANQMLQLYSGTYALVISTENITQNWYFGNDRSMLLPNCLFRVGGAAMLLSNRRRDGLRAKYELQHVVRTHLGAKDQAYGCIFQTEDDEDNVGVRLTKELMAVAGEALKVNVTTLGPLVLPISEQALFIFNLIVRKTFNKKLKPYIPDFKLAFDKICIHTGGRAVIDEIEKQLRLTPEMVEPSRAVLFRYGNVSSSSIWYVLAYMESIEGVKRGDRIWQLGFGSGFKCNSAVWRSKRRIKNMHYAWEGFNLQEMRDHLASLAIHKARHLEQKPK

SEQ ID NO: 18718 - protein, 261 aa, Persea americana
QVHPNSYALVVSTENMTLNWYSGNNRAMLVTNCLFRMGGAAILLSNRWSDRRRSKYQLVHTVRTHIGADDRAFNCVSQEEDEAGKVGVSLSKDLMVIAGEALKSNITTLGPMVLPMSEQLLFFATLAARKVFKMKIKPYIPDFKLAFEHFCIHAGGRAVLDELQKNLELSDWQMEPSRMTLYRFGNTSSSSLWYELGYSEAKGRVMKGDRMWQIAFGSGFKCNSAVWRALRSVNPAKEKSPWMDDIDSFPVHVPKVTTIQS

SEQ ID NO: 18719 - protein, 497 aa, Arabidopsis thaliana
MPQAPMPEFSSSVKLKYVKLGYQYLVNHFLSFLLIPIMAIVAVELLRMGPEEILNVWNSLQFDLVQVLCSSFLVIFISTVYFMSKPRTIYLVDYSCYKPPVTCRVPFATFMEHSRLILKDKPKSVEFQMRILERSGLGEETCLPPAIHYIPPTPTMDAARSEAQMVIFEAMDDLFKKTGLKPKDVDILIVNCSLFSPTPSLSAMVINKYKLRSNIKSFNLSGMGCSAGLISVDLARDLLQVHPNSNAIIVSTEIITPNYYQGNERAMLLPNCLFRMGAAAIHMSNRRSDRWRAKYKLSHLVRTHRGADDKSFYCVYEQEDKEGHVGINLSKDLMAIAGEALKANITTIGPLVLPASEQLLFLTSLIGRKIFNPKWKPYIPDFKLAFEHFCIHAGGRAVIDELQKNLQLSGEHVEASRMTLHRFGNTSSSSLWYELSYIESKGRMRRGDRVWQIAFGSGFKCNSAVWKCNRTIKTPKDGPWSDCIDRYPVFIPEVVKL

SEQ ID NO: 18720 - protein, 497 aa, Arabidopsis thaliana
MPQAPMPEFSSSVKLKYVKLGYQYLVNHFLSFLLIPIMAIVAVELLRMGPEEILNVWNSLQFDLVQVLCSSFFVIFISTVYFMSKPRTIYLVDYSCYKPPVTCRVPFATFMEHSRLILKDKPKSVEFQMRILERSGLGEETCLPPAIHYIPPTPTMDAARSEAQMVIFEAMDDLFKKTGLKPKDVDILIVNCSLFSPTPSLSAMVINKYKLRSNIKSFNLSGMGCSAGLISVDLARDLLQVHPNSNAIIVSTEIITPNYYQGNERAMLLPNCLFRMGAAAIHMSNRRSDRWRAKYKLSHLVRTHRGADDKSFYCVYEQEDKEGHVGINLSKDLMAIAGEALKANITTIGPLVLPASEQLLFLTSLIGRKIFNPKWKPYIPDFKLAFEHFCIHAGGRAVIDELQKNLQLSGEHVEASRMTLHRFGNTSSSSLWYELSYIESKGRMRRGDRVWQIAFGSGFKCNSAVWKCNRTIKTPKDGPWSDCIDRYPVFIPEVVKL

SEQ ID NO: 18721 - protein, 492 aa, Arabidopsis thaliana
MPEFSSSVKLKYVKLGYQYLVNHFLSFLLIPIMAIVAVELLRMGPEEILNVWNSLQFDLVQVLCSSFFVIFISTVYFMSKPRTIYLVDYSCYKPPVTCRVPFATFMEHSRLILKDKPKSVEFQMRILERSGLGEETCLPPAIHYIPPTPTMDAARSEAQMVIFEAMDDLFKKTGLKPKDVDILIVNCSLFSPTPSLSAMVINKYKLRSNIKSFNLSGMGCSAGLISVDLARDLLQVHPNSNAIIVSTEIITPNYYQGNERAMLLPNCLFRMGAAAIHMSNRRSDRWRAKYKLSHLVRTHRGADDKSFYCVYEQEDKEGHVGINLSKDLMAIAGEALKANITTIGPLVLPASEQLLFLTSLIGRKIFNPKWKPYIPDFKLAFEHFCIHAGGRAVIDELQKNLQLSGEHVEASRMTLHRFGNTSSSSLWYELSYIESKGRMRRGDRVWQIAFGSGFKCNSAVWKCNRTIKTPKDGPWSDCIDRYPVFIPEVVKL

SEQ ID NO: 18722 - protein, 492 aa, Arabidopsis thaliana
MSDFSSSVKLKYVKLGYQYLINNFLTLLLIPVIATVAIELLRMGPEEILSVLNSLHFELLHILCSSFLIIFVSTVYFMSKPRTVYLVDYSCYKPPVTCRVPFSSFMEHSRLILKDNPKSVEFQMRILERSGLGEETCLPPAIHYIPPTPTMESARNEAQMVIFTAMEDLFKNTGLKPKDIDILIVNCSLFSPTPSLSAMIINKYKLRSNIKSYNLSGMGCSASLISVDVARDLLQVHPNSNAIIISTEIITPNYYKGNERAMLLPNCLFRMGGAAILLSNRRSDRWRAKYKLCHLVRTHRGADDKSYNCVMEQEDKNGNVGINLSKDLMTIAGEALKANITTIGPLVLPASEQLLFLSSLIGRKIFNPKWKPYIPDFKQAFEHFCIHAGGRAVIDELQKNLQLSGEHVEASRMTLHRFGNTSSSSLWYELSYIEAQGRMKRNDRVWQIAFGSGFKCNSAVWKCNRTIKTPTDGAWSDCIERYPVFIPEVVKL

SEQ ID NO: 18723 - protein, 492 aa, Arabidopsis thaliana
MSDFSSSVKLKYVKLGYQYLINNFLTLLLIPVIATVAIELLRMGPEEILSVLNSLHFELLHILCSSFLIIFVSTVYFMSKPRTVYLVDYSCYKPPVTCRVPFSSFMEHSRLILKDNPKSVEFQMRILERSGLGEETCLPPAIHYIPPTPTMESARNEAQMVIFTAMEDLFKNTGLKPKDIDILIVNCSLFSPTPSLSAMIINKYKLRSNIKSYNLSGMGCSASLISVDVARNLLQVHPNSNAIIISTEIITPNYYKGNERAMLLPNCLFRMGGAAILLSNRRSDRWRAKYKLCHLVRTHRGADDKSYNCVMEQEDKNGNVGINLSKDLMTIAGEALKANITTIGPLVLPASEQLLFLSSLIGRKIFNPKWKPYIPDFKQAFEHFCIHAGGRAVIDELQKNLQLSGEHVEASRMTLHRFGNTSSSSLWYELSYIEAQGRMKRNDRVWQIAFGSGFKCNSAVWKCNRTIKTPTDGAWSDCIERYPVFIPEVVKL

SEQ ID NO: 18724 - protein, 492 aa, Arabidopsis thaliana
MSDFSSSVKLKYVKLGYQYLINNFLTLLLIPVIATVAIELLRMGPEEILSVLNSLHFELLHILCSSFLIIFVSTVYFMSKPRTVYLVDYSCYKPPVTCRVPFSSFMEHSRLILKDNPKSVEFQMRILERSGLGEETCLPPAIHYIPPTPTMESARNEAQMVIFTAMEDLFKNTGLKPKDIDILIVNCSLFSPTPSLSAMIINKYKLRSNIKSYNLSGMGCSASLISVDVARDLLQVHPNSNAIIISTEIITPNYYKGNERAMLLPNCLFRMGGAAILLSNRRSDRWRAKYKLCHLVRTHRGADDKSYNCVMEQEDKNGNVGINLSKDLMTIAGEALKANITTIGPLVLPASEQLLSLSSLIGRKIFNPKWKPYIPDFKQAFEHFCIHAGGRAVIDELQKNLQLSGEHVEASRMTLHRFGNTSSSSLWYELSYIEAQGRMKRNDRVWQIAFGSGFKCNSAVWKCNRTIKTPTDGAWSDCIERYPVFIPEVVKL

SEQ ID NO: 18725 - protein, 509 aa, Brassica juncea
MTSVNVKLLYHYVITNLFNLCFFPLTAIVAGKAYRLTIDDLHHLYYSYLQHNLITIASLFAFTVSGFGLYIATLPKPLTLVEYSCYLPPRHLKVSVSKIMDIFYQIRKADTSSRNVACDDPSSLDFLRKIQERSGLGDETYSPEGLIHVPPRKSFAASREETEKVIIGGIENLFENTKVKPKDIGILVVNSSKFNPTPSLSAMVVNTFKLRSNIKSFNLGGMGCSAGVIAIAIDLAKDLLHVHKNTYALVVSTENITQGIYAEENRSMMFSNCLFRVGGAAILLSNKSGDRRRSKYELVHTVRTHTGADDKSFRCVQQGDDEDGKIGVCLSKDITNVAGTTLTKNIAICRPLILPLSEKFLFFATSVAMKLLKDKIKHYYVPDFKLAVDHFCIQPGGRAVIDELEKNLGLSPIDVEASRSTLHRFGNTSSSSIWYELAYIEPKERLKKGNKGWQIALGLGFKCNSAVWVALNNVKASANSPWEHCIDRYPVKNDSDLSKSKTHVQNGRS

SEQ ID NO: 18726 - protein, 509 aa, Brassica juncea
MTSVNVKLLYHYVITNLFNLCFFPLTAIVAGKAYRFTIDDLHHLYYSYLQHNLITIASLFAFTVSGFGLYIATLPKPLYLVEYSCYLPPRHLKVSVSKIMDIFYQIKADTSSRNVACDDPSSLDFLRKIQERSGLGDETYSPEGLIHVPPRKSFAGSREETEKVIIGGIENLFENTKVKPKDIGILVVNSSKFNPTPSLSAMVVNTFKLRSNIKSFNLGGMGCSAGVIAIAIDLAKDLLHVHKNTYALVVSTEGITQGIYAEENRSMMFSNCLFRVGGAAILLSNKSGDRRRSKYELVHTVRTHTGADDKSFRCVQQGDDEDGKTGVCLSKDITNVAGTTLTKHIAICRPLILPLSEKFLFFATSVAMKLLKDKIKHYYVPDFKLAVDHFCIQPGGRAVIDELEKNLGLSPIDVEASRSTLHRFGNTSSSSIWYELAYIEPKERLKKGNKKGWQIALGLGFKGNSAVWVALNNVKASANSPWEHCIDRYPVKNDSDLSKSKTQVQNGRS

SEQ ID NO: 18727 - protein, 506 aa, Brassica napus
MTSINVKLLYHYVITNLFNLCFFPLTAIVAGKAYRLTIDDLHHLYYSYLQHNLITIAPLFAFTVFGSVLYIATRPKPVYLVEYSCYLPPTHCRSSISKVMDIFYQVRKADPSRNGTCNDSSWLDFLRKIQERSGLGDETHGPEGLLQVPPRKTFAAAREETEQVIIGALENLFKNTNVNPKDIGILVVNSSMFNPTPSLSAMVVNTFKLRSNVRSFNLGGMGCSAGVIAIDLAKDLLHVHKNTYALVVSTENITYNIYAGDNRSMMVSNCLFRVGGAAILLSNKPRDRRRSKYELVHTVRTHTGADDKSFRCVQQGDDENGKTGVSLSKDITDVAGRTVKKNIATLGPLILPLSEKLLFFVTFMGKKLFKDKIKHYYVPDFKLAIDHFCIHAGGKAVIDVLEKNLGLAPIDVEASRSTLHRFGNTSSSSIWYELAYIEAKGRMKKGNKVWQIALGSGFKCNSAVWVALNNVKASTNSPWEHCIERYPVKIDSDSGKSETRAQNGRS

SEQ ID NO: 18728 - protein, 506 aa, Brassica napus
MTSVNVKLLYHYVITNLFNLCFFPLTAIVAGKAYRLTIDDLHHLYYSYLQHNLITIAPLFAFTVFGSVLYIATRPKPVYLVEYSCYLPPTHCRSSISKVMDIFYQVRKADPSRNGTCDDSSWLDFLRKIQERSGLGDETHGPEGLLQVPPRKTFAAAREETEQVIIGALENLFKNTNVNPKDIGILVVNSSMFNPTPSLSAMVVNTFKLRSNVRSFNLGGMGCSAGVIAIDLAKDLLHVHKNTYALVVSTENITYNIYAGDNRSMMVSNCLFRVGGAAILLSNKPGDRRRSKYELVHTVRTHTGADDKSFRCVQQGDDENGKIGVSLSKDITDVAGRTVKKNIATLGPLILPLSEKLLFFVTFMGKKLFKDKIKHYYVPDFKLAIDHFCIHAGGRAVIDVLEKNLALAPIDVEASRSTLHRFGNTSSSSIWYELAYIEAKGRMKKGNKVWQIALGSGFKCNSAVWVALNNVKASTNSPWEHCIDRYPVKIDSDSGKSETRVQNGRS

SEQ ID NO: 18729 - protein, 506 aa, Brassica napus
MTSINVKLLYHYVITNLFNLCFFPLTAIVAGKAYRLTIDDLHHLYYSYLQHNLITIAPLFAFTVFGSVLYIATRPKPVYLVEYSCYLPPTHCRSSISKVMDIFYQVRKADPSRNGTCDDSSWLDFLRKIQERSGLGDETHGPEGLLQVPPRKTFAAAREETEQVIIGALENLFKNTNVNPKDIGILVVNSSMFNPTPSLSAMVVNTFKLRSNVRSFNLGGMGCSAGVIAIDLAKDLLHVHKNTYALVVSTENITYNIYAGDNRSMMVSNCLFRVGGAAILLFNKPGDRRRSKYELVHTVRTHAGADDKSFRCVQQGDDENGKIGVSLSKDITDVAGRTVKKNIATLGPLILPLSEKLLFFVTFMGKKLFKDKIKHYYVPDFKLAIDHFCIHAGGRAVIDVLEKNLALAPIDVEASRSTLHRFGNTSSSSIWYELAYIEAKGRMKKGNKVWQIALGSGFKCNSAVWVALNNVKASTNSPWEHCIDRYPVKIDSDSGKSETRAQNGRS

SEQ ID NO: 18730 - protein, 506 aa, Brassica napus
MTSINVKLLYHYVITNLFNLCFFPLTAIVAGKAYRLTIDDLHHLYYSYLQHNLITIAPLFAFTVFGSVLYIATRPKPVYLVEYSCYLPPTHCRSSISKVMDIFYQVRKADPSRNGTCDDSSWLDFLRKIQERSGLGDETHGPEGLLQVPPRKTFAAAREETEQVIIGALENLFKNTNVNPKDIGILVVNSSMFNPTPSLSAMVVNTFKLRSNVRSFNLGGMGCSAGVIAIDLAKDLLHVHKNTYALVVSTENITYNIYAGDNRSMMVSNCLFRVGGAAILLSNKPGDRRRSKYELVHTVRTHTGADGKSFRCVQQGDDENGKIGVSLSKDITDVAGRTVKKNIATLGPLILPLSEKLLFFVTFMGKKLFKDKIKHYYVPDFKLAIDHFCIHAGGRAVIDVLEKNLALAPIDVEASRSTLHRFGNTSSSSIWYELAYIEAKGRMKKGNKVWQIALGSGFKCNSAVWVALNNVKASTNSPWEHCIDRYPVKIDSDSGKSETRVQNGRS

SEQ ID NO: 18731 - protein, 505 aa, Brassica napus
MTSINVKLLYHYVITNLFNLCFFPLTAIVAGKAYLTIDDLHHLYYSYLQHNLITIAPLLAFTVFGSVLYIATRPKPVYLVEYSCYLPPTHCRSSISKVMDIFFQVRKADPSRNGTCDDSSWLDFLRKIQERSGLGDETHGPEGLLQVPPRKTFARAREETEQVIIGALENLFKNTNVNPKDIGILVVNSSMFNPTPSLSAMVVNTFKLRSNVRSFNLGGMGCSAGVIAIDLAKDLLHVHKNTYALVVSTENITYNIYAGDNRSMMVSNCLFRVGGAAILLSNKPRDRRRSKYELVHTVRTHTGADDKSFRCVQQGDDENGQTGVSLSKDITDVAGRTVKKNIATLGPLILPLSEKLLFFVTFMGKKLFKDEIKHYYVPDFKLAIDHFCIHAGGKAVIDVLEKNLGLAPIDVEASRSTLHRFGNTSSSSIWYELAYIEPKGRMKKGNKVWQIALGSGFKCNSAVWVALNNVKASTNSPWEHCIDRYPVKIDSDSGKSETRVPNGRS

SEQ ID NO: 18732 - protein, 168 aa, Brassica napus
FRCVQQGDDENGKTGVSLSKDITDVAGRTVKKNIATLGPLILPLSEKLLFFVTFMGKKLFKDKIKHYYVPDFKLAIDHFCIHAGGRAVIDVLEKNLALAPIDVEASRSTLHRFGNTSSSSIWYELAYIEAKGRMKKGNKVWQIALGSGFKCNSAVWVALNNVKASTNS

SEQ ID NO: 18733 - protein, 168 aa, Brassica napus
FRCVQQGDDENGKTGVSLSKDITDVAGRTVKKNIATLGPLILPLSEKLLFFVTFMGKKLFKDKIKHYYVPDFKLAIDHFCIHAGGKAVIDVLEKNLGLAPIDVEASRSTLHRFGNTSSSSIWYELAYIEAKGRMKKGNKVWQIALGSGFKCNSAVWVALNNVKASTNS

SEQ ID NO: 18734 - protein, 506 aa, Brassica rapa
MTSINVKLLYHYVITNLFNLCFFPLTAIVAGKAYRLTIDDLHHLYYSYLQHNLITIAPLFAFTVFGSVLYIATRPKPVYLVEYSCYLPPTHCRSSISKVMDIFYQVRKADPSRNGTCDDSSWLDFLRKIQERSGLGDETHGPEGLLQVPPRKTFAAAREETEQVIIGALENLFKNTNVSPKDIGILVVNSSMFNPTPSLSAMVVNTFKLRSNVRSFNLGGMGCSAGVIAIDLAKDLLHVHKNTYALVVSTENITYNIYAGDNRSMMVSNCLFRVGGAAILLSNKPGDRRRSKYELVHTVRTHTGADDKSFRCVQQGDDENGKTGVSLSKDITDVAGRTVKKNIATLGPLILPLSEKLLFFVTFMGKKLFKDKIKHYYVPDFKLAIDHFCIHAGGRAVIDVLEKNLALAPIDVEASRSTLHRFGNTSSSSIWYELAYIEAKGRMKKGNKVWQIALGSGFKCNSAVWVALNNVKASTNSPWEHCIDRYPVKIDSDSGKSETRVQNGRS

SEQ ID NO: 18735 - protein, 459 aa, Brassica rapa
MTSINVKLLYHYVITNLFNLCFFPLTAIVAGKAYRLTIDDLHHLYYSYLQHNLITIAPLFAFTVFGSVLYIATRPKPVYLVEYSCYLPPTHCRSSISKVMDIFYQVKKSCPSRNGTCDDSSWLDFLRKIQERSGLGDETHGPEGLLQVPPRKTFAAAREETEQVIIGALENLFKNTNVNPKDIGILVVKSSMFNPTPSLSAMVKNNFKLRSNVRSFNLGGMGCSAGVIAIDLAKDLLHVHKNTYAFVVSTENITYNIYAGDNRSMMVSNCLFRVGGAAILLSNKPGDRRRSKYELVHTVRTHTGADDKSFRCVQQGDDENGKIGVSLSKDITDVAGRTVKKNIATLGPLILPLSEKLLFFVTFMGKKLFKDKIKHYYVPDFKLAIDHFCIHAGGRAVIDVLEKNLALAPIDVEASRSTLHRFGNTSSSSIWYELAYIEAKGRMKKGNKVWQIALGSGFK

SEQ ID NO: 18736 - protein, 458 aa, Brassica rapa
MTSINVKLLYHYVITNLFNLCFFPLTAIVAGKAYRLTIDDLHHLYYAYLQHNLITIAPLFAFTVFGSVLYIATRPKPVYLVEYSCYLPPTHCRSSISKVMDIFYQVRKADPSRIGTCDDSSWLDFLRKIQERSGLGDENHGPEGLLQVPPRKTFAAAREETEQVIIGALENLFKNTNVSPKDIGILVVHSSMFNPTPSLSAMVNNFKLRSNVRSFNLGGMGCSAGVIAIDLAKDLLHVHKNTYALVVSTENITYNIYAGDNRSMMVSNCLFRVGGAAILLSNKPGDRRRSKYELVHTVRTHTGADDYSFRCVQQGDDENGKTGVSLSKDITDVAGRTVKKNIATLGPLILPLSEKLLFFVTFMGKKLFKDKIKHYYVPDFKLAIDHFCIHAGGRAVIDVLEKNLALAPIDVEASRSTLHRFGNTSSSSIWYELAYIEAKGRMKKGNKVWQIALGSGFK

SEQ ID NO: 18737 - protein, 509 aa, Brassica rapa
MTSVNVKLLYHYVITNLFNLCFFPLTAIVAGKAYRFTIDDLHHLYYSYLQHNLITIASLFAFTVSGFGLYIARLPKPLYLVEYSCYLPPRHLKVSVSKIMDIFYQIKADTSSRNVACDDPSSLDFLRKIQERSGLGDETYSPEGLIHVPPRKSFAGSREETEKVIIGGIENLFENTKVKPKDIGILVVNSSKFNPTPSLSAMVVNTFKLRSNIKSFNLGGMGGSAGVIAIAIDLAKDLLHVHKNTYALVVSTEGITQGIYAEENRSMMFSNCLFRVGGAAILLSNKSGDRRRSKYELVHTVRTHTGADDKSFRCVQQGDDEDGKTGVCLSKDITNVAGTTLTKHIAICRPLILPLSEKFLFFATSVAMKLLKDKIKHYYVPDFKLAVDHFCIQPGGRAVIDELEKNLGLSPIDVEASRSTLHRFGNTSSSSIWYELAYIEPKERLKKGNKKGWQIALGLGFKGNSAVWVALNNVKASANSPWEHCIDRYPVKNDSDLSKSKHQVQNGRS

SEQ ID NO: 18738 - protein, 168 aa, Brassica rapa
FRCVQQGDDENGKTGVSLSKDITDVAGRTVKKHIATLGPLILPLSEKLLFFVTFMGKKLFKDKIKHYYVPDFKLAIDHFCIHAGGRAVIDVLEKNLALAPIDVEASRSTLHRFGNTSSSSIWYELAYIEAKGRMKKGNKVWQIALGSGFKCNSAVWVALNNVKASTNS

SEQ ID NO: 18739 - protein, 506 aa, Brassica oleracea
MTSINVKLLYHYVITNLFNLCFFPLTAIVAGKAYRLTIDDLHHLYYSYLQHNLITIAPLFAFTVFGSVLYIATRPKPVYLVEYSCYLPPTHCRSSISKVMDIFYQVRKADPSRNGTCDDSSWLDFLRKIQERSGLGDETHGPEGLLQVPPRKTFAAAREETEQVIIGALENLFKNTNVNPKDIGILVVNSSMFNPTPSLSAMVVNTFKLRSNVRSFNLGGMGCSAGVIAIDLAKDLLHVHKNTYALVVSTENITYNIYAGDNRSMMVSNCLFRVGGAAILLSNKPRDRRRSKYELVHTVRTHTGADDKSFRCVQQGDDENGKTGVSLSKDITDVAGRTVKKNIATLGPLILPLSEKLLFFVTFMGKKLFKDKIKHYYVPDFKLAIDHFCIHAGGKAVIDVLEKNLGLAPIDVEASRSTLHRFGNTSSSSIWYELAYIEAKGRMKKGNKVWQIALGSGFKCNSAVWVALNNVKASTNSPWEHCIDRYPVKIDSDSGKSETRAQNGRS

SEQ ID NO: 18740 - protein, 459 aa, Brassica oleracea
MTSINVKLLYHYVITNLFNLCFFPLTAIVAGKAYRLTIDDLHHLYYSYLQHNLITIAPLFAFTVFGSVLYIATRPKPVYLVEYSCYLPPTHCRSSISKVMDIFYQVRKADPSRNGTCDDSSWLDFLRKIQERSGLGDETHGPEGLLQVPPRKTFAAAREETEQVIIGALGNLFKNTNVSPKDIGILVVNSSMFNPIPSLSAMVVNTFKLRSNVRSFNLGGMGCSAGVIAIDLAKDLLHVHKNTYALVVSTENITYNIYAGDNRSMMVSNCLFRVGGAAILLSIKPGDRRRSKYELVHTVRTHTGADDFSFRCVQQGDDENGKTGVSLSKDITDVAGRTVKKNIATWGPLILPLSEKLLFFVTFMGKKLFKDKIKHYYVPDFKLAIDHFCIHAGGRAVIDVLEKNLALAPIDVEASRSTLHRFGNTSSSSIWYELAYIEAKGRMKKGNKVWQIALGSGFK

SEQ ID NO: 18741 - protein, 168 aa, Brassica oleracea
FRCVQQGDDENGKTGVSLSKDITDVAGRTVKKHIATLGPLILPLSEKLLFSVTFMGKKLFKDKIKHYYVPDFKLAIDHFCIHAGGKAVIDVLEKNLGLAPIDVEASRSTLHRFGNTSSSSIWYELAYIEAKGRMKKGNKVWQIALGSGFKCNSAVWVALNNVKASTNS

SEQ ID NO: 18742 - protein, 496 aa, Glycine max
MPPILPDFSNSVKLKYVKLGYQYLVNHILTLTLIPMMIAIFMEILRLGPEEILNLWHSLHLDLVQILCSAFLIIFIATVYFMSKPRTIYLVDYACFKPPVTCRVPFATFMEHSRLILKDNPKSVEFQMRILERSGLGEETCLPPAIHYIPPKPTMEAARGEAELVIFSAMDSLFNKTGLKPKDIDILIVNCSLFSPTPSLSAMVINKYKLRSNIKSFNLSGMGCSAGLISVDLARDLLQVHPNSNAVVVSTEIITPNYYQGKERAMLLPNCLFRMGGAAILLSNRTSERRRAKYRLVHVVRTHKGADDKAYRCVFEEEDREGKVGISLQKDLMAIAGEALKSNITTMGPLVLPASEQLLFLLTLIGRKIFNPKWKPYIPDFKQAFEHFCIHAGGRAVIDELQKNLQLSTEHVEASRMTLHRFGNTSSSSLWYELNYIESKGRMKKGDRVWQIAFGSGFKCNSAVWKCNRSIKTPVDGPWADCIDRYPVDIPEIVKL

SEQ ID NO: 18743 - protein, 595 aa, Oryza sativa (japonica cultivar-group)
MADRVFNQSSATIGAAGGYWSSYYCYKVSDQLSQSCGHEFAMLAKVKVKEEAAMAREQALLLTEIVNRGVEPSGPDAGSPTFSVRVRRRLPDFLQSVNLKYVRLGYHYLISHGVYLATIPVIVLVCGAEVGSLSRDELWRKVWGEATYDLATVLAFLAVLAFTISVYIMSRPRPVYLIDFACYKPADELKVSKAEFIDLARKSGKFDEDSLAFQSRLLAKSGIGDESYMPRCVFEPGTNCATMKEGRAEASAAMFAALDELFDKCRVRPKDVGVLVVNCSLFNPTPSLSAMIVNHYKMRGNILSYNLGGMGCSAGVIAVDLARDMLQASGAGLAVVVSTEAVSFTWYAGKRRSMLIPNAFFRAGCAAVLLSNRRRDFHRAKYQLEHIVRTHKGADDRSFRSVYQEEDEQRIKGLSISRDLVEVGGHALKTNITTLGPLVLPFSEQILFFAGVLFRHLFPSKTSAPPPPSADGDASAAAPYIPDFKRAFEHFCMHAASRDVLEHLQGNLGLRDGDLEASRAALHRFGNTSSSSIWYELAYLEAKGRVRRGDRVWQLAFGSGFKCNSAVWRAVRRVRRPARSPWLDCVEQYPARMNA

SEQ ID NO: 18744 - protein, 478 aa, Oryza sativa (japonica cultivar-group)
MLLLKAVYRVVVNNFLALAAAAVAAVLLRRPDELAARLRAVSSPLHAATAAVLAAGVARLVRARRARGVYLVEYGCFRPRPCYRAPFATCLEHAHLMPYLVDEESVAFAIRLLERSGLGDETCVPDAYHYMPPDRSLRASRDESELVIFSAVDDVFARSALTPADIDVLIVNCSIFTPTPVFADMVVNRYKLRAEVQNVNLSGMGCSAGLVSVGLAKNLLQVSPPGTNVLIVSTEILSSQYYVGTERAMLLPNCLFRMGAAAMILSNSPDHARFRLGRVVRTVTAARDSDYRCVFQEEDEQGNTGIRLSKDLATTAGHALKSNIAAFGPLVLPASEQLLVAISFLKRKLKQLSGHAGKVRLYRPDFRTAFEHFCIHAGGRGVIDEVQHGLGLSDDDVEASRMTLHRFGNTSSSSVLYELAYLEAKGRMKRGDRVWMISFGAGFDCNSVAWECVKPAPDADGPWVDCIHRYPVQLPEIA

SEQ ID NO: 18745 - protein, 521 aa, Simmondsia chinensis
MKAKTITNPEIQVSTTMTTTTTTATLPNFKSSINLHHVKLGYHYLISNALFLVFIPLLGLASAHLSSFSAHDLSLLFDLLRRNLLPVVVCSFLFVLLATLHFLTRPRNVYLVDFACYKPHPNLITSHEMFMDRTSRAGSFSKENIEFQRKILERAGMGRETYVPKSVTKVPPEPSIAAARAEAEEVMYGAIDEVLEKTGVKPKQIGILVVNCSLFNPTPSLSSMIVNHYKLRGNILSYNLGGMGCSAGLISIDLAKDLLQVYRNTYVLVVSTENMTLNWYWGNDRSMLITNCLFRMGGAAIILSNRWRDRRRSKYQLLHTVRTHKGADDKSYRCVLQQEDENNKVGVALSKDLMAVAGEALKANITTLGPLVLPMSEQLLFFATLVARKVFKMTNVKPYIPDFKLAAKHFCIHAGGKAVLDELETNLELTPWHLEPSRMTLYRFGNTSSSSLWYELAYAEAKGRIRKGDRTWMIGFGSGFKCNSVVWRALRSVNPAREKNPWMDEIENFPVHVPKIAPIAS

SEQ ID NO: 18746 - protein, 503 aa, Tropaeolum majus
MSGTKATSVSVPLPDFKQSVNLKYVKLGYHYSITHAMYLFLTPLLLIMSAQISTFSIQDFHHLYNHLILHNLSSLILCIALLLFVLTLYFLTRPTPVYLLNFSCYKPDAIHKCDRRRFMDTIRGMGTYTEENIEFQRKVLERSGIGESSYLPPTVFKIPPRVYDAEERAEAEMLMFGAVDGLFEKISVKPNQIGVLVVNCGLFNPIPSLSSMIVNRYKMRGNVFSYNLGGMGCSAGVISIDLAKDLLQVRPNSYALVVSLECISKNLYLGEQRSMLVSNCLFRMGGAAILLSNKMSDRWRSKYRLVHTVRTHKGTEDNCFSCVTRKEDSDGKIGISLSKNLMAVAGDALKTNITTLGPLVLPMSEQLLFFATLVGKKVFKMKLQPYIPDFKLAFEHFCIHAGGRAVLDELEKNLKLSSWHMEPSRMSLYRFGNTSSSSLWYELAYSEAKGRIKKGDRVWQIAFGSGFKCNSAVWKALRNVNPAEEKNPWMDEIHLFPVEVPLN

SEQ ID NO: 18747 - protein, 532 aa, Sorghum bicolor
MSIKSETNERSSTIQSAGHRICSIVKLCYQHLMLAVSYALYLFLAPIILATLVLHLSRHTSADDDLIVSARSTLTANLPFTVVVVAAAATAVYLMRRPRAVYLLDLACYKPGAEHAVTRETFMRLVVGYGTFSDDSLAFQRKILERSGLGQGTYLPKALTSSPPNPCMAEARREAEAVMFGAVDQLLAKTGVRAGDIGIVVVNSGLFSPTPSLSAMIVHHYKLRRDVSSYNLAGMGCSASLISVDLAKQLLQVQRNTYALVVSLEIMAASAYVGNTRSMLVPNCIFRMGGAAVLLTNHGTERRRAKYQLLHTVRTHQGADDRAYRCVYQEEDESGHVGVALSKDLMSVAAEALKTNITTLGPRVLPMSEKMKMMLVGGKAAVVQVLGVQQQGQGGSRSRPYIPDLTTAFEHFCIHAGGRAVLDTVERSLDLSAWHMEPSRMTLYRWGNTSSSSLWYELAYTEAKGRVRRGHRVCQIAFGSGFKCNSAVWRALRTIDPAKESAAAGNPWVEEIHRFPVEVPQVERVDVAAMAS

SEQ ID NO: 18748 - protein, 555 aa, Triticum aestivum
  unsure (1)..(555): unsure at all Xaa locations
MSMEDSTPPAGAGASAGEGASSPSPSRXGCXDFLQSVRLKYVKLGYHYLITHGMYLLLTPLIVLIAVHLSTLSPGDVADLWTHLRFNLLSVIACSTLLVFLSTVYFLTRPRSVYLVDFGCYKPGPERRCSRETFMRCSKLTGNFTEANLDFQRKIXLAPARAAEDTYIPPALVTVPPNPSMELARQEAQVCMFGAIDNMLAKTGVKPKDIGILVVNCSLFNPTPSLSAMVVNHYKLRGNIVSYNLGGMGCSAGLLSIDLAKDLLQVHPNSYAMVVSTENITLNWYFGNNRSMLVSNCLFRMGCAAILLSNKRSDRRRSKYELIHTVRTHKGCNDKCFSCVTQEEDEAGKVGVALSKDLMAVAGDALKTNITTLGPLVLPFSEQLLFMVTLVGKKLFKMKIKPYIPDFKLAFEHFCIHAGGRAVLDEIEKNMDLTDWHMEPSRMTLFRFGNTSSSSLWYELAYSEAKGRIRRRDRIWQIAFGSGFKCNSAVWKALRSVNPAKEQNNPWMDEIDTFPVVVPKVSKVVEXLCLFSNIPPGTASEQILPLNSTVCNLFG

SEQ ID NO: 18749 - protein, 276 aa, Triticum aestivum
  unsure (1)..(276): unsure at all Xaa locations
XHASGAGLISIDLARDMLQVHPNSNALVISTEIITPNFYHGSRRDMLLPNCLFRMGAAAILLSNRRREARRAKYRLVHVVRTHKGADDRAYRCVYEEEDDEGHSGISLSKELMAIAGEALKSNITTMGPLVLPMSEQLLFFFRLVGRKVINNKWKPYIPDFKLAFEHFCIHAGGRAVIDELHKNLELSPRHVEASRMTLHRFGNTSSSSLWYELAYIEAKGRMRKGDRVWQIGFGSGFKCNSAVWKCLRTVKTPTDGPWDDCIQRYPVHIPEVVKL

SEQ ID NO: 18750 - protein, 291 aa, Triticum aestivum
  unsure (1)..(291): unsure at all Xaa locations
XRADIAAHGRSRXGHPSGAGLLSIHLARDMRQLHPNSNALVISTEIVTPRLYHGSRRHLLLPNCLFRMGAAAVLLSNRRREGGRAKYRLVHVVRTHKGADDRAYRCVYEXEEDDEGHSGISRSNALMAIPGEALRSSITTMSPLVLAMSEPQLLVFRLVGRKVFNNKWKPYIPDIKLAXFEHFCIHAGRRPVIEELHHGLKMSPAYVXPSRMTLHRFGNTSSSSLWYELAYIEAKGRMRKGDRVWQIGFGSGFKCNSAVWKCLRTVKTPTDGPWDDCIQRYPVHIPEVVKL

SEQ ID NO: 18751 - protein, 449 aa, Triticum aestivum
  unsure (1)..(449): unsure at all Xaa locations
FLPGQPLPTPAHPSHHARTPARTRSPGPTALRPHQPRHPRNPAXIHPGQTLPNPDQPHPPRTQASCRPGHLKLGYHIVVSNAVYVLLAPFAAALALRASRLTPSDLAAARAYLLANLHLAVSLVSVATALATVYLARRPRAVYLLDFACYKPGPDHVVTRETFMEQSNKAGVFTDDNLAFQRKILERSGLGQGTYFPAAVLNSPPNPCMAEARREAEAVMFGAIDSLLAKTGVRARDIGVVVVNCSLFNPTPSLSAMVVNHYKLRGNVASYNLGGMGCSAGLISIDLAKQLLQVHRNSYALVVSMENITLNWYWGNDRSMLMSNCLFRMGGAAILLSNRAADKRRSKYQLMHTVRTHHGADDRAYRCVFQEEDXXAGRVGVALSKDLMAVAGEALKTNITTLGPLVLPMSEQILFLSSLIGKKIFGLKXXKPYIPDFKMAFEHFCIHAX

SEQ ID NO: 18752 - protein, 297 aa, Triticum aestivum
  unsure (1)..(297): unsure at all Xaa locations
XNHYGLRGNVVSYNLGGMGCSAGLLSVDLAKDLLQVHPSSYALVVSMENITLNWYFGNDRSMLVSNCLFRMGGAAILLSNKRADRRRSKYELVHTVRTHKGADDKCFGCVTQQEDGAGKVGVSLSKDLMAVAGDALKTNITTLGPLVLPLSEQLLFMATLVAKKAFKVKIKPYIPDFKLAFEHFCIHAGGRAVLDELEKNLGLTEWHMEPSRMTLYRFGNTSSSSLWYELAYSEAKGRIGRRDRVWQIAFGSGFKCNSAVWRALRTVAPEAEASNPWADEIDRFPVEVPRVSRVGNA

SEQ ID NO: 18753 - protein, 507 aa, Zea mays
AGRAGGKQQQAGDMPSGSAFSGSVNLKHVKLGYQYLVNHFLTLLLVPVMAATALELARLGPGELLSLWRSLELDLVHILCSAFLVVFVGTVYVMSRPRPVYLVDYACYKPPASCRVPFATFMEHTRLISDDDKSVRFQTRILERSGLGEDTCLPPANHYIPPNPSMEASRAEAQLVIFSAIDDLVRRTGLKPKDIDILVVNCSLFSPTPSLSAMIINKYKLRSNIRSFNLSGMGCSAGLISIDLARDMLQVHPNSNALVVSTEIITPNFYQGSRRDMLLPNCLFRMGAAAILLSNRRREARRAKYRLVHVVRTHKGSDDRAYRCVYEEEDEQGFSGISLSKELMAIAGDALKSNITTIGPLVLPMSEQLLFFFRLVGRKLVNKGWRPYIPDFKLAFEHFCIHAGGRAVIDELQKNLQLSPRHVEASRMTLHRFGNTSSSSLWYELAYIEAKGRMRRGDRVWQIGFGSGFKCNSAVWKCLRSIKTPTNGPWDDCIHRYPVDVPEVVKL

SEQ ID NO: 18754 - protein, 504 aa, Zea mays
AGGKQQQAGDMPSGSAFSGSVNLKHVKLGYQYLVNHFLTLLLVPVMAATALELARLGPGELLSLWRSLELDLVHILCSAFLVVFVGTVYVMSRPRPVYLVDYACYKPPASCRVPFATFMEHTRLISDDDKSVRFQTRILERSGLGEDTCLPPANHYIPPNPSMEASRAEAQLVIFSAIDDLVRRTGLKPKDIDILVVNCSLFSPTPSLSAMIINKYKLRSNIRSFNLSGMGCSAGLISIDLARDMLQVHPNSNALVVSTEIITPNFYQGSRRDMLLPNCLFRMGAAAILLSNRRREARRAKYRLVHVVRTHKGSDDRAYRCVYEEEDEQGFSGISLSKELMAIAGDALKSNITTIGPLVLPMSEQLLFFFRLVGRKLVNKGWRPYIPDFKLAFEHFCIHAGGRAVIDELQKNLQLSPRHVEASRMTLHRFGNTSSSSLWYELAYIEAKGRMRRGDRVWQIGFGSGFKCNSAVWKCLRSIKTPTNGPWDDCIHRYPVDVPEVVKL

SEQ ID NO: 18755 - protein, 504 aa, Zea mays; identical to SEQ ID NO: 18754

SEQ ID NO: 18756 - protein, 558 aa, Zea mays
  unsure (1)..(558): unsure at all Xaa locations
YPPGRPGQTNTSTNTAPQEQDSRSSRRARAGTLVWLQRQDAAESRIAAAAGERGPAVRHHADRRXVFSGSVNLKHVKLGYRSAGPPPXTLLLVPVMAATALELARLGPVLSLWRSLELDLVHILCSAFVAVFAGTVYAMSRPRPVYLVDYACYKPPGSCRVPFATFMEHTRLISXXDDRSVRFQTRILERSGLGEDTCLPPANHFIPPNPSMEASRAEAQLVVFSAIDDLLRRTGTKPKDVDILVVNCSLFSPTPSLSAMVVNRYKLRSNVRSFNLXSGMGCSAGLISIDLARDMLQVHPNSNALVVSTEIITPNFYRGSRRDMLLPNCLXFRMGAAAILLSNRRREAPRAKYVLRHVVRTHKGADDRAFNCVYQEQDGEGKTGVSLSKDLMAIAGGALKTNITTLGPLVLPVSEQLLFFATLVAKKLLVSAKTKPYIPDFKLAFEHFCIHAGGRAVIDELEKNLQLSPAHVEASRMTLHRFGNTSSSSIWYELAYMEAKGRVRRGHRVWQIAFGSGFKCNSAVWHALRNVKPSPDSPWEDCIDRYPVELVDGFPAHQ

SEQ ID NO: 18757 - protein, 440 aa, Zea mays
  unsure (1)..(440): unsure at all Xaa locations
PQQQASASRHAGLVAAPRRCREQDSSSSRRARAGSPAPCRPAAXFSGSVNLKHVKLGYRYLLDHLLTLLLVPVMAATALELARLGPGELLSLWRSLELDLVHILCSAFVAVFAGTVYAMSRPRPVYLVDYACYKPPGSCRVPFATFMEHTRLISDDDRSVRFQTRILERSGLGEDTCLPPANHFIPPNPSMEASRAEAQLVVFSAIDDLLRRTGTKPKDVDILVVNCSLFSPTPSLSAMVVNRYKLRSNVRSFNLXSGMGCSAGLISIDLARDMLQVHPNSNALVVSTEIITPNFYRGSRRDMLLPNCLXFRMGAAAILLSNRRREAPRAKYRLVHVVRTHKGADDRAYRCVYQEEDQQGFSGISLSKXLLAIAGDALKSNITTIGPLVLPMSEQLLFFFRLVGRKLLNGGWKPYIPDFKLAFDHFCIHAGGRAVIDELX

SEQ ID NO: 18758 - protein, 496 aa, Lesquerella fendleri
MTSLNIKLLYHYILTNLFNLCLFPLTAFLAGKASHLTKSDLLMFLSHLQDNLITVIVLFTFTIFCLVLYIVTKPKQIYLVDYSCYLPPDHLKVSISSVMDIFYELRKVDPLCEVGCDDSSLEFMRKVLERSGLGDETYVPLGLHQVPPQKTFAAIKDETEQVIKGALENLFENTKVNPREIGILVINSSMFNPTPSLSAMVINTFKLRSNIKSFNLGGMGCSAGVIAIDLAKDLLHVHKNTYALVISTENITITAYAGENRSMNVSNCLFRIGGAAILLSNKPRDKRRSKYKLAHTVRTHTGADDMSYRCVQQEEDEMGKVGVRLSKDITTVAGTAVKKNISTLGPLILPLSEKLLYFVSFIAKKLLKEKIKNYYVPDLKLAINHFCIHAGGRGVLDVLEKNLRLSPIDVEASRSTLHRFGNTSSSSIWYELAYIEAKGRMKKGDKAWQIALGSGFKCNSAVWVALRNVKASANSPWEHCIDRYPVPDTCVENGKS

SEQ ID NO: 18759 - protein, 469 aa, Mus musculus
MAEACEPTRPSEDEDEEREPLLPRVAWAQPRRVAPGSAVRMQADEGADVLREPATDEPPAVSGEGSISASLSTELDRTRTTSSETNTFLEDPEFADIVLKAEQAIEIGVFPERISQGSSGSYFVKDSKRNIIGVFKPKSEEPYGQLNPKWTKYVHKVCCPCCFGRGCLLPNQGYLSEAGAYLVDVKLNLGIVPKTKVVLLVSETFNYSAIDRAKSRGKKYALEKVPKVGRKFHRIGLPPKVGSFQLFVKDYKEAEYWLRRFEAEPLPENIRKQFQSQFEKLVILDYIIRNTDRGNDNWLVKYDEMKYAKKIESEESNWIDNKQLLIKIAAIDNGLAFPFKHPDEWRAYPFHWAWLPQAKVPFSEETRNLILPYISDMNFVQDLCEDLYELFKTDKGFDRAAFENQMSVMRGQILNLTQALRDGKSPMQLAQMPCVIVECSKSGSQGRVVHLGSSFTQTVHCRKPFFSSW

SEQ ID NO: 18760 - protein, 469 aa, Mus musculus
MAEACEPTRPSEDEDEEREPLLPRVAWAQPRRVAPGSAVRMQADEGADVLREPATDEPPAVSGEGSISASLSTELDRTRTTSSETNTFLEDPEFADIVLKAEQAIEIGVFPERISQGSSGSYFVKDSKRNIIGVFKPKSEEPYGQLNPKWTKYVHKVCCPCCFGRGCLLPNQGYLSEAGAYLVDVKLNLGIVPKTKVVWLVSETFNYSAIDRAKSRGKKYALEKVPKVGRKFHRIGLPPKVGSFQLFVKDYKEAEYWLRRFEAEPLPENIRKQFQSQFEKLVILDYIIRNTDRGNDNWLVKYDEMKYAKKIESEESNWIDNKQLLIKIAAIDNGLAFPFKHPDEWRAYPFHWAWLPQAKVPFSEETRNLILPYISDMNFVQDLCEDLYELFKTDKGFDRAAFENQMSVMRGQILNLTQALRDGKSPMQLAQMPCVIVECSKSGSQGRVVHLGSSFTQTVHCRKPFFSSW

SEQ ID NO: 18761 - protein, 953 aa, Plasmodium falciparum 3D7
MGSSSLPMSQQMYFSTHNALRINEENDVINTLFYEINGSRHISLLIFPFYDVQMLKRLLIKKLNLPGGVKVNDIIIFYKGIKLPNYRIISTYIDNNNNRNDKKKKKKKINKLYWAIKDTNPNASIRVIDSTKNYPEFFEDILNEIKLSFKKNIAPKLTMDGTGGTYLLYNAKKKICSVFKPLDEEAFAPFNPRGYEGKMYQEGFRAGVLSGEGASREIAAYLLDNCYNNFSNVPCTIMVEACNPHFNNKSKLKYVDKETNLKWKCGSLQEFIDSRESVGNYDYKQFSIRDIHKIAILDIRVMNLDRNDGNILVSPLKTLKDSCNQFVYRNNKFTSSNNEDMLKRIITIDKKPSRYTLIPIDHGLILPHIMDVAEIDLVWFEWPQIKIPLDDEELEVVFSFDPDKDAEKVRNKLLIREDCIRTMRVCTRLLQIGAKMHLTLYEIAKISTRKNIDEESILEHLVKDSITQAYQMMDYTSLMSTNRLGYILDLAEIKMNKKKKNSKIKTVEINDDKIINQLYEKNQGNLFFNEKGETTGGEGSLKSPPSIKKDNDIIKSNIYNKNVSNNNLIKDVDDMISINSSSNTTNSIKNVSLINESYKNIYSNNVIKNNNSDFFNKNIENNIDLMNITNQVNNINLCLNIKKEDNETNGEENDMSLKQNNLKHTHLNSRSDFSKECENTTESKNITMKLKKENFSNNSPDNLLDKPLDTLLNEPLDHFLGKPLNKFVDKPLDNMLENISGEVSDMSNISNNLSNVSDKIKVDTSEYKDEALFCNSPNDDTKVKKKKKKKDSDLDGYPKDQKNYTNCDDGDKINSDDNGINKENEMINQVKNNLNDDEEEEEEEEEEEEEENDDYDVTFKKPSGTIKRISENTGTAYRSMEMNKINSIWMIRDKNNKIINVKWENKIFEKLFFETFENYIKKYINDYHRDWRNYPYNGSKITTTKHAYLNNIK

SEQ ID NO: 18762 - protein, 650 aa, Arabidopsis thaliana
MSRNLDSPVQTQMAVAVFKTPLTGASKMEGKQHHKHQHLQRQSSGRRVFVQTETGCVLGMELDRSDNVHTVKRRLQIALNFPTEESSLTYGDMVLTNDLSAVRNDSPLLLKRNFMHRSSSTPCLSPTGRDLQQKDRSGPIEILGHSDCFSIVKHMVKDIVKAMKMGVEPLPVHSGLGGAYYFRNKRGESVAIVKPTDEEPFAPNNPKGFVGKALGQPGLKSSVRVGETGFREVAAYLLDYGRFANVPPTALVKITHSVFNVNDGVKGNKPREKKLVSKIASFQKFVAHDFDASDHGTSSFPVTSVHRIGILDIRIFNTDRHGGNLLVKKLDGVGMFGQVELIPIDHGLCLPETLEDPYFEWIHWPQASLPFSDEEVDYIQSLDPVKDCDMLRRELPMIREACLRVLVLCTIFLKEASAYGLCLAEIGEMMTREFRPGEEEPSELEVVCIEAKRSVTERDVFSPRSDVVGEAEFQFDLDCDDLESVYSSKIQLTDDYFTKNPFSNGRSSLGKLEESIKEEEEDEEEEEDKTENTVPMIIMKDSFFSSAAFHDKAPSLSKLSTSMKNTHLSDTTRKNPKPLTRGKSENTSSGHKSANEQLPVSASFVKVADMKEDEWVLFLERFQELLGPAFAKRKTATLSKRQRLGTSCQF

SEQ ID NO: 18763 - protein, 638 aa, Arabidopsis thaliana
MAVAVFKTPLTGASKMEGKQHHKHQHLQRQSSGRRVFVQTETGCVLGMELDRSDNVHTVKRRLQIALNFPTEESSLTYGDMVLTNDLSAVRNDSPLLLKRNFMHRSSSTPCLSPTGRDLQQKDRSGPIEILGHSDCFSIVKHMVKDIVKAMKMGVEPLPVHSGLGGAYYFRNKRGESVAIVKPTDEEPFAPNNPKGFVGKALGQPGLKSSVRVGETGFREVAAYLLDYGRFANVPPTALVKITHSVFNVNDGVKGNKPREKKLVSKIASFQKFVAHDFDASDHGTSSFPVTSVHRIGILDIRIFNTDRHGGNLLVKKLDGVGMFGQVELIPIDHGLCLPETLEDPYFEWIHWPQASLPFSDEEVDYIQSLDPVKDCDMLRRELPMIREACLRVLVLCTIFLKEASAYGLCLAEIGEMMTREFRPGEEEPSELEVVCIEAKRSVTERDVFSPRSDVVGEAEFQFDLDCDDLESVYSSKIQLTDDYFTKNPFSNGRSSLGKLEESIKEEEEDEEEEEDKTENTVPMIIMKDSFFSSAAFHDKAPSLSKLSTSMKNTHLSDTTRKNPKPLTRGKSENTSSGHKSANEQLPVSASFVKVADMKEDEWVLFLERFQELLGPAFAKRKTATLSKRQRLGTSCQF

SEQ ID NO: 18764 - protein, 630 aa, Arabidopsis thaliana
MSRKLDSPIKTQMAVALVKSPLNGEFREFNKVGMKTPVGRRRVFVQTETGCVLGLELDRSDNAHTVKRKLQVALNFPIEESSLTFGDLVLKNDLTAVRSDSPLLLTRNNFHRSSSTPCLSPMRADLQQRRDESSPIEILGNSVSFSFVRQMAKDITKAVKKGIDPVAVNSGLGGAYYFKNSRGESVAIVKPTDEEPYAPNNPKGFVGKALGQPGLKRSVRVGETGYREVAAYLLDKEHFANVPPTALVKITHSIFNVNDGVKASKPMEKMLVSKIASLQQFIPHDYDASEHGTSNFPVSAVHRIGILDIRILNTDRHSGNLLVKKLDGDGMFGQVELVPIDHGLCLPETLEDPYFEWIHWPQASIPFSEDELKYIANLDPLGDCEMLRRELPMVREASLRVLVLCTIFLKEAAANGLCLAEIGEMMTREVRPGDEEPSEIEVVCLEAMSLIGEKDAESPRSDLGNDIEFQFDIDCEEVTDCTKKLALPLGLTFGNARGQLSKVEETTEDGEEEEEEDREEEENDRADLEKMPTIKLSMSLKSTLLGEKSQKYQKHPGARVESAYASSAHRSADEQIPSSTSFVKLSDMSEEEWTIFLEKYQELLYPAIEKRKSITLGQKQRQRLGTSCQF

SEQ ID NO: 18765 - protein, 622 aa, Arabidopsis thaliana
MAMAVFKAPLKGEFHGARKMEGKQYKHHLLQQQSTGRRRVFVQTDTGCVLGVELDRNDNVHTVKKRLQIAFNFPTEESSLTFGDMVLKNDLSAVRNDSPLLLKRNLMHRSSSTPCLSPTGNDLQRKDRSGPIEILSHSPCFLSLKQTANDIVKAMKMGVEPIPVNGGLGGAYYFRDEKGQSVAIVKPTDEEPFAPNNPKGFVGKALGQPGLKPSVRVGETGFREVAAYLLDYDHFANVPPTALVKITHSVFNVNDGMDGNKSREKKKLVSSKIASFQKFVPHDFDASDHGTSSFPVASVHRIGILDIRILNTDRHGGNLLVKKLDDGGVGRFGQVELIPIDHGLCLPETLEDPYFEWIHWPQASIPFSEEELDYIQSLDPVKDCEMLRRELPMIREACLRVLVLCTVFLKEAAVFGLCLAEIGEMMTREFRAGEEEPSELEMLCIEAKRLTTEQDVLSPKSDGEGETEFQFDIDYNELDSVYGSETETDEFFAKNPFSNGRSSLGELKESIAEEEEDDEEEAKLTLSLSKLSTSMKNNLSNTMGSGYLKPPKDNQTDKALVSHKSANVQLPLSVNFVKLADMKEVEWVVFLERFQELLYSAFAERKTMTLRNTQRLGTSCKF

SEQ ID NO: 18766 - protein, 620 aa, Arabidopsis thaliana
MAVFKAPLKGEFHGARKMEGKQYKHHLLQQQSTGRRRVFVQTDTGCVLGVELDRNDNVHTVKKRLQIAFNFPTEESSLTFGDMVLKNDLSAVRNDSPLLLKRNLMHRSSSTPCLSPTGNDLQRKDRSGPIEILSHSPCFLSLKQTANDIVKAMKMGVEPIPVNGGLGGAYYFRDEKGQSVAIVKPTDEEPFAPNNPKGFVGKALGQPGLKPSVRVGETGFREVAAYLLDYDHFANVPPTALVKITHSVFNVNDGMDGNKSREKKKLVSSKIASFQKFVPHDFDASDHGTSSFPVASVHRIGILDIRILNTDRHGGNLLVKKLDDGGVGRFGQVELIPIDHGLCLPETLEDPYFEWIHWPQASIPFSEEELDYIQSLDPVKDCEMLRRELPMIREACLRVLVLCTVFLKEAAVFGLCLAEIGEMMTREFRAGEEEPSELEMLCIEAKRLTTEQDVLSPKSDGEGETEFQFDIDYNELDSVYGSETETDEFFAKNPFSNGRSSLGELKESIAEEEEDDEEEAKLTLSLSKLSTSMKNNLSNTMGSGYLKPPKDNQTDKALVSHKSANVQLPLSVNFVKLADMKEVEWVVFLERFQELLYSAFAERKTMTLRNTQRLGTSCKF

SEQ ID NO: 18767 - protein, 561 aa, Arabidopsis thaliana
MNCLATTIIITCKPTLISDMAVAIDPFSDKFPYFNRSSQRCRLQSLTNLDFNFLAQSFNHTFEDDNIHRSVSSPCFSIAASANMEEDLKATTAPRIEILGGQRVPTVRALVAEVTMAMVSGAQPLLLPSGMGGAYLLQTGKGHNIAVAKPVDEEPLAFNNPKKSGNLMLGQPGMKHSIPVGETGIRELAAYLLDYQGFSGVPPTALVSISHVPFHVSDAFSFSSMPYKVASLQRFVGHDFDAGELGPGSFTATSVHRIGILDVRLLNLDRHAGNMLVKRCDKKEAYNRLGTAELVPIDHGLCLPECLDDPYFEWLNWPQALVPFSDTELDYISNLDPFKDAELLRTELHSLPESAIRVLVVCTVFLKQAAAAGLCLAEIGEKMTRDFSKGEESFSLLETLCTKAKASVFGKTSEDSDYSHEGNEVNTELQCGMFKFDGGDTPCEAEISEVFHVSKPPLVPRGPRANTIPNDVTASMSSSQNQRITHQEKSAKEKKRGGKQERCTVRSKSPPISPNHDESKGVSFVDMTTVEWDTFLQSFQTLLQDALSKGSTPRLGCSCEI

SEQ ID NO: 18768 - protein, 560 aa, Arabidopsis thaliana
MNCLATTIIITCKPTLISDMAVAIDPFSDKFPYFNRSSQRCRLQSLTNLDFNFLAQSFNHTFEDDNIHRSVSSPCFSIAASANMEEDLKATTAPRIEILGGQRVPTVRALVAEVTMAMVSGAQPLLLPSGMGGAYLLQTGKGHNIAVAKPVDEEPLAFNNPKKSGNLMLGQPGMKHSIPVGETGIRELAAYLLDYQGFSGVPPTALVSISHVPFHVSDAFSFSSMPYKVASSQRFVGHDFDAGELGPGSFTATSVHRIGILDVRLLNLDRHAGNMLVKRCDKKEAYNRLGTAELVPIDHGLCLPECLDDPYFEWLNWPQALVPFSDTELDYISNLDPFKDAELLRTELHSLPESAIKVLVVCTVFLKQAAAAGLCLAEIGEKMTRDFSKGEESFSLLETLCTKAKASVFGKTSEDSDYSHEGNEVNTELQCGMFKFDGGDTPCEAEISEVFHVSKPPLVPRGPRANTIPNDVTASMSSSQNQRITHQEKSAKEKKRGGKQERCTVRSKSPPISPNHESKGVSFVDMTTVEWDTFLQSFQTLLQDALSKGSTPRLGCSCEI

SEQ ID NO: 18769 - protein, 533 aa, Arabidopsis thaliana
MAVALDPLTDRFSQFSRSSQRCRLQSLTNLDFNFLGFNTKQTNLSASSHSLNNRSVSTPCFSISGSNLDGSATPHIEILGGQRVPTVRSLVAEVTIAIVSGAQPLLLPSGLGGAYLLQTEKGNNIAVAKPVDEEPLAFNNPKGSGGLTLGQPGMKRSIRVGESGIRELAAYLLDHQGFSSVPPTALVRISHVPFHDRGSDHAAYKVASLQRFVGHDFDAGELGPGSFTVVSVHRIGILDVRVLNLDRHAGNMLVKKIHDQDETTCSNGVGAAELVPIDHGLCLPECLDDPYFEWLNWPQASVPFTDIELQYISNLDPFKDAELLRTELDSIQESSLRVLIVCTIFLKEAAAAGLSLAEIGEKMTRDICRGEESSSVLEILCNKAKASAVSGSDDDDDYSSEWNEVEAELECGIFQFDDEVECKELPDMLQVPIFTRVPSIAANLSALMRCPPNQWISTYDTNIEEERRDRSIVRSKSHPICVNYDEKEGVYFGDMSGDEWEMFLHSFQMLLPEALEGSTSKGPKPRFGSSCKF

SEQ ID NO: 18770 - protein, 639 aa, Glycine max
  unsure (1)..(639): unsure at all Xaa locations
MSRKLDSPVQTQMAVAVIRSSPLGREYHGKQPAGRRRVFVQTEKGCVLGMDLDRGDNVHTVKRRLQLALNVPVDESYLTFGDMVFKNDLSAVRNDTPLLLTRGKNNLMPRSSSTPCLSPKGRDIDKSGPIEILGQSNRLDGIKHMIKDIMKAIKMGIEPIPVHSGLGGAYYFRNSKGESVAIVKPTDEEPFAPNNPKGFVGKALGQPGLKRSVRVGETGFREVAAYLLDYDHFANVPPTALVKITHSVFNVNDGVNGNNLWRKRLFSKIASFQQFIPHDFDASDHGTSSFPVASVHRIGILDIRILNTDRHAGNLLVRKLDGIGSFGQVELIPIDHGLCLPETLEDPYFEWIHWPQASIPFSEDELAYIEDLDPYQDCEMLRRELPMIREACLRVLVLCTIFLKEAAAYGLCLAEIGEMMTREFRRGEEEPSELEVVCLEARKIVVERDREEPPGAEMRDDEFLFDIDYYDEFGSDFTPKMAIDDPLTRATFQPALGNGHARNPLSKLDECIEEEEEEAEGESPXXGFVTSSTEEKIPSVSELSVSLKNTMLDGKNQNQQKYGGKVDNGHFANTSSGHKSANEQLPPSISFVDVTEMTEDEWSNFLEKFQELLYPAFAKRKSITLGQRQRQRLGTSCQF

SEQ ID NO: 18771 - protein, 640 aa, Glycine max
  unsure (1)..(640): unsure at all Xaa locations
MSRKLDSPVQTQMAVAVIRSSPLGREYHGKQPAGRRRVFVQTEKGCVLGMDLDRGDNVHTVKRRLQLALNVPVDESYLTFGDMVFKNDLSAVRNDTPLLLTRGKNTHMPRSSSTPCLSPKGRDIDKSGPIEILGQSNRLDGIKHMIKDIMKAIKMGIEPIPVHSGLGGAYYFRNSKGDSVAIVKPTDEEPFAPNNPKGFVGKALGQPGLKRSVRVGETGFREVAAYLLDYDHFANVPPTALVKITHSVFNVNDGVNGNNLWRKRLFSKIASFQQFIPHDFDASDHGTSSFPVASVHRIGILDIRILNTDRHAGNLLVRKLDGIGSFGQVELIPIDHGLCLPETLEDPYFEWIHWPQASIPFSEDELAYIEDLDPYHDCEMLRRELPMIREACLRVLVLCTIFLKEAAAYGLCLAEIGEMMTREFRRGEEEPSELEVVCLEARKIVVERDREELSPRSEMXXDDEFLFDIDYYDEFGSDFTPKMAIDDPLTRATFLPALGNGQSRNPLSKLDECIEEEEEEEEEAEGESPQGFVTSAAEEKIPSVSELSVSLKNTMLDGKNQNQQKYLENGHFANTSSGHKSANEQLPPSISFVDVTEMTEDEWPLFLEKFQELLYPAFAKRKSITLGQRQRQRLGTSCQF

SEQ ID NO: 18772 - protein, 641 aa, Glycine max
  unsure (1)..(641): unsure at all Xaa locations
MYPDLDTCLHDEMAVTTFKVPXXSECCGNKKMERKPSGRRRVFVQTETGCVLGMELDRRDNAHTVKRKLQVAFNVPTEASSLICGDMVLKNDLSVVRNDSPLLLTRTFLHRSSSTPCLSPTGRDLQQRDQSGPIEVIGCSDMFSGTKQLVEDIMKAIKVGIEPIPIQSGLGGAYYFRNSNGENAAIVKPTDEEPYAPNNPKGFVGKALGQPGLKRSVRVGETGLREVAAYLLDHDHFANVPSTALVKVTHSIFNINDRVNGSMHHNKKQISKIASLQQFIPHDFDASDHGTSSFPVAAVHRIGILDVRILNTDRHAGNLLVRKLEGFGRFDQVELFPIDHGLCLPETLEDPYFEWIYWPQASIPFSDDELDYIYHLDPFRDSEMLRMELPMIREACLRVLVLCTIFLKEAAAFGLCLAEIGDMMSREFQGLHEEPSELELICIEAKKLLDQEELVSLGSXEVGDKDVTQFQLDCEDQDLDFTTNIEEKLTVMPPFQVGATNGIIRNTLSRLEESVMEDEAESEGELPXXVVTNXNGPVGNGVPNVSRLSVSLQNTRTGEKSRQQMGVKQKSGFLAGTSSGNTTVNELPASSSFVKLTDMDEERWNQFLENFQRLLIPDFVNYKRGNVSKKQRQRLGTSCQF

SEQ ID NO: 18773 - protein, 632 aa, Glycine max
  unsure (1)..(632): unsure at all Xaa locations
MYPDLDTCLHDEMAAATFKGPXXSECCGNGKMERKXXSGRRRVFVQTETGCVLGMELDRRDNAHTVKRKLQVAFNVPTEASSLICGDMVLKNDLSVVRNDSPLLLTRTFLHRSSSTPCLSPTGRDLLQRDQSGPIEVIGCSDMFSGTKQLVKDIMKAIKVGIEPIPIQSGLGGAYYFRNSNGENVAIVKPTDEEPYAPNNPKGFVGKALGQPGLKRSVRVGETGFREVAAYLLDHDHFANVPFTALVKVTHSIFNVNDRVNGSMHHNKKQISKIASLQQFIPHDFDASDHGTSSFPVAAVHRIGILDVRILNTDRHAGNLLVRKLEGFGRFDQVELFPIDHGLCLPETLEDPYFEWIYWPQASIPFSDDELDYIYHLDPFRDSEMLRMELPMIREACLRVLVLCTIFLKEAAAFGLCLAEIGDMMSREFQGLHEEPSELELICIEAKKLLDQEELFSYEAEVEDKDVIQFQLDCEDRDLDFTTNIEEKLTVMPPFQVGARNGNIRNTLSRLEESMMEDEAESEGELPVGGGEYNGPVLNGVPNVSKLSVSLQNTRTSEKSWQQMGVKQKSDXLAGTSSGNTTVNELPASSSFVKLTDMDEERWNQFLEXFPKLLIQIXYYNEECGAEQRQRX

SEQ ID NO: 18774 - protein, 630 aa, Glycine max
  unsure (1)..(630): unsure at all Xaa locations
MSRKLDSPVQTQMAVAVIRSSPLGREYHGKQPAGRRRVFVQTEKGCVLGMDLDRGESXGRISKGIXLLLPLKKKSHLFQNXXRVTEKYHVRWEKPXXISRNMEERWIMAILXNTSSGHKSANEQLPPSISFVDVTEMTEDEWSNFLEKFQELLYPAFAKRKSITLGQRQRQSLGTSCTVLKLSDMLVSXERTIGMKKNKGCGVKGMGEFWLKXSGCMRLGGVRGGKAYCLDYDHFANVPPTALVKITHSVFNVNDGVNGNNLWRKRLFSKIASFQQFIPHDFDASDHGTSSFPVASVHRIGILDIRILNTDRHAGNLLVRKLDGIGSFGQVELIPIDHGLCLPETLEDPYFEWIHWPQASIPFSEDELAYIEDLDPYHDCEMLRRELPMIREACLRVLVLCTIFLKEAAAYGLCLAEIGEMMTREFRRGEEEPSELEVVCLEARKIVVERDREELSPRSEMRDDEFLFDIDYYDEFGSDFTPKMAIDDPLTSGQSRNPLSKLDECIEEEEEEEEEAEGESPHTSAAEEKIPSVSELSVSLKNTMLDGKNQNQQKYSGGKVENGHSSSGHKSANEQLPPSISFVDVTEMTEDEWPLFLEKFQELLYPAFAKRKSITLGQRQRQRLGTSCQF

SEQ ID NO: 18775 - protein, 415 aa, Glycine max
KSRTSCVLEYARDAAAQVSGPAIATKCVPDVVDHDNGRMHHNKKQISKIASLQQFIPHDFDASDHGTSSFPVAAVHRIGILDVRILNTDRHAGNLLVRKLEGLGRFDQVELFPIDHGLCLPETLEDPYFEWIYWPQASIPFSDDELDYIYHLDPFRDSEMLRMELPMIREACLRVLVLCTIFLKEAAAFGLCLAEIGDMMSREFQGLDEEPSELELICIEAKKLLDHEELFSFEAEVGDKDVTQFQLDCEDQDLDFTTNIEEKLTVMPPFQVGARNGNIRNTLSRLEESMMEDEAESEGELPVGGGEYNGPVLNGVPNVSKLSVSLPNTRTSEKSRQQMGVTQKSDFLAGTSSGNTTVNELPASSSFVKLTDMDEERWNQFLENFQRLLIPDFVNYKRGNVSKKQRQRLGTSCQF

SEQ ID NO: 18776 - protein, 341 aa, Glycine max
  unsure (1)..(341): unsure at all Xaa locations
XSIFFLNSFGFSFQASNIHRSFSTPCLPLTTMLGGEDFTSSSHPRVEIVGGSEAPPVHALVVEVAIAMASGVHPIPLPSGLGGAYVFPNQNGNNIAVAKPVDEEPLALNNPKGLGGQMLGQPGLKKSIRIGETGIRELAAYLLDHGGXLAGVPPPALVKFSHAAFFGAASSCSSNHMTKIAYPLRFVIHGFDAALLGPSFFPVSSVHQIGILDIRIMNLDRHAGNMLVMKHDHNNSGYVDGVADLVPIDHGFCLPEWLDDPYFEWLHWPQASIPFSEYEIDYISKLDPFRDAEALRNELPSSLRESSIRVLIVCTILLKQAAAAGLCLAEIGQMMTRKFCX

SEQ ID NO: 18777 - protein, 492 aa, Oryza sativa (japonica cultivar-group)
MAIAVGHCRELSPPGGGVRGRHCRLRSVTQLDCPVFDDHDLDLDRRERNGHAGLSPRRSLSSPCFSTVVPPAADRAEPARDDGEKMMPRVEIVAGGHARGVHELIAEAAGAIATGTRLVPAQGGIGGALLLEDGRSVDHVAVIKPLLDDASSPSHGGGGGYASKAVLREVAAFLLDHDGFARVEPTALIKISRPAMPTTTASIQRFAAHECDAGELGPSRFSVASVHRIGSLDVRLLNIDRHAGNILVKKSPESECASGGSTLTPLDLVPIDHGLCLPEQLDDPYFEWLHWPQSSLPFSGAELEYVASLDPFRDAAMLRAELPSLTEAAIRILTLCTIFLQRAAAAGLCLADIGDMMTREFSAMEEGLSALESLCKNAYDSSTTTAGSSPRKHHHSDDSDDESTQFGMDDVPAGLPPHLFLLGGGGIAKSVSFSAAEQGAAGRGAARKRMSFKALSGDEWAAFLDRFEQLLPAALDAKKRAGLKLTRLGTSF

SEQ ID NO: 18778 - protein, 592 aa, Oryza sativa
  unsure (1)..(592): unsure at all Xaa locations
MSRDLDCPVQTQMAVAVLDRSFSSEYPASSRTEXXRSCSWKRVFVQTENGYVLGIELERGENAHTVKKKLQVALKVPTEESSLTFGDLVLNNDLSSIRNDSPLLLRKNQMHRSSSTPCLSPTAHDVQEQDHSEPIEILGCLSPSSRMKQLAKDVVEAIRNGVDPVPVNSGMGGAYYFKNIYGERVAIVKPTDEEPFAPNNPKGFVGKTLGLPGLKRSVPVGETGLREVAAYLLDHDNFANVPPTMLVKITHSVFNVNDTVSCNKVFHNKLQAVSKLASLQQFIAHDYDASDHGTSSFPVSAVHRIGILDIRIFNTDRHAGNLLVRKLGPGPDNFGVQTELIPIDHGLCLPESLEDPYFEWIHWPQASIPFTEEELEYIANLDPVKDAEMLRLELPFIRGACLRVLVLSTIFLKEAAAFGLCLSEIGEMMSRQFTGKEEEPSELELLCMEARKWVKKRELFLPEAGVEDDNDGITQFSIDSEDGSDASELPSFSKFGLMNASHRNPLSKLDECDEEDGEEEEDDDGDEEDDDEDMFKDDAGNLKNPXSKHIPSVSKLSASFKGASFSLGTRAYHKGVPQDKVTAKTNYRGKGX

SEQ ID NO: 18779 - protein, 640 aa, Triticum aestivum
  unsure (1)..(640): unsure at all Xaa locations
MSRDLDCPVQTQMAVAVLDRSFSSDYPASSKTEXXRPLSWKRVFVQTDNGSVLGIELERGENAHSVKKKLQIALNVSTEESSLTFGDLVLNNDLSNVRNDSPLLLTRNQMHRSSSTPCLSPTGNGVQQRDRSGPIAILGMFKPFPSVKQLAKDIVKAIRNDVDPVAXVTSGMGGAYYFKNIWGDHVAIVKPTDEEPFAPNNPKGFVGKTLGQPGLKRSVRVGETGFREVAAYLLDHGNFANVPPTMLVKITHSVFNVNATVGCNHKMFHNKSQAVSKIASLQQFIPHDFDASDHGTSSFPVSCGHRIXGILDIRIFNTDRHSGNLLVRKVGPGSDNFGVQTELIPIDHGLCLPECLEDPYFEWIHWPQASIPFSEEELEYIAKLDPLKDAEMLRMELPMIRKACLRVLVLSTIFLKEGAAFGLCLSEIGEMMSRQFTGRQERERDAPSQRHGPRSSTSSRSSSRAPSEHGSTRLAPARVHCRGWELLASFEGNVDATQVCRCFLRGRRNGSSPTRLXVCVWTTDRGEEKIRGGXDKNKDRPRWHLIFPALSPTTXAFRRRXSKVAAKTNYSGEGSMYQSGSRSANEMLPPSASFVKLSDMGSEEWTAFLDKFQELLPSAFQARKHAAARPLQRLGTSCQF

SEQ ID NO: 18780 - protein, 357 aa, Triticum aestivum
  unsure (1)..(357): unsure at all Xaa locations
XGTSSFPVSAVHRIGILDIRIFNTDRHSGNLLVRKVGPGSDNFGVQTELIPIDHGLCLPECLEDPYFEWIHWPQASIPFSEEELEYIANLDPVKDADMLRMELPMIRKACLRVLVLSTIFLKEGAAFGLCLSEIGEMMSRQFTGKEEEPSELELLCMEARKWVEDRELFLPEAGVEDDDDDFTQFSLDGEDDSDAFESXLIQQVWSHEXASHRNPLSKLAECDEEEDDDKEMVKDDSDPLNGMFPKLVPPVSKLSASLKGFGFHGKAKPYRGGIPKTKSKVAAKTNYSGEGSMYQSGSRSANEMLPPSASFVKLSDMGSEEWTAFLDKFQELLPSAFRARKHAAARPLQRLGTSCQF

SEQ ID NO: 18781 - protein, 354 aa, Plasmodium falciparum
MGSSSLPMSQQMYFSTHNALRINEENDVINTLFYEINGSRHISLLIFPFYDVQMLKRLLIKKLNLPGGVKVNDIIIFYKGIKLPNYRIISTYIDNNNNRNDKKKKKKKINKLYWAIKDTNPNASIRVIDSTKNYPEFFEDILNEIKLSFKKNIAPKLTMDGTGGTYLLYNAKKKICSVFKPLDEEAFAPFNPRGYEGKMYQEGFRAGVLSGEGASREIAAYLLDNCYNNFSNVPCTIMVEACNPHFNNKSKLKYVDKETNLKWKCGSLQEFIDSRESVGNYDYKQFSIRDIHKIAILDIRVMNLDRNDGNILVSPLKTLKDSCNQFVYRNNKFTSSNNEDMLKRIITIDKKPSR

SEQ ID NO: 18782 - protein, 380 aa, Caenorhabditis elegans
MSSLEHRKKVDDEFQLVFQKAQEAINKGIQPSLIPEGSSGSYFVYGLEGEIVGVFKPKDEEPFASLNPKWPKFFQRMLCFCCFGRACLIPNTGYLSEAAASIVSEMLQLDVVPTTRIVKLASPSFFYSRFFGHYDVRPKEGSFQLYVNGYESGNTVFARWNYDKNLLSDEEGAKFQLLFQKMCIVDYVIRNTDRHMDNLLVRHVPGEEINLAAIDNGLAFPVRHPECTSRFRSFPFRWSNLPWAQGEFDPVLRRHVLSLLTPQFVHRLCVDLKKLFRHGIASSNYMLVNSQLRVVRGQIWNLRQAILANESPGEMACRDPIIVSRSSDIVMSNPPPPRGMIGLLSSHLATPNNNSSDVTMKTAIEHEKENSTVPENLITL

SEQ ID NO: 18783 - protein, 973 aa, Plasmodium yoelii yoelii
  unsure (1)..(973): unsure at all Xaa locations
SFQSMGSNSIAISQQMYFSTHNALRINEENDVISTLFYEINGHRHISLLIFPFYDVQMLKRLLIKKLDLPDIKVNDILIFYKGIKLPNYRIISTYLDNSNRVDNVKKKKKKKVNKLYWAIKDPNPNASIRVIDNKSYPPFFENILNDIKLAFKKNIAPKLTMDGTGGTYLLFNSKKKVCSVFKPADEEAFSPFNPRGYEGKIYQEGFRAGVLSGEGASREIAAYILDNTYNNFSNVPCTIMVEACNPHFNNKSNLKYIYNENTLKWKCGSLQEFIDSRESVGNYDHKQFSIRDVHKIGILDIRVMNLDRNDGNILVSPIKSLKDCCNQFLYRNNKRFSTNDEDILKRIITIDQKPSRYSLIPIDHGLIMPHIMDVAEIDLVWFGWPQTKIPFDNEVLEVIFSFDPDKDADKIRNKLLIREDCIRTMRVCTRLLQIGAWMHLNLHEIAKISTRKNIDEESILERLVRDSIIQAYQMMDYTSLMSTNRLGYILDLAEIKINKKKKNSKNKTIELIDSNKTKDENSNDIKKNTISQKEEENYETNNNTTYAKSKSLDIKKIENSFTIVSFKDIRDNKSSSSFTLVNNNTNQNGNNSYDDKLETYNINMNDQKGGECNSTYKTLIQHRSGSKESGNKFIHTKINNISNREHARGYYSLSKDNNIEVRNDNIEVRNDNIEVRNDNIEVRNDNIEMRNDSINDQNKEKNISETNSFSNKSEYTFVTATSNSKKDDNINKSSNDVEQNSDGSKNLGGSSENFVGNVDEENGAKVEKKMKKKKKKKKKXXSDEKVESYQSDKKESSFNISDDNDQNVENVENSNNSKNERNVENEKNEKNTIEHNQQNLNSYQDKEEEEEEEEEEEEEEEEEEEEEEEDDENYVRFKKTTGTMKRISENTGTAYRNIEMNKINSVWMIKDKNNKTINVKWENKIFEKLFFETFENYVKKYINDYHPNWREYQYNGSKVVNTKHSYLSSVKQ

SEQ ID NO: 18784 - protein, 481 aa, Homo sapiens
MEDPSEPDRLASADGGSPEEEEDGEREPLLPRIAWAHPRRGAPGSAVRLLDAAGEEGEAGDEELPLPPGDVGVSRSSPAELDRSRPAVSVTIGTSEMNAFLDDPEFADIMLRAEQAIEVGIFPERISQGSSGSYFVKDPKRKIIGVFKPKSEEPYGQLNPKWTKYVHKVCCPCCFGRGCLIPNQGYLSEAGAYLVDNKLHLSIVPKTKVVWLVSETFNYNAIDRAKSRGKKYALEKVPKVGRKFHRIGLPPKIGSFQLFVEGYKEAEYWLRKFEADPLPENIRKQFQSQFERLVILDYIIRNTDRGNDNWLVRYEKQKCEKEIDHKESKWIDDEEFLIKIAAIDNGLAFPFKHPDEWRAYPFHWAWLPQAKVPFSEEIRNLILPYISDMNFVQDLCEDLYELFKTDKGFDKATFESQMSVMRGQILNLTQALRDGKSPFQLVQIPCVIVERSQGGSQGRIVHLSNSFTQTVNCRKPFFSSW

SEQ ID NO: 18785 - protein, 481 aa, Homo sapiens
MEDPSEPDRLASADGGSPEEEEDGEREPLLPRIAWAHPRRGAPGSAVRLLDAAGEEGEAGDEELPLPPGDVGVSRSSSAELDRSRPAVSVTIGTSEMNAFLDDPEFADIMLRAEQAIEVGIFPERISQGSSGSYFVKDPKRKIIGVFKPKSEEPYGQLNPKWTKYVHKVCCPCCFGRGCLIPNQGYLSEAGAYLVDNKLHLSIVPKTKVVWLVSETFNYNAIDRAKSRGKKYALEKVPKVGRKFHRIGLPPKIGSFQLFVEGYKEAEYWLRKFEADPLPENIRKQFQSQFERLVILDYIIRNTDRGNDNWLVRYEKQKCEKEIDHKESKWIDDEEFLIKIAAIDNGLAFPFKHPDEWRAYPFHWAWLPQAKVPFSEEIRNLILPYISDMNFVQDLCEDLYELFKTDKGFDKATFESQMSVMRGQILNLTQALRDGKSPFQLVQIPCVIVERSQGGSQGRIVHLSNSFTQTVNCRKPFFSSW

SEQ ID NO: 18786 - protein, 530 aa, Arabidopsis thaliana
MDLGVRVSGHETVSSPGQTELGSGFSNKQERSGFDGEDCWRSSKLSRTSTDGFSSSPASAKTLSFHQGIPLLRSTTINDPRKGQEHMLSFSSASGKSDVSPYLQYCRNSGYGLGGMMNTSNMHGNLLTGVKGPFSLTQWAELEQQALIYKYITANVPVPSSLLLSLKKSFFPYGSLPPNSFGWGSFHLGFSGGNMDPEPGRCRRTDGKKWRCSRDAVPDQKYCERHINRGRHRSRKPVEGQNGHNTNAAAAASAAAASTAAAVSKAAAGTSAVAMRGSDNNNSLAAAVGTQHHTNNQSTDSLANRVQNSRGASVFPATMNLQSKETHPKQSNNPFEFGLISSDSLLNPSHKQASYATSSKGFGSYLDFGNQAKHAGNHNNVDSWPEELKSDWTQLSMSIPMAPSSPVQDKLALSPLRLSREFDPAIHMGLGVNTEFLDPGKKTNNWIPISWGNNNSMGGPLGEVLNSTTNSPKFGSSPTGVLQKSTFGSLSNSSSASSTIIGDNNNKNGDGKDPLGPTTLMNTSATAPSL

SEQ ID NO: 18787 - protein, 535 aa, Arabidopsis thaliana
MDIGVHVLGSVTSNENESLGLKELIGTKQDRSGFIGEDCLQRSLKLARTTTRAEEEENLSSSVAAAYCKTMSFHQGIPLMRSASPLSSDSRRQEQMLSFSDKPDALDFSKYVGLDNSSNNKNSLSPFLHQIPPPSYFRSSGGYGSGGMMMNMSMQGNFTGVKGPFTLTQWAELEQQALIYKYITANVPVPSSLLISIKKSFYPYGSLPPSSFGWGTFHLGFAGGNMDPEPGRCRRTDGKKWRCSRDAVPDQKYCERHINRGRHRSRKPVEVQSGQNQTAAAASKAVTTPQQPVVAGNTNRSNARASSNRSLAIGSQYINPSTESLPNNRGVSIYPSTVNLQPKESPVIHQKHRNNNNPFEFGHISSDSLLNPNTAKTYGSSFLDFSSNQEKHSGNHNHNSWPEELTSDWTQLSMSIPIASSSPSSTHNNNNAQEKTTLSPLRLSRELDLSIQTDETTIEPTVKKVNTWIPISWGNSLGGPLGEVLNSTTNSPTFGSSPTGVLQKSTFCSLSNNSSVSSPIAENNRHNGDYFHYTT

SEQ ID NO: 18788 - protein, 524 aa, Arabidopsis thaliana
MDIGVHVLGSVTSNENESLGLKELIGTKQDRSGFIGEDCLQRSLKLARTTTRAEEEENLSSSVAAAYCKTMSFHQGIPLMRSASPLSSDSRRQEQMLSFSDKPDALDFSKYVGLDNSSNNKNSLSPFLHQIPPPSYFRSSGGYGSGGMMMNMSMQGNFTGVKGPFTLTQWAELEQQALIYKYITANVPVPSSLLISIKKSFYPYGSLPPSSCGNMDPEPGRCRRTDGKKWRCSRDAVPDQKYCERHINRGRHRSRKPVEVQSGQNQTAAAASKAVTTPQQPVVAGNTNRSNARASSNRSLAIGSQYINPSTESLPNNRGVSIYPSTVNLQPKESPVIHQKHRNNNNPFEFGHISSDSLLNPNTAKTYGSSFLDFSSNQEKHSGNHNHNSWPEELTSDWTQLSMSIPIASSSPSSTHNNNNAQEKTTLSPLRLSRELDLSIQTDETTIEPTVKKVNTWIPISWGNSLGGPLGEVLNSTTNSPTFGSSPTGVLQKSTFCSLSNNSSVSSPIAENNRHNGDYFHYTT

SEQ ID NO: 18789 - protein, 576 aa, Glycine max
  unsure (1)..(576): unsure at all Xaa locations
MDLGVVGLEGVVGSESGCVFGSSLASDPGQSTSGTDLVCXKQERSAIASEDDEWGTYKVAKIDHDMSSAPKAMIFQQRNNSLLRSNNATLFSDGHHQSQMLSFSSPKSETLLHQLSSYSRNTGYSSGSXXSMHGALAGVRGPFTPSQWMELEHQALIYKYITANMPVPTHLLIPIRKALDSVGFCNFSTGLLRSNSLGWGGFHLGFSNSTDPDPGRCRRTDXKKWRCSRDAVVDQKYCERHMNRGRHRSRKPVEGQSGHALTTTNTPNASSNSTVXARQPQQQHLCTHQCAPPSSSXXSSPANTINRMFMSNNKENNNTSERTKDGLALPMLPPTLEPKPKEPYDESSRNKNEFGLVTSDSLLNPSQKRSFDSSSSSQKDDSSESQQQSHHNHNHRSSSSIWPELDNMQSDRTQLSISIPIATSSPSNEKLTLSPLRLSREFDPIQMGLGVGSASNEANTRQANWIPITWXXSSMGGPLGEVLNLSNNPPPIGSSPTGVLQKTAFGSLSNSSAGSSPRGAPENNNXRIEISDDSLFSRLNCFLLLLFFFFLKKLFGNGLAFVECVDHNNSTRVVAG

SEQ ID NO: 18790 - protein, 391 aa, Glycine max
  unsure (1)..(391): unsure at all Xaa locations
XGFHLGFSNNTDPEPGRCRRTDGKKWRCSRDAVVDQKYCERHMNRGRHRSRKPVEGQSGHALTTTTSNTPNASSNSVVPGNNNNTFAHNNVHHPIPPHSSPVNTITRMFTSNKENNNSTSERMQDPALPMLSANLELKPKENNPYSSRNNNEFGLVTSDSLLNPSEKRSFTSSQKNDSSDFIDDSPKPQSNHHHRSSSIWPELDNMQSDRTQLSISIPISSSDPSNEKLTLSPLRLSRELDPIQMGLGVGXSAPNEANTRQANWIPITWXXSSMGGPLGEVLNGWDNNPPSGSSPTGVLQKSAFGSLSNSSAGSSPRGAENNKEGATLCNALXSTSXQEEEAPCPLKYDEAMLEEEEDEKDFVLLTSIISEVYIYMVMLEFGKMCSCSCSC

SEQ ID NO: 18791 - protein, 293 aa, Glycine max
  unsure (1)..(293): unsure at all Xaa locations
MDLGVVGLEGVVGSESCCVFGSSLASDPEIKQYGSGVLKQERSAIASEDDEWRTSKVAKTDHDMSSASKAMLFQQRNNSLLRSNATLFSDGHHHQSQMLSFSSPKSESLLVDKASYTRNAGYSSGSXXSMHGALAGVRGPFTPSQWMELEHQALIYKYITSNVPVPTHLIPIRKALDSLGFCNFSTGLLRPNALGWGGFHLGFSNNTDPEPGRCRRTDGKKWRCSRDAVVDQKYCERHMNRGRHRSRKPVEGQLGHALTTTTTTNTPNASSNSTVVPRNTTTTTTFAHNNVHX

SEQ ID NO: 18792 - protein, 296 aa, Glycine max
  unsure (1)..(296): unsure at all Xaa locations
MDLGVVGLEGVVGSESGCVFGSSLASDPGQSTSGTDLVCXKQERSAIASEDDEWGTYKVAKIDHDMSSAPKAMIFQQRNNSLLRSNNATLFSDGHHHQSQMLSFSSPKSETLLHQLSSYTRNTGYSSGSXXSMHGALAGVRGPFTPSQWMELEHQALIYKYITSNVPVPTHLIPIRKALDSLGFCNFSTGLLRPNALGWGGFHLGFSNNTDPEPGRCRRTDGKKWRCSRDAVVDQKYCERHMNRGRHRSRKPVEGQLGHALTTTTTTNTPNASSNSTVVPRNTTTTTTFAHNNVHX

SEQ ID NO: 18793 - protein, 365 aa, Glycine max
  unsure (1)..(365): unsure at all Xaa locations
YGCEKTTEXGKKWRCSRDAVVDQKYCERHMNRGRHRSRKPVEGQSGHALTTTNTPNASSNSTVXARQPQQQHLCTHQCAPPSSSXXSSPANTINRMFMSNNKENNNTSERTKDGLALPMLPPTLELKPKEPYDESSRNNNEFGLVTSDSLLNPSQKRSFDSSSSSQKGHFIDDSPKPQSHHNHHRSSSYXWPELDNMQSDRTQLSISIPISSSSPSNEKLTLSPLRLSRALDPIQMGLGVGSGAYEANPRQANWIPITWXXSSMGGPLGEVLNLSNNPPPIGSSPTGVLQKTAFGSLSNSSAGSSPRGAPENNNXRIEISDDSLFSRLNCFLLLLFFFFLKKLFGNGLAFVECVDHNNSTRVVAG

SEQ ID NO: 18794 - protein, 483 aa, Oryza sativa
MAAVDGEGAMARWIELEHQALIYKYLAANSPVPHSLLIPIRRSLTSPYSLGSSTLGWGSFQLGYSGSADPEPGRCRRTDGKKWRCSRDAVADQKYCERHMNRGRHRSRKHVEGQPGHAAKAMPAAVAAAAASATQPSAPAAHSGGAANTANPCSLQYSRDLANKHNESEQVQDSDSLSMLTSISTRNTGSLFPFSKQHNPFEVSNSRPDFGLVSPDSLMSSPHRRTSICSLRRGMNNRVQFPFNTLWTGQGHLHKDAWPDAEDMQAQRSQLSISAPMASSDLSSASTSPIHEKLMLSPLKLSREYSPIGLGFAANRDEVNQGEANWMPMFRDSLMGGPLGEVLTKNNNMEGFDSSPVGVLQKTTFGSVSSSTGSSPRLENHSDDGNSNLRDDLGSVVVNHPSIRLLVFGQKSRACNTLLKSNALVCTSSTENAVLVLRMSHSAAAFHGRSCVHETDCKRHSENDLNRRRNRRADHATQRMPKQ

SEQ ID NO: 18795 - protein, 370 aa, Oryza sativa
  unsure (1)..(370): unsure at all Xaa locations
AGWPACTEPGLTGWTDPRGPFQLGYSGSADPEPGRCRRTDGKKWRRSRDAVADQKYCERHMNRGRHRSRKHVEGQPGHAAKAMPAAVAAAAASATQPSAPAAHSGGAANTANPCSLQYSRDLANKHNESEQVQDSDSLSMLTSISTRNTGSLFPFSKQHNPFEVSNSRPDFGLVSPDSLMSSPHRRTSICSLRRGMNNRVQFPFNTLWTGQGHLHKDAWPDAEDMQAQRSQLSISAPMASSDLSSASTSPIHEKLMLSPLKLSREYSPIGLGFAANRDEVNQGEANWMPMFRDSLMGGPLGEVLTKNNNMEGFDSSPVGVLQKTTFGSVSSSTGSSPRLENHSDDGNSNLRDDLGSVVVNHPSIRLVXAF

SEQ ID NO: 18796 - protein, 841 aa, Oryza sativa
  unsure (1)..(841): unsure at all Xaa locations
XWSLVVQVVQXCSCKYHCIISSFATDTSPAAGALVMKFCSIKLSIADWCNSTDGTIKTMANAMQTKYDKYWEKSNMALVVACFLDPRYKTSSIEYYSMKIYGLEAAEKFDEFNGVIKKLFDVYATSACATSKKKGAEMHVHLNENDSSHDHEQHLQRFLLERSQPICSDKTELQIYMEQPLLLWTSKDPFDILSWWKLKQAEFPILCKLARDFLCIQVSTVASESAFSAGGRVVDPFRTRLDPEAVQALVCTKDWIKAANNGYKTQAIINELDIESVESLANLLIVINIXXGAFVSTSSLSGLCIPRNIRFRIRVRSYSILIRIRDNSYSFPYPSYSYSFPYPPNNMKTDTPRIREPASHFCSRTVQPDAAAAAAGLLRWMAMATPTTNGSFLLGSGGYPGAQILSFSSSGHSGNEMCPLSPKMQSLLNPLEMALTLFTLPSSSERGLDCGSSDVARMQGVLARVRGPFTPTQWMELEHQALIYKHIVANAPVPAGLLLPIRRSLHPPVFPHFSSGGILGSSSLGWGSFQLGYSGSADSEPGRCRRTDGKKWRCSRDAVVDQKYCERHINRGRHRSRKHVEGQSSHAAKATVPAIAQPPIGASNGKLSGSHGVSNELTKTLATNRMMLDKANLIERSQDYTNQQHNILQNNTKGDNWSEEMSSQADYAVIPAGSLMNTPQSANLNPIPQQQRCKQSLFGKGIQHDDIQLSISIPVDNSDLPTNYNKAQMDHVVGGSSNGGNNTRASWIPGSWEASIGGPLGEFFTNTSSASDDKGKSRHPPSLNLLADGHTTSPQLQSPTGVLQMTSFSSVPSSTVSSPAGSLCNGLLTSGLVNAQTVQTL

SEQ ID NO: 18797 - protein, 215 aa, Triticum aestivum
  unsure (1)..(215): unsure at all Xaa locations
GRAAALLRHARLLSSVRGPFTPSQWMELEHQALIYKYLAANIAVPHNLVVPIRRSVTSLYPSAYFGSSTLGWGLFQLGYSGSADLEPGRCRRTDGKKWRCSRDAVADQKYCERHMNRGRHRSRKHVEGQPGHAAKAMPATAAAAAQPGALATGGGGGAPAGAAICHEQQPLKNYAASTIDPCSLQYNRGNGEQAATRVRASAGLRHPLDADLHEX

SEQ ID NO: 18798 - protein, 397 aa, Arabidopsis thaliana
MMSLSGSSGRTIGRPPFTPTQWEELEHQALIYKYMVSGVPVPPELIFSIRRSLDTSLVSRLLPHQSLGWGCYQMGFGRKPDPEPGRCRRTDGKKWRCSREAYPDSKYCEKHMHRGRNRARKSLDQNQTTTTPLTSPSLSFTNNNNPSPTLSSSSSSNSSSTTYSASSSSMDAYSNSNRFGLGGSSSNTRGYFNSHSLDYPYPSTSPKQQQQTLHHASALSLHQNTNSTSQFNVLASATDHKDFRYFQGIGERVGGVGERTFFPEASRSFQDSPYHHHQQPLATVMNDPYHHCSTDHNKIDHHHTYSSSSSSQHLHHDHDHRQQQCFVLGADMFNKPTRSVLANSSRQDQNQEEDEKDSSESSKKSLHHFFGEDWAQNKNSSDSWLDLSSHSRLDTGS

SEQ ID NO: 18799 - protein, 397 aa, Arabidopsis thaliana
MMSLSGSSGRTIGRPPFTPTQWEELEHQALIYKYMVSGVPVPPELIFSIRRSLDTSLVSRLLPHQSLGWGCYQMGFGRKPDPEPGRCRRTDGKKWRCSREAYPDSKYCEKHMHRGRNRARKSLDQNQTTTTPLTSPSLSFTNNNNPSPTLSSSSSSNSSSTTYSASSSSMDAYSNSNRFGLGGSSSNTRGYFNSHSLDYPYPSTSPKQQQQTLHHASALSLHQNTNSTSQFNVLASATDHKDFRYFQGIGERVGGVGERTFFPEASRSFQDSPYHHHQQPLATVMNDPYHHCSTDHNKIDHHHTYSSSSSSQHLHHDHDHRQQQCFVLGADMFNKPTRSVLANSSRQDQNQEEDEKDSSESSKKSLHHFFGEDWAQNKNSSDSWLDLSSHSRLDTGN

SEQ ID NO: 18800 - protein, 396 aa, Arabidopsis thaliana
MSLSGSSGRTIGRPPFTPTQWEELEHQALIYKYMVSGVPVPPELIFSIRRSLDTSLVSRLLPHQSLGWGCYQMGFGRKPDPEPGRCRRTDGKKWRCSREAYPDSKYCEKHMHRGRNRARKSLDQNQTTTTPLTSPSLSFTNNNNPSPTLSSSSSSNSSSTTYSASSSSMDAYSNSNRFGLGGSSSNTRGYFNSHSLDYPYPSTSPKQQQQTLHHASALSLHQNTNSTSQFNVLASATDHKDFRYFQGIGERVGGVGERTFFPEASRSFQDSPYHHHQQPLATVMNDPYHHCSTDHNKIDHHHTYSSSSSSQHLHHDHDHRQQQCFVLGADMFNKPTRSVLANSSRQDQNQEEDEKDSSESSKKSLHHFFGEDWAQNKNSSDSWLDLSSHSRLDTGN

SEQ ID NO: 18801 - protein, 375 aa, Glycine max
  unsure (1)..(375): unsure at all Xaa locations
PVAFIFSSSTSLLTLMMNGTNRFPFTPSHWREXASGISIPPDLLFTIKRSYXXDSPLSSXXLLPNQPQLGWNYLQMGLGKKIEDPEPGRCRRTDGKKWRCSKEAYPDSKYCERHMHRGKNRSRKPVEVLKSTTTPSSSTTNSNVSSTQQAISSITKINSTLSPLASSETPNTTTILNTMAPFSIIITLLQGPLALACLLKTTVLPCFLTLAHALSPTQTAGVXXYVYGEKEEVDEHAFFTDCGVMKSFSASSMDDSWQLTPLTMSSSSSSSKQRSSFGXXSSDYSXXLQLQSHSKQQQQEHHQDQGCYMFGAGQVVKEEXXQKTVHRFFDEWPHKGREGSWLDLDDKSSTTQLSISIPTSSHDFSTFSSRTHHDG

SEQ ID NO: 18802 - protein, 396 aa, Glycine max
  unsure (1)..(396): unsure at all Xaa locations
QITITPSSEFISLFQILYLLVLHFPTILERDTHTLPSFCCLKMMSASARNRSPFTQTQWQELEHQALVFKYMVTGTPIPPDLIYSIKRSLDTSISSRLFPHHPIGWGCFEMGFGRKVDPEPGRCRRTDGKKWRCSKEAYPDSKYCERHMHRGRNRSRKPVDSSAISTATNTSQTIPSSYTRNRSPTIPPPPPPSSFPFSPLPSSMPIDQSQPFSQSYQNSSLNPFFYSQSTSSRPPDADFPPQDATTHHLFMDSAGSYSHDEKNYSRHVHGIREDVDERAFFPEASGSARSYTDSYQQLSMSSYKSYSNSNFQNINNDATTNPRQQEQQLQXXQQHCFVLGTDXXKSTRPSKEKEAXXTTTGQRPLHRFFGEWPPKNTTTDSWLDLASNSRIQTDE

SEQ ID NO: 18803 - protein, 205 aa, Oryza sativa (japonica cultivar-group)
MESQRRRWFSCVAASAAIPTSSRTPVCTPYQALYGGPYAVATAHTPAAAAAYHAQVSPFHLHLDTTHPHPPAAAVLLLHGPQGVRVRARHQGGAHGEHAFFSDGTEREHHHAAAGHGQWQFKQLGMEPKQSTTPLFPGAGYGNTAVSPYAIDLSKENDDEKERRQQQHCFLLGADLRLENSAGHDHAAATQKPQTSRPLLRRVAA

SEQ ID NO: 18804 - protein, 225 aa, Triticum aestivum
AAATHDTTPYHALYGGPYSSAGRQQHASAYHHAAQVSPFHLHLDTTHPHPPPSYYSSMDHSKDSYAYGHSVKEVHGGGEHAFFSSDHQHQHHASAGGNGQWQFKQLGGMEPKQHTTSLFPGCGGYGNNAAYAIDLSSKEEDEEKERRQQQQHCFLLGADLRLDKPSSGHGDSADQKPLRPFFDEWPHEKTGSKGSWMGLEGETQLSISIANELPITTTSRYHHGE

SEQ ID NO: 18805 - protein, 111 aa, Triticum aestivum
  unsure (1)..(111): unsure at all Xaa locations
MMLGGHGGGGGGGRCLFTASQWRELEHQALIYKYMAAGSQVPHELVLPLRHRDAAFAAIDTAPSLACYPPPQPSLGWGLYGAGSQYARKPEDPEPGRCRRTDGKKWRCSRX

SEQ ID NO: 18806 - protein, 389 aa, Zea mays
  unsure (1)..(389): unsure at all Xaa locations
MMMMSSGRAGGGATAGRYPFTASQWQELEHQALIYKCLASGKPIPSYLMPPLRRILDSALATSPSLAYPPQPSLGWGCFGMGFTRKADEDPEPGRCRRTDGKKWRCSKEAYPDSKYCEKHMHRGKNRSRKPVEMSLATPAPAPAPAAATTATATSSPAPSYHRPAHDATPSPYHALYGXXAAAAVALTRGGAYHHAQHVSPFHFHLETTHPHPPPPYNYSADQRDYAYGHAAAKEVGEHAFFSDGAXXERVDRQAAAGQWQFRQLGVETKPGPTPLFPVAGYGHGAASPYGVEMGKDDDEQEERRRQHCFVLGADLRLERPSSGHGHGHDHDDAAAAQKPLRPFFDEWPHQKGDKAGSWMGLDGETQLSMSIPMAATDLPVTSRFRNDE

SEQ ID NO: 18807 - protein, 380 aa, Zea mays
  unsure (1)..(380): unsure at all Xaa locations
MMMMSGRAATAGRYPFTASQWQELEHQALIYKCLASGKPIPSYLMPPLRRILDSALATSPSLAAFPPQPSLGWGGCFGMGFSRKPADEDPEPGRCRRTDGKKWRCSKEAYPDSKYCEKHMHRGKNRSRKPVEMSLATPAPASSATSAAAAXXTSSSQAPSYHSPAPAVPYHAPYGAAYHHTQTQVTXXSPFHLLHLETTHPHPPPPPPPPYYYADQRDYAYGKEVGERAFFSDGAXXERDRQQQAAGQWQFKQLGTMEATSTTPLLVPAAGYGHGAASPYGVGQAKEDEEEEETRRQQQHCFVLGADLRLAERPSGAHDAAAQKPLRHFIDEWPHEKGSKGSWMGGLDGETTQLSMSIPMAAAADLPVTSRYRTXWRRAL

SEQ ID NO: 18808 - protein, 603 aa, Oryza sativa (japonica cultivar-group)
MDLGGGVGVVMAAVDGGGGGELGGGGLLGSRLMKHGRGNAGDQEHEWRPPAKQARGGDASSAAAAVAAAAAVSEAVKVAAPFLLGASCSPGHGGEQMLSFSSSASSCSSGGGGAAVAAAAAAGGAMPLYYGTPASCSGLSSVSLSSSMQGAMARVRGPFTPSQWIELEHQALIYKYLAANSPVPHSLLIPIRRSLTSPYSPAYFGSSTLGWGSFQLGYSGSADPEPGRCRRTDGKKWRCSRDAVADQKYCERHMNRGRHRSRKHVEGQPGHAAKAMPAAVAAAAASATQPSAPAAHSGGAVAGLAINHQHQQMKNYAANTANPCSLQYSRDLANKHNESEQVQDSDSLSMLTSISTRNTGSLFPFSKQHNPFEVSNSRPDFGLVSPDSLMSSPHSSLENVNLLTSQSLNEQQSSVSLQHFVDWPRTPAQGALAWPDAEDMQAQRSQLSISAPMASSDLSSASTSPIHEKLMLSPLKLSREYSPIGLGFAANRDEVNQGEANWMPMFRDSLMGGPLGEVLTKNNNMEARNCLSESLNLLNDGWDSSSGFDSSPVGVLQKTTFGSVSSSTGSSPRLENHSVYDGNSNLRDDLGSVVVNHPSIRLV

SEQ ID NO: 18809 - protein, 338 aa, Sorghum bicolor
MMLSGHGGGRRLFTASQWQELEHQALIFKYMASGAPVPHDLVLPLRLATGVDTAPSLAFPPQPSPSLAYWGCYGAGAPFGRKAEDPEPGRCRRTDGKKWRCSREAHGESKYCEKHIHRGKSRSRKPVEVTSPAAAAYRPSALSISPPRAADAPPPSLAHPHQHLRHGAASAAAAARGAPGQATAGALQLHLDASLHAASPPPSYHRYAHSHAHYTPPPSLFPGGGGGYDYGQSKELREAELRRRHFHALGADLSLDKPLAATAAGSAAAEKPLRRFFDEWPRESGDTRPSSWAGAEDATQLSISIPAASPSDLAASAAARYHNGEPSGERKTPLLLVP

SEQ ID NO: 18810 - protein, 607 aa, Oryza sativa
  unsure (1)..(607): unsure at all Xaa locations
XANPAEFVGQRVREQXRRRGRWIEQSSAGRRRVFVQTETGCVLGMDLDRSDNAHTVKRRLQLALNVPTGETSLTFGDRVLENDLSFIRPDSPLLLTRNSINRSCSTPCLCPVSKDFEHKDRSGLVEMLGCSISCARVKRLVDDVVTAIRSGVDPVPIGSGLGGSYYFRNISGDRVAIVKPTDEEPFAPNNPKGFVGRALGQPGLKKSVRVGETGFREVAAYLLDHDNFANVPPTALVKITHSIFHINCPVNGGRAHDQKQQVSSKIASFQQFIAHDFDASDHGTSSFPVAAVHRIGILDIRIFNTDRHAGNVLVRKLDGGTGRFGCQTELFPIDHGLCLPENLEDPYFEWIHWAQSSIPFSEEELEYIKNLDPMRDVAMLRRELPIIREACLRVLXVLCTIFLKEAAASGLCLAEIGEMMTREFRGLEEEPSKLEVVCMEARRKLAEWEPYSPVIEQGEDMDFQFSLDMLGEYNDVIRSPRFNGLGAKGNGFRNPLSKLVESIDEDNDDDDGRSESSKRSSERVHSGGLKFPSADKSSGSNGSVHAHRSADEQLPSSVYFVRLSDMNAEEWNIFLEKFQELLKEALQERAAAAGQRMKQRLGTSCKF

SEQ ID NO: 18811 - protein, 402 aa, Triticum aestivum
  unsure (1)..(402): unsure at all Xaa locations
XGETGFREVAAYLLDHENFANVPATALVKITHSVFNINRPMNGGTPAHDHKPQVTSKIASFQQFIAHDFDASDHGTSSFPVAAVHRIGILDIRIFNTDRHGGNVLVRKLDGGTGRFGCQTELFPIDHGLCLPENLEDPYFEWIHWAQASIPFSEEELEYISKLDPMRDAAMLRGELPMIREACLRVLILCTIFLKEAAAFGLCLAEIGEMMTREFAGMEEEPRKLEIVCMENWRXADQREAFXGSVERVEDMDFQFSMDVLGGYSDVIRSXRFNCSGMEARSRNPLTKLVESMAEDGDDEEDRKEPSRHSSDRFSSADFSTPSLHRTTSSKTSSNSSVHAPNRSADEQLPSSLCFVRLSDMSAEEWHVFVEKFQELLKEALEECKAAAGQRMKQRLGTSCKF

SEQ ID NO: 18812 - protein, 261 aa, Mus musculus
MASADWGYGSENGPDQWSKLYPIANGNNQSPIDIKTSEANHDSSLKPLSISYNPATAKEIVNVGHSFHVIFDDSSNQSVLKGGPLADSYRLTQFHFHWGNSNDHGSEHTVDGTRYSGELHLVHWNSAKYSSASEAISKADGLAILGVLMKVGPANPSLQKVLDALNSVKTKGKRAPFTNFDPSSLLPSSLDYWTYFGSLTHPPLHESVTWVICKDSISLSPEQLAQLRGLLSSAEGEPAVPVLSNHRPPQPLKGRTVRASF

SEQ ID NO: 18813 - protein, 261 aa, Mus musculus
MASADWGYGSENGPDQWSKLYPIANGNNQSPIDIKTSEANHDSSLKPLSISYNPATAKEIVNVGHSFHVIFDDSSNQSVLKGGPLADSYRLTQFHFHWGNSNDHGSEHTVDGTRYSGELHLVHWNSAKYSSASEAISKADGLAILGVLMKVGPANPSLQKVLDALNSVKTKGKRAPFTNFDPSSLLPSSLDYWTYFGSLTHPPLHESVTWVICKDSISLSPEQLAQLRGLLSSAEGESAVPVLSNHRPPQPLKGRTVRASF

SEQ ID NO: 18814 - protein, 261 aa, Mus musculus
MASADWGYGSENGPDQWSKLYPIANGNNQSPIDIKTSEANHDSSLKPLSISYNPATAKEIVNVGHSFHVIFDDSSNQSVLKGPLADSYRLTQFHFHWGNSSNDHGSEHTVDGTRYSGELHLVHWNSAKYSSASEAISKADGLAILGVLMKVGPANPSLQKVLDALNSVKTKGKRAPFTNFDPSSLLPSSLDYWTYFGSLTHPPLHESVTWVICKDSISLSPEQLAQLRGLLSSAEGESAVPVLSNHRPPQPLKGRTVRASF

SEQ ID NO: 18815 - protein, 260 aa, Mus musculus
MAKEWGYASHNGPDHWHELYPIAKGDNQSPIELHTKDIKHDPSLQPWSASYDPGSAKTILNNGKTCRVVFDDTYDRSMLRGGPLSGPYRLRQFHLHWGSSDDHGSEHTVDGVKYAAELHLVHWNPKYNTFGEALKQPDGIAVVGIFLKIGREKGEFQILLDALDKIKTKGKEAPFTHFDPSCLFPACRDYWTYHGSFTTPPCEECIVWLLLKEPMTVSSDQMAKLRSLFSSAENEPPVPLVGNWRPPQPVKGRVVRASFK

SEQ ID NO: 18816 - protein, 260 aa, Mus musculus
MAKEWGYARHNGPDHWHELYPIAKGDNQSPIELHTKDIKHDPSLQPWSASYDPGSAKTILNNGKTCRVVFDDTYDRSMLRGGPLSRPYRLRQFHLHWGSSDDHGSEHTVDGVKYAAELHLVHWNPRYNTFGEALKQPDGIAVVGILLKIGREKGEFQILLDALDKIKTKGKEAPFTHFDPSCLFPACRDYWTYHGSFTTPPCEECIVWLLLKEPMTVSSDQMAKLRSLFSSAENEPPVPLVGNWRPPQPVKGRVVRASFK

SEQ ID NO: 18817 - protein, 262 aa, Mus musculus
MARLSWGYGEHNGPIHWNELFPIADGDQQSPIEIKTKEVKYDSSLRPLSIKYDPASAKIISNSGHSFNVDFDDTEDKSVLRGGPLTGNYRLRQFHLHWGSADDHGSEHVVDGVRYAAELHVVHWNSDKYPSFVEAAHESDGLAVLGVFLQIGEHNPQLQKITDILDSIKEKGKQTRFTNFDPLCLLPSSWDYWTYPGSLTVPPLLESVTWIVLKQPISISSQQLARFRSLLCTAEGESAAFLLSNHRPPQPLKGRRVRASFY

SEQ ID NO: 18818 - protein, 259 aa, Mus musculus
AKEWGYARHNGPDHWHELYPIAKGDNQSPIELHTKDIKHDPSLQPWSASYDPGSAKTILNNGKTCRVVFDDTYDRSMLRGGPLSRPYRLRQFHLHWGSSDDHGSEHTVDGVKLAAELHLVHWNPRYNTFGEALKQPDGIAVVGILLKIGREKGEFQILLDALDKIKTKGKEAPFTHFDPSCLFPACRDYWTYHGSFTTPPCEECIVWLLLKEPMTVSSDQMAKLRSLFSSAENEPPVPLVGNWRPPQPVKGRVVRASFK

SEQ ID NO: 18819 - protein, 260 aa, Mus musculus
MSHHWGYSKHNGPENWHKDFPIANGDRQSPVDIDTATAQHDPALQPLLISYDKAASKSIVNNGHSFNVEFDDSQDNAVLKGGPLSDSYRLIQFHFHWGSSDGQGSEHTVNKKKYAAELHLVHWNTKYGDFGKAVQQPDGLAVLGIFLKIGPASQGLQKVLEALHSIKTKGKRAAFANFDPCSLLPGNLDYWTYPGSLTTPPLLECVTWIVLREPITVSSEQMSHFRTLNFNEEGDAEEAMVDNWRPAQPLKNRKIKASFK

SEQ ID NO: 18820 - protein, 260 aa, Mus musculus
MSHHWGYSKHNGPENWHKDFPIANGDRQSPVDIDTATAQHDPALQPLLISYDKAASKSIVNNGHSFNVEFDDSQDNAVLKGGPLSDSYRLIQFHFHWGSSDGQGSEHTVNKKKYAAELHLVHWNTKYGDFGKAVQQPDGLAVLGYFLKIGPASQGLQKVLEALHSIKTKGKRAAFANFDPCSLLPGNLDYWTYPGSLTTPPLLECVTWIVLREPITVSSEQMSHFRTLNFNEEGDAEEAMVDNWRPAQPLKNRKIKASFK

SEQ ID NO: 18821 - protein, 260 aa, Mus musculus
MSHHWGYSKHNGPENWHKDFPIANGDRQSPVDIDTATAQHDPALQPLLISYDKAASKSIVNNGHSFNVEFDDSQDNAVLKGGPLSDSYRLIQFHFHWGSSDGQGSEHTVNKKKYAAELHLVHWNTKYGDFGKAVQQPDGLAVLGYFLKIGPASQGLQKVLEALHSIKTKGKRAAFANFDPCSLLPGNLDYWTYPGSLTTPPLLECVTWIVLRDPITVSSEQMSHFRTLNFNEEGDAEEAMVDNWRPAQPLKNRKIKASFK

SEQ ID NO: 18822 - protein, 260 aa, Mus musculus
MSHHWGYSKHNGPENWHKDFPIANGDRQSPVDIDTATAHHDPALQPLLISYDKAASKSIVNNGHSFNVEFDDSQDNAVLKGGPLSDSYRLIQFHFHWGSSDGQGSEHTVNKKKYAAELHLVHWNTKYGDFGKAVQQPDGLAVLGYFLKIGPASQGLQKVLEALHSIKTKGKRAAFANFDPCSLLPGNLDYWTYPGSLTTPPLLECVTWIVLREPITVSSEQMSHFRTLNFNEEGDAEEAMVDNWRPAQPLKNRKIKASFK

SEQ ID NO: 18823 - protein, 248 aa, Mus musculus
CATGTRQSPINIQWKDSVYDPQLAPLRVSYDAASCRYLWNTGYAFQVEFDDSCEDSGISGGPLGNHYRLKQFHFHWGATDEWGSEHAVDGHTYPAELHLVHWNSTKYENCKKASVGENGLAVIGVFLKLGAHHQALQKLVDVLPEVRHKDTQVAMGPFDPSCLMPACRDYWTYPGSLTTPPLAESVTWIVQKTPVEVSPSQLSMFRTLLFSGRGEEEDVMVNNYRPLQPLRDRKLRSSFRLDRTKMRS

SEQ ID NO: 18824 - protein, 248 aa, Mus musculus
CATGTRQSPINIQWKDSVYDPQLAPLRVSYDAASCRYLWNTGYFFQVEFDDSCEDSGISGGPLGNHYRLKQFHFHWGATDEWGSEHAVDGHTYPAELHLVHWNSTKYENYKKASVGENGLAVIGVFLKLGAHHQALQKLVDVLPEVRHKDTQVAMGPFDPSCLMPACRDYWTYPGSLTTPPLAESVTWIVQKTPVEVSPSQLSMFRTLLFSGRGEEEDVMVNNYRPLQPLRDRKLRSSFRLDRTKMRS

SEQ ID NO: 18825 - protein, 248 aa, Mus musculus
SAEGTRQSPINIQWKDSVYDPQLAPLRVSYDAASCRYLWNTGHAFQVEFDDSCEDSGISGGPLGNHYRLKQFHFHWGATDEWGSEHAVDGHTYPAELHLVHWNSTKYENYKKASVGENGLAVIGVFLKLGAHHQALQKLVDVLPEVRHKDTQVAMGDFDPSCLMPACRDYWTYPGSLTTPPLAESVTWIVQKTPVEVSPSQLSMFRTLLFSGRGEEEDVMVNNYRPLQPLRDRKLRSSFRLDRTKMRS

SEQ ID NO: 18826 - protein, 264 aa, Mus musculus
MTGHHCWGYGQDDGPSNWHKLYPIAQGDRQSPINIISSQAVYSPSLQPLELFYEACMSLSITNNGHSVQVDFNDSDDRTVVSGGPLEGPYRLKQLHFHWGKKRDMGSEHTVDGKSFPSELHLVHWNAKKYSTFGEAAAAPDGLAVVGVFLETGDEHPSMNRLTDALYMVRFKDTKAQFSCFNPKCLLPTSRHYWTYPGSLTTPPLSESVTWIVLREPIRISERQMEKFRSLLFTSEDDERIHMVDNFRPPQPLKGRVVKASFQA

SEQ ID NO: 18827 - protein, 317 aa, Mus musculus
MAVMNHLRVILQVSSSTLPWRRCWVPRLVPRRSCSLYTCTYRTRNRALPPLWENLDLVPAGDRQSPINIRWRDSVYDPGLKPLTISYDPATCLHIWNNGYSFLVEFEDSTDKSVVEGGPLEHNYRLKQFHFHWGAIDAWGSEHTVDSKCYPAELHLVHWNAVKFESFEDAALEENGLAVIGVFLKLGKHHKELQKLVDTLPSIKHKDTLVEFGSFDPSCLMPTCPDYWTYSGSLTTPPLSESVTWIIKKQPVEVDRDQLEQFRTLLFTSEGEKEKRMVDNFRPLQPLMNRTVRSSFRHDYVLNIQVKAKPTASEVTP

SEQ ID NO: 18828 - protein, 317 aa, Mus musculus
MAVMNHLRVILQVSSSTLPWRRCWVPRLVPRRSCSLYTCTYRTRNRALPPLWENLDLVPAGDRQSPINIRWRDSVYDPGLKPLTISYDPATCLHIWNNGYSFLVEFEDSTDKSVVEGGPLEHNYRLKQFHFHWGAIDAWGSEHTVDSKCYPAELHLVHWNAVKFESFEDAALEENGLAVIGVFLKLGKHHKELQKLVDTLPSIKHKDTLVEFGSFDPSCLMPTCPDYWTYSGSLTTPPLSESVTWIIKKQPVEVDRDQLEQFRTLLFTFEGEKEKRMVDNFRPLQPLMNRTVRSSFRHDYVLNIQVKPKPTASEVTP

SEQ ID NO: 18829 - protein, 317 aa, Mus musculus
MAVMNHLRVILQVSSSTLPWRRCWVPRLVPRRSCSLYTCTYRTRNRALPPLWENLDLVPAGDRQSPINIRWRDSVYDPGLKPLTISYDPATCLHIWNNGYSFLVEFEDSTDKSVVEGGPLEHNYRLKQFHFHWGAIDAWGSEHTVDSKCYPAELHLVHWNAVKFESFEDAALEENGLAVIGVFLKLGKHHKELQKLVDTLPSIKHKDTLVEFGSFDPSCLMPTCPDYWTYSGSLTTPPLSESVTWIIKKQPVEVDRDQLEQFRTLLFTSEGEKEKRMVDNFRPLQPLMNRTVRSSFRHDYVLNIQVKPKPTASEVTP

SEQ ID NO: 18830 - protein, 299 aa, Mus musculus
MLRRDPRKPLAILRHVGLLCATGPQRWRFQHSCAEEHSNCARHPLWTGPVSSAEGTRQSPINIQWKDSVYDPQLAPLRVSYDAASCRYLWNTGYFFQVEFDDSCEDSGISGGPLGNHYRLKQFHFHWGATDEWGSEHAVDGHTYPAELHLVHWNSTKYENYKKASVGENGLAVIGVFLKLGAHHQALQKLVDVLPEVRHKDTQVAMGPFDPSCLLPACRDYWTYPGSLTTPPLAESVTWIVQKTPVEVSPSQLSTFRTLLFSGRGEEEDVMVNNYRPLQPLRDRKLRSSFRLDRTKMRS

SEQ ID NO: 18831 - protein, 298 aa, Mus musculus
MLRRDPRKPLAILRHVGLLCATGPQRWRFQHSCAEEHSNCARHPLWTGPVSSAEGTRQSPINIQWKDSVYDPQLAPLRVSYDAASCRYLWNTGYFFQVEFDDSCEDSGISGGPLGNHYRLKQFHFHWGATDEWGSEHAVDGHTYPAELHLFMNSTKYENYKKASVGENGLAVIGVFLKLGAHHQALQKLVDVLPEVRHKDTQVAMGPFDPSCLLPACRDYWTYPGSLTTPPLAESVTWIVQKTPVEVSPSQLSTFRTLLFSGRGEEEDVMVNNYRPLQPLRDRKLRSSFRLDRTKMRS

SEQ ID NO: 18832 - protein, 255 aa, Mus musculus
GQDDGPSNWHKLYPIAQGDRQSPINIISSQAVYSPSLQPLELFYEACMSLSITNNGHSVQVDFNDSDDRTVVSGGPLEGPYRLKQLHFHWGKKRDMGSEHTVDGKSFPSELHLVHWNAKKYSTFGEAAAAPDGLAVVGVFLETGDEHPSMNRLTDALYMVRFKDTKAQFSCFNPKCLLPTSRHYWTYPGSLTTPPLSESVTWIVLREPIRISERQMEKFRSLLFTSEDDERIHMVDNFRPPQPLKGRVVKASFQA

SEQ ID NO: 18833 - protein, 354 aa, Mus musculus
MPHRSLRATVVLLLVILKKQPSSSAPLNGSKWTYVGPAGEKNWSKKYPSCGGLLQSPIDLHSDILQYDASLAPLQFQGYNVSVEKLLNLTNDGHSVRLNLNSDMYIQGLQPHHYRAEQLHLHWGNRNDPHGSEHTVSGKHFAAELHIVHYNSDLYPDFSTASDKSEGLAVLAVLIEIGSANPSYDKIFSHLQHVKYKGQQVLIPGFNIEELLPESPGEYYRYEGSLTTPPCYPTVLWTVFRNPVQISQEQLLALETALYFTHMDDPTPREMINNFRQVQKFDERLVYISFRQGLLTNTGLSLGIILSVALAGVLGISIVLAVSIWLFKRKKSKKGDNKGVIYKPAIKKEAEVHA

SEQ ID NO: 18834 - protein, 344 aa, Mus musculus
MPHRSLRATVVLLLVILKKQPSSSAPLNGSKWTYVGPAGEKNWSKKYPSCGGLLQSPIDLHSDILQYDASLAPLQFQGYNVSVEKLLNLTNDGHSVRLNLNSDMYIQGLQPHHYRAEQLHLHWGNRNDPHGSEHTVSGKHFAAELHIVHYNSDLYPDFSTASDKSEGLAVLAVLIEIGSANPSYDKIFSHLQHVKYKGQQVLIPGFNIEELLPESPGEYYRYEGSLTTPPCYPTVLWTVFRNPVQISQEQLLALETALYFTHMDDPTPREMINNFRQVQKFDERLVYISFRQGIILSVALAGVLGISIVLAVSIWLFKRKKSKKGDNKGVIYKPAIKKEAEVHA

SEQ ID NO: 18835 - protein, 337 aa, Mus musculus
MLFFALLLKVTWILAADGGHHWTYEGPHGQDHWPTSYPECGGDAQSPINIQTDSVIFDPDLPAVQPHGYDQLGTEPLDLHNNGHTVQLSLPPTLHLGGLPRKYTAAQLHLHWGQRGSLEGSEHQINSEATAAELHVVHYDSQSYSSLSEAAQKPQGLAVLGILIEVGETENPAYDHILSRLHEIRYKDQKTSVPPFSVRELFPQQLEQFFRYNGSLTTPPCYQSVLWTVFNRRAQISMGQLEKLQETLSSTEEDPSEPLVQNYRVPQPLNQRTIFASFIQAGPLYTTGEMLGLGVGILAGCLCLLLAVYFIAQKIRKKRLGNRKSVVFTSARATTEA

SEQ ID NO: 18836 - protein, 354 aa, Mus musculus
MPHRSLRATVVLLLVILKKQPSSSAPLNGSKWTYVGPAGEKNWSKKYPSCGGLLQSPIDLHSDILQYDASLAPLQFQGYNVSVEKLLNLTNDGHSVRLNLNSDMYIQGLQPHHYRAEQLHLHWGNRNDPHGSEHTVSGKHFAAELHIVHYNSDLYPDFSTASDKSEGLAVLAVLIEIGSANPSYDKIFSHLQHVKYKGQQVLIPGFNIEELLPESPGEYYRYEGSLTTPPCYPTVLWTVFRNPVQISQEQLLALETALYFTHMDDPTPREMINNFRQVQKFDERLVYISFRQGLLTDTGLSLGIILSVALAGVLGISIVLAVSIWLFKRKKSKKGDNKGVIYKPAIKKEAEVHA

SEQ ID NO: 18837 - protein, 437 aa, Mus musculus
MASLGPSPWAPLSTPAPTAQLLLFLLLQVSAQPQGLSGMQGEPSLGDSSSGEDELGVDVLPSEEDAPEEADPPDGEDPPEVNSEDRMEESLGLEDLSTPEAPEHSQGSHGDEKGGGHSHWSYGGTLLWPQVSPACAGRFQSPVDIRLERTAFCRTLQPLELLGYELQPLPELSLSNNGHTVQLTLPPGLKMALGPGQEYRALQLHLHWGTSDHPGSEHTVNGHRFPAEIHVVHLSTAFSELHEALGRPGGLAVLAAFLQESPEENSAYEQLLSHLEEISEEGSKIEIPGLDVSALLPSDLSRYYRYEGSLTTPPCSQGVIWTVFNETVKLSAKQLHTLSVSLWGPRDSRLQLNFRATQPLNGRTIEASFPAAEDSSPEPVHVNSCFTAGDILALVFGLLFAVTSIAFLLQLRRQHRHRSGTKDRVSYSPAEMTETGA

SEQ ID NO: 18838 - protein, 437 aa, Mus musculus
  unsure (1)..(437): unsure at all Xaa locations
MASLGPSPWAPLSTPAPTAQLLLFLLLQVSAQPQGLSGMQGEPSLGDSSSGEDELGVDVLPSEEDAPEEADPPDGEDPPEVNSEDRMEESLGLEDLSTPEAPEHSQGSHGDEKGGGHSHWSYGGTLLWPQVSPACAGRFQSPVDIRLERTAFCRTLQPLELLGYELQPLPELSLSNNGHTVQLTLPPGLKMALGPGQEYRALQLHLHWGTSDHPGSEHTVNGHRFPAEIHVVHLSTAFSELHEALGRPGGLAVLAAFLQESPEENSAYEQLLSHLEEISEEGSKIEIPGLDVSALLPSDLSRYYRYEGSLTTPPCSQGVIWTVFNETVKLSAKQLHTLSVSLWGXRDSRLQLNFRATQPLNGRTIEASFPAAEDSSPEPVHVNSCFTAGDILALVFGLLFAVTSIAFLLQLRRQHRHRSGTKDRVSYSPAEMTETGA

SEQ ID NO: 18839 - protein, 192 aa, Mus musculus
EFDDSQDNAVLKGGPLSDSYRLIQFHFHWGSSDGQGSEHTVNKKKYAAELHLVHWNTKYGDFGKAVQQPDGLAVLGIFLKIGPASQGLQKVLEALHSIKTKGKRAAFANFDPCSLLPGNLDYWTYPGSLTTPPLLECVTWIVLREPITVSSEQMSHFRTLNFNEEGDAEEAMVDNWRPAQPLKNRKIKASFK

SEQ ID NO: 18840 - protein, 325 aa, Mus musculus
VAHAYASAMRALVSVVSLFFLGIQAHSDWSYSGDDGVGESQWSEQYPSCGGERQSPIDVKTEEVMFNPSLKPLSLVNYEKENLEFTMTNNGHTVSIDLPPSMYLETSDGTEFISKAFHFHWGGRDWELSGSEHTIDGIRSIMEAHFVHFNKEYGTYENAKDQKNGLAVLAVLFKIDEYAENTYYSDIISALKNIEKPGETTTLKDTTIRNLLPKDVHHYYTYPGSLTTPPCTENVQWFVLRDKVTLSKAQVVTIENSVMDHNNNTIQNGYRSTQPNNHRVVEANFLNVPDMYSSYHLYLKNMQKEILQPKKQKKTKKNRHFWSRK

SEQ ID NO: 18841 - protein, 291 aa, Mus musculus
MADLSFIEDAVAFPEKEEDEEEEEEEGVEWGYEEGVEWGLVFPDANGEYQSPINLNSREARYDPSLLDVRLSPNYVVCRDCEVTNDGHTIQVILKSKSVLSGGPLPQGQEFELYEVRFHWGRENQRGSEHTVNFKAFPMELHLIHWNSTLFGSIDEAVGKPHGIAIIALFVQIGKEHVGLKAVTEILQDIQYKGKSKTIPCFNPNTLLPDPLLRDYWVYEGSLTIPPCSEGVTWILFRYPLTISQMQIEEFRRLRTHVKGAELVEGCDGILGDNFRPTQPLSDRIIRAAFQ

SEQ ID NO: 18842 - protein, 317 aa, Mus musculus
MRALVSVVSLFFLGIQAHSDWSYSGDDGVGESQWSEQYPSCGGERQSPIDVKTEEVMFNPSLKPLSLVNYEKENLEFTMTNNGHTVSIDLPPSMYLETSDGTEFISKAFHFHWGGRDWELSGSEHTIDGIRSIMEAHFVHFNKEYGTYENAKDQKNGLAVLAVLFKIDEYAENTYYSDIISALKDIEKPGETTTLKDTTIRDLLPKDVHHYYTYPGSLTTPPCTENVQWFVLRDRVTLSKAQVVTIENSVMDHNNNTIQNGYRSTQPNNHRVVEANFLNVPDMYSSYHLYPKNMQKEILQPKKQKKTKKNRHFGSRK

SEQ ID NO: 18843 - protein, 303 aa, Mus musculus
MADLSFIEDAVAFPEKEEDEEEEEEEGVEWGYEEGVEWGLVFPDANGEYQSPINLNSREARYDPSLLDVRLSPNYVVCRDCEVTNDGHTIQVILKSKSVLSGGPLPQGQEFELYEVRFHWGRENQRGSEHTVNFKAFPMELHLIHWNSTLFGSIDEAVGKPHGIAIIALFVQIGKEHVGLKAVTEILQDIQYKGKSKTIPCFNPNTLLPDPLLRDYWVYEGSLTIPPCSEGVTWILFRYPLTISQMQIEEFRRLRTHVKGVELVEGCDGILGDNFRPTQPLSDRVIRAAFSSQRDREQTHLHQ

SEQ ID NO: 18844 - protein, 291 aa, Mus musculus
MADLSFIEDAVAFPEKEEDEEEEEEEGVEWGYEEGVEWGLVFPDANGEYQSPINLNSREARYDPSLLDVRLSPNYVVCRDCEVTNDGHTIQVILKSKSVLSGGPLPQGQEFELYEVRFHWGRENQRGSEHTVNFKAFPMELHLIHWNSTLFGSIDEAVGKPHGIAIIALFVQIGKEHVGLKAVTEILQDIQYKGKSKTIPCFNPNTLLPDPLLRDYWVYEGSLTIPPCSEGVTWILFRYPLTISQMQIEEFRRLRTHVKGAELVEGCDGILGDNFRPTQPLSDRVIRAAFQ

SEQ ID NO: 18845 - protein, 291 aa, Mus musculus
MADLSFIEDAVAFPEKEEDEEEEEEEGVEWGYEEGVEWGLVFPDANGEYQSPINLNSREARYDPSLLDVRLSPNYVVCRDCEVTNDGHTIQVILKSKSVLSGGPLPQGQEFELYEVRFHWGRENQRGSEHTVNFKAFPMELHLIHWNSTLFGSIDEAVGKPHGIAIIALFVQIGKEHVGLKAVTEILQDIQYKGKSKTIPCFNPNTLLPDPLLRDYWVYEGSLTIPPCSEGVTWILFRYPLTISQMQIEEFRRLRTHVKGVELVEGCDGILGDNFRPTQPLSDRVIRAAFQ

SEQ ID NO: 18846 - protein, 305 aa, Mus musculus
MQLLLALLALAYVAPSTEDSGWCYEIQTKDPRSSCLGPEKWPGACKENQQSPINIVTARTKVNPRLTPFILVGYDQKQQWPIKNNQHTVEMTLGGGACIIGGDLPARYEAVQLHLHWSNGNDNGSEHSIDGRHFAMEMHIVHKKLTSSKEDSKDKFAVLAFMIEVGDKVNKGFQPLVEALPSISKPHSTSTVRESSLQDMLPPSTKMYTYFRYNGSLTTPNCDETVIWTVYKQPIKIHKNQFLEFSKNLYYDEDQKLNMKDNVRPLQPLGKRQVFKSHAPGQLLSLPLPTLLVPTLTCLVANFLQ

SEQ ID NO: 18847 - protein, 258 aa, Mus musculus
WCYEIQTEDPRSSCLGPEKWPGACKENQQSPINIVTARTKVNPRLTPFILVGYDQKQQWPIKNNQHTVEMTLGGGACIIGGDLPARYEAVQLHLHWSNGNDNGSEHSIDGRHFAMEMHIVHKKLTSSKEDSKDKFAVLAFMIEVGDKVNKGFQPLVEALPSISKPHSTSTVRESSLQDMLPPSTKMYTYFRYNGSLTTPNCDETVIWTVYKQPIKIHKNQFLEFSKNLYYDEDQKLNMKDNVRPLQPLGKRQVFKSHA

SEQ ID NO: 18848 - protein, 328 aa, Mus musculus
MGGAARLSAPQALVLWAALGAAAHIGPAPDPEDWWSYKENLQGNFVPGPPFWGLVNAAWSLCAVGKRQSPVDVELKRVLYDPFLPPLRLSTGGEKLRGTLYNTGRHVSFLPASRPVVNVSGGPLLYSHRLSELRLLFGARDGAGSEHQINHEGFSAEVQLIHFNQELYGNLSAASRGPNGLAILSLFVNVAGSSNPFLSRLLNRDTITRISYKNDAYFLQDLSLELLFPESFGFITYQGSLSTPPCSETVTWILIDRALNITSLQMHSLRLLSQNPPSQIFQSLSGNGRPLQPLAHRALRGNRDPRHPERRCRGPNYRLHVDGGPHGR

SEQ ID NO: 18849 - protein, 1442 aa, Mus musculus
MRRLLEPCWWILFLKITSSVLHYVVCFPALTEGYVGTLQESRQDSSVQIRRRKASGDPYWAYSGAYGPEHWVTSSVSCGGSHQSPIDILDHHARVGDEYQELQLDGFDNESSNKTWMKNTGKTVAILLKDDYFVSGAGLPGRFKAEKVEFHWGHSNGSAGSEHSVNGRRFPVEMQIFFYNPDDFDSFQTAISENRIIGAMAIFFQVSPRDNSALDPIIHGLKGVVHHEKETFLDPFILRDLLPASLGSYYRYTGSLTTPPCSEIVEWIVFRRPVPISYHQLEAFYSIFTTEQQDHVKSVEYLRNNFRPQQALNDRVVSKSAVRDAWNHDLADFLDNPLGTEASKVCSSPPIHMKVQPLNQTALQVSWSQPETIYHPPIMNYMISYSWTKNEDEKEKTFTKDSDKDLKATISHVSPDSLYLFRVQAVCRNDMRSDFSQTMLFQANTTRIFQGTRIVKTGVPTASPASSADMAPISSGSSTWTSSGIPFSFVSMATGMGPSSSGSQATVASVVTSTLLAGLGFGGGGISSFPSTVWPTRLPTASAASKQAGRTVLATTEALASPGPDVHSAPSKDSEGTEEGEKEEKSESEDGEREHEEEEKDSEKKEKSEATHTAAESDRTAPAPTPSSPHRTAAEGGHQTIPGRRQDHSAPATDQPGHVAPDLDPLVDTATQVPPTATEEHYSGSDPRRPEMPSKKPMSRGDRFSEDSKFITVNPAEKNTSGMLSRPSPGRMEWIIPLIVVSALTFVCLVLLIAVLVYWRGCNKIKSKGFPRRSREVPSSGERGEKGSRKCFQTAHFYVEDSSSPRVVPNESVPIIPIPDDMEAIPVKQFGKHIGELYSNSQHGFSEDFEEVQRCTADMNITAEHSNHPDNKHKNRYINILAYDHSRVKLRPLPGKDSKHSDYINANYVDGYNKAKAYIATQGPLKSTFEDFWRMIWEQNTGIIIMITNLVEKGRRKCDQYWPTENTEEYGNIIVTLKSTKVHACYTVRRLSVRNTKVKKGQKGNPKGRQNERTVIQYHYTQWPDMGVPEYALPVLTFVRRSSAARMPDMGPVLVHCSAGVGRTGTYIVIDSMLQQIKDKSTVNVLGFLKHIRTQRNYLVQTEEQYIFIHDALLEAILGKETAVSSSQLHSYVNSILIPGVGGKTRLEKQFKLITQCNAKYVECFSAQKECNKEKNRNSSVVPAERARVGLAPLPGMKGTDYINASYIMGYYRSNEFIITQHPLPHTTKDFWRMIWDHNAQIIVMLPDNQSLAEDEFVYWPSREESMNCEAFTVTLISKDRLCLSNEEQIIIHDFILEATQDDYVLEVRHFQCPKWPNPDAPISSTFELINVIKEEALTRDGPTIVHDEYGAVSAGMLCALTTLSQQLENENAVDVFQVAKMINLMRPGVFTDIEQYQFVYKAMLSLISTKENGNGPMTGDKNGAVLTAEESDPAESMESLV

SEQ ID NO: 18850 - protein, 239 aa, Mus musculus
MDVFVHVGPDQWSKLYPIANGNNQSPIDIKTSEANHDSSLKPLSISYNPATAKEIVNMGHSFHVIFDDSTNQYVLKGGPLADSYRLTQFHFHWGNSNDHGSEHTVDGTRYSGELHLVHWNSAKYSSASEAISKADGLAILGVLMKVGPANPRLQKVLDALNSVKSKTERACSEWKAHSEAWYIIPHICSHEHTEDTRVYAHVHGEQLQRSLPLNEVPDQENEVKTIHGSVVRDSQRKRW

SEQ ID NO: 18851 - protein, 261 aa, Mus musculus
MFNPSLKPLSLVNYEKENLEFTMTNNGHTVSIDLPPSMYLETSDGTEFISKAFHFHWGGRDWELSGSEHTIDGIRSIMEAHFVHFNKEYGTYENAKDQKNGLAVLAVLFKIDEYAENTYYSDIISALKDIEKPGETTTLKDTTIRDLLPKDVHHYYTYPGSLTTPPCTENVQWFVLRDRVTLSKAQVVTIENSVMDHNNNTIQNGYRSTQPNNHRVVEANFLNVPDMYSSYHLYPKNMQKEILQPKKQKKTKKNRHFGSRK

SEQ ID NO: 18852 - protein, 251 aa, Mus musculus
RTRGEKENLEFTMTNNGHTVSIDLPPSMYLETSDGTEFISKAFHFHWGGRDWELSGSEHTIDGIRSIMEAHFVHFNKEYGTYENAKDQKNGLAVLAVLFKIDEYAENTYYSDIISALKNIEKPGETTTLKDTTIRNLLPKDVHHYYTYPGSLTTPPCTENVQWFVLRDKVTLSKAQVVTIENSVMDHNNNTIQNGYRSTQPNNHRVVEANFLNVPDMYSSYHLYLKNMQKEILQPKKQKKTKKNRHFWSRK

SEQ ID NO: 18853 - protein, 429 aa, Mus musculus
MRILQSFLACVQLLCLCRLDWAYGYYRQQRKLVEEIGWSYTGALNQKNWGKKYPICNSPKQSPINIDEDLTQVNVNLKKLKFQGWEKASLENTFIHNTGKTVEINLTNDYYLSGGLSEKVFKASKITFHWGKCNVSSEGSEHSLEGQKFPLEMQVYCFDADRFSSFEEAVKGKGRLRALSILFEVGVEENLDYKAIIDGTESVSRFGKQAALDPFVLQNLLPNSTDKYYIYNGSLTSPPCTDTVEWIVFKDTVSISESQLAVFCEVLTMQQSGYVMLMDYLQNNFREQQYKFSRQVFSSYTGKEEIHEVVCSSEPENVQADPENYTSLLVTWERPRVVYDAMIEKFAVLYQPLAGNDQAKHEFLTDGYQDLGAILNNLLPNMSYVLQIVAVCSNGLYGKYSDQLIVDMPTEDAELDLFPELIGTEEIIK

SEQ ID NO: 18854 - protein, 306 aa, Mus musculus
MTVPHQFVRGQERKKVYYNTLVKELGTFLGRNAPCPACPRLKAAVLHYVVCFPALTEGYVGTLQESRQDSSVQIRRRKASGDPYWAYSGAYGPEHWVTSSVSCGGSHQSPIDILDHHARVGDEYQELQLYGFDNESSNKTWMKNTGKTVAILLKDDYFVSGAGLPGRFKAEKVEFHWGHSNGSAGSEHSVNGRRFPVEMQIFFYNPDDFDSFQTAISENRIIGAMAIFFQVSPRDNSALDPIIHGLKGVVHHEKETFLDPFILRDLLPASLGSYYRYTGSLTTPPCSEIVEWIVFRRPVPISYHQV

SEQ ID NO: 18855 - protein, 1612 aa, Mus musculus
MRILQSFLACVQLLCLCRLDWAYGYYRQQRKLVEEIGWSYTGALNQKNWGKKYPICNSPKQSPINIDEDLTQVNVNLKKLKFQGWEKASLENTFIHNTGKTVEINLTNDYYLSGGLSEKVFKASKITFHWGKCNVSSEGSEHSLEGQKFPLEMQVYCFDADRFSSFEEAVKGKGRLRRLSILFEVGVEENLDYKAIIDGTESVSRFGKQAALDPFVLQNLLQNSTDKYYIYNGSLTSPPCTDTVEWIVFKDTVSISESQLAVFCEVLTMQQSGYVMLMDYLQNNFREQQYKFSRQVFSSYTGKEEIHEVVCSSEPENVQADPENYTSLLVTWERPRVVYDAMIEKFAVLYQPLAGNDQAKHEFLTDGYQDLGAILNNLLPNMSYVLQIVAVCSNGLYGKYSDQLIVDMPTEDAELDLFPELIGTEEIIKEEEYGKDNEEDTGLNPGRDSVTNQIRKKEPQVSTTTHYNHMGTKYNEAKTNRSPTRGSEFSGKSDVPNTSPNSTSQHVAEFETERGISLPSQTGTNLPPHNVEGTSASLNSGSKTLFIFPQMNLSGTAESLNTVPITEYKEVSADVSEEENFLTDFKLDTGADDSSGSSPSTSTVPFFSDNLSHGYITSSDMPEAITYDVLKPGSTRNAPEDSAPSGSEESLKDPSLEGSVWFPGSTDLTTQSETGSGRESFLQVNSTDIQIDESRETTESFSPDATVSQDPSVTDMGMPHYSTFAYLPTEVTPQAFTPSSRPLDLAPTINILHSQTTQPVYNGETPLQPSYSSEVFPLATPLLLDNQTLNTTPAASSSDSALHATPVSPSVGVSFESILSSYDDAPLLPFSSASFSSEMFRHLHTVSQTLPQVTSAAERDELSLHASLLVARGDLLLEPSLVQYSDVASHQATTRAASDTLGFGSESAVFYKTSMVSQIESPRSDVVMHAYSSGPEPSYTVEGSHHVPTVSYSSAMPLHGSVDVSDQGSLLINPSHISMPESSFITPTASLLQPPPALSGDGEWSGASSDSELLLPDADGLRTLNISSPVSVAEFTYTTSVFADGIKPLSKSEMMYGNETELKMSSFSDMAYPSKSTVVPKMSDVVHKWSESLKETSVSISSMKSVFPESLVYPTTKGFEQGVSHVPEIIFPVQPTHTASQASGDTWLKPGLSANSEAAFSDTASREVVHPSTQPLLYEAATPFNTEALLQPSFQASDVDTLLKTALPSVPSDPILAGTPQVEQSSSSVSHPMASESGSSESMLHFTSVPILDISPSKVHSTPLQGLTVPHSSKKFSEQGLLKSKSPQQVLPSLFSNDEFFQNAHLDVSQAYPPKGRHAFVTPVLSIDEPQNTLINKLVYSEDIFSSTEISITDKVLTGLPTLASDVLSSTDHSVPLGSGPISLTMVSPNRDDSVTTAKLLLPSTATSKLTQSARSDADLVGGGEDGDDYDDDDYDDIDRGRFPVNKCMSCLPYRESREKVMNDSDTQESSLVDQSDPISPLLFENTEEENGGTGVTRVDKSPPPSMLPQNHNDGKEDSDIQMGSAVLPHTPGSKAWAVLTSDEESGSGQGTSDSLNDNETSTDFSFPDVNEKDTDGVLETDDTGIAPGSPRSSTPSVTSGHSGVSNSSEAG

SEQ ID NO: 18856 - protein, 324 aa, Mus musculus
MWALDFLLSFLLIQLAAQVDSSGTWCYDSQDPKCGPAHWKELAPACGGPTQSPINIDLRLVQRDYTLKPFIFQGYDSAPQDPWVLENDGHTVLLRVNSCQQNCPAIRGAGLPSPEYRLLQLHFHWGSPGHQGSEHSLDEKHGSMEMHMVHMNTKYQSMEDARSQPDGFAILAVLLVEEDRDNTNFSAIVSGLKNLSSPGVAVNLTSTFALASLLPSALRLLRYYRYSGSLTTPGCEPAVLWTVFENTVPIGHAQVVQFQAVLQTGPPGLHPRPLTSNFRPQQPLGGRRISASPEASVRSSVSTLPCLHLALVGLGVGLRLWQGP

SEQ ID NO: 18857 - protein, 204 aa, Mus musculus
GPPFWGLVNAAWSLCAVGKRQSPVDVELKRVLYDPFLPPLRLSTGGEKLRGTLYNTGRHVSFLPASRPVVNVSGGPLLYSHRLSELRLLFGARDGAGSEHQINHEGFSAEVQLIHFNQELYGNLSAASRGPNGLAILSLFVNVAGSSNPFLSRLLNRDTITRISYKNDAYFLQDLSLELLFPESFGFITYQGSLSTPPCSETVT

SEQ ID NO: 18858 - protein, 597 aa, Mus musculus
MRILQSFLACVQLLCLCRLDWAYGYYRQQRKLVEEIGWSYTGALNQKNWGKKYPMCNSPKQSPINIDEDLTQVNVNLKKLKFQGWEKASLENTFIHSTGKTVEINLTNDYYLSGGLSEKVFKASKITFHRGKCNVSSEGSEHSLEGQKFPLEMQVYCFDADRFSSFEEAVKGKGRLRALSILFEVGVEENLDYKAIIDGTESVSRFGKQAALDPFVLQNLLQNSTDKYYIYNGSLTSPPCTDTVEWIVFKDTVSISESQLAVFCEVLTMQQSGYVMLMDYLQNNFREQQYKFSRQVFSSYTGKEEIHEVVCSSEPENVQADPENYTSLLVTWERPRVVYDAMIEKFAVLYQPLAGNDQAKHEFLTDGYQDLGAILNNLLPNMSYVLQIVAVCSNGLYGKYSDQLIVDMPTEDAELDLFPELIGTEEIIKEEEYGKDNEEDTGLNPGRDSVTNQIRKKEPQVSTTTHYNHMGTKYNEAKTNRSPTRGSEFSGKSDVPNTSPNSTSQHVAEFETERGISLPSQTGTNLPPHNVEGTSASLNSGSKTLFIFPQMNLSGTAESLNTVPITEYKEVSADVSEEENFLTDFKLDTGADDSSAG

SEQ ID NO: 18859 - protein, 261 aa, Rattus norvegicus
MASADWGYDSKNGPDQWSKLYPIANGNNQSPIDIKTSEAKHDSSLKPVSVSYNPATAKEIVNVGHSFHVVFDDSSNQSVLKGGPLADSYRLTQFHFHWGNSNDHGSEHTVDGAKYSGELHLVHWNSAKYSSAAEAISKADGLAIIGVLMKVGPANPNLQKVLDALSSVKTKGKRAPFTNFDPSSLLPSSLDYWTYFGSLTHPPLHESVTWVICKESISLSPEQLAQLRGLLSSAEGEPAVPVLSNHRPPQPLKGRTVRASF

SEQ ID NO: 18860 - protein, 260 aa, Rattus norvegicus
MAKEWGYASHNGPEHWHELYPIAKGDNQSPIELHTKDIRHDPSLQPWSVSYDPGSAKTILNNGKTCRVVFDDTFDRSMLRGGPLSGPYRLRQFHLHWGSSDDHGSEHTVDGVKYAAELHLVHWNPKYNTFGEALKQPDGIAVVGIFLKIGREKGEFQILLDALDKIKTKGKEAPFNHFDPSCLFPACRDYWTYHGSFTTPPCEECIVWLLLKEPMTVSSDQMAKLRSLFASAENEPPVPLVGNWRPPQPIKGRVVRASFK

SEQ ID NO: 18861 - protein, 260 aa, Rattus norvegicus
  unsure (1)..(260): unsure at all Xaa locations
XAKEWGYASHNGPEHWHELYPIAKGDNQSPIELHTKDIRHDPSLQPWSVSYDPGSAKTILNNGKTCRVVFDDTFDRSMLRGGPLSGPYRLRQFHLHWGSSDDHGSEHTVDGVKYAAELHLVHWNPKYNTFGEALKQPDGIAVVGIFLKIGREKGEFQILLDALDKIKTKGKEAPFNHFDPSCLFPACRDYWTYHGSFTTPPCEECIVWLLLKEPMTVSSDQMAKLRSLFASAENEPPVPLVGNWRPPQPIKGRVVRASFK

SEQ ID NO: 18862 - protein, 281 aa, Rattus norvegicus
MTIGAFSSLTPTCLRAFHRGPWRGWGYDEHYGPIHWNELFPIADGDQQSPIEIKTKEVKYDSSLRPLSIKYDPASAKIISNSGHSFNVDLDDTEDKSVLHGGPLTGSYRLRQFHLHWGSADDHGSEHVVDGVRYAAELHVVRWNSDKYPSFVEAAHESDELAVLGAFLQIGEHNPQLQKITDILDSIKEKGKQTRFTNFDPLCLLPSSWDYWTYPGSLTVPPLLESVTWIVLKQPISISSQQLARFRSLLCTAEGESEAFLLSNHRPPQPLKGRRVRASFY

SEQ ID NO: 18863 - protein, 260 aa, Rattus norvegicus
MAKEWGYGSHNGPEHWHELYPIAKGDNQSPIELHTKDIRHDPSLQPWSVSYDPGSAKTILNNGKTCRVVFDDTFDRSMLRGGPLSGPYRLRQFHLHWGSSDDHGSEHTVDGVKYAAELHLVHWNPKYNTSEEALKQPDGIAVVGIFLKIGREKGEFQILLDALDKIKTKGKEAPFNHFDPSCLFPACRDYWTYHGSFTTPPCEECIVWLLLKEPMTVSSDQMANVRSLFASAENEPPVPLVGNWRPPQPIKGRVVRASFK

SEQ ID NO: 18864 - protein, 260 aa, Rattus norvegicus
MSHHWGYSKSNGPENWHKEFPIANGDRQSPVDIDTGTAQHDPSLQPLLICYDKVASKSIVNNGHSFNVEFDDSQDFAVLKEGPLSGSYRLIQFHFHWGSSDGQGSEHTVNKKKYAAELHLVHWNTKYGDFGKAVQHPDGLAVLGIFLKIGPASQGLQKITEALHSIKTKGKRAAFANFDPCSLLPGNLDYWTYPGSLTTPPLLECVTWIVLKEPITVSSEQMSHFRKLNFNSEGEAEELMVDNWRPAQPLKNRKIKASFK

SEQ ID NO: 18865 - protein, 264 aa, Rattus norvegicus
MTGHHCWGYGQDDGPSNWHKLYPIAQGDRQSPINIISSQAVYSPSLQPLELFYEACMSLSITNNGHSVQVDFNDSDDRTVVAGGPLEGPYRLKQLHFHWGKKRDVGSEHTVDGKSFPSELHLVHWNAKKYSTFGEAAAAPDGLAVVGIFLETGDEHPSMNRLTDALYMVRFKDTKAQFSCFNPKCLLPTSRHYWTYPGSLTTPPLSESVTWIVLREPIRISERQMEKFRSLLFTSEDDERIHMVNNFRPPQPLKGRVVKASFQS

SEQ ID NO: 18866 - protein, 304 aa, Rattus norvegicus
MLRAKMLGRGPYKPLAILRHMGPLCATRPQHWRFQHSYAEKHSNCARHPLWTGPVSSPGGTQQSPINIQWTDSVYDPKLAPLRVSYDAASCRYLWNTGYFFQVEFDDSCEESGISGGPLGNHYRLKQFHFHWGATDEWGSEHMVDGHAYPAELHLVHWNSMKYENYKKATTGENGLAVIGVFLKLGAHHEALQRLVDILPEVRHKDTQVTMGPFDPSCLLPACRDYWTYPGSLTTPPLAESVTWIVHKMPIEVSPSQLSTFRTLLFSGRGEDEEVMVNNFRPLQPLRGRNVRSSFQVPRVGTKS

SEQ ID NO: 18867 - protein, 225 aa, Rattus norvegicus
MGSTSLVLCVPVLRGGPLTGSYRLRQFHLHWGSADDHGSEHVVDGVRYAAELHVVHWNSDKYPSFVEAAHESDGLAVLGVFLQIGEHNPQLQKITDILDSIKEKGKQTRFTNFDPLCLLPSSWDYWTYPGSLTVPPLLESVTWIVLKQPISISSQQLARFRSLLCTAEGESAAFLLSNHRPPQPLKGRRHNTYGVSVKDCYATKHSDCVELETELTTFFFMKHYV

SEQ ID NO: 18868 - protein, 418 aa, Rattus norvegicus
MASLGLSPWVPLLTPAPTVQLLLLLLLLVSAHPQSLSGMQGVPSLGESSSGEDDLGVEDLPSEEDTPGEADPPGGEDPPEVNSKARKEDSLALEDLPTPEAPENRQGSHRDEKGTLLWPQVSPACAGRFQSPVDIRLELTSFCRTLQPLELLGYELQSLPELSLCNNGHTVQLTLPPGLKMVLGPGQEYRALQLHLHWGTSDHPGSEHTVNGHRFPAEIHVVHLSTAFSELHEALGRPGGLAVLAAFLQESPEENSAYEQLLSHLEEIAEEGSKIEIPGLDVSALLPSDLSRYYRYEGSLTTPPCSQGVIWTVFNETVKLSAKQLHTLSVSLWGLRDSRLQLNFRATQPLNGRTIEASFPAVADSSPEPGDILALVFGLLFAATSIAFLLQLRRQHRHRSGTKDGVTYSPAEMTETGA

SEQ ID NO: 18869 - protein, 319 aa, Rattus norvegicus
MGGAARLSAPQALVLWAALGAAAHIGPAPDPEDWWSYKENLQGNFVPGPPFWGLVNAAWSLCAVGKRQSPVDVELKRVLYDPFLPPLRLSTGGEKLRGTLYNTGRHVSFLPASRPVVNVSGGPLLYSHRLSELRLLFGARDGAGSEHQINHQGFSAEVQLIHFNQELYGNLSAASRGPNGLAILSLFVNVAGSSNPFLSRLLNRDTITRISYKNDAYFLQDLSLELLFPESFGFITYQGSLSTPPCSETVTWILIDRALNITSLQVTDLQIFQSLSGNGRPLQPLAHRALRGNRDPRHPERRCRGPNYRLHVDGGPHGR

SEQ ID NO: 18870 - protein, 328 aa, Rattus norvegicus
MGGAARLSAPQALVLWAALGAAAHIGPAPDPEDWWSYKENLQGNFVPGPPFWGLVNAAWSLCAVGKRQSPVDVELKRVLYDPFLPPLRLSTGGEKLRGTLYNTGRHVSFLPASRPVVNVSGGPLLYSHRLSELRLLFGARDGAGSEHQINHQGFSAEVQLIHFNQELYGNLSAASRGPNGLAILSLFVNVAGSSNPFLSRLLNRDTITRISYKNDAYFLQDLSLELLFPESFGFITYQGSLSTPPCSETVTWILIDRALNITSLQMHSLRLLSQNPPSQIFQSLSGNGRPLQPLAHRALRGNRDPRHPERRCRGPNYRLHVDGGPHGR

SEQ ID NO: 18871 - protein, 1426 aa, Rattus norvegicus
MRRLLEPCWWILFLKITSSVLHYVVCFPALTEGYVGTLQESRQGSSVQIRRRKASGDPYWAYSGAYGPEHWVTSSVSCGGSHQSPIDILDHHARVGEEYQELQLDGFDNESSNKTWMKNTGKTVAILLKDDYFVSGAGLPGRFKAEKVEFHWGHSNGSAGSEHSVNGRRFPVEMQIFFYNPDDFDSFQTAISENRIIGAMAIFFQVSPRDNSALDPIIHGLKGVVHHEKETFLDPFVLRDLLPASLGSYYRYTGSLTTPPCSEIVEWIVFRRPVPISYHQLEAFYSIFTTEQQDHVKSVEYLRNNFRPQQALNDRVVSKSAVRDAWNHDLADFLDNPLGTEASKVCSSPPIHMKVQPLNQTALQVSWSQPETIYHPPIMNYMISYSWTKNEDEKEKTFTKDSDKDLKATISHISPDSLYLFRVQAVCRNDMRSDFSQTMLFQANTTRIFQGTRIVKTGVPTASPASSADMAPISSGSSTWTSSGIPFSFVSMATGMGPSSSGSQATVASVVTSTLLAGLGFGGGGISSFPSTVWPTRLPTASAASKQAGRPVLATTEALASPGPDGDSAPTKDGEGAEEGEKEEKSESEDGEREQEEEEKDSEKKEKSEATHTAAESDQTAPAPTPSSPHRTAQEGGHQTIPGHRQDHSAPVTDQPGHVDPGLDTLVDTATQVPPTATEEHYSGSDPKRPEMPSKKPISRGDRFSEDSKFITVNPAEKNTSGMISRPSPGRMEWIIPLIVVSALTFVCLVLLIAVLVYWRGCNKIKSKGFPRRSREVPSSGERGEKGSRKCFQTAHFYVEDSSSPRVVPNESIPIIPIPDDMEAIPVKQFGKSQHGFSGDFEEVQRCTADMNITAEHSNHPDNKHKNRYINILAYDHSRVKLRPLPGKDSKHSDYINANYVDGYNKAKAYIATQGPLKSTFEDFWRMIWEQNTGIIIMITNLVEKGRRKCDQYWPTENTEEYGNIIVTLKSTEVHACYTVRRFSVRNTKVKKGQKGNPKGRQNERTVIQYHYTQWPDMGVPEYALPVLTFVRRSSAARMPDMGPVLVHCSAGVGRTGTYIVIDSMLQQIKDKSTVNVLGFLKHIRTQRNYLVQTEEQYIFIHDALLEAILGKETEVSSSQLHSYVNSILIPGVGGKTRLEKQFKLITQCNAKYVECFSAQKECNKEKNRNSSVVPAERARVGLAPLPGMKGTDYINASYIMGYYRSNEFIITQHPLPHTTKDFWRMIWDHNAQIIVMLPDNQSLAEDEFVYWPSREESMNCEAFTVTLISKDRLCLSNEEQIIIHDFILEATQDDYVLEVRHFQAPISSTFELINVIKEEALARDGPTIVHDEYGAVSAGMLCALTTLSQQLENENAVDVFQVAKMINLMRPGVFTDIEQYQFVYKAMLSLVSTKENGNGPMTGDKNGAVLTAEESDPAESMESLV

SEQ ID NO: 18872 - protein, 1168 aa, Rattus norvegicus
MRRLLEPCWWILFLKITSSVLHYVVCFPALTEGYVGTLQESRQGSSVQIRRRKASGDPYWAYSGAYGPEHWVTSSVSCGGSHQSPIDILDHHARVGEEYQELQLDGFDNESSNKTWMKNTGKTVAILLKDDYFVSGAGLPGRFKAEKVEFHWGHSNGSAGSEHSVNGRRFPVEMQIFFYNPDDFDSFQTAISENRIIGAMAIFFQVSPRDNSALDPIIHGLKGVVHHEKETFLDPFVLRDLLPASLGSYYRYTGSLTTPPCSEIVEWIVFRRPVPISYHQLEAFYSIFTTEQQDHVKSVEYLRNNFRPQQALNDRVVSKSAVRDAWNHDLADFLDNPLGTEASKVCSSPPIHMKVQPLNQTALQVSWSQPETIYHPPIMNYMISYSWTKNEDEKEKTFTKDSDKDLKATISHISPDSLYLFRVQAVCRNDMRSDFSQTMLFQANTTRIFQGTRIVKTGVPTASPASSADMAPISSGSSTWTSSGIPFSFVSMATGMGPSSSGSQATVASVVTSTLLAGLGFGGGGISSFPSTVWPTRLPTASAASKQAGRPVLATTEALASPGPDGDSAPTKDGEGAEEGEKEEKSESEDGEREQEEEEKDSEKKEKSEATHTAAESDQTAPAPTPSSPHRTAQEGGHQTIPGHRQDHSAPVTDQPGHVDPGLDTLVDTATQVPPTATEEHYSGSDPKRPEMPSKKPISRGDRFSEDSKFITVNPAEKNTSGMISRPSPGRMEWIIPLIVVSALTFVCLVLLIAVLVYWRGCNKIKSKGFPRRSREVPSSGERGEKGSRKCFQTAHFYVEDSSSPRVVPNESIPIIPIPDDMEAIPVKQFGKSQHGFSGDFEEVQRCTADMNITAEHSNHPDNKHKNRYINILAYDHSRVKLRPLPGKDSKHSDYINANYVDGYNKAKAYIATQGPLKSTFEDFWRMIWEQNTGIIIMITNLVEKGRRKCDQYWPTENTEEYGNIIVTLKSTEVHACYTVRRFSVRNTKVKKGQKGNPKGRQNERTVIQYHYTQWPDMGVPEYALPVLTFVRRSSAARMPDMGPVLVHCSAGVGRTGTYIVIDSMLQQIKDKSTVNVLGFLKHIRTQRNYLVQTEEQYIFIHDALLEAILGKETEVSSSQLHSYVNSILIPGVGGKTRLEKQFKLITQCNAKYVECFSALRGQQVEGS

SEQ ID NO: 18873 - protein, 717 aa, Rattus norvegicus
MRRLLEPCWWILFLKITSSVLHYVVCFPALTEGYVGTLQESRQGSSVQIRRRKASGDPYWAYSGAYGPEHWVTSSVSCGGSHQSPIDILDHHARVGEEYQELQLDGFDNESSNKTWMKNTGKTVAILLKDDYFVSGAGLPGRFKAEKVEFHWGHSNGSAGSEHSVNGRRFPVEMQIFFYNPDDFDSFQTAISENRIIGAMAIFFQVSPRDNSALDPIIHGLKGVVHHEKETFLDPFVLRDLLPASLGSYYRYTGSLTTPPCSEIVEWIVFRRPVPISYHQLEAFYSIFTTEQQDHVKSVEYLRNNFRPQQALNDRVVSKSAVRDAWNHDLADFLDNPLGTEASKVCSSPPIHMKVQPLNQTALQVSWSQPETIYHPPIMNYMISYSWTKNEDEKEKTFTKDSDKDLKATISHISPDSLYLFRVQAVCRNDMRSDFSQTMLFQANTTRIFQGTRIVKTGVPTASPASSADMAPISSGSSTWTSSGIPFSFVSMATGMGPSSSGSQATVASVVTSTLLAGLGFGGGGISSFPSTVWPTRLPTASAASKQAGRPVLATTEALASPGPDGDSAPTKDGEGAEEGEKEEKSESEDGEREQEEEEKDSEKKEKSEATHTAAESDQTAPAPTPSSPHRTAQEGGHQTIPGHRQDHSAPVTDQPGHVDPGLDTLVDTATQVPPTATEEHYSGSDPKRPEMPSKKPISRGDRFSEDSKFITVNPGK

SEQ ID NO: 18874 - protein, 1397 aa, Rattus norvegicus
MRRLLEPCWWILFLKITSSVLHYVVCFPALTEGYVGTLQESRQGSSVQIRRRKASGDPYWAYSGAYGPEHWVTSSVSCGGSHQSPIDILDHHARVGEEYQELQLDGFDNESSNKTWMKNTGKTVAILLKDDYFVSGAGLPGRFKAEKVEFHWGHSNGSAGSEHSVNGRRFPVEMQIFFYNPDDFDSFQTAISENRIIGAMAIFFQVSPRDNSALDPIIHGLKGVVHHEKETFLDPFVLRDLLPASLGSYYRYTGSLTTPPCSEIVEWIVFRRPVPISYHQLEAFYSIFTTEQQDHVKSVEYLRNNFRPQQALNDRVVSKSAVRDAWNHDLADFLDNPLGTEASKVCSSPPIHMKVQPLNQTALQVSWSQPETIYHPPIMNYMISYSWTKNEDEKEKTFTKDSDKDLKATISHISPDSLYLFRVQAVCRNDMRSDFSQTMLFQANTTRIFQGTRIVKTGVPTASPASSADMAPISSGSSTWTSSGIPFSFVSMATGMGPSSSGSQATVASVVTSTLLAGLGFGGGGISSFPSTVWPTRLPTASAASKQAGRPVLATTEALASPGPDGDSAPTKDGEGAEEGEKEEKSESEDGEREQEEEEKDSEKKEKSEATHTAAESDQTAPAPTPSSPHRTAQEGGHQTIPGHRQDHSAPVTDQPGHVDPGLDTLVDTATQVPPTATEEHYSGSDPKRPEMPSKKPISRGDRFSEDSKFITVNPAEKNTSGMISRPSPGRMEWIIPLIVVSALTFVCLVLLIAVLVYWRKCFQTAHFYVEDSSSPRVVPNESIPIIPIPDDMEAIPVKQFGKSQHGFSGDFEEVQRCTADMNITAEHSNHPDNKHKNRYINILAYDHSRVKLRPLPGKDSKHSDYINANYVDGYNKAKAYIATQGPLKSTFEDFWRMIWEQNTGIIIMITNLVEKGRRKCDQYWPTENTEEYGNIIVTLKSTEVHACYTVRRFSVRNTKVKKGQKGNPKGRQNERTVIQYHYTQWPDMGVPEYALPVLTFVRRSSAARMPDMGPVLVHCSAGVGRTGTYIVIDSMLQQIKDKSTVNVLGFLKHIRTQRNYLVQTEEQYIFIHDALLEAILGKETEVSSSQLHSYVNSILIPGVGGKTRLEKQFKLITQCNAKYVECFSAQKECNKEKNRNSSVVPAERARVGLAPLPGMKGTDYINASYIMGYYRSNEFIITQHPLPHTTKDFWRMIWDHNAQIIVMLPDNQSLAEDEFVYWPSREESMNCEAFTVTLISKDRLCLSNEEQIIIHDFILEATQDDYVLEVRHFQAPISSTFELINVIKEEALARDGPTIVHDEYGAVSAGMLCALTTLSQQLENENAVDVFQVAKMINLMRPGVFTDIEQYQFVYKAMLSLVSTKENGNGPMTGDKNGAVLTAEESDPAESMESLV

SEQ ID NO: 18875 - protein, 309 aa, Rattus norvegicus
MQLLLALLALAYVAPSTEDSHWCYEIQAKEPNSHCSGPEQWTGDCKKNQQSPINIVTSKTKLNPSLTPFTFVGYDQKKKWEVKNNQHSVEMSLGEDIYIFGGDLPTQYKAIQLHLHWSEESNKGSEHSIDGKHFAMEMHVVHKKMTTGDKVQDSDSKDKIAVLAFMVEVGNEVNEGFQPLVEALSRLSKPFTNSTVSESCLQDMLPEKKKLSAYFRYQGSLTTPGCDETVIWTVFEEPIKIHKDQFLEFSKKLYYDQEQKLNMKDNVRPLQPLGNRQVFRSHASGRLLSLPLPTLLVPTLTCLVASFLH

SEQ ID NO: 18876 - protein, 323 aa, Rattus norvegicus
MWALGFRLCFLLMLAAQVDSNGTWCYDSQDPKCGPAHWKELAPACGGPTQSPVNIDLRLVQRDYALKPFIFHGYDSAPQDPWILENDGHTVLLRVHSCQQNCPAIRGAGLPSSEYRLLQLHFHWGSPGHKGSEHSVDEKHGSMEMHMVHMNTKYQSMGHARSQPDGLAILAVLLVEEDKDNTNFSAIVSGLKNVSSPGVSVNLTSTFALASLLPSALGLLRYYRYSGSLTTPGCEPAVLWTVFENTVPIGHAQVVQFQAVPQTGPPGLHPRPLTDNFRPQQPLGGRRISASPGASIRSSVPIRPCLHLALLGLGVGLRLWQGP

SEQ ID NO: 18877 - protein, 1616 aa, Rattus norvegicus
MRILQSFLACVQLLCVCRLDWAYGYYRQQRKLVEEIGWSYTGALNQKNWGKKYPICNSPKQSPINIDEDLTQVNVNLKKLKFQGWEKPSLENTFIHNTGKTVEINLTNDYYLSGGLSEKVFKASKMTFHWGKCNVSSEGSEHSLEGQKFPLEMQIYCFDADRFSSFEETVKGKGRLRALSILFEIGVEENLDYKAIIDGTESVSRFGKQAALDPFILQNLLPNSTDKYYIYNGSLTSPPCTDTVEWIVFKDTVSISESQLAVFCEVLTMQQSGYVMLMDYLQNNFREQQYKFSRQVFSSYTGKEEIHEAVCSSEPENVQADPENYTSLLITWERPRVVYDTMIEKFAVLYQPLEGNDQTKHEFLTDGYQDLGAILNNLIPNMSYVLQIVAICSNGLYGKYSDQLIVDMPTEDAELDLFPELIGTEEIIKEENYGKGNEEDTGLNPGRDSATNQIRKKEPQVSTTTHYNHMGTKYNEAKTNRSPTRGSEFSGKSDVLNTSLNPTSQQVAEFNPEREMSLPSQIGTNLPPHSVEGTSASLNSGSKTLLVFPQMNLSGTAESLNMVSITEYKEVSADLSEEENLLTDFKLDSGADDSSGSSPASSTVPFSTDNLSHGYTSSSDTPEAVTYDVLRPESTRNALEDSAPSGSEESLKDPSLEGSVWFPGSTDLTTQSETGSGREGFLQVNSTDFQVDESRETTETFSPDATASRGPSVTDMEMPHYSTFAYPPTEVTSHAFTPSSRPLDLAPTSNILHSQTTQPVYNGETPLQPSYSSEVFPLVTPLLLDNQTLNTTPAASSSDSALHATPVFPSVGVSFDSILSSYDDAPLLPFSSASFSSDLFHHLHTVSQTLPQVTSAAERDELSLHASLLVAGGDLLLEPSLVQYSDVMSHQVTIHAASDTLEFGSESAVLYKTSMVSQIESPSSDVVMHAYSSGPETSYAIEGSHHVLTVSSSSAIPVHDSVGVADQGSLLINPSHISLPESSFITPTASLLQLPPALSGDGEWSGASSDSELLLPDTDGLRTLNMSSPVSVADFTYTTSVSGDDIKPLSKGEMMYGNETELKMSSFSDMAYPSKSTVVPKMSDIVNKWSESLKETSVSVSSINSVFTESLVYPITKVFDQEISRVPEIIFPVKPTHTASQASGDTWLKPGLSTNSEPALSDTASSEVSHPSTQPLLYEAASPFNTEALLQPSFPASDVDTLLKTALPSGPRDPVLTETPMVEQSSSSVSLPLASESASSKSTLHFTSVPVLNMSPSDVHPTSLQRLTVPHSREEYFEQGLLKSKSPQQVLPSLHSHDEFFQTAHLDISQAYPPKGRHAFATPILSINEPQNTLINRLVYSEDIFMHPEISITDKALTGLPTTVSDVLIATDHSVPLGSGPISMTTVSPNRDDSVTTTKLLLPSKATSKPTHSARSDADLVGGGEDGDDYDDDDYDDIDSDRFPVNKCMSCSPYRESQEKVMNDSDTQESSLVDQSDPISHLLSENTEEENGGTGVTRVDKSPDKSPPPSMLPQKHNDGREDRDIQMGSAVLPHTPGSKAWAVLTSDEESGSGQGTSDSLNDNETSTDFSFPDVNEKDADGVLEADDTGIAPGSPRSSTPSVTSGHSGVSNSSEAG

SEQ ID NO: 18878 - protein, 2316 aa, Rattus norvegicus
MRILQSFLACVQLLCVCRLDWAYGYYRQQRKLVEEIGWSYTGALNQKNWGKKYPICNSPKQSPINIDEDLTQVNVNLKKLKFQGWEKPSLENTFIHNTGKTVEINLTNDYYLSGGLSEKVFKASKMTFHWGKCNVSSEGSEHSLEGQKFPLEMQIYCFDADRFSSFEETVKGKGRLRALSILFEIGVEENLDYKAIIDGTESVSRFGKQAALDPFILQNLLPNSTDKYYIYNGSLTSPPCTDTVEWIVFKDTVSISESQLAVFCEVLTMQQSGYVMLMDYLQNNFREQQYKFSRQVFSSYTGKEEIHEAVCSSEPENVQADPENYTSLLITWERPRVVYDTMIEKFAVLYQPLEGNDQTKHEFLTDGYQDLGAILNNLIPNMSYVLQIVAICSNGLYGKYSDQLIVDMPTEDAELDLFPELIGTEEIIKEENYGKGNEEDTGLNPGRDSATNQIRKKEPQVSTTTHYNHMGTKYNEAKTNRSPTRGSEFSGKSDVLNTSLNPTSQQVAEFNPEREMSLPSQIGTNLPPHSVEGTSASLNSGSKTLLVFPQMNLSGTAESLNMVSITEYKEVSADLSEEENLLTDFKLDSGADDSSGSSPASSTVPFSTDNLSHGYTSSSDTPEAVTYDVLRPESTRNALEDSAPSGSEESLKDPSLEGSVWFPGSTDLTTQSETGSGREGFLQVNSTDFQVDESRETTETFSPDATASRGPSVTDMEMPHYSTFAYPPTEVTSHAFTPSSRPLDLAPTSNILHSQTTQPVYNGETPLQPSYSSEVFPLVTPLLLDNQTLNTTPAASSSDSALHATPVFPSVGVSFDSILSSYDDAPLLPFSSASFSSDLFHHLHTVSQTLPQVTSAAERDELSLHASLLVAGGDLLLEPSLVQYSDVMSHQVTIHAASDTLEFGSESAVLYKTSMVSQIESPSSDVVMHAYSSGPETSYAIEGSHHVLTVSSSSAIPVHDSVGVADQGSLLINPSHISLPESSFITPTASLLQLPPALSGDGEWSGASSDSELLLPDTDGLRTLNMSSPVSVADFTYTTSVSGDDIKPLSKGEMMYGNETELKMSSFSDMAYPSKSTVVPKMSDIVNKWSESLKETSVSVSSINSVFTESLVYPITKVFDQEISRVPEIIFPVKPTHTASQASGDTWLKPGLSTNSEPALSDTASSEVSHPSTQPLLYEAASPFNTEALLQPSFPASDVDTLLKTALPSGPRDPVLTETPMVEQSSSSVSLPLASESASSKSTLHFTSVPVLNMSPSDVHPTSLQRLTVPHSREEYFEQGLLKSKSPQQVLPSLHSHDEFFQTAHLDISQAYPPKGRHAFATPILSINEPQNTLINRLVYSEDIFMHPEISITDKALTGLPTTVSDVLIATDHSVPLGSGPISMTTVSPNRDDSVTTTKLLLPSKATSKPTHSARSDADLVGGGEDGDDYDDDDYDDIDSDRFPVNKCMSCSPYRESQEKVMNDSDTQESSLVDQSDPISHLLSENTEEENGGTGVTRVDKSPDKSPPPSMLPQKHNDGREDRDIQMGSAVLPHTPGSKAWAVLTSDEESGSGQGTSDSLNDNETSTDFSFPDVNEKDADGVLEADDTGIAPGSPRSSTPSVTSGHSGVSNSSEAEASNSSHESRIGLAEGLESEKKAVIPLVIVSALTFICLVVLVGILIYWRKCFQTAHFYLEDNTSPRVISTPPTPIFPISDDIGAIPIKHFPKHVADLHASNGFTEEFETLKEFYQEVQSCTVDLGITADSSNHPDNKHKNRYVNIVAYDHSRVKLTQLAEKDGKLTDYINANYVDGYNRPKAYIAAQGPLKSTAEDFWRMIWEHNVEVIVMITNLVEKGRRKCDQYWPTDGSEEYGSFLVNQKNVQVLAYYTVRNFTLRNTKIKKGSQKGRSSGRLVTQYHYTQWPDMGVPEYSLPVLAFVRKTAQAKRHAVGPVVVHCSAGVGRTGTYIVLDSMLQQIQHEGTVNIFGFLKHIRSQRNYLVQTEEQYVFIHDTLVEAILSKETEVPDSHIHSYVNTLLIPGPSGKTKLEKQFQLLSQSNILQSDYSTALKQCNREKNRTSSIIPVERSRVGISSLSGEGTDYINASYIMGYYQSNEFIITQHPLLHTIKDFWRMIWDHNAQLVVMIPDGQNMAEDEFVYWPNKDEPINCESFKVTLMSEEHKCLSNEEKLIVQDFILEATQDDYVLEVRHFQCPKWPNPDSPISKTFELISIIKEEAANRDGPMIVHDEHGGVTAGTFCALTTLMHQLEKENSMDVYQVAKMINLMRPGVFTDIEQYQFLYKVVLSLVSTRQEENPSTSLDSNGAALPDGNIAESLESLV

SEQ ID NO: 18879 - protein, 285 aa, Rabbit fibroma virus
MSSRQESPIDLKIYNTTVEKYPPLDINYGDNSTRIHNNGSTLKVLFNVSVPSTLQGGPLKSKYVLSELSFRWGRSEHSVNGAYYIGEVQMVHWNLKYTNYDNARKYKDGVVILAVFLKTGRLNDKIELITSQVSNIVQKNASHVFTGFNPISLLPKCLDYWTYAGTTTASPIDKNVTWIVFKEPIPISAGQLGRLRTMISSDPGKPVTYIYNNFRETQPVKEYNVKASFSNAEGCYDRHVYKNPFVELYALVIATVCILIVLSVISVVLYNRRTHSLSRRVYYGR

SEQ ID NO: 18880 - protein, 286 aa, Myxoma virus
MSSRQESPIDLKIYSTPVEEYPPLDVNYGDNSTYIYNNGSTLKVLFNVAIPSTLQGGPLKSKYVLSELSFRWGRSEHSVNGAYYVGEVQMVHWNLKYANYDDARKYKDGVVILAVFLKAGGLNDKIELITSQVHNIVQKNASKGFTGFNPVSLLPKCLDYWTYTGTTTVAPIDKNVTWIVFKDPIPISAGQLGRLRTMTSSDPGKPVTYIYNNFKETQPVKEYNVKASFSNAEGCYDKHVYKNPFIELYVIIAVVVCVTIILSVMASILYNRRRFVALARRIYYGS

SEQ ID NO: 18881 - protein, 292 aa, Rhodopseudomonas palustris
MDRPNRLGQSVTVKRRSFVPLPFAPASGNASSRASTPETSMDRRNILKAFAGLALCPLCATAGAAAEGAHHWGYEGEGGPAKWGEIDPANQICSIGVQQSPVDIRSTVSANLFPLQVQWADTADTIINNGHTIQLNVAEGSTLKLGGATFKLVQFHFHRPSEHQIDGKSFPMEVHFVHRMDSGTLGVVGVLMQEGAANAAFAKIVATMPQSEGPAVKADAGINPNALLPAKLGYYRYEGSLTTPPCSEVVDWMVLTDPITVAAEDVAAFAKLYPMNARPVQKDNRRFVLQSN

SEQ ID NO: 18882 - protein, 255 aa, Rhodopseudomonas palustris
MDRRNILKAFAGLALCPLCATAGAAAEGAYHWGYEGEGGPAKWGELDPANQICSIGVQQSPVDIRSTVSANLFPLQVQWADTADTIINNGHTIQLNVAEGSTLKLGGATFKLVQFHFHRPSEHQIDGKSFPMEVHFVHRMDSGTLGVVGVVGVLMQEGAANAAFAKIVATMPQSEGPAVKADAAINPNALLPAKLGYYRYEGSLTTPPCSEVVDWMVLTDPITVAAEDVAAFAKLYPMNARPVQKDNRRFVLQSN

SEQ ID NO: 18883 - protein, 259 aa, Rhodospirillum rubrum
MVMQRAFSHAAMAVAFGLVGFSGAPAVAAETAHPPHWAYEGKGGPVDWGALSEDYHACAAGKEQSPVDIRDAIPAKLPAIAPAYQAQSAVVVNNGHTLQVNVSPGSSLDFRGQRYELLQYHFHHPSEHLVNGKAAPLELHLVHKGPTALTVIGVMLVPGAANPAIEAIWKVAPAKEGGEATLGDPGPDLGKLLPESKSYTFYEGSLTTPPCSEVVNWINLKTPVTVSEDQIARFAALFPMNARPPQALHRRIILESQDQ

SEQ ID NO: 18884 - protein, 237 aa, Synechococcus sp. PCC 7942
MRRRSLLAALGGSCIGWLGSSQPVWASADWDYSRRRGPRQWAKLDPAYAICQQGRQQSPINLTGQPDRTPLDYRDRPFKGILQQAPHSLRIDCPAGNGFWEAGTFYELLQFHFHTPSEHQHQGQRFPAEIHFVHRSDRDQLAVVGVFLAAGDRPLPILDNLLAVPPSTDNQLLSTAIQPTDLMPRDRTVWRYSGSLTTPPCSEPVLWRVCDRPLFVARQQLRQLRQRLGMNARPLQA

SEQ ID NO: 18885 - protein, 230 aa, Enterococcus faecium
MDVEWGYSGDKGPENWASLCDWFARGAEFPLQSPIHLTKGEETKIEGDTLSFHYQKQRFTDKEFKNTIHLVPFDQLSYVEFKKERYYLTDIHFHLPSEHIINGKQEDIEFHFVHMNSKKENLVVGVMYQLMVQEGWLYNQENGESWNLEKHEHWVNPDVFFPEQKSHFHYIGSLTTPPTSGPIQWFVMDHVGKLNQEFLLPFDGQYARPNNRPIQPLNGREIYYFEEFEQ

SEQ ID NO: 18886 - protein, 262 aa, Monodelphis domestica
MANLNWSYEGENGPEHWSKLYPIANGDNQSPIDIKTKEVKHDASLKPISVSYNPATAKEIVNVSHNFQVNFEDKDNQSVLKGGPFTGSFRLRQFHFHWGTADDHGSEHTVDGVKYSSELHIVHWNSEKYSSFSEAAEKPDGLAIIAVFIKAGQANPGLQKVIDALSSIKTKGKKAPFANFDPSLLIPQSSDYWSYHGSLTHPPLHESVTWIIYREPISASSEQLAKFRSLLSTAEGEKASSILHNHRLPQPLKGRQVKASFK

SEQ ID NO: 18887 - protein, 260 aa, Tribolodon hakonensis
MSHGWGYADHNGPQKWCENFPIANGPRQSPIDIQTKGASYDDTLKPLKLKYDPTTSLDILNNGHSFQVTFADDNDSSMLTEGPISGKYRLKQFHFHWGASDGKGSEHTVDGKCYPAELHLVHWNTKYASFGEAANKPDGLAVVGVFLQIGEDNPKLQKILDAMDAIKSKGKQTSFTNFDPTCLLPKSLEYWTYPGSLTTPPLYESVTWIVCKQPISVSSEQMKKFRSLLFTAEEEKACCMVNNYRPPQPLKDRKVCASFK

SEQ ID NO: 18888 - protein, 274 aa, Nicotiana langsdorffii x Nicotiana sanderae
MRMAAITKMLFISFLFLSSVFLARSGEVDDESEFSYDEKSENGPANWGNIRPDWKECSGKLQSPIDIFDLRAEVVSNLRILQKDYKPSNATLLNRGHDIMLRLDDGGYLKINETQYQLKQLHWHTPSEHTINGERFNLEAHLVHESNNGKFVVIGIVYEIGLWPDPFLSMIENDLKVPANKKGIERGIGIIDPNQIKLDGKKYFRYIGSLTTPPCTEGVVWIIDRKVKTVTRRQIKLLQEAVHDGFETNARPTQPENERYINSTYHSFGIEKQQ

SEQ ID NO: 18889 - protein, 233 aa, Listeria innocua
MTKEKVLWGYDEKTGPEMWGHICSDFEIAHTGKAQSPVNIEQADVVKLKPSTMKFYYKETDYTIKRIEQSVHVFPHDKEQGLRFNGEYYPLVSFHAHIPAEHLLDGYVYPIEWHFVHEKPDGTTLVMSAWMEIDNTNNVEFKDLPTYFPEVFADFETEREITLDVNEFMPEERVFYTYQGSRTTPPTVEGVTWIVLKNAKTLGQEDFTEFEKAIGNTSRPVQDLNGREITFYN

SEQ ID NO: 18890 - protein, 233 aa, Listeria monocytogenes EGD-e
MTKEKVLWGYDEKTGPEMWGHICSDFEIAHTGKAQSPVDIEQADVVKLKPSTMKFYYKETDYTIRRIEQSVHVFPHDKEQGLRFNGEYYPLVSFHAHIPAEHLLDGYIYPIEWHFVHEKPDGTTLVMSAWMDIDNTNNIEFKNLPTYFPEVFADFETEREITLDVNEFMPEERVFYTYQGSRTTPPTVEGVTWIVLKNAKTLGQEDFTEFEKAIGNTSRPVQDLNGREITFYN

SEQ ID NO: 18891 - protein, 241 aa, Anopheles gambiae str. PEST
MRKSLLATALLLCPAAFAATPHWEYSGEAGPAQWARLTPEFGQCAGSNQSPVNLDGLVDAELAPLQFHYLAGGRSVTNNGHTVQVDYAPGSRLELDGMRFELKQFHFHAPSENLIKGHSYPLEGHLVHINAKGELAVVAVMFEPGQANAALSQAWQVLPAKAGESHAFKEPISAEQLLPAKRDYYRFSGSLTTPPCSEGVRWLVMKQPVQVSQAQIDAFKAVMHHPNNRPVQPLHGRLVLQ

SEQ ID NO: 18892 - protein, 288 aa, Anopheles gambiae str. PEST
LEESETDQNHVKMSVTWGYTQMNGPQKWPEMFPQARGQRQSPVDIVTSKTQNSGDLQENPLRWTYVPENTRSLVNPGYCWRVDVNGKGSMLTGGPLQKEQFILEQFHCHWGCSDSRGSEHTVDGESFAGELHLVHWNQSKYKSFAEAAGHPDGLAVLGVFLKVGKPHPELDIIARLLPFITHKGDRVTLNKPLDPARLLPEGKAYWTYLGSLTTPPCSESVTWILFKEPIEVSHEQLELFREMRCYDAAEECPCDETLNKQFDYGKVINNFRPPLELGNRQLREVDSY

SEQ ID NO: 18893 - protein, 330 aa, Anopheles gambiae str. PEST
TSPSDFAYSVKVLCSVQTKLTMKSFTLLICYGLFVLHAARGDEWNYPTPGTNGVMSEPERWGGQCDNGRRQSPIDLTIAAAVRGQFAPLFFSNYMLPLKQPRVTNTGHSIQINNRDSAITMQGGGLGGRFVLDQMHFHWGSEHTLDDTRYGLELHLVHHDTRYASLEDAVQARNGVAVLGVLFHVGSQPNMHIDTILDTATEIQNEVGKEALLRGKLSPYNLLPSNRTSFYRYEGSLTTPACAESVIWTVFTESISVSLEQVERFKAIHDQTGRELVNNFRSVQPLNTRALVYATEWDQQGNNFATKMTSNVVFLGAIVLLVITSRLSYH

SEQ ID NO: 18894 - protein, 352 aa, Anopheles gambiae str. PEST
SHQFWYYQSIMATHRILDTMAIKVGPSHWGEQYNSCTGKHQSPININSLDVKKVNLPPLVFQGFDVSPRETNLTNNGHTVVVTMESEVTPTVSGGPLTGVYEYSQLHFHWGDNDTFGSEDMIDNHRFPMELHVVFFKQEYKNARTALNHPDGLTVLAFFFEIAPDDNPMYQEFIELLGNVTGSHLSARFDTPPSLKDLIADDLLHYYTYDGSLTTPPCSEVVTWIDFKEPILLSHAQVQAFRALENEEGHPLTHNFRPVQPLGDRVVLYNTDEIIKQVDLDGEQPEEPSEAGVDTNQLDTGRSDEAPKAPSDPNGRKHPRNAGTPSIATRWSSVLVVALPLLWAAFLRSERY

SEQ ID NO: 18895 - protein, 296 aa, Anopheles gambiae str. PEST
IEASWEEWWTYDGISGPAFWGLINPQWNMCNKGRRQSPINVEPEKLLFDPYLRSLHIDKHKISGTLHNTGQSLVFRVEKDTKQHVNISSGPLAYRYQFEEIYFHYGTDNNQGSEHHIHGYSFPGEIQLYGFNKELYHNMSEAQHKAQGIVGISLMLQIGDTPNPELRIITSAFNKVLYKGSSTPIRHISLRSLLPNTEQYMTYEGSTTHPGCWESTVWIILNKPIYITKQELYALRKLMQGSEQTPKAPLGNNARPLQALHHRTVRTNIDFANTGVSKTQSCPTMYKDMYYKANRW

SEQ ID NO: 18896 - protein, 323 aa, Anopheles gambiae str. PEST
TLQTFHTASKQSEVKQKNIQTIPYRVSVPVSSTMGVRPRQCLVYGGLLLIAVVATLVHGDFSYEDPDRWADTDPDCGGMRQSPIDIVRSAATLPSLDHAAPLLLEGGARKPVSIVVTNNGHTAQYTFHWSKESERPTLIGGPLPFGAPYVLEQLHFHWGADNGRGSEHTFDGVAWAAEAHFVFYKQEYGSFDQAVTQPDGLAVVGALYEVGGDKVKPGAKWAVPLPKIRPAGSTTTLEGGAVFNLDSVAPGGSWLRYYSYAGSLTTPPCAESVTWIVRDGTSPIAQKDLDELRNLRDSADQPLVDNFRPVQPLNGRPVVRYGF

SEQ ID NO: 18897 - protein, 383 aa, Anopheles gambiae str. PEST
NNSKKTEMQLLKWHGQLILLNFLMFMSWRPCRGLNVPSYDSNYRANPTRRSAVFAQPSSYYDQYAAAGPKPLTADQRRAKLTALSNPDFYFPDDPEADLAEANEPEPALERQRARPAPAAGSFSYNEKDKNGPSHWYRVDARCGGRYQSPILLNTSSALLVNRKRPLRLDGQTNLPQTILLQNDGHSAKFTYNWRTGADRPVLRGGPLKTKYLFDQFHFHWGVNSTVGSEHVYDYQRYPMEIHLVFYNGLYESFAAAREQVDGIAVVGLFYEIYDHAVDEQLNTWTRFLRNVVEPNSQHTIEFIDTFPLYEVIGDVEWPYFSYEGSLTTPPCLETVTWIVATKPLLVTEKEMKQFRRLQSPTGLMVNNYRPVQKLNHRRVFLY

SEQ ID NO: 18898 - protein, 328 aa, Anopheles gambiae str. PEST
NITIAKKVFIMQLSIGSRCCRSVSSLLFALLLIGGRYDGADGHRFGYSKPDQRRWSKAHQSCAGAHQSPIAIHSHRAVPLYMPAIELVGYNNLLPGPMTIHNNGHSVSLSIPKTDPTSGKHPYIFGGKLENEYELEGLHFHWGDKNNRGAEHVLNDIRYPLEMHIIHRNKKYKSVGEALGYSDGLTVLGFFYQVTEQDAPSINTLVRSFGQIVDYDQTLQLNHTFTLQSLIDGIDLTRFYTYKGSLTTPPCSEAVTWVVFPDLLELSVNQMKRFRTLDTGIHGSPMVDNYRALQPIGNRRVFVRKVNSRYTGLDVFEGRHHSKWDWVY

SEQ ID NO: 18899 - protein, 292 aa, Anopheles gambiae str. PEST
FDTLTGPAFWGLINPEWSLCNKGRRQSPVNLEPQRLLFDPNLRILHIDKHRISGTITNTGHSVIFTADNETSSAYGTPQIPVNLTGGPLSYRYRFHEIHVHYGLHDQFGSEHSVEGYTFPAEARHIQIFGYNSQLYANFSDALYRAQGIVGVAILLQLGDLSNPELRMLTDQLERIRYGGDEAPVRRISVRDLLPDTEHYMTYEGSTTAPACYETVTWIVMNKPIYITKQQLHALRRLMQGGPDHPKAPLGNNFRPPQPLLHRPVRTNIDFRNKLEKGGKICATMYKDVHYK

SEQ ID NO: 18900 - protein, 248 aa, Anopheles gambiae str. PEST
QSPIALNQRSTVIRDGIQPLDYFGHWDGLGKAKMVNTGSSAMITFSDRPFRPFIVGGVLGNKYIFEQLHFHWGIGDGSGCEHTLEGSTYSMEAHAVHYNAKYGSFAEAVDKPDGLAVLGFFVQAYGNDDCPAFDKIVAGLQYIRSPDAQTEIDADCLAWMGMQELNRHYYTYKGSLTTPPYFESVTWLVYKTPIYVSSRQLEAFRQLQACPKDSSKKIVNNFRSVQVPQQVPEVVFVRNNHPVVFSKL

SEQ ID NO: 18901 - protein, 249 aa, Anopheles gambiae str. PEST
VQSPIALNQRSTVIRDGIQPLDYFGHWDGLGKAKMVNTGSSAMITFSDRPFRPFIVGGVLGNKYIFEQLHFHWGIGDGSGCEHTLEGSTYSMEAHAVHYNAKYGSFAEAVDKPDGLAVLGFFVQAYGNDDCPAFDKIVAGLQYIRSPDAQTEIDADCLAWMGMQELNRHYYTYKGSLTTPPYFESVTWLVYKTPIYVSSKQLEAFRQLQACPKDSSKKIVNNFRSVQVPQQVPEVVFVRNNHPVVLSKL

SEQ ID NO: 18902 - protein, 269 aa, Anopheles gambiae str. PEST
MQRTASKGTVQSPVCLVQGRARIVDDAAPLHYVGHWDGLGRATLSNNGQSAVLTLSERPFRPFLVGGPLGSAYLFEQLHFHWGPDDAVGSEHLLDGRAHSMEAHLVHYNARYGSFGAALAHPDGLAVVALWLDGGGSAVWRPLQPIVRALRHIRRPGTRTTALPADCLRWLAAGLELGRHYYTYDGSMTTAPYRECVRWLIYRTPVYVSPRQTAAFRRLLGRCPARPGGDRFAPITSNFRPVQRSAAGGDPLGLVFVRDSVGAARRAKL

SEQ ID NO: 18903 - protein, 264 aa, Magnetospirillum magnetotacticum
MCLMGGAVMDRRSFLKGASGAACLCGACGGSIAEAVASEGAHWAYEGHGGPKEWGMLSPEYAACSMGREQSPVDLSKPIAAIIGDPLTAWRPIPLRVQNNGHTIQVDCAGGGSLMLDGKSYDLLQFHFHHPSEHTVDGAFFDMECHFVHKAADGGLAVLGVMIAKGAANPALEAIWQVMPAKGGETATGTSMLDASMLLPKDPVTFRYAGSLTTPPCSEVVQWVVYRQAVTASAEQLAAFAKLFPNNARPVQPLNRRKLLLDVM

SEQ ID NO: 18904 - protein, 275 aa, Xanthomonas campestris pv. campestris str. ATCC 33913
MPSFKSFLLHRVSPVCLCVAAGWGTVAMAQTVLPDATPVHAHETTQHDGHEWGYTGPEGAEHWAELAKENALCGNGQQNSPIDLKDAIDATLGKLQLDYGAVPLVVRNTGHSIQLDLHAGGTMRVGGKQYDALQLHFHHPSEHLLNGRRFPMEAHIVHQGPDGTLGVLAIFFETGKANPAFQRVLDAMPSDKNQTRQVADAVVRASDFLPPANQRSFYRYEGSLTTPPCSETVDWVVLSQPVQVSREQINAFERVYPFNARPLQPLDRRFLLKSH

SEQ ID NO: 18905 - protein, 271 aa, Xanthomonas axonopodis pv. citri str. 306
MLQSASRNAWRVAFPPWHRPSHPRSAFFLPEFVHARFQVASVTSHQPAVPVHRRRLGRGGHGANRTARKQAGGGARDRAAYRAIDANLGTLLLSYSAVPLVVRNTGHSIQLDLHDGGSMATGGKQYQALQLHFHHPSEHLLNGRRFPMEAHLVHQGPDGTLGVLAIFFETGKANTAFQRVLDAMPKDKDQTRQVANATVSAEAFLPPSNQRSFYRYEGSLTTPPCSETVDWVVLSQPVQVSEAQINAFERVYPFNARPLQPLDRRFLLKSH

SEQ ID NO: 18906 - protein, 237 aa, Leuconostoc mesenteroides subsp. mesenteroides ATCC 8293
MVHCEHIVGTFFVVALLYINTIVRNLRGTRMKHLDYREQEDWRKADDTIYQSPIDIPLTSIQQQENSQLIIHFEDRVQSDDRIIGEQFLVQGNLRVDGTVWALERFHFHDGAEHLVDGKRYDAEIHFVFQRDNQTLVLAVFGETADTDNGIEVRNIYDEHVNADGLMKLIPDNRSYYRYTGSLTTPPLGQNINWLILTSAIQISKQDKAFLHADYPNNYREVQDLNGREIDFFPEKK

SEQ ID NO: 18907 - protein, 213 aa, Oenococcus oeni MCW
MPKLDYDNQNNWLFKTGQMQSPVALESNKAEKIEKQATLKLNYSTNASYVHDNGQGIEIGLSGKAIIDNRFFSLQQFHIHAPSEHLLNNYRFDGEIHFVHQAKDGRTAVIAVFLKAGKTSKTFSQIFNHLNQDQNFVCDLTDLIPENKSYYHYLGSLTTPPLTENVEWYILANPVEISRQQLAEFHKLYPYNNRQLQSLNGRPVLYCSSTIKN

SEQ ID NO: 18908 - protein, 256 aa, Streptococcus mutans UA159
MKKKFIYLTVLVVVAVFCISTFLTLKGDSQDREAHWSYSGSTSPEHWGDLSDDYKAAKDGKEQSPINITGAKDVDLPSLQLNSKNSKAEVENNGHTIEVKLKNKKNTLKFNGKTYTLEQFHFHAPSENQIDGKTYPLEGHFVYTTKDKKITVISILYQYGKENKTLKQVWKKMPQKAETKKNLSQPVAISQLFPKDLDYYNFEGSLTTPPCTEGVNWIVFKKQENISKAQVKKFSKTLGFNNNRPIQKLNGREIKE

SEQ ID NO: 18909 - protein, 240 aa, Vibrio vulnificus CMCP6
MKKTVIAAVLATGLTAMGCHAAEWGYEGKHGPEHWGEIAKECAMGKNQSPIDIRQPTQADLKGLDLHYSGQVIALSNNGHTLQGSLSGENVLDIDGKSFELKQFHFHTPSENLIQGKQYPLEAHFVHADKAGNLAVVAVMFESGSQNQALNSLIAKVPKAGEEVKLAQAFDVNDLIPAHSEYYRFNGSLTTPPCSEGVRWLVIKEASELSPTQTHVLMQAMGQNNRPVQPLNARVVLSKE

SEQ ID NO: 18910 - protein, 211 aa, Lactobacillus plantarum WCFS1
MTFDYAHQTDWPMTSGQHQSPIDIQTQHVQSSQLSAINWRGLYQAKTITGEATTLKASGIGAAYLNDRDFAFQQIHFHTPAEHLIDGQAAPIEWHLVHQSATGQLAVVAVFGRIGKPNSSLQGLLDQFTAQTSHELTTPVNLTELLPDTGTVYHYLGSLTTPPLSETVEWYVCADTVMIGEQQLAAYQQLFAANNRKIQPLNDRPIIAERF

SEQ ID NO: 18911 - protein, 238 aa, Vibrio parahaemolyticus RIMD 2210633
MKKSLTAIGLSLVFVGSANAANWGYEGSHGPEHWGEFASECAQGKNQSPIDIHSATQAELAKLQLDYQGKVVALTNNGHTLQTSIEGENVLTIDSKAFTLKQFHFHTPSENHVDGKSYPLEAHYVHADEQGNLAVVAVFFEQGKANPALANLLENVPERDQNVAIRAPFDANALIPSDKDYYRFNGSLTTPPCSEGVRWLVIKDPQSISAEQIAQFEHVMGENNRPVQPLNARMVLTK

SEQ ID NO: 18912 - protein, 239 aa, Vibrio parahaemolyticus RIMD 2210633
MNKTLLAFSLSLLTLSAAQASEWGYGNDKHGPEHWGEIAKDCATTKNQSPINIENPADAKLEALNPSYTGQVIGLTNNGHTLQAQVNGRNSFTIDGETFELQQFHFHTPSENQIKGRQYPLEAHFVHANEDGELAVISVMFDAGDQNAALSKLINAIPQENQTTFFKDTFEINDLLPKTANYYRFNGSLTTPPCSEGVRWFVLKDTQTLSKDQAAKLMEVMGQNNRPLQPLNARVVLSN

SEQ ID NO: 18913 - protein, 291 aa, Bradyrhizobium japonicum USDA 110
MGRKDRVGEPINSTRDGHCDSPRLSPRLRAHRRSNSSWGNMMNRRHALKALAGLALCPVCKPAFAAEGVHWSYEGAGAPAKWGDLDAANKACAVGLQQSPIDIEATIKSQLPTLKLNWGKSADTIVNNGHTIQLNFAEGSTLTLGDVKYKLLQVHFHRPSEHMIGGKNFPMEAHFVHRNDAGGLAVVGVLMAEGKPNPAFGKIVKTMPAADGPAVKADASIDPLAMLPTRLSYFRYPGSLTTPPCSEVVEWLLLTTPIQVSAADVAAFAKLYPMNARPVQKDNRRYVLRST

SEQ ID NO: 18914 - protein, 232 aa, Enterococcus faecalis V583
MKKIKNMDVEWSYTGNDGPEHWHTLCDWFAEGAKFAYQSPIALEKESAETVNSQITFHYKKEEFTEKEFKNTFHFVPPNTESYVMFENVAYHLTDIHFHMPSEHLLSGKQYPLEFHLVHMNDAGENLVVGCLFTITEEENRFSEANHPMDWENGTHQQWFNPSIFLPEERLHYHYVGSLTTPPTKGPVKWFVFDTIQKMDQAFLNKIKEGMLAFNNRPLQPLNGRKIYFSND

SEQ ID NO: 18915 - protein, 246 aa, Dioscorea cayenensis
EDEFSYIEGSPNGPENWGNLRPEWKTCGNGMKQSPINLCDDKVIQTPALGKLRTSYQAARATLKNNGHDIMVNFKSDAGSQFINRVQYQLKRIHFHSPSEHALNGERYDLEIQMVHESQDQRRAVTAIMFRFGRSDPFLSDLEDFIKQISRSENFEVDAGVVDPRQLLQFDDPSYYRYMGSFTAPPCTEDITWTVIKKLGTVSPKQVLMLKQAVNENAINNARPLQPLKFRTVFLYPHQKPNHDAI

SEQ ID NO: 18916 - protein, 273 aa, Dioscorea cayenensis
MSSSTLLHLLLLSSLLFSCLPNAKPQQAEDEFSYIEGSPNGPENWGNLKKEWETCGKGMEQSPIQLRDNRVIFDQTLGELRRNYRAAEATLRNSGHDVLVEFEGNAGSLSINRVAYQLKRIHFHSPSEHEMNGERFDLEAQLVHESQDQKRAVVSILFRFGRADTFLSDLEDFIKQFSSSQKNEINAGVVDPNQLQFDDCAYFRYMGSFTAPPCTEGISWTVMRKVATVSPRQVLLLKQAVNENAINNARPLQPTNYRSVFYFEQLKSKLGVI

SEQ ID NO: 18917 - protein, 589 aa, Dunaliella salina
MGSRRITLLGALFAVLAVAIEGRTLLTHNLKAEAAETVDAVSSVVAGSAGRQLLVSEPHDYNYEKVGFDWTGGVCVNTGTSKQSPINIETDSLAEESERLGTADDTSRLALKGLLSSSYQLTSEVAINLEQDMQFSFNAPDEDLPQLTIGGVVHTFKPVQIHFHHFASEHAIDGQLYPLEAHMVMASQNDGSDQLAVIGIMYKYGEEDPFLKRLQETAQSNGEAADKNVELNSFSINVARDLLPESDLTYYGYDGSLTTPGCDERVKWHVFKEARTVSVAQLKVFSEVTLAAHPEATVTNNRVIQPLNGRKVYEYKGEPNDKYNYVQHGFDWRDNGLDSCAGDVQSPIDIVTSTLQAGSSRSDVSSVNLNDLNTDAFTLTGNTVNIGQGMQINFGDPPAGDLPVIRIGTRDVTFRPLQVHWHFFLSEHTVDGVHYPLEAHIVMKDNDNLGDSAGQLAVIGIMYKYGDADPFITDMQKRVSDKIASGAITYGQSGVSLNNPDDPFNVNIKNNFLPSELGYAGYDGSLTTPPCSEIVKWHVFLEPRTVSVEQMEVFADVTLNSNPGATVTTNRMIQPLEGRTVYGYNGAAA

SEQ ID NO: 18918 - protein, 589 aa, Dunaliella salina
MGSRRITLLGALFAVLAVAIEGRTLLTHNLKAEAAETVDAVSSVVAGSAGRQLLVSEPHDYNYEKVGFDWTGGVCVNTGTSKQSPINIETDSLAEESERLGTADDTSRLALKGLLSSSYQLTSEVAINLEQDMQFSFNAPDEDLPQLTIGGVVHTFKPVQIHFHHFASEHAIDGQLYPLEAHMVMASQNDGSDQLAVIGIMYKYGEEDPFLKRLQETAQSNGEAGDKNVELNSFSINVARDLLPESDLTYYGYDGSLTTPGCDERVKWHVFKEARTVSVAQLKVFSEVTLAAHPEATVTNNRVIQPLNGRKVYEYKGEPNDKYNYVQHGFDWRDNGLDSCAGDVQSPIDIVTSTLQAGSSRSDVSSVNLMTLNTDAFTLTGNTVNIGQGMQINFGDPPAGDLPVIRIGTRDVTFRPLQVHWHFFLSEHTVDGVHYPLEAHIVMKDNDNLGDSAGQLAVIGIMYKYGDADPFITDMQKRVSDKIASGAITYGQSGVSLNNPDDPFNVNIKNNFLPSELGYAGYDGSLTTPPCSEIVKWHVFLEPRTVSVEQMEVFADVTLNSNPGATVTTNRMIQPLEGRTVYGYNGAAA

SEQ ID NO: 18919 - protein, 555 aa, Dunaliella salina
MARLVLLGALLGALCATAVQGSLDGSQVEAGLGRQLTQDKPHEYNYNRHGIDWRDEGLDNCAGSMQSPINIDMATLNRGEERSDVSGLYLNGLASPAYDVAADVTVNAEQDMKITFKDVAQNNMPAIKIDGSDMLFKPVQLHFHHFLSEHAINGAHYPLEAHLVMGDASGNTNQLAVLGIMYQYGEQPDDFVRRLQTKTIDEIATNGAGYGETVNVTDLSVNIMKDVLPPTHHNYVGYDGSLTTPPCDERVKWHVFTEPRTITTGQLEKFLMITKRGHTDAIVTNNRIVQPIGRPLYHYKPTPASYNYARKGIDWREAGLDNCAGDRQSPINIDTTDLQPGAVSGISLNGLESQSFTFTDAYVNLEQDMKVSFTAPTNNLPTVNIDGNDESFRPIQLHFHHFSSEHTVDGMIYPLEAHLVMASQAENSNQLAVIAIFYQYGSEADDFLTRLHTEAISAQQGNANWGDNNVPINLPITFATDLMPSSTEHWAYEGSLTTPPCDERVRWIVMKEPRTTTAEQMETFKTATVNAHYAAEIVNNRAIQERNSRPISSIP

SEQ ID NO: 18920 - protein, 498 aa, Dunaliella salina
MARLALLGAALLCALAVSTQGSPEGHGTKTEMMGAGRLLQQGPHTNSDPPYNYNCHGFDWAASSSSAEITELCDSPASSFPVADCDGDMQSPINIVTSELADPTDRSGVSGINLRGMGSSDFVLRSNVKVNIEQDMKISWDAPTSGNLPTIMIDGTEQRFQPIQLHFHHFASEHTINGQLYPLEAHLVMASLDDPNQLAVIGTMYKYGNGDDFLARLFGKVEDALEERDDVSYGSKEVPIDMEISPKDHVLPQSSLEYAGYDGSLTTPPCSEVVKWHVFTSPRTISIDQLKTFERVSLNAHPNEAIPTNNRVIQPLGTRAAYRYEATAMDDSGDGTGNADELSSPTTVTATYDIMVSGTASSLADMFNNGARLDNGGFGPDDQAEADLLRQIQRRARANSGAEGAEVVRMMKFTAALGRRRLNQQGAAAEMDIRYYFEGSTDQEEATSAVNGMNPSSLGSSSSGLTDVQQTEVTSSASSLRAGLGLVVAAFFGAALAL

SEQ ID NO: 18921 - protein, 498 aa, Dunaliella salina
MARLALLGAALLCALAVSTQGSPEGHGTKTEMMGAGRLLQQGPHTNSDPPYNYNCHGFDWAASSSSAEITELCDSPASSFPVADCDGDMQSPINIVTSELADPTDRSGVSGINLRGMGSSDFVLRSNVKLNIEQDMKISWDAPTSGNLPTIMIDGTEQRFQPIQLYFHHFASEHTINGQLYPLDAHLVMASLDDPNQLAVIGTMYKYGNGDDFLARLFGKVEDALEERDDVSYGSKEVPIDMEISPKDHVLPQSSLEYAGYDGSLTTPPCSEVVKWHVFTSPRTISIDQLKTFERVSFNAHPNEAIPTNNRVIQPLGTRAVYRYEATAMDDSGDGTGNADELSSPTTVTATYDIMVSGTASSLADMFNNGARLDNGGFGPDDQAEADLLRQIQRRARANSGAEGAEVVRMMKFTAALGRRRLNQQGAAAEMDIRYYFEGSTDQEEATSAVNGMNPSSLGSSSSGLTDVQQTEVTSSASSLRAGLGLVVAAFFGAALAL

SEQ ID NO: 18922 - protein, 310 aa, Chlamydomonas reinhardtii; identical to SEQ ID NO: 490

SEQ ID NO: 18923 - protein, 387 aa, Chlamydomonas reinhardtii
ESLPATHLNTMARTGALLLVALALAGCAQACIYKFGTSPDSKATVSGDHWDHGLNGENWEGKDGAGNAWVCKTGRKQSPINVPQYQVLDGKGSKIANGLQTQWSYPDLMSNGTSVQVINNGHTIQVQWTYNYAGHATIAIPAMHNQTNRIVDVLEMRPNDAADRVTAVPTQFHFHSTSEHLLAGKIYPLELHIVHQVTEKLEACKGGCFSVTGILFQLDNGPDNELLEPIFANMPSREGTFSNLPAGTTIKLGELLPSDRDYVTYEGSLTTPPCSEGLLWHVMTQPQRISFGQWNRYRLAVGLKECNSTETAADAGHHHHHRRLLHNHAHLEEVPAATSEPKHYFRRVMLAESANPDATPARPLPLARTSATPSTPTAAPSSWPAIT

SEQ ID NO: 18924 - protein, 377 aa, Chlamydomonas reinhardtii
MARTGALLLVALALAGCAQACIYKFGTSPDSKATVSGDHWDHGLNGENWEGKDGAGNAWVCKTGRKQSPINVPQYQVLDGKGSKIANGLQTQWSYPDLMSNGTSVQVINNGHTIQVQWTYNYAGHATIAIPAMHNQTNRIVDVLEMRPNDAADRVTAVPTQFHFHSTSEHLLAGKIYPLELHIVHQVTEKLEACKGGCFSVTGILFQLDNGPDNELLEPIFANMPSREGTFSNLPAGTTIKLGELLPSDRDYVTYEGSLTTPPCSEGLLWHVMTQPQRISFGQWNRYRLAVGLKECNSTETAADAGHHHHHRRLLHNHAHLEEVPAATSEPKHYFRRVMLAESANPDAYTCKAVAFGQNFRNPQYANGRTIKLARYH

SEQ ID NO: 18925 - protein, 377 aa, Chlamydomonas reinhardtii
NMARTGALLLVALALGCAQACIYKFGTSPDSKATVSGDHWDHGLNGENWEGKDGAGNAWVCKTGRKQSPINVPQYQVLDGKGSKIANGLQTQWSYPDLMSNGTSVQVINNGHTIQVQWTYNYAGHATIAIPAMHNQTNRIVDVLEMRPNDAADRVTAVPTQFHFHSTSEHLLAGKIYPLELHIVHQVTEKLEACKGGCFSVTGILFQLDNGPDNELLEPIFANMPSREGTFSNLPAGTTIKLGELLPSDRDYVTYEGSLTTPPCSEGLLWHVMTQPQRISFGQWNRYRLAVGLKECNSTETAADAGHHHHHRRLLHNHAHLEEVPAATSEPKHYFRRVMLAESANPDAYTCKAVAFGQNFRNPQYANGRTIKLARYH

SEQ ID NO: 18926 - protein, 357 aa, Chlamydomonas reinhardtii
CIYKFGTSPDSKATVSGDHWDHGLNGENWEGKDGAGNAWVCKTGRKQSPINVPQYQVLDGKGSKIANGLQTQWSYPDLMSNGTSVQVINNGHTIQVQWTYNYAGHATIAIPAMHNQTNRIVDVLEMRPNDAADRVTAVPTQFHFHSTSEHLLAGKIYPLELHIVHQVTEKLEACKGGCFSVTGILFQLDNGPDNELLEPIFANMPSREGTFSNLPAGTTIKLGELLPSDRDYVTYEGSLTTPPCSEGLLWHVMTQPQRISFGQWNRYRLAVGLKECNSTETAADAGHHHHHRRLLHNHAHLEEVPAATSEPKHYFRRVMLAESANPDAYTCKAVAFGQNFRNPQYANGRTIKLARYH

SEQ ID NO: 18927 - protein, 380 aa, Chlamydomonas reinhardtii
MARTGALLLAALALAGCAQACIYKFGTSPDSKATHTGDHWDHSLNGENWEGKDGAGNPWVCKTGRKQSPINVPQYHVLDGKGSKIATGLQTQWSYPDLMSNGSSVQVINNGHTIQVQWTYDYAGHATIAIPAMRNQSNRIVDVLEMRPNDASDRVTAVPTQFHFHSTSEHLLAGKIFPLELHIVHKVTDKLEACKGGCFSVTGILFQLDNGPDNELLEPIFANMPTREGTFTNLPAGTTIKLGELLPSDRDYVTYEGSLTTPPCSEGLLWHVMTQPQRISFGQWNRYRLAVGEKECNSTETDAAHADAGHHHHHHRRLLHNHAHLEEVPAATSEPKHYFRRVMEETENPDAYTCTTVAFGQNFRNAQYANGRTIKLARYE

SEQ ID NO: 18928 - protein, 374 aa, Chlamydomonas reinhardtii
MARTGALLLAALALAGCAQACIYKFGTSPDSKATHTGDHWDHSLNGENWEGKDGAGNPWVCKTGRKQSPINVPQYHVLDGKGSKIATGLQTQWSYPDLMSNGSSVQVINNGHTIQVQWTYDYAGHATIAIPAMRNQSNRIVDVLEMRPNDASDRVTAVPTQFHFHSTSEHLLAGKIFPLELHIVHKVTDKLEACKGGCFSVTGILFQLDNGPDNELLEPTREGTFTNLPAGTTIKLGELLPSDRDYVTYEGSLTTPPCSEGLLWHVMTQPQRISFGQWNRYRLAVGEKECNSTETDAAHADAGHHHHHHRRLLHNHAHLEEVPAATSEPKHYFRRVMEETENPDAYTCTTVAFGQNFRNAQYANGRTIKLARYE

SEQ ID NO: 18929 - protein, 348 aa, Chlorella sorokiniana
MRVAAALLALAVCANACSHVYFADSDLHAHGRRLTAAEGPTWNYNKGGSDWPGTCASGNKQSPIAFSSDGLPAISSDARANLQLGVVSGLKVINTGHGTQIEWDKLEDSAATVPVFDDTWQAIFDGSSENKTVRQVPVKPLQFHLHTASEHLVNGELAPVELHIVAAVDNTTGAWVPENCRQSQCLTVFGVSIWLASDPYAKSDSFWQTVVDNLPTATGKEGANNLTSPATLNLTALLPEDLTFATYSGSLTTPPCSEGVQWHMFVTPKRELSAAQLNALQAISSTATAEVLAACPADEVIPEVAAADGAGNSSASTVELGCKTPTGARITNRQVMPLNDRTVFISKP

SEQ ID NO: 18930 - protein, 261 aa, Lepisosteus osseus
MSHSWGYAANNGPDKWHEKFPIAQGPRQSPIDIVPSQAQHDPDLKPLRIVYDPSTSKGILNNGHSFQVDFADENDSSTLQGGPISGVYRLRQFHFHWGASDERGSEHTVGGVKYAAELHLVHWNAGKYASFGDAAKAPDGLAVVGVFLKIGAASPNLQKVLDALDAIKTKGKQTPFPQFDPKILLPSSLDFWTYEGSLTTPPLLESVTWIVLKEPITVSSEQMAKFRSLLFTAEGETACCMVDNYRPPQPLKGRKVRASFK

SEQ ID NO: 18931 - protein, 325 aa, Acetabularia acetabulum
MLSTVILCLLVVSAFTKQKSHDDEFNYKLGGDDWPGLCATGDLQSPIDVHFMNQLSGSQIQGCEIVEELKGDTDMYAYPERLVLNRDGQPQATFQFGSTDEVLITNVGDAIVWMFDDDFSLLNLPIQGGKLDGVLHPITKGQGRTSNFMGGQIEYVQARFVNFHVHSPGEHMYNGYLAPLEGHFVMNIDQADLDTCPEAGCLAVVSVHFQHSLDDTPNQFIQDTLELIGGEWPVQIGASMEANGSLNFDQLLPQNPHYMLYSGSLTTPPCTEGVLWHVIQESVPVSIAQVAALQNAIGYSHDGIVRNNRRIQPINNRDIIYHDCI

SEQ ID NO: 18932 - protein, 315 aa, Acetabularia acetabulum
MLSALVLCQLVVLSISQKDFNYKLGGDDWPGLCATGNLQSPIDVRFSEPLSSLKAQTCEISSKLKISNPGRLVLNRAGLPQATFQFGSSDKVTVANVGGAIVWLFDDDFSLLNLPIEGGKLDGILQSNNKGLDRISIFMREQIEVVQARFINFHVHSVSEHMFNGFLAPLEGHFVMQIDQADLQSCPEAGCLAVVGVHFQHSIDDTPNQFIQDTLQLIGGKWPDTNGQSIPASGSLNFDQLVPHNPSYMLYSGSLTTPPCTEGVLWHVIQQPMTVSIAQVAELQNAIGFERDGLVRNNRRIQPINNRDMIYHDCI

SEQ ID NO: 18933 - protein, 315 aa, Acetabularia acetabulum
MLSALVLCQLVVLSISQKDFNYKLGGDDWPGLCATGNLQSPIDVRFSEPLSSLKAQTCEISSKLEKSNPGRLVLNRAGLPQATFQFGSSDKVTVANVGGAIVWLFDDDFSLLNLPIEGGKLDGILQSNNKGLDRISIFMREQIEVVQARFINFHVHSVSEHMFNGFLAPLEGHFVMQIDQADLQSCPEAGCLAVVGVHFQHSIDDTPNQFIQDTLQLIGGKWPDTNGQSIPASGSLNFDQLVPHNPSYMLYSGSLTTPPCTEGVLWHVIQQPMTVSIAQVAELQNAIGFERDGLVRNNRRIQPINNRDMIYHDCI

SEQ ID NO: 18934 - protein, 284 aa, Arabidopsis thaliana
MKIMMMIKLCFFSMSLICIAPADAQTEGVVFGYKGKNGPNQWGHLNPHFTTCAVGKLQSPIDIQRRQIFYNHKLNSIHREYYFTNATLVNHVCNVAMFFGEGAGDVIIENKNYTLLQMHWHTPSEHHLHGVQYAAELHMVHQAKDGSFAVVASLFKIGTEEPFLSQMKEKLVKLKEERLKGNHTAQVEVGRIDTRHIERKTRKYYRYIGSLTTPPCSENVSWTILGKVRSMSKEQVELLRSPLDTSFKNNSRPCQPLNGRRVEMFHDHERVDKKETGNKKKKPN

SEQ ID NO: 18935 - protein, 277 aa, Arabidopsis thaliana
MKTIILFVTFLALSSSSLADETETEFHYKPGEIADPSKWSSIKAEWKICGTGKRQSPINLTPKIARIVHNSTEILQTYYKPVEAILKNRGFDMKVKWEDDAGKIVINDTDYKLVQSHWHAPSEHFLDGQRLAMELHMVHKSVEGHLAVIGVLFREGEPNAFISRIMDKIHKIADVQDGEVSIGKIDPREFGWDLTKFYEYRGSLTTPPCTEDVMWTIINKVGTVSREQIDVLTDARRGGYEKNARPAQPLNGRLVYLNEQSSPSPTPRLRIPRVGPV

SEQ ID NO: 18936 - protein, 275 aa, Arabidopsis thaliana
MVNYSSISCIFFVALFSIFTIVSISSAASSHGEVEDEREFNYKKNDEKGPERWGELKPEWEMCGKGEMQSPIDLMNERVNIVSHLGRLNRDYNPSNATLKNRGHDIMLKFEDGAGTIKINGFEYELQQLHWHSPSEHTINGRRFALELHMVHEGRNRRMAVVTVLYKIGRADTFIRSLEKELEGIAEMEEAEKNVGMIDPTKIKIGSRKYYRYTGSLTTPPCTQNVTWSVVRKVRTVTRKQVKLLRVAVHDDANSNARPVQPTNKRIVHLYRPIV

SEQ ID NO: 18937 - protein, 267 aa, Arabidopsis thaliana
MDTNAKTIFFMAMCFIYLSFPNISHAHSEVDDETPFTYEQKTEKGPEGWGKINPHWKVCNTGRYQSPIDLTNERVSLIHDQAWTRQYKPAPAVITNRGHDIMVSWKGDAGKMTIRKTDFNLVQCHWHSPSEHTVNGTRYDLELHMVHTSARGRTAVIGVLYKLGEPNEFLTKLLNGIKAVGNKEINLGMIDPREIRFQTRKFYRYIGSLTVPPCTEGVIWTVVKRVNTISMEQITALRQAVDDGFETNSRPVQDSKGRSVWFYDPNV

SEQ ID NO: 18938 - protein, 248 aa, Arabidopsis thaliana
MDEYVEDEHEFSYEWNQENGPAKWGKLRPEWKMCGKGEMQSPIDLMNKRVRLVTHLKKLTRHYKPCNATLKNRGHDMMLKFGEEGSGSITVNGTEYKLLQLHWHSPSEHTMNGRRFALELHMVHENINGSLAVVTVLYKIGRPDSFLGLLENKLSAITDQNEAEKYVDVIDPRDIKIGSRKFYRYIGSLTTPPCTQNVIWTVVKKVRTVTKNQVKLLRVAVHDNSDTNARPVQPTNKRVVKLYKPKSL

SEQ ID NO: 18939 - protein, 263 aa, Arabidopsis thaliana
MKHIFFNSCITKKNIEDETQFNYEKKGEKGPENWGRLKPEWAMCGKGNMQSPIDLTDKRVLIDHNLGYLRSQYLPSNATIKNRGHDIMMKFEGGNAGLGITINGTEYKLQQIHWHSPSEHTLNGKRFVLEEHMVHQSKDGRNAVVAFFYKLGKPDYFLLTLERYLKRITDTHESQEFVEMVHPRTFGFESKHYYRFIGSLTTPPCSENVIWTISKEMRTVTLKQLIMLRVTVHDQSNSNARPLQRKNERPVALYIPTWHSKLY

SEQ ID NO: 18940 - protein, 260 aa, Arabidopsis thaliana
MDANTKTILFFVVFFIDLFSPNILFVYAREIGNKPLFTYKQKTEKGPAEWGKLDPQWKVCSTGKIQSPIDLTDERVSLIHDQALSKHYKPASAVIQSRGHDVMVSWKGDGGKITIHQTDYKLVQCHWHSPSEHTINGTSYDLELHMVHTSASGKTTVVGVLYKLGEPDEFLTKILNGIKGVGKKEIDLGIVDPRDIRFETNNFYRYIGSLTIPPCTEGVIWTVQKRVLYFFCFCYRLIIFVTPYINIFWIFVFVFWCMLM

SEQ ID NO: 18941 - protein, 263 aa, Arabidopsis thaliana
MVNYSSISCIFFVALFSIFTIVSISSAASSHGEVEDEREFNYKKNDEKGPERWGELKPEWEMCGKGEMQSPIDLMNERVNIVSHLGRLNRDYNPSNATLKNRGHDIMLKFEDGAGTIKINGFEYELQQLHWHSPSEHTINGRRNRRMAVVTVLYKIGRADTFIRSLEKELEGIAEMEEAEKNVGMIDPTKIKIGSRKYYRYTGSLTTPPCTQNVTWSVVRKVRTVTRKQVKLLRVAVHDDANSNARPVQPTNKRIVHLYRPIV

SEQ ID NO: 18942 - protein, 188 aa, Arabidopsis thaliana
MFFGEGAGDVIIENKNYTLLQMHWHTPSEHHLHGVQYAAELHMVHQAKDGSFAVVASLFKIGTEEPFLSQMKEKLVKLKEERLKGNHTAQVEVGRIDTRHIERKTRKYYRYIGSLTTPPCSENVSWTILGKVRSMSKEQVELLRSPLDTSFKNNSRPCQPLNGRRVEMFHDHERVDKKETGNKKKKPN

SEQ ID NO: 18943 - protein, 2254 aa, Arabidopsis thaliana
MKHIFFNSCITKKNIEDETQFNYEKKGEKGPENWGRLKPEWAMCGKGNMQSPIDLTDKRVLIDHNLGYLRSQYLPSNATIKNRGHDIMMKFEGGNAGLGITINGTEYKLQQIHWHSPSEHTLNGKRYLKRITDTHESQEFVEMVHPRTFGFESKHYYRFIGSLTTPPCSENVIWTISKEMRTVTLKQLIMLRVTVHDQSNSNARPLQRKNERPVALYIPTWHSPFRCVLSVNMKKDEKIGLTGRTIYTRSLAASIPASVEQETPGLRRSSRGTPSTKVITPASATRKSERLAPSPASVSKKSGGIVKNSTPSSLRRSNRGKTEVSLQSSKGSDNSIRKGDTSPDIEQRKDSVEESTDKIKPIMSARSYRALFRGKLKESEALVDASPNEEELVVVGCSRRIPAGNDDVQGKTDCPPPADAGSKRLPVDETSLDKGTDFPLKSVTETEKIVLDASPIVETGDDSVIGSPSENLETQKLQDGKTDCSPPANAESKTLPVGETSLEKEYPQKFQDDNTDCLPPANAESKRLPVGETSLEKDTDFPLKSTTETGKMVLYASPIVETRDDSVICSPSTNLETQKLLVSKTGLETDIVLPLKRKRDTAEIELDACATVANGDDHVMSSDGVIPSPSGCKNDNRPEMCNTCKKRQKVNGDCQNRSVCSCIVQPVEESDNVTQDMKETGPVTSREYEENGQIQHGKSSDPKFYSSVYPEYWVPVQLSDVQLEQYCQTLFSKSLSLSSLSKIDLGALEETLNSVRKTCDHPYVMDASLKQLLTKNLELHEILDVEIKASGKLHLLDKMLTHIKKNGLKAVVFYQQATQTPEGLLLGNILEDFVGQRFGPKSYEHGIYSSKKNSAINNFNKESQCCVLLLETRACSQTIKLLRADAFILFGSSLNPSHDVKHVEKIKIESCSERTKIFRLYSVCTVEEKALILARQNKRQNKAVENLNRSLTHALLMWGASYLFDKLDHFHSSETPDSGVSFEQSIMDGVIHEFSSILSSKGGEENEVKLCLLLEAKHAQGTYSSDSTLFGEDHIKLSDEESPNIFWSKLLGGKNPMWKYPSDTPQRNRKRVQYFEGSEASPKTGDGGNAKKRKKASDDVTDPRVTDPPVDDDERKASGKDHMGALESPKVITLQSSCKSSGTDGTLDGNDAFGLYSMGSHISGIPEDMLASQDWGKIPDESQRRLHTVLKPKMAKLCQVLHLSDACTSMVGNFLEYVIENHRIYEEPATTFQAFQIALSWIAALLVKQILSHKESLVRANSELAFKCSRVEVDYIYSILSCMKSLFLEHTQGLQFDCFGTNSKQSVVSTKLVNESLSGATVRDEKINTKSMRNSSEDEECMTEKRCSHYSTATRDIEKTISGIKKKYKKQVQKLVQEHEEKKMELLNMYADKKQKLETSKSVEAAVIRITCSRTSTQVGDLKLLDHNYERKFDEIKSEKNECLKSLEQMHDVAKKKLAEDEACWINRIKSWAAKLKVCVPIQSGNNKHFSGSSNISQNAPDVQICNNANVEATYADTNCMASKVNQVPEAENTLGTMSGGSTQQVHEMVDVRNDETMDVSALSREQLTKSQSNEHASITVPEILIPADCQEEFAALNVHLSEDQNCDRITSAASDEDVSSRVPEVSQSLENLSASPEFSLNREEALVTTENRRTSHVGFDTDNILDQQNREDCSLDQEIPDELAMPVQHLASVVETRGAAESDQYGQDICPMPSSLAGKQPDPAANTESENLEEAIEPQSAGSETVETTDFAASHQGDQVTCPLLSSPTGNQPAPEANIEGQNINTSAEPHVAGPDAVESGDYAVIDQETMGAQDACSLPSGSVGTQSDLGANIEGQNVTTVAQLPTDGSDAVVTGGSPVSDQCAQDASPMPLSSPGNHPDTAVNIEGLDNTSVAEPHISGSDACEMEISEPGPQVERSTFANLFHEGGVEHSAGVTALVPSLLNNGTEQIAVQPVPQIPFPVFNDPFLHELEKLRRESENSKKTFEEKVSFPHYPKSILKAELERKMAEVQAEFRRKFHEVEAEHNTRTTKIEKDKNLVIMNKLLANAFLSKCTDKKVSPSGAPRGKIQQLAQRAAQVSALRNYIAPQQLQASSFPAPALVSAPLQLQQSSFPAPGPAPLQPQASSFPSSVSRPSALLLNFAVCPMPQPRQPLISNIAPTPSVTPATNPGLRSPAPHLNSYRPSSSTPVATATPTSSVPPQALTYSAVSIQQQQEQQPQQSLSSGLQSNNEVEPTRWLRSLLLKRNVLLSCI

SEQ ID NO: 18944 - protein, 250 aa, Mesorhizobium loti
MHRRNLIRGFIALGVCPICAQTARAASAHWGYGGSVGPEHWADLDTRNFACSAGRQQSPIDIAGTVKADIPRIDISWLKGGGRMVNNGHTIQINMPEGSTLTRGDRVYQLAQLHFHAPSEHHVAGMSFPMEAHFVHKDTKSDTLGVLSALLTPGATNKSFAGLAKVFPARPGEEMAVDEFDPNGLLPASLGYWTYEGSLTTPPCTENVEWMVAMEPVEVDTADIKRFTTLYASNARSIRPSNRRFILGLS

SEQ ID NO: 18945 - protein, 250 aa, Mesorhizobium loti
MHRRNLIRAFIALGVCPICAQTARAASAHWGYGGSVGPEHWADLDTRNFACSAGRQQSPIDIAGTVKADIPRIDISWLKGGGRMVNNGHTIQINMPEGSTLTRGDRVYQLAQLHFHAPSEHHVAGMSFPMEAHFVHKDTKSDTLGVLSALLMPGATNNSFAGLAKVFPARPGEEMAVDEFDPNGLLPASLGYWTYEGSLTTPPCTENVEWMVAMEPVEVDTADIKRFTTLYASNARSIRPSNRRFILGLS

SEQ ID NO: 18946 - protein, 249 aa, Sinorhizobium meliloti
MERRDFLRGLALLAACPLCVKTAYAAEGVHWRYEGEEGPEHWGSLAKENSACSAGSQQSPIDIRGAVKADIPELTADWKSGGTILNNGHTIQVNAAGGTLRRGDKSYDLVQYHFHSPSEHFVDGKSFPMEAHFVHKNAETGTLGVLGVFLVPGAANSTFASLAEKFPRNPGEESPLITIDPKGLLPSSLSYWTYEGSLTTPPCSEIVDWMVAMEAVEVDPGDIKKFTALYSMNARPALAGNRRYVLSSS

SEQ ID NO: 18947 - protein, 287 aa, Glycine max
  unsure (1)..(287): unsure at all Xaa locations
LFTMALRVHFSIVSIAVLALCTSADYFSANFSYAGPNGPEYWGSLSPSYAACSHGKSQSPVELMKTDIVIDMQLKNLNRNYLPTNATLVDNIFNIGVHFEGKVGDININGKNYSLKQLHWHSPSEHMANGRIHDAELHLVHLTEDNYNIAVVAVLYKLGDPDPLISQFEDKLVDLEKEIRAGNKDAQIAIGTFDVEEINRSSHRYYRYVGSLTTPPCKEGVTWNILGKLRTLSKKQLELLKAPLGPEFKHNARPLQQLNGRKIQMYYHPNHLHGSHATPSKYHKXIA

SEQ ID NO: 18948 - protein, 191 aa, Glycine max
  unsure (1)..(191): unsure at all Xaa locations
GITQKLLNQRANKMERAMAIQLFAYSFFIVIVLLFPPAMCAEFNYDLSSPNGPLNWGXXNPQWQLCKNGKNQSPINLQKLSADVEFISGIQRNYQPANATLISSEHDIMVNWTENAGHITINGTQYQLAQGHWHSPSEHRINGIRYDLELHMVHISSAGRLAVTGVLYKFGRPDDEFISKIEDDLQLMAEN

SEQ ID NO: 18949 - protein, 203 aa, Glycine max
  unsure (1)..(203): unsure at all Xaa locations
XQLRRPPPPSMKMEFFLTDHTLSNIKVNDTGVGLLSVLSLSSEPPMLMVMSXEFEALQFHFHAPAEHTINEGRYELELHIVHKTKTHRNLAVVAVFFEXLIKTPELPPTLXIDALKLDRCGCDLDLNMYELLSQDLTEMTXXFFAYKGGLTTPPCSETVNWYLFEKPVKITQAQLNHFNLRWKDNMNFACGEGNNRPIQALNX

SEQ ID NO: 18950 - protein, 173 aa, Glycine max
  unsure (1)..(173): unsure at all Xaa locations
SKSIRTFYSSLKYLTRNILQCLLXLVLICCLFTAFLFLSLPVMSQEVEDESEFSYDEKSENGPSNWGDIHPEWSLCNNGSMQSPIDLLNERVQIVSHLGRLQMNYQPSNATIKNRGHDIKLEWVAGAGYLQINETEYVLKQCHWHSPSEHTIDGKRLDLEVHMVHDTSSGQSA

SEQ ID NO: 18951 - protein, 162 aa, Glycine max
  unsure (1)..(162): unsure at all Xaa locations
MIEINMKHQGKLRVFLPNMIILVTILLHSTTWISAQEVEDESEFDYIKGSEKGPSHWGELKKEWETCKSGKMQSPIDLSSHRVRVVPKLGELKKYYTPQNATIXKNRGHDIELKWEGDAGSININGTEFFLHQCHWHSPSEHTINGRRYDLEXHMVHESKTX

SEQ ID NO: 18952 - protein, 187 aa, Glycine max
  unsure (1)..(187): unsure at all Xaa locations
RLREDDRRGPTHPRTNNLCATCRHSTHKSQLSPPSETCSVKVTXSVAISLICILFCSTLTSALDEPEYGYNEKSANGPXHWGDLKEEWAACKIGQIQSPIDLSTNGVEVIPKLGGLNWNYKPQHATVSNRGHDVAVIWEGDAGSIEINGTPFFLQQAHWHWPAEXTIXGRRYDWEXHMVHVSPQPDX

SEQ ID NO: 18953 - protein, 278 aa, Oryza sativa (japonica cultivar-group)
MAASHGNAIFVLLLCTLFLPSLACDSGGVKFGYTGSIGPDFWGNLSADFTRCSNGKQQSPIDIDTNNLVHELNMEPLHRNYTAANATLVDNIFNVALRYEEAAGVLSINGVKYTLKQMHWHSPSEHTINGFRFPLELHMVHTNENGNITVLAFLYRFGRPDPFFEQIQDKLAALNAEGCKAEKGSPVPAGSVSLLTMRQHVHIYYRYVGSLTTPPCAENVIWNIPAMPREMTPQQAADLMAPLDEGYRRNSRPTQQMNGRTVQLYHRFWGKKKRRSSP

SEQ ID NO: 18954 - protein, 276 aa, Oryza sativa (japonica cultivar-group)
MAASHGNAIFVLLLCTLFLPSLACDSGGVKFGYTGSIGPDFWGNLSADFTRCSNGKQQSPIDIDTNNLVHELNMEPLHRNYTAANATLVDNIFNVALRYEEAAGVLSINGVKYTLKQMHWHSPSEHTINGFRFPLELHMVHTNENGNITVLAFLYRFGRPDPFFEQDKLAALNAEGCKAEKGSPVPAGSVSLLTMRQHVHIYYRYVGSLTTPPCAENVIWNIPAMPREMTPQQAADLMAPLDEGYRRNSRPTQQMNGRTVQLYHRFWGKKKRRSSP

SEQ ID NO: 18955 - protein, 276 aa, Oryza sativa (japonica cultivar-group)
MSTSARRLLLLAGAAAAIALLLSATAPVAGAEDDGYSYIPGSPRGPQNWGSLKPEWATCSSGKMQSPINLGLLDLTLAPGLGNLNYTYQNANASVVNRGHDIMVRFDGDAGSLKINGTAYQLRQMHWHTPSEHTIDGRRYDMELHMVHLNAQNQAAVIGILYTIGTRDEFLQKLEPYIIEISKQEGKERVIIGGADPNVAKGQDTVYYRYMGSFTTPPCTEGVIWTVVRKVRTVSLSQITLLKAAVLTGNENNARPLQGVNNREIDLFLPLPLINN

SEQ ID NO: 18956 - protein, 312 aa, Oryza sativa
  unsure (1)..(312): unsure at all Xaa locations
SEHGHFGSRXQTPSAWARSALRRVQALLHCRKRWQLLMEMRSLFCCCALSFSRPLXCDSGGVKFGYTGSIGPDFWGNLSADFTRCSNGKQQSPIDIDTNNLVHELNMEPLHRNYTAANATLVDNIFNVALRYEEAAGVLSINGVKYTLKQMHWHSPSEHTINGFRFPLELHMVHTNENGNITVLAFLYRFGRPDPFFEQIQDKLAALNAEGCKAEKGSPVPAGSVSLLTMRQHVHIYYRYVGSLTTPPCAENVIWNIPAMPREMTPQQAADLMAPLDEGYRRNSRPTQQMNGRTVQLYHRFWGKKKRRSSPX

SEQ ID NO: 18957 - protein, 350 aa, Oryza sativa
  unsure (1)..(350): unsure at all Xaa locations
MARARRGRQNAAASPPSLALQLQVASLVIVFVFAFSSAITPTRADHVEGHMSHEMFGYEXTTRRGPAKWGXSLHKEWAVCGDGKKQSPIDITTVEPQKVXXEPLMQAYKAGATTIQNRGHDYMLKWKDGNSKLTVQGKEYTLKQVHWHEPSEHTINGTRFDAEMHMVHEDPSMARAVVSVLFKAGQPNAVLTEMAPHFKNLAGKEKAEEEVKEPVDPSTWVDKTSGYYRYDGSLTTPPCTEGVIWTIMSKIGDASKEQIDLLKXXVATTVEPNARPAQKLNDRIVRSKRYNKVVASTTAKPLQQTALQRLASEGRTELAPPGQRHKKTEHYAQHMFQVFIRYLRTSRGSR

SEQ ID NO: 18958 - protein, 409 aa, Oryza sativa
MASVTGTQQANWGGLLETAATNVPIAAVTPRHHRSRSHSRYRGRRIQHSRGRRHRIRCPPSPLSPTATTCRFRGRGRRIRKLPPLAPEVGGGCIRPLPATAHCRPPPPLPRLGSVDPRVDVATEDGGGAVGGERRRARRLLLLAGAAAAIALLLSATAPVAGAEDDGYSYIPGSPRGPQNWGSLKPEWATCSSGKMQSPINLGLLDLTLAPGLGNLNYTYQNANASVVNRGHDIMVRFDGDAGSLKINGTAYQLRQMHWHTPSEHTIDGRRYDMELHMVHLNAQNQAAVIGILYTIGTTPDEFLQKLEPYIIAISNQEGKEKMVVGGADPNVAKGKDTVYYRYMGSFTTPPCTEGVIWTVVRKVRTVSLSQITLLKAAVLTGNENNARPLQGVNNREIDLFLPLPLINN

SEQ ID NO: 18959 - protein, 296 aa, Oryza sativa
  unsure (1)..(296): unsure at all Xaa locations
MVSLRAAIVLVVAASSVAVAFSHAEGNEGPDFTYKGANGPSNWGKLSPEYRMCGEGRSQSXVDINTKTVVPRSDLDTLDRNYNAVNATIVNNGKDITMKFHGEVGQVIIAGKPYRFQAXXWHAPSEHTINGRRFPLELHLVHKSDADGGLAVISVLYKLGAPDSFYLQFKDHLAELGADECDFSKEEAHVAAGLVQMRSLQKRTGSYFRYGGSLTTPPCGENVVWSVLGKVREISQEQLHLLMSPLPTKDARPAQPLNGRAVFYYNXRRAAPSPSRNSPSDSFFFFSFFFFLVFCI

SEQ ID NO: 18960 - protein, 311 aa, Oryza sativa
  unsure (1)..(311): unsure at all Xaa locations
MVSSHAAIVFFLVAASSLLSYGEAAPKMTAVAADYGYPADYGYAAGSKLGPENWGKLSPAYKLCGDGKKQSPIDIVTKQAISNPNLDSLNRTYTASDGTLVNNGKDILMEFADKVGTVTVNGKVYSFRRVHWHAPSEHTINGEKHPLELQMVHAAADGSLAVIAILYKYGAPDSFYFQLKRKLAELAADGCSFGEENAQVALGLVHLRSLQKRTGSYFRYAGSLTAPPCTEDVFWSVLGKIRQISQEQVALITALLPAGGARPTQPLNGRTVQFYNPPNXXPSPSRSSSPRPNGLWPIYIYYMGCIGLHRP

SEQ ID NO: 18961 - protein, 174 aa, Oryza sativa
  unsure (1)..(174): unsure at all Xaa locations
XCIAHASSFVVTAVVTLLLLAPAAGAEEDDQFGYIPGTPRGPENWGSLKPEWATCSSGEMQSPINLGLLDLTLAPGLGDLNYTYRNANATVVNRGHDIMVRFDGGDDAAAAGGLVINGTAYRLRQVHWHAPSEHAVDGRRYDMELHMVHLNTQNQTAVVGILYAIGAQDEFLHK

SEQ ID NO: 18962 - protein, 166 aa, Oryza sativa
AGSVVINGTAYYLRQLHWHSPTEHSVDGRRYDMELHMVHESAEKKAAVIGLLYEVGRPDRFLQKMEPYLKMIADKEDREEKVGMIDPRGARGRASVYYRYMGSLTTPPCTQGVVWTIVKRVRTVSRYQLDLLREAVHDEMENNARPLQAVNNRDISIFRPYPHKRY

SEQ ID NO: 18963 - protein, 196 aa, Oryza sativa
  unsure (1)..(196): unsure at all Xaa locations
XHWHSPSEHTINGQRFAVELHMVHHSDDGNITVIAVLYRHGKPDPFLFQIKDKLAALYLEGCKAEKGEPLPVGLVDMRELKKGADRYFRYVGSLTTPPCTENVIWNIFGEIRQLTQEQAAALRGALHGGYTHNRRPTQPLNGRTYVPKFRNVNVIGAMDCNKTLFIVMVHIIHFSFVRSLRKGDNGMDAGKTKTLN

SEQ ID NO: 18964 - protein, 273 aa, Triticum aestivum
  unsure (1)..(273): unsure at all Xaa locations
MASQMSSAWAAVVVIVSSLLAVALSHDEGGGPSFGYTPGTPDGPENWGKLSPAYKACGDGKAQSPIDIVIANAVPNPNLDTLTRVYAPSNATLHNTGKDIVMSFEQGGEPVMPGSINFKLKMIHWHAPGEHTVNGKRFPLELHMVHVDDQDHKAVIGILYEIGNPDPFYDQLTEKLRELXXTTPTVAAGVVELKSLQKRTGSYFRYMGSLTTPPCTEKVMWNILGKGRELSQEQLQLITAPLPHQDNRPPQPLNGRQVAFYNXRQTPSSPSNP

SEQ ID NO: 18965 - protein, 314 aa, Triticum aestivum
  unsure (1)..(314): unsure at all Xaa locations
RIPATWPIRGKARNGRSTVPAMASRRAVLALVVAVAASAASVAADDPDYSYVSGTKLGPENWAKLSPKYSACNGGAAARKQSPIDIVTKSAVPKPDLDPLTRTYVATDATLINNGKEISMTFNGKPGSVSIGGKAFSLKKLRWKTPSEHTINGKRHPVEVQLVHESDAGXSGELAIIAILYKLGAPDSFYYQLKRKLAELAADRCSYGEQDARVATGLVHLRSLEKRTGSYFRYMGSLTAPPCAENVYWNVLGKVRQMTKEQIDLVTAPLPAAAKQNARPVQPLNGRVVTFYNXRPTAPSPSTCDLTPIRWSAN

SEQ ID NO: 18966 - protein, 324 aa, Triticum aestivum
  unsure (1)..(324): unsure at all Xaa locations
YPQGPAPAGSKRGRSTTQQTQEELTSSTSRGADTQPSTNALRAHQDNMRPSRDLRLAVLLLLFSASVLLPAARAQQETEEEEEFSYSLDAENGPAHWGDIKEEWSACGKGNMQSPIDLASPRVSLVRGLGYLNHSYAPANATIVNRGHDIMLKFEGDAGSVSIGGTPYFLRQLHWHSPTEHSVNGRRYDMELHMFHESAQGKAAVIGVFYEIGAHDAFLHKLEPYLEMIADRKDREEKMGMMDPRGARGKASVYYRYVGSLTTPPCSEGVIWTIVKRVRTVSRHQLELLXREAVHDDMEKNARPRQEVNNRDISMFRPFEQNRH

SEQ ID NO: 18967 - protein, 285 aa, Triticum aestivum
MRSARHLHLPVWALLLLLHFSAFVPAARAQQEIDDESEFSYVCGAKNGPENWGKIKEEWATCGTGRMQSPIDLSDRHASRAPHLGYLNHSYPPAEASIVNRGHDIAVMFHGDAGSLWINGTAYHLRQVHWHSPSEHRVNGRRYSLELHMVHLSAENKAAVIGLLYKIGRPDHFLHELEPYLRRMADTKEKEEMVGVVDPWVARGDAEAYYRYMGSLTTPACDEGVIWTVIKRVATVSTHQLKLLTDAVHDGFEMNARPLQKVNGRDINFFCPDDHHERYYAAADQ

SEQ ID NO: 18968 - protein, 286 aa, Triticum aestivum
MRSARHLRLAVSALLLLLLLSAGVLAARAQHEIDDESEFSYVCGAKNGPENWGKIKEEWATCGTGQMQSPIDLSDRHASRAPNLGYLNHSYLPVEASIVNRGHDIMVMFNGDAGSLWINGTAYHLRQVHWHSPSEHRVNGRRYSLELHMVHLSAENKTAVIGILYKIGSRDHFLPSSRSYLKRMADTKEKEEMVGMVDPWEAPGRWRRAYYRYMGALPRATADERISWWVIKRPTTISAHQLRPVTDSVHAALEFNARPLKKATRTDISLLSPADHHARDYAAADQ

SEQ ID NO: 18969 - protein, 199 aa, Triticum aestivum
  unsure (1)..(199): unsure at all Xaa locations
MAKGWGYASHNGPDHWHELFPNAKGENQSPIELHTKDIRHDPSLQPWSVSYDGGSAKTILNNGKTCRVVFDDTYDRSMLRGGPLPGPYRLRQFHLHWGSSDDHGSEHTVDGVKYAAELHLVHWNPKYNTFKEALKQRDGIAVIGIFLKIGHENGEFQIFLDALDKIKTKGKEAPFTKFDPSCLFPACRDYWTYQGSFTX

SEQ ID NO: 18970 - protein, 253 aa, Triticum aestivum
  unsure (1)..(253): unsure at all Xaa locations
AGRAGNTHKRNSPAPRAEEPTPQDQERDNMRPSRDLRLAVFLLLFSASVLLPAARAQQETEEEEEFSYSLDAENGPAHWGDIKEEWSACGKGNMQSPIDLASPRVSLVRGLGYLNHSYSPANATIVNRGHDIMLKLEGDAGSVSIGGTPYFLRQLHWHSPTEHSVNGRRYDMELHMFHESAEGKAAVIGVFYEIGAHDAFLHKLEPYLEMIADRKDREEKMGMMDPRGARGKGSVYYRYVGSLXTPPWTEGVI

SEQ ID NO: 18971 - protein, 248 aa, Triticum aestivum
  unsure (1)..(248): unsure at all Xaa locations
YPQGXGXXXXYPKKKPRGLTSSTSGGADTQPSPARXRDNMRSSRDLRLAGLLLLFSASVLLPVARAQQETEEEEEFSYSLDAENGPAHWGDIKEEWSACGKGNMQSPIDLASPRVSLGRGLGYLNHSYHPANATIVNRGHDIMLKFEGDAGSVSIGGTPYFLRQLHWHSPTEHSVNGRRYDMELHMFHESAQGKAAVIGVFYEIGAHDAFLHKLEPYLEMIADRKDREEKMGMMDPRGARGKASGYYX

SEQ ID NO: 18972 - protein, 279 aa, Triticum aestivum
  unsure (1)..(279): unsure at all Xaa locations
MRSARDLRLAVSALLLLLLLSAGVLAARAQHEIDDESEFSYIRGSENGPENWGKIKEEWATCGTGQMQSPIDLSDRRAARAPNLGYLNHSYLPVEASIVNRGHDIMVKFNGDAGSLWINGTAYHLRQVHWHSPSEHRVNGRRYSLELHMVHLSAENKTAVIGILYKIGRRDHFLHELEXSYLRRIADTKEKEEMVXVVDPWDGEGRSKAYYXATLGLPSTKARXXKXXGVHLRTRHXKRXSQPXRAHQXXXNETVQXXXQQXXXXHXXXKTXXHXXXHX

SEQ ID NO: 18973 - protein, 149 aa, Triticum aestivum
  unsure (1)..(149): unsure at all Xaa locations
XKYAAELHLVHWNTRDGDFGKAVQQPDGLAVLGIFLKVGSAKPGLQKVVDVLDSIKTKGKSADFTNFDPRGLLPESLDYWTYPGSLTTPPLLECVTWIVLKEPISVSSEQVLKFRKLNFNGEGEPEELMVDNWRPAQPLKNRQIKASFK

SEQ ID NO: 18974 - protein, 201 aa, Triticum aestivum
  unsure (1)..(201): unsure at all Xaa locations
DQRPSQHASISGXLRLAVLLLFSASVLLPAARAQQETEEEEEFSYSLDAENGPANWGEIKEEWSACGKGNMQSPIDLASPRVSLVRGLGYLNHTYAPANATIVNRGHDIMLKFEGDAGSVSIGGTPYFLRQLHWHSPTEHSVNGRRYDMELHMFHESAQGKAAVIGVFYEIGAHDAFLHKLEPYLEMIADRKDMEEKMGMX

SEQ ID NO: 18975 - protein, 178 aa, Triticum aestivum
  unsure (1)..(178): unsure at all Xaa locations
MDARGGDASAIALLLCACFLTALACDSNGAKFAYSGPLGPDHWGGLDPNFTRCAMGTYQSPVDIKTSDVVYNPMLGPLHREYTAANATLVDNIFNIALRCEDAAGTVQIDGVKYKLDNIHWHSPSEHTINGERFAVEQHMVHFSDDGNISVVSILYRLGRPDPFLMQLQDKLSELXRX

SEQ ID NO: 18976 - protein, 178 aa, Triticum aestivum; identical to SEQ ID NO: 18975
  unsure (1)..(178): unsure at all Xaa locations

SEQ ID NO: 18977 - protein, 176 aa, Triticum aestivum
MYSWIPLLATFAPQALASCAYGTHLHRRADAIQAPKFGYSAANGPANWYNLDPEANKLCATGTHQSPINLSNGTHKVLSGSDLQIEIPDFHDGAEFENLGSTVEVVTEGMGGKLTLDNTVYHLKQFHFHLPSEHLDNGTSMAMEMHMVHQSEDKKLAVIGVLLEAGEFQSYSGSLT

SEQ ID NO: 18978 - protein, 272 aa, Triticum aestivum
  unsure (1)..(272): unsure at all Xaa locations
MASRFLSVAALLVAAAACVLANTQSPINIXXSSEAVDAELPALSFKHYRSSQSSYYLANTGHGCQITLKNWLYNPKVKGGPLPRTFVLEQVHFHWGASDGVGSEHYLNGNPSSMEVHLVHWNSKYASYSEASTKADGLAVIGFFIEGIDNYRNPDFQKLVNAIQIVAEESEKVEVNADLLAWVVPYLEASGYYTYDGSLTTSPYSENVLWIVYENPIPIGKAQIAPFRAIENHESEQLTTNFRQLQNADGVEVRYVXRNSTQSAPETVPDRQ

SEQ ID NO: 18979 - protein, 303 aa, Zea mays
SRPAGIPTSSASKKAKQSPHAERLQKGMGHLRGLTAARLLAAAFLLSVAAAARAQEETEHEEEFSYVVGDENGPEHWGSIKAEWGNCSAGRMQSPIDLSHERVSLVRSLGYLTHSYRPAEAAIANRGHDIMVRFKGDAGFLVINGTAYYLKQMHWHSPTEHTVDGRRYDMELHLVHESSANKAAVIGMLYEIGAEDPFLQALEPSIHRIADRQDREEAIGVVDPRRARGRASVYYRYVGSLTTPPCTEGVIWTVVKRVRTVSRHQLELLREAVHDGMEKNARPVQDVNDRDISIFRPKPHKHY

SEQ ID NO: 18980 - protein, 308 aa, Zea mays
LGTSRPAGNSSQTSSASKKAKQSPHAERLQKGMGHLRGLTAARLLAAAFLLSVAAAARAQEETEHEEEFSYVVGDENGPEHWGSIKAEWGNCSAGRMQSPIDLSHERVSLVRSLGYLTHSYRPAEAAIANRGHDIMVRFKGDAGFLVINGTAYYLKQMHWHSPTEHTVDGRRYDMELHLVHESSANKAAVIGMLYEIGAEDPFLQALEPSIHRIADRQDREEAIGVVDPRRARGRASVYYRYVGSLTTPPCTEGVIWTVVKRVRTVSRHQLELLREAVHDGMEKNARPVQDVNDRDISIFRPKPHKHY

SEQ ID NO: 18981 - protein, 283 aa, Zea mays
MGPARHLRGLTALLISAALLLSAAIPAARGQEETEDEEEFNYIPGDANGPENWGSIKPEWANCSAGRMQSPIDLARERVSLVPALGFLNHSYRPAQASIVNRGHDIMVRFNGDAGRLVINGTAYDLRQMHWHSPSEHTVDGRRYAMELHMVHESAAGKAAVIGILYEIGLADPFLLRLEPFIRRIADRKDREEPIGVVDPRLARGTASAYYRYMGSLTTPPCSEGVVWTIIKKVRSVSKRQLELLREAVHDGNENNARPLQDLNDRDISLFRPKLHKQELLSF

SEQ ID NO: 18982 - protein, 350 aa, Zea mays
  unsure (1)..(350): unsure at all Xaa locations
MFLHCVRVTASSVFRAQSFRCLFRMTTCRTANAAAVVRLLLLCSFCAAAAIACDPPNGAKFGYTGSVGPDHWGALSPSFRQCATGTKQSPIDISTAQAVSNPALQPLHRDYTVANATLVDNVVNVALRFDGDGGAGSVSVGGKLYTLKQVHWHSPSEHTVDGRRFPVELHMVHASDDGNVTVVAMLYRFGSRPDPLLWQIQDKLAALHAEGCRAEEGGGGQVPAGDVSLWSLRLHSHTYYRYVGSFTTPPCTEDVIWSVMAQVREMTVEQAAALMAPLEKAYRHNNRPTQPMNGRVVQVCHRFVMSKKTAPXPYVRAPCPGRMPGRPLLVAVDDASSILKLVSRSVGLIS

SEQ ID NO: 18983 - protein, 296 aa, Zea mays
  unsure (1)..(296): unsure at all Xaa locations
HQVRRTRGTNNLPVRVLIRARRQWCPPPXALIGLLVAAASLAVALSDGGGMAAPVYGYAAGSPNGPENWGKLSPAYKLCGEGKQQSPIDIVTKQAVPAATLDTLNRTYGATNATLINDGHDITLALEGKVGTVTVNGKAYSFEKLHWHSPSDHTINGQRFPLELHLVHRSADGALAVIGILYQLGAPDSFYYQLKRQLGEIAEEEESRVEAGLIHLRSLQKRTGSYFRYTGSLTVPPCTENVVWSVLGKVRQISQDQLQLLKAPLXXGSDARPTQPLNGRTVQFYNPPNSTISFQI

SEQ ID NO: 18984 - protein, 299 aa, Zea mays
  unsure (1)..(299): unsure at all Xaa locations
RPVAPRTQPPSSVXLLLCSCYAAAALACDPANGAKFGYSGSVGPDHWGALSPSFRQCATGTKQSPIDISTAQAVSNPALQPLHRDYTVANATLVDNVVNVALRFDGDGGGGGAGSVSVGGKLYRLKQVHWHSPSEHTVDGRRFPVELHMVHASDDGNVTVVAMLYRFGRPDPLLWQIQDKLAALHAEGCRAEKGAPVAAGDVSLWSLRLYSHTYYRYVGSFTTPPCTENVIWSVLAQVREEGPPLREGDDXWTAPPDGALERTGHTASTRNGCVVQVYRNGFINKKTAPXPCRAMRCPV

SEQ ID NO: 18985 - protein, 312 aa, Zea mays
  unsure (1)..(312): unsure at all Xaa locations
PLKGARINRGRPGTTTDTHIVYQCSSNNPCATKAIMVSSSRAVVVVVGLLVAASSLAVAASEPTYGYTAGSPDGPENWGKLSPAYKLCGQGKQQSPIDIVTKQGRPQRHLDTLNRTYAATAATLINDGHDITMTFEGKVGTVMVNGKAYSFEKMHWHSPSDHTINGQRFPLELHLVHRSADGALAVIGILYQLGAPDSFYYQLKRQLGEMAKDRCSFGEEESHEGVALIHLRSLQKRTGSYFRYTGSXLTVPPCTENVVWSVLGKVRQISKEQLQLLKAPLXXGNDARPTQPLNGRTVQFYNPPNSTVSFHM

SEQ ID NO: 18986 - protein, 279 aa, Zea mays
  unsure (1)..(279): unsure at all Xaa locations
MARRRDDVALAAITFAIVALCARYASAVGTTPQSSFSYREGDPTGPTKWATLQKDWDVCDSGTEQSPIDVAKVEVSEDLDXXLQQTYEPGDAVMHNRLHDFMLNWTGGNGGLTIEGKKYKLKQVHWHVPSEHTVNGTRFDAEMHMVHEDSTDAKSKAVVAVLFSAKAAAQALLREARWXKQNGTEEVKGPVVDPAAWIDKASGYYGYEGSLTTPPCTQGVLWTIMSKVADASKEEIHSIESVKEANARPAQKINSRVVRYYKAAGATEAPAPAPAPEAT

SEQ ID NO: 18987 - protein, 280 aa, Zea mays
  unsure (1)..(280): unsure at all Xaa locations
XVSSPSXAAVAAAVLLAAALLRVVPGARGQEETEHEEEFSYVPGDEHGPEHWGSIKAEWAACGAGRMQSPIDLSHERVSLVRSLGYLSHSYRPAEASIVNRGHDIMVRDFEGDAGSLVINGTAYYLRQLHWHSPTEHTVDGRRYDMELHLVHESAENKAAVIAVLYEIGGHDDALLRQLEPAIRRVADVRDREMRVGVVDPRRARGRASVYYRYVGSLTAPPCTEGVIWTIVKRVRSVSKHQLELLREAVHDVSLRISPHQLESASNMNVAGFGIFFFFS

SEQ ID NO: 18988 - protein, 297 aa, Zea mays
  unsure (1)..(297): unsure at all Xaa locations
MARRPDDLALAAITFAIVALCARYASAVGTXSVTSDYRAATPQSTFSYKEGDPTGPTKWATLQKDWDVCDSGTEQSPIDVAXXVEVSEDLDPLQQTYEPGDAVMHNRLHDFMLNWTGGNGGLTIEGKKYKLKQVHWHVPSEHTVNGTRFDAEMHMVHEDSTDAKSKAVVAVLFSAKAGKSSKLLRDVPQALLXERLAGKQNGTEEVNVVDPAAWIDKASGYYGYEGSLTTPPCTQGVLWTIMSKVADASKEEIHXXIESVKEANARPAQKINSRVVRYYKAAGATEAPAPAPAPEAT

SEQ ID NO: 18989 - protein, 230 aa, Zea mays
  unsure (1)..(230): unsure at all Xaa locations
RPGTTTDHIVYQCSSNNPCATKAIMVSSSRAVVVVVGLLVAASSLAADGGGPTYGYTGPDGPENWGKLSPAYKLCGQGKQQSPIDIVTKQAVPNANLDTLNRTYAATAATLINDGHDITMTFEGKVGTVMVNGKAYSFEKMHWHSPSDHTINGQRFPLELHLVHRSADGALAVIGILYQLGAPDSFYYQLKRQLGEMAKDRCSFGEEESHEGVALIPLRSLQKRTGSYFX

SEQ ID NO: 18990 - protein, 210 aa, Zea mays
  unsure (1)..(210): unsure at all Xaa locations
XCSAGRMQSPIDLSHERVSLVRSLGYLTHSYRPAEAAIANRGHDIMVRDATGDAGFLVINGTAYYLKQMHWHSPTEHTVDGRRYAMELHMVHESAAGKAAVIGILYEIGLVPDPFLLRLEPFIRRIADRKDREEPIGVVDPRLARGTASAYYRYMGSLTTPPCSEGVVWTIIKKVRSVSKRQLELLREAVHDVSPSSCRXILLFQKFDLQ

SEQ ID NO: 18991 - protein, 288 aa, Zea mays
  unsure (1)..(288): unsure at all Xaa locations
MRSFVLGTRSPCCCCLVCAWFXLDALRAGWLGSVDEDEEDFSYRRNAGNGPARWGLIRREWATCNVGLLQSPIGLSDTLAGLADRSGRLGRSYRPAAASLVNRGHSIMVRFNSNPGGVVIDGVAYRLRQMHWHAPSEHAINGRRYALELQMVHQSDTNRYAVVSQLYRISRRRPDRTIHRLERYIRRIARRKNHEELIDEEVDPRRPVSRSTAYYKYTGSFTTPPCTEGVTWVVAHQTRRVTRRQVRLLRNAVHDGTRSNRRPLQEANGRAITFYYTSPAHGRGANGD

SEQ ID NO: 18992 - protein, 191 aa, Zea mays
  unsure (1)..(191): unsure at all Xaa locations
XSGAGRMQSPIDLSHERVSLVRSLGYLSHSYRPAEASIVNRGHDIMVRFEGDAGSLVINGTAYYLRQLHWHSPTEHTVDGRRYDMELHLVHESAENKAAVIAVLYEIGGHDDALLRQLEPAIRRVADVRDREMRVGVVDPRRARGRASVYYRYVGSLTAPPCTEGVIWTIVKRVRSVSKHQLELLREAVHD

SEQ ID NO: 18993 - protein, 262 aa, Zea mays
  unsure (1)..(262): unsure at all Xaa locations
MRSFVLGTRSPCCCCLVCAWFXLDALRAGWLGSVDEDEEDFSYRRNAGNGPARWGLIRREWATCNVGLLQSPIGLSDTLAGLADRSGRLGRSYRPAAASLVNRGHSIMVRFNSNPGGVVIDGVAYRLRQMHWHAPSEHAINGRRYALELQMVHQSDTNRYAVVSQLXRIXRRRPDRTIHRLERYIRRIIARRKNHEELIDEEVDPRRPVSRSTAYYKYTGSFTTPPCTEGVTWVVAHQGTRSNRRQVSLCQKKGHQISRTFA

SEQ ID NO: 18994 - protein, 196 aa, Zea mays
  unsure (1)..(196): unsure at all Xaa locations
XNYTAEAVGSRQDTHXXTADEEDFSYRRNAGNGPARWGLIRREWATCNVGLLQSPIGLSDTLAGLADRSGRLGRSYRPAAASLVNRGHSIMVRFNSNPGGVVIDGVAYRLRQMHWHAPSEHAINGRRYALELQMVHQSDTNXLERYIRRIIARRKNHEELIDEEVDPRRPVSRSTAYYKYTGSFTTXPPCTEGVTX

SEQ ID NO: 18995 - protein, 252 aa, Neisseria gonorrhoeae
MPRFPRTLPRLTAVLLLACTAFSAAAHGNHTHWGYTGHDSPESWGNLSEEFRLCSTGKNQSPVNITETVSGKLPAIKVNYKPSMVDVENNGHTIQVNYPEGGNTLTVNGRTYTLKQFHFHVPSENQIKGRTFPMEAHFVHLDENKQPLVLAVLYEAGKTNGRLSSIWNVMPMTAGKVKLNQPFDASTLLPKRLKYYRFAGSLTTPPCTEGVSWLVLKTYDHIDQAQAEKFTRAVGSENNRPVQPLNARVVIE

SEQ ID NO: 18996 - protein, 222 aa, Neisseria gonorrhoeae
THWGYTGHDSPESWGNLSEEFRLCSTGKNQSPVNITETVSGKLPAIKVNYKPSMVDVENNGHTIQVNYPEGGNTLTVNGRTYTLKQFHFHVPSENQIKGRTFPMEAHFVHLDENKQPLVLAVLYEAGKTNGRLSSIWNVMPMTAGKVKLNQPFDASTLLPKRLKYYRFAGSLTTPPCTEGVSWLVLKTYDHIDQAQAEKFTRAVGSENNRPVQPLNARVVIE

SEQ ID NO: 18997 - protein, 221 aa, Neisseria gonorrhoeae
HWGYTGHDSPESWGNLSEEFRLCSTGKNQSPVNITETVSGKLPAIKVNYKPSMVDVENNGHTIQVNYPEGGNTLTVNGRTYTLKQFHFHVPSENQIKGRTFPMEAHFVHLDENKQPLVLAVLYEAGKTNGRLSSIWNVMPMTAGKVKLNQPFDASTLLPKRLKYYRFAGSLTTPPCTEGVSWLVLKTYDHIDQAQAEKFTRAVGSENNRPVQPLNARVVIE

SEQ ID NO: 18998 - protein, 223 aa, Neisseria gonorrhoeae
HTHWGYTGHDSPESWGNLSEEFRLCSTGKNQSPVNITETVSGKLPAIKVNYKPSMVDVENNGHTIQVNYPEGGNTLTVNGRTYTLKQFHFHVPSENQIKGRTFPMEAHFVHLDENKQPLVLAVLYEAGKTNGRLSSIWNVMPMTAGKVKLNQPFDASTLLPKRLKYYRFAGSLTTPPCTEGVSWLVLKTYDHIDQAQAEKFTRAVGSENNRPVQPLNARVVIE

SEQ ID NO: 18999 - protein, 203 aa, Neisseria gonorrhoeae
EFRLCSTGKNQSPVNITETVSGKLPAIKVNYKPSMVDVENNGHTIQVNYPEGGNTLTVNGRTYTLKQFHFHVPSENQIKGRTFPMEAHFVHLDENKQPLVLAVLYEAGKTNGRLSSIWNVMPMTAGKVKLNQPFDASTLLPKRLKYYRFAGSLTTPPCTEGVSWLVLKTYDHIDQAQAEKFTRAVGSENNRPVQPLNARVVIE

SEQ ID NO: 19000 - protein, 360 aa, Neurospora crassa
MARLFRSLMLAAAASVTPVWSLCSHNTFLHPREEGKTVEVKKFGYIGVTGPLFWSSLAPENTACSTGRRQSPIDMTGTSFNMVPSSEIQIDIPDFTEGTEFENLGTTIEVIAKGGSMTFGEKQYTLQQFHFHLPSEHLDNGTSRAMEMHMVWQTENQELAVIGTYIDVATEAGSARFIPPFAAPAPPTQPVPSGVPVHPHINKTAPDAPPARFRIRGSRSHREQEVIMPHPTNENETAPVRPVGPDTPVSGAPTVLLETIFSTVDAIRTPGTVTQTPPLILSEVVNIWKSGHFQGYMGSLTTPPCSEGVMWLVSTQTLRVAPLTFENVRSVIGFNSRLTQNAPGEDNILAKAGCAAAGTE

SEQ ID NO: 19001 - protein, 244 aa, Pectobacterium carotovorum
MKGKLSIALMLSVCFSASATDSVHWGYEGNGDPAHWGKLSPDFSLCETGKNQSPINIRQALNAQHDPLQLAFQSGTQQIINNGHTIQVNVSPGNTLLLDNETFTLQQFHFHAPSENEIDGKQFPLEGHFVYKNADGALTVIALMFQEGAANPQLATAWQQIPARVDQAEDVRTPVAIQALLPTSLNYYRFSGSLTTPPCSEGIRWLVLDHPVTASAEQISQFSSVMHHANNRPIQPLNGRIIIH

SEQ ID NO: 19002 - protein, 273 aa, Dioscorea alata
MSSSTLFHLFLLSSLLFSCFSNARLDGDDDFSYIEGSPNGPENWGNLRPEWKTCGYGMEQSPINLCDDRVIRTPTLGKLRTSYQAARATVKNNGHDIMVYFKSDAGTQFINQVEYQLKRIHFHSPSEHALSGERYDLEVQMVHESQDQRRAVIAIMFRFGRSDPFLPDLEDFISQISRRETNEVDAGVVDPRQLLQFDDPAYYRYMGSYTAPPCTEDITWTVIKKLGTVSPKQVLMLKQAVNENSMNNARPLQPLKFRTVFFYPRQKSDHVAI

SEQ ID NO: 19003 - protein, 273 aa, Dioscorea alata
MSSPTLLHLLLLSSLLFSCLPNAKPQQAEDEFSYIEGSPNGPENWGSLKPEWKTCGNGMEQSPIQLRDNRVILDQTLGKLRRNYRATDARLRNSGHDVLVEFKNNAGSLSINRVAYQLKRIHFHSPAEHEMNGERFDLEAQLVHESQDQKRAVVSILFRFGPADPFLSDLEDFIRQLSNSQKNEINAGVVDPNQLQIDDSAYYRYMGSYTAPPCTEDITWTVIKKLGTVSPKQVLMLKQAVNENSINNARPLQPTNFRSVFYFEQLKSKLGVI

SEQ ID NO: 19004 - protein, 272 aa, Dioscorea alata
MSSPTLLHLFLLSSLLFSCFSNARLDGEDEFSYIEGSPNGPENWGSLKPEWKTCGNGMEQSPIQLRDNGVIFDQTLGKLRRDYRATDARLRNSGHDVLVEFKNNAGSLSINRVAYQLKRIHFHSPAEHEMNGERFDLEAQLVHESQDQKRAAVSILFRFGPADPFLSDLEDFIRQLSNSQKNEINAGVVDPNQLQIDDSAYYRYMGSFTAPPCSEGISWTVMRKVATVSPRQVLLLKQTVNENAINNARPLQPTNFRSVFYFEQLKSKLGVI

SEQ ID NO: 19005 - protein, 246 aa, Klebsiella pneumoniae
MKTSLGKAALLALSMMPVTVFASHWSYEGEGSPEHWGALNEEYKTCQNGMNQSPINIDATFKTHLSPLDTHYIDGPITLINNGHTIQAALKTTTADTITIDGTPFILQQFHFHAPSENTVHGKHYAMEMHLVHKNAKGAVAVVAVMFEQGAENTELNKLWATMPEQAEQTAKIVTQMDLNALLPIDKTYWRFSGSLTTPPCSEGVTRIVLKHPLTLSSAQLAKFSHAMHHDNNRPVQPLNGRVVIE

SEQ ID NO: 19006 - protein, 261 aa, Anthopleura elegantissima
MAAPKWGYGPNNGPSKWAKDFPAAAGARQSPIDIKTHDAQHDSALKIKPLKIQYSQGNDFNVTNNGYSLVISRKTSEGTNLSGGPLEHNYRFEQFHFHWGKTSGSGSEHLLDGKAFPAELHLVHWNTDLFSSFGEAASSKNGLAVLGAFVQIGGESAGLKTITDLIPQVQNIGDKQDLKVPFNLSSLLPSNTNDYWTYSGSLTTPPCYESVSWFVFKEPIHATENQMQQFRSLKANDGGCIVDNYRPVMDGSGRNVRASFE

SEQ ID NO: 19007 - protein, 246 aa, Caenorhabditis elegans
MTGHWSYCDDDECGPNRWPTGQHQSPINIDLGEVERKDTHDGIKFVNYDHPIQGDIVNNGHSVQMTPELRSEHPEIYGGGLDQVYRLVQYHFHWGENDNEGSEHTLGGLRYPAELHLVHQGVEDPGKLAVVGVFLQLGKEGKALSNEERVLGKLCNPETVTRVENVRLSEKLPANKRSFWRYEGSLTTPPCSEIVTWTIFTEPVTVTHDQLELFRQVQDIEKRPIKKNYRPTQNLNDRKIVHIVAN

SEQ ID NO: 19008 - protein, 334 aa, Caenorhabditis elegans
MAQAIPFCNNKKKQLGTPRHLAPMPSHLLVLSLLVALLVVVSCGPGSDHGWGYDENNGPDTWQGKCQNHLKQSPIDIRAPDVDYALLHRMHFLNYDMDGKIELSNTGRTCDVCRRFESWQHKQPMIQGGGLKHRYKLAQFHLHWGQNDAVGSEHAMGSLHYPAELHLVHVREGLTLKEALSRPDGLAVVGVFLAKTNDPVANKFSPISERLHDLRHSGNKTELKNFRTKYVLPLDTEAFYRYEGSLTTPDCSEAVIWTVLAEPMAISSHQLHLLRQLHNKELVKSDKNYRPLQPLNGRRIQYRPSKLDRAMICSSFATTSVIITYVAILSAMLI

SEQ ID NO: 19009 - protein, 309 aa, Caenorhabditis elegans
MPSHLLVLSLLVALLVVVSCGPGSDHGWGYDENNGPDTWQGKCQNHLKQSPIDIRAPDVDYALLHRMHFLNYDMDGKIELSNTGRTFCRRFESWQHKQPMIQGGGLKHRYKLAQFHLHWGQNDAVGSEHAMGSLHYPAELHLVHVREGLTLKEALSRPDGLAVVGVFLAKTNDPVANKFSPISERLHDLRHSGNKTELKNFRTKYVLPLDTEAFYRYEGSLTTPDCSEAVIWTVLAEPMAISSHQLHLLRQLHNKELVKSDKNYRPLQPLNGRRIQYRPSKLDRAMICSSFATTSVIITYVAILSAMLI

SEQ ID NO: 19010 - protein, 259 aa, Caenorhabditis elegans
MPRRKERYSKTQRSSRERLKLTTFLAAAQRQSPIDIVPQHVCCDTDVCKADALNIDYKSGDCCDVLVSEGGFLVNVKRNCGTFLTANHLPSSKFALAQFHAHWGSNSKEGSEHFLDGKQLSGEVHFVFWNTSYESFNVALSKPDGLAVVGVFLKEGKYNDNYHGLIDTVRKATGNATPIAMPKDFHIEHLLPSPDKREFVTYLGSLTTPPYNECVIWTLFTEPVEVSFGQLNVLRNIIPANHRACQDRCDREIRSSFNF

SEQ ID NO: 19011 - protein, 235 aa, Caenorhabditis elegans
MAAAQRQSPIDIVPQHVCCDTDVCKADALNIDYKSGDCCDVLVSEGGFLVNVKRNCGTFLTANHLPSSKFALAQFHAHWGSNSKEGSEHFLDGKQLSGEVHFVFWNTSYESFNVALSKPDGLAVVGVFLKEGKYNDNYHGLIDTVRKATGNATPIAMPKDFHIEHLLPSPDKREFVTYLGSLTTPPYNECVIWTLFTEPVEVSFGQLNVLRNIIPANHRACQDRCDREIRSSFNF

SEQ ID NO: 19012 - protein, 280 aa, Caenorhabditis elegans
MAPPQVRRSARLSKRCQEEKVKLQKKNVGFKAKSKSAKKSNKKFKKAAAQRQSPIDIVPQHVCCDTDVCKADALNIDYKSGDCCDVLVSEGGFLVNVKRNCGTFLTANHLPSSKFALAQFHAHWGSNSKEGSEHFLDGKQLSGEVHFVFWNTSYESFNVALSKPDGLAVVGVFLKEGKYNDNYHGLIDTVRKATGNATPIAMPKDFHIEHLLPSPDKREFVTYLGSLTTPPYNECVIWTLFTEPVEVSFGQLNVLRNIIPANHRACQDRCDREIRSSFNF

SEQ ID NO: 19013 - protein, 243 aa, Riftia pachyptila
MAAWDYEANGPATWAKSFPLAAGKKQSPIDIDPASVSKKSTSALVASYNPAASNTLTNTGLSFQVSVDGTLSGGPLGNEYKAASFHFHWSKTSAEGSEHTVAGKAYAAEAHIVHYNAAKYASFQDAVKADDGLAVLATFIQPGATNAGVQKIIDLLPSVPTKGDTATIPGGFDVACLLPGDQSKYWYYPGSLTTPPCFESVTWIVYKDPIQLCENQLAALRKITGCNFRPTLGLCGRQVSSSF

SEQ ID NO: 19014 - protein, 239 aa, Vibrio cholerae
MKKTTWVLAMVASMSFGVQASEWGYEGEHAPEHWGKVAPLCAEGKNQSPIDVAQSVEADLQPFTLNYQGQVVGLLNNGHTLQAIVRGNNPLQIDGKTFQLKQFHFHTPSENLLKGKQFPLEAHFVHADEQGNLAVVAVMYQVGSENPLLKVLTADMPTKGNSTQLTQGIPLADWIPESKHYYRFNGSLTTPPCSEGVRWIVLKEPAHLSNQQEQQLSAVMGHNNRPVQPHNARLVLQAD

SEQ ID NO: 19015 - protein, 298 aa, Aedes aegypti
MIALFVATLLPSTIRADEWHYPTPAPNGVINEPERWGGQCETGRRQSPIDLTYQAAVKGDFAPFLFSNYMNPIRNAQLTNTGHSIQIDSTDPSVTLYGGGLPGKFVLDQMHFHWGSEHTIAGVRYGQELHMVHHDSRYNSLTEAGAVKNAVAVIGVLFHVSNQDNTHMDVVLETSQDIRDAAGKSAPLKGKLSPHNPLPKNRTSYFRYEGSLTTPTCAESVIWTVFTESLPVSLDQVELFKTIHDPSGHELVINFRSLQPLNARALVYHTDMDYSGSGAIPKLSLTLIVAAIAALLAK

SEQ ID NO: 19016 - protein, 270 aa, Drosophila melanogaster
MSHHWGYTEENGPAHWAKEYPQASGHRQSPVDITPSSAKKGSELNVAPLKWKYVPEHTKSLVNPGYCWRVDVNGADSELTGGPLGDQIFKLEQFHCHWGCTDSKGSEHTVDGVSYSGELHLVHWNTTKYKSFGEAAAAPDGLAVLGVFLKAGNHHAELDKVTSLLQFVLHKGDRVTLPQGCDPGQLLPDVHTYWTYEGSLTTPPCSESVIWIVFKTPIEVSDDQLNAMRNLNAYDVKEECPCNEFNGKVINNFRPPLPLGKRELREIGGH

SEQ ID NO: 19017 - protein, 335 aa, Drosophila melanogaster
MRRCRNTPFAIVIAPILICASLVLAQDFGYEGRHGPEHWSEDYARCSGKHQSPINIDQVSAVEKKFPKLEFFNFKVVPDNLQMTNNGHTVLVKMSYNEDEIPSVRGGPLAEKTPLGYQFEQFHFHWGENDTIGSEDLINNRAYPAELHVVLRNLEYPDFASALDKDHGIAVMAFFFQVGDKSTGGYEGFTNLLSQIDRKGKSVNMTNPLPLGEYISKSVESYFSYTGSLTTPPCSEEVTWIDFTTPIDITEKQLNAFRLLTANDDHLKNNFRPIQPLNDRTLYKNYIEIPIHNMGSIPLVDAENAAGKWRAQAAAVLLPLVVLAALSRTSIFRGF

SEQ ID NO: 19018 - protein, 311 aa, Drosophila melanogaster
MKLTAFLEASFLLICWSQAVSSHVFGYSEPNQRRWARHHGHCAGKTQSPIAITTSRTTAIHMPAVDMIGYHNLLPYPLKMINNGHTVSITIPKVNVTEVGEDFLPYIRGAKLPGEFEVEGLHFHWGDKNNRGSEHVINDIRYTMEMHIVHRNKKYATIGEALNHPDGAAVLGFFFNLDEDEGAGLVTINRHLHLIADANQEATLNVTFSLSSLIAGVDVDKFYTYKGSLTTPPCSEAVTWILFPDPIPISPKQISRFRQLSDTQDGALVDNFRTLQPVGNRRIFARTGHVRHTSIATLKHEGEYLKYDWFY

SEQ ID NO: 19019 - protein, 304 aa, Drosophila melanogaster
MHLIALSLIVCCSVSFSWANEWGYPDLDNNQDEPFPKWGGLCDSGKKQSPINLHVKGALKGEFDALKFENYDEHQKNLRMVNNGHSIQLSGFDHELTLSGGALLQDFVVEQIHMHWWSEHTINDIRYPLEVHIVHRNTIYPNMTMAANFKDGIVVIGVLYHVSNTPNEAIGSIIKSLGAVKSYDSMNKPVLVADSLAVDDLVPSVENYFTYAGSLTTPTCAEAVTWIVLTETFPVTLDQVNEFKEIEYDEGKQLHNNYRELQSENNRAVVLVEQPEQRSGSAGLTASVSLGLMTLILAGQKFLL

SEQ ID NO: 19020 - protein, 327 aa, Drosophila melanogaster
MELLQALCCTLLLLLARMQVLLAVSWEDWWTYDGISGPAFWGLINPEWSLCNKGRRQSPVNLEPQRLLFDPNLRPMHIDKHRISGLITNTGHSVIFTAGNDTVANYDGMQTPVNISGGPLSYRYRFHEIHMHYGLNDQFGSEHSVEGYTFPAEIQIFGYNSQLYANFSDALNRAQGIVGVSILLQLGDLSNAELRMLTDQLERIRYGGDEAFVKRLSIRGLLPDTDHYMTYDGSTTAPACHETVTWVVLNKPIYITKQQLHALRRLMQGSPDHPKAPLGNNYRPPQPLLHRPIRTNIDFKTTKSNGKAACPTMYREVYYKATSWKQN

SEQ ID NO: 19021 - protein, 279 aa, Drosophila melanogaster
MFLVARSFAPINSGTRSHFGFNYDKQGRDWNVKCGERQSPIALWSCNSITCNVPKLKFLNYHKSLCDPLSVINNGLTVLMRIPKTVDGSRPSLCISSEGQQVFEADQLHFHWGSALSKGSEHCLDGNYYDGEVHIVHKNASYKSNKEAGLQPNGFAVLALFIRNLEDPNIETPAMNMICKQVSSITKLDDSCPLEDSMALQDLFASIDSQKYFTYQGSLTTPPCAEAVIWFVFPTPLDVPKELWKHFWQLRDSRDQRVLNTYRELQDGHDRPVYRSKAK

SEQ ID NO: 19022 - protein, 279 aa, Drosophila melanogaster
MFLVARSFAPINSGTRSHFGFNYDKQGRDWNVKCGERQSPIALWSCNAITCNVPKLKFLNYHKSLCDPLSVINNGLTVLMRIPKTVDGSRPSLCISTEGQQVFEADQLHFHWGSALSKGSEHCLDGNYYDGEVHIVHKNASYKSNKEAGLQPNGFAVLALFIRNLEDPNIETPAMNMICKQVSSITKLDDSCPLEDSMALQDLFASIDSQKYFTYQGSLTTPPCAEAVIWFVFPTPLDVPKELWKHFWQLRDSRDQRVLNTYRELQDGHDRPVYRSKAK

SEQ ID NO: 19023 - protein, 235 aa, Drosophila melanogaster
MRQSLIVPLPRIVFGNYDVKLRGPLTLLNNGHTETANGNKPFITGGLLKGRFVAEAFHFHWGSPSSRGSEHSINQQRFDVEMHIVHRNEKYGDIDEAKNKKDGIAVIGVMLKINPNRIFPGLSKVMSALPRVTKYNAKTTIPGGLSLGQMLGNVNPRDFFTYRGSLTTPLCEQSVTWTVFSQVLPVPYSSVSKFWKLRDSEGHRLINNFRDIQPRNGRPVFYRIGKDLSGAYLGK

SEQ ID NO: 19024 - protein, 527 aa, Drosophila melanogaster
MFDTALGTVLSVMVQLIILVFGQILGQVVQHPLITTGLCLLGAFAYHADQETLKEIYQRVLLLIRTPLQFGNTSCSRNSAPVYGYDMQHGPHTWLPKSRSSSSSVEEATFFQSPVNIDESQIQRMAIRELLSWNHYDDLPASITLENTGQTLILRAQFHGNAPTISGADLLASYTFLELRFHWGWCNSEGSEHTINHRKFPLEMQVMHKTGSGIPRTCTSSYDLLMIGYVFELSAHNPFLDPLVQNLRLVQKPGKRVQISPFPISYLMYQFRSGFYSYGGSLTHPPCYQGTEWFIFPESLAISDFQLRHFRLLLGPDGISPIARNSRPVQHMGNRVVSLNCFCPYDAAQLSRMHVELCQAQAQEEHEEERIEQEQQLELERELERQRESDLKAQQEQASEAAIAASEDEGQLIETIDTTTIITSSSNTSICMTTLMRKDSPRQLEQPSQMPMMAPNQGNFCNPGIVIFSGVNESKSKCGIHQDTPEELMIHNRGTGRNMGVQNGCKADAFCGVGDGVNIGIRMELVE

SEQ ID NO: 19025 - protein, 225 aa, Drosophila melanogaster
MHLIALSLIVCCSVSFSWANEWGYPDLDNNQDEPFPKWGGLCDSGKKQSPINLHVKGALKGEFDALKFENYDEHQKNLRMVNNGHSIQLSGFDHELTLSGGALLQDFVVEQIHMHWWSEHTINDIRYPLEVHIVHRNNIYPNMTMAANFKDGIVVIGVLYHVSNTPNEAIGSIIKSLGAVKSYDSMNKPVLVADSLAVDDLVPSVENYFTYAGSLTTPTCAEAVT

SEQ ID NO: 19026 - protein, 252 aa, Pasteurella multocida
MKKSNLFVLTLGALALTACTSPLKKEETHTHWGYTGHESPEHWAELSPKFRICGEGKNQTPIDIKHTIDGKLAPIKLDYRPSNVEIVNNGHTIQVDFKEASNRMQLNGKTFTLKQFHFHVPSENLIRGKSFPMEAHFVHADNEGNLAVLGVLYVLSSENQRLAPIWQNFPQKAGEKYTLSTAFDPATLIPKKRDYYRFSGSLTTPPCSEGVNWLVLKHYDNISQSQVEAFATLMKGHNNRPVQPINARVIVE

SEQ ID NO: 19027 - protein, 200 aa, Galeocerdo cuvier
  unsure (1)..(200): unsure at all Xaa locations
EGTRQSPINQEAKFDSNLKPLDLXYDPAYVLTGGPLCGRQFHFHWGASDTHGSEHILDGKTYAAELHLVHEKYSDFAEALKAPDGLAVXGVMLXVCDSNPALKIVCSLESLKAKGDEFKDFSPCSLLPSCLQYWTYLGSLTTPPLESVIWLVIKEPISLGPDQLAKFRGRGLEFGPNEPMQNNYRPPQPLKGREIRKNFE

SEQ ID NO: 19028 - protein, 260 aa, Danio rerio
MAHAWGYGPADGPESWAESFPIANGPRQSPIDIVPTQAQHDPSLKHLKLKYDPATTKSILNNGHSFQVDFVDDDNSSTLAGGPITGIYRLRQFHFHWGSSDDKGSEHTIAGTKFPCELHLVHWNTKYPNFGEAASKPDGLAVVGVFLKIGAANPRLQKVLDALDDIKSKGRQTTFANFDPKTLLPASLDYWTYEGSLTTPPLLESVTWIVLKEPISVSPAQMAKFRSLLFSSEGETPCCMVDNYRPPQPLKGRKVRASFK

SEQ ID NO: 19029 - protein, 306 aa, Danio rerio
LPLSVYSTRQHKHTRTHISPHTPPHTPHLRSFDISHAAQRRGAMTGHHWGYGEDNGPSAWHKDYPIAEGNRQSPIDIVPSEAVFDAKLSPIALSYNNCTSLSISNNGHSVVVEFVDTDERSVITGGPLENMYRLKQFHFHWGSKGCCGSEHTVAGKTFVSELHLVHWNANKYKSFSEAAVAPDGLAVLGIFLETGDEHRALHQITDALYMVRFKGSLAEFKGFNPKCLLPNSLEYWTYPGSLTTPPLYESVTWIVLKEPIYVSEKQMGKFRTLLFNGEEEEDRNRMENNYRPPQPLKGRMVRASFK

SEQ ID NO: 19030 - protein, 260 aa, Xenopus laevis
MAHAWGYGPDNGPSTWHHAFPLAKGEYQSPINIVTAEAKHDHHLKPISIKYDPSTTKVILNNGHAFNVEFDDSENKSVLTGGALTEPYRLKQFHFHWGSCDGHGSEHTVNGVKYEAELHLVHWNTKYGSMAEAVKHCDGLAVVGVFLKVGEAHPGLQKVLDTLNQIPNKGNEAAFNDFDPSVLLPKSLDFWTYKGSLTTPPLLQCVMWHVLKEPITVSNQQLTQLRSLFFNAEGDTPCSMVDNFRPTQPLKGRHIRASFQ

SEQ ID NO: 19031 - protein, 260 aa, Xenopus laevis
MAHAWGYGPDNGPSTWHHAFPLANGEYQSPINIVPAEAKYDQHLKPISIKYDPSTAKVILNNGHAFNVEFDDSENRSVLSGGALSEPYRLKQFHFHWGSCEGHGSEHTVNGVKCEAELHLVHWNTKYGSMAEAVKHCDGLAVVGVFLKVGEAHPGLQKVLDALKLIPNKGNEAHFSDFDPSVLLPNSLDFWTYKGSLTTPPLLQCVLWHVLKEPIAVSKQQLSQLRSLFFNAEGDTPCSMVDNFRPAQPLKGRDVRASFQ

SEQ ID NO: 19032 - protein, 2271 aa, Xenopus laevis
MVNPRCFLVCLQLFSVWQVGLPFSYYRPQRKLTEEIDWSYTETLNQENWAKKYPACNGAKQSPINIDEDLTQLNTNLKKLHFEGWHEESSAYTLIRNTGKTVEINLTDDYFLSGGALDSQYKASWITFHWGKCNATSDGSEHSLEGQKFPLEMQIFCFNHKEFENIDEAISANGKIKALSILFKVGQEDNVHYNTIIDGVNNVHRFGRKVALEPFILSDLLPDYTDKYYTYNGSLTTPPCSESVEWIVFKDTVTISESQLEMFCEILTMQQSGYVMVMDYLQNNYRHQQYTFSGQVFSSYTGTEEIPEPVCSSEPEDVRADSKNNTSLLITWRRPRVVYDAVIERYLVFYQRLEGEDQTKHEYLTDGYQDLGAIIYNVLPNTSYVLQVVAICTNGLYGKRSDQVIVDMTLDPQGTDPFTDFTETEEDIEDSEEVEEEKENESTRISLSTVSNTNQIQAQGGQATTSSYSEGNAYIITEKTADDKIQKHRDGLKAYLYPTLQTTTKTMRDTTLDYSGKSMKDAVMPQSVSEATTNLSNDFKSRVEIWMLNISDSTKGITEEDEQTSADSELHATTTSWKRRILIPTRNPKPVSDHSTVSTAPTVSATYFSEITSQGNTESSDLPYSDINDAFTSTSEDISKVKAPVTEFELYNIPTSTSKSNVPVVTEEEHTTNSINLHMDELLSTSFSRQTTVLQATASSLEDVNKATLPGQEMPLVSNITFSTPKVLLESVSASFGHHDSELSVTEVLSQATLSQTTQPVSNGEIPLQPSFTSEVFPLVTPPRSDTKLLKATPATSDIDLILHATPVFPSVDVSVEPSLSSYDGTPLLAFSSASSASKVSRHLYTVSELFTQVPTDTLSLHASLVLTESNALLQPSHTYYSDVKPHQTIYGASETLTFDHGGHTFKKSNKLISHLESPNTELNMHALSTVSELTSPLSSDMASSESFVHDTVAIFHQGSIIKNLGTEVFYRPSTVSVQDISLQPTQSILSNEDSSDTFSGSGFFNYGIDDLKEQEMVSSVSAFGDVFKTNEFIENKTVNKTDYTGESNTGLQTVSAYSPVTLHAGNEEVAGLSSSDDRDYIFKVEQSSQETPPLSFLTPRSIDADINAASENLLPVEQINTLPPTSGNISLKAMLPEASAVSVSSHMSLSPTQEFFYEVSDKPVSDFFFQNVLQSTDDVSISSNVTYAEFLNDASNSYNISSNIDSVLLPTPSDTTIQSLLHSTYVTPVGNALSPDFVESTVLQQSVSALHSHYVAPHLSATVNTGTSYANDKASQTLDIEPTFLHAVSTPVLPTNTLTQDTTLNNHLPSYPYATHGIPAASRENKDVSYSLSTDVTVNYLLLPTVYVSVTAGFPNSESPSTLTMLTATSQTSSDILPTVSSNTKMGPSVVDDGFIIASTYSTSHTEAQENVIADNSVHRTILKNKTLSEYSEQSEEGSAFSTAAVDSNIDSDMERGSFLSTTMPTSSTGQKHIQFTAPETRVQTRNTLLENTSESSSWAVLTDEESGSGPSTSDSLCDNETSTDFSFSDINDRDKNYEVAIQPGKADLTPGSEITSPPSVTSERSPVVNVSEADVSNQEASNSSHESRVGLAEGLESEKTVIPLVVVSSLTFICLVVLVGILIYWRKCFQTAHFYLEDNTSSRVIAGPPIPVFPVADDVEAIPLKQFHKHVEDLHSRNGFTDEFEEVQNCTTDLGITYENSNHPDNKNKNRYINIVAYDHSRVKLSQLAEKDGKATDYINANFVDGYNKQKAYIAAQGPLKSTAEDFWRMIWEHNVEVIVMITNLVEKGRRKCDQYWPSDGSEEYGAFLVTQKTIKVLAYYTVRTFTVRNNKIKKGSQKGRQNERAVVQYHYTQWPDMGVPEYTLPVLTFVRKASATKLNGPVVVHCSAGVGRTGTYIVLDSMLQQIQHEGTVNIFGFLKHIRSQRNYLVQTEEQYIFIHDALVEAILSRETEVPETHIHGYVNTLLTMGPSGKSRLETQFKLLSEPNILQCDYSTALKPQNRDKNRTSSVIPVERSRVGLSSLAGEGTDYINASYVMGYHESNQFIITQHPLLHTIKDFWRMMWDHNSQLIVMLPDMQNMAEDEFVYWPNKDQPIVCDTFTVTLVREDHVCLSNEENLIIQDFILEATQDDYVLEVRHFQCPKWPNPDSPISKTFELINLIKEEAANKDGTIIVHDEYGGVTAGTFCALYSLMHQLEQENSLDVYQVVKMINLMRPGIFTDIEQYQFLYKAMLSLVSTRQEEDSMVFMDTNGAPLPDGSTAESLESLV

SEQ ID NO: 19033 - protein, 1576 aa, Xenopus laevis
MVNPRCFLVCLQLFSVWQVGLPFSYYRPQRKLTEEIDWSYTETLNQENWAKKYPACNGAKQSPINIDEDLTQLNTNLKKLHFEGWHEESSAYTLIRNTGKTVEINLTDDYFLSGGALDSQYKASWITFHWGKCNATSDGSEHSLEGQKFPLEMQIFCFNHKEFENIDEAISANGKIKALSILFKVGQEDNVHYNTIIDGVNNVHRFGRKVALEPFILSDLLPDYTDKYYTYNGSLTTPPCSESVEWIVFKDTVTISESQLEMFCEILTMQQSGYVMVMDYLQNNYRHQQYTFSGQVFSSYTGTEEIPEPVCSSEPEDVRADSKNNTSLLITWRRPRVVYDAVIERYLVFYQRLEGEDQTKHEYLTDGYQDLGAIIYNVLPNTSYVLQVLAICTNGLYGKRSDQVIVDMTLDPQGTDPFTDFTETEEDIEDSEEVEEEKENESTRISLSTVSNTNQIQAQGGQATTSSYSEGNAYIITEKTADDKIQKHRDGLKAYLYPTLQTTTKTMRDTTLDYSGKSMKDGVMPQSVSEATTNLSNDFKSRVEIWMLNISDSTKGITKEDEQTSADSELHATTTSWKRRILIPTRNPKPVSDHSTVSTAPTVSATYFSEITSQGNTESSDLPYSDINDAFTSTSEDISKVKAPVTEFELYNIPTSTSKSNVPVVTEEEHTTNSINLHMDELLSTSFSRQTTVLQATASSLEDVNKATLPGQEMPLVSNITFSTPKVLLESVSASFGHHDSELSVTEVLSQATLSQTTQPVSNGEIPLQPSFTSEVFPLVTPPRSDTKLLKATPATSDIDLILHATPVFPSVDVSVEPSLSSYDGTPLLAFSSASSASKVSRHLYTVSELFTQVPTDTLSLHASLVLTESNALLQPSHTYYSDVKPHQTIYGASETLTFDHGGHTFKKSNKLISHLESPNTELNMHALSTVSELTSPLSSDMASSESFVHDTVAIFHQGSIIKNLGTEVFYRPSTVSVQDISLQPTQSILSNEDSSDTFSGSGFFNYGIDDLKEQEMVSSVSAFGDVFKTNEFIENKTVNKTDYTGESNTGLQTVSAYSPVTLHAGNEEVAGLSSSDDRDYIFKVEQSSQETPPLSFLTPRSIDADINAASENLLPVEQINTLPPTSGNISLKAMLPEASAVSVSSHMSLSPTQEFFYEVSDKPVSDFFFQNVLQSTDDVSISSNVTYAEFLNDASNSYNISSNIDSVLLPTPSDTTIQSLLHSTYVTPVGNALSPDFVESTVLQQSVSALHSHYVAPHLSATVNTGTSYANDKASQTLDIEPTFLHAVSTPVLPTNTLTQDTTLNNHLPSYPYATHGIPAASRENKDVSYSLSTDVTVNYLLLPTVYVSVTAGFPNSESPSTLTMLTATSQTSSDILPTVSSNTKMGPSVVDDGFIIASTYSTSHTEAQENVIADNSVHRTILKNKTLSEYSEQSEEGSAFSTAAVDSNIDSDMERGSFLSTTMPTSSTGQKHIQFTAPETRVQTRNTLLENTSESSSWAVLTDEESGSGPSTSDSLCDNETSTDFSFSDINDRDKNYEVAIQPGKADLTPGSEITSPPSVTSERSPVVNVSEAG

SEQ ID NO: 19034 - protein, 202 aa, Helicobacter pylori 26695
MKKTFLIALALTASLVGAENTKWDYKNKENGPHRWDKLHKDFEVCKSGKSQSPINIEHYYHTQDKADLQFKYAASKPKAVFFTHHTLKASFEPTNHINYRGHDYVLDNVHFHAPMEFLINNKTRPLSAHFVHKDAKGRLLVLAIGFEEGKENPNLDPILEGIQKKQNFKEVALDAFLPKSINYYHLTALSPLLLAQRGWHGL

SEQ ID NO: 19035 - protein, 247 aa, Helicobacter pylori J99
MKKTFLIALALTASLIGAENTKWDYKNKENGPHRWDKLHKDFEVCKSGKSQSPINIEHYYHTQDKADLQFKYAASKPKAVFFTHHTLKASFEPTNHINYRGHDYVLDNVHFHAPMEFLINNKTRPLSAHFVHKDAKGRLLVLAIGFEEGKENPNLDPILEGIQKKQNLKEVALDAFLPKSINYYHFNGSLTAPPCTEGVAWFVIEEPLEVSAKQLAEIKKRMKNSPNQRPVQPDYNTVIIKSSAETR

SEQ ID NO: 19036 - protein, 275 aa, Bacillus halodurans
MKKYLWGKTCLVVSLSVMVTACSSAPSTEPVDEPSETHEETSGGAHEVHWSYTGDTGPEHWAELDSEYGACAQGEEQSPINLDKAEAVDTDTEIQVHYEPSAFTIKNNGHTIQAETTSDGNTIEIDGKEYTLVQFHFHIPSEHEMEGKNLDMELHFVHKNENDELAVLGVLMKAGEENEELAKLWSKLPAEETEENISLDESIDLNALLPESKEGFHYNGSLTTPPCSEGVKWTVLSEPITVSQEQIDAFAEIFPDNHRPVQPWNDRDVYDVITE

SEQ ID NO: 19037 - protein, 260 aa, Gallus gallus
MSHHWGYDSHNGPAHWHEHFPIANGERQSPIAISTKAARYDPALKPLSFSYDAGTAKAIVNNGHSFNVEFDDSSDKSVLQGGALDGVYRLVQFHIHWGSCEGQGSEHTVDGVKYDAELHIVHWNVKYGKFAEALKHPDGLAVVGIFMKVGNAKPEIQKVVDALNSIQTKGKQASFTNFDPTGLLPPCRDYWTYPGSLTTPPLHECVIWHVLKEPITVSSEQMCKLRGLCFSAENEPVCRMVDNWRPCQPLKSREVRASFQ

SEQ ID NO: 19038 - protein, 260 aa, Gallus gallus
MSHHWGYDSHNGPAHWHEHFPIANGERQSPIAISTKAARYDPALKPLSFSYDAGTAKAIVNNGHSFNVEFDDSSDKSVLQGGALDGVYRLVQFHIHWGSCEGQGSEHTVDGVKYDAELHIVHWNVKYGKFAEALKHPDGLAVVGIFMKVGNAKPEIQKVVDALNSIQTKGKQASFTNFDPTGLLPPCRDYWTYPGSLTTPPLHECVIWHVLKEPITVSSEQMCKLRGLCFSAENEPVCRMVDNWRPCQPVKSREVRASFQ

SEQ ID NO: 19039 - protein, 256 aa, Gallus gallus
LGYDSHNGPAHWHEHFPIANGERQSPIAISTKAARYDPALKPLSFSYDAGTAKAIVNNGHSFNVEFDDSSDKSVLQGGALDGVYRLVQFHIHWGSCEGQGSEHTVDGVKYDAELHIVHWNVKYGKFAEALKHPDGLAVVGIFMKVGNAKPEIQKVVDALNSIQTKGKQASFTNFDPTGLLPPCRDYWTYPGSLTTPPLHECVIWHVLKEPITVSSEQMCKLRGLCFSAENEPVCRMVDNWRPCQPLKSREVRASFQ

SEQ ID NO: 19040 - protein, 252 aa, Gallus gallus
SHNGPAHWHEHFPIANGERQSPIAISTKAARYDPALKPLSFSYDAGTAKAIVNNGHSFNVEFDDSSDKSVLQGGALDGVYRLVQFHIHWGSCEGQGSEHTVDGVKYDAELHIVHWNVKYGKFAEALKHPDGLAVVGIFMKVGNAKPEIQKVVDALNSIQTKGKQASFTNFDPTGLLPPCRDYWTYPGSLTTPPLHECVIWHVLKEPITVSSEQMCKLRGLCFSAENEPVCRMVDNWRPCQPVKSREVRASFQ

SEQ ID NO: 19041 - protein, 1422 aa, Gallus gallus
MRRLLQPCWWIFFLKITSSVLHDVVCFPALTEGYVGSLHESRHGSSVQIRRRKASGDPYWGYSGTYGPEHWVTSSEKCGGSHQSPIDIVDHQAHVLYEYQELQLDGFDNESSNKTWMKNTGKTVAILLKDDYFVSGAGLPGRFKAEKVEFHWGQSNGSAGSEHSINGKRFPVEMQIYFYNPDDFDSFGTAVLENREVGAMAVFFQVSQRDNSALDPIIRGLKGVVHHEKETFLDPFVLRDLLPTSLGSYYRYTGSLTTPPCSEIVEWIIFRKPVPISYHQLEAFYSIFTTEQQDHVKSVEYLRNNFRPQQRLNNRKVSKSAVKDAWSQDMTDILENPLGTEASKACSTPPVNMKVQPVNRTALLVTWNQPETIYHPPIMNYMISYSWTKNEDEKEKTFTKDSDKDLKAIISHVSPDILYLFRVQAVCRNEMRSDFSQTMLFQANTTRIFEGTRIVKTGVPTASPASSADMAPISSGSSTWTSSGLPFSFVSMATGMGPSSSGSQATVASVVTSTLLAGLGFSGSSISSFPSSVWPTRLPTAAAPTKQAGRPVVATTEPAAASPGPERDSALTKDGEGAEEGEKDEKSESEDGEREHEEEDEKEAEKKEKSRATAAAEARNSTEPSVATASPNWTAEEEGNKTVSGEEPNQNVVPKAGRPEEESFTDADTQPQPLPSTQVPPAFTDELYLEKIPRRPETTRKPLPKDNRFLEEYPSDNKFITINPADKNSSSMATRPSPGKMEWIIPLIVVSALTFVCLILLIAVLVYWRKCFQTAHFYVEDSSSPRVVPNESIPIIPIPDDMEAIPVKQFVKHISELYSNNQHGFSEDFEEVQRCTADMNITAEHSNHPDNKHKNRYINILAYDHSRVKLRPLPGKDSKHSDYINANYVSGYNKAKAYIATQGPLKSTFEDFWRMIWAQHTGIIVMITNLVEKGRRKCDQYWPTENSEEYGNIIVTLKSTNIHACYTVRPLHGQEHKDEKGSERKPKGRQNERTVIQYHYTQWPDMGVPEYALPVLTFVRRSSAARTPHMGPVVVHCSAGVGRTGTYIVIDSMLQQIKDKSTVNVLGFLKHIRTQRNYLVQTEEQYIFIHDALLEAILGKETEVSANQLHSYVNSILIPGIGGKTRLEKQFKLVTQCNAKYVECFSAQKDCNKEKNRNSSVVPSERARVGLAPLPGMKGTDYINASYIMGYYRSNENVITQHPLPHTTKDFWRMIWDHNAQIIVMLPDNQSLAEDEFVYWPSREESMNCEAFTVTLISKDRLCLSNEEQIIIHDFILEATQDDYVLEVRHFQCPKWPNPDAPISSTFELINVIKEEALTRDGPTIVHDEYGAVSAGTLCALTTLSQQLENENAVDVFQVAKMINLMRPGVFTDIEQYQFLYKAMLSLVSTKENGNGPMTLDKNGAVMASDESDPAESMESLV

SEQ ID NO: 19042 - protein, 265 aa, Nitrosomonas europaea
MKTKILASLASIIFTGYVSIAASAPPHWSYDEEPIWGAIEDAALPVPLRYPYAECGIGQHQSPVDLADAKIVSAKPLNKLSAQYKTDTPTFFNTGHAIQVNTSKNFAGGLKVGKELLPLIQLHFHEPSEHVFGGKKFPAELHFVHINKDGRIAVLGVVINIGKENAVFQTILDNMPRHEGEANSPSRVRFNPAKLLPSGVNAANLKYLTLAGSLTTPPCSEGVQWYILTKSITISADQLEQMKSFYHDNARSAQSLNERSILSNQ

SEQ ID NO: 19043 - protein, 260 aa, Macaca mulatta
ASPDWGYDDKNGPEQWSKLYPIANGNNQSPVDIKTSEAKHDTSLKPISVSYNPATAKEIINVGHSFHVNFEDNDNRSVLKGGPFSDSYRLFQFHFHWGSSNEYGSEHTVDGVKYSSELHIVHWNSAKYSSLAEAVSKADGLAVIGVLMKVGEANPKLQKVLDALHAIKTKGKRAPFTNFDPSTLLPSSLDFWTYSGSLTHPPLYESVTWIICKESISVSSEQLAQFRSLLSNVEGSNPVPIQRNNRPTQPLKGRTVRASF

SEQ ID NO: 19044 - protein, 261 aa, Macaca nemestrina
MASPDWGYDDKNGPEQWSKLYPIANGNNQSPVDIKTSEAKHDTSLKPISVSYNPATAKEIINVGHSFHVNFEDNDNRSVLKGGPFSDSYRLFQFHFHWGSSNEYGSEHTVDGVKYSSELHIVHWNSAKYSSLAEAVSKADGLAVIGVLMKVGEANPKLQKVLDALHAIKTKGKRAPFTNFDPSTLLPSSLDFWTYSGSLTHPPLYESVTWIICKESISVSSEQLAQFRSLLSNVEGDNPVPSQRNNRPTQPLKGRTVRASF

SEQ ID NO: 19045 - protein, 261 aa, Gorilla gorilla
MASPDWGYDDKNGPEQWSKLYPIANGNNQSPVDIKTSETKHDTSLKPISVSYNPATAKEIINVGHSFHVTFEDNDNRSVLKGGPLSDSYRLFQFHFHWGSTNEHGSEHTVDGVKYSAELHLTHWNSAKYSSLAEAASKADGLAVIGVLMKVGEANPKLQKILDALQAIKTKGKRAPFTNFDPSTLLPSSLDFWTYPGSLTHPPLYESVTWIICKESISVSSEQLAQFRSLLSNVEGDNAVPMQHNNRPTQPLKGRTVRASF

SEQ ID NO: 19046 - protein, 261 aa, Pan troglodytes
MASPDWGYDDKNGPEQWSKLYPIANGNNQSPVDIKTSETKHDTSLKPISVSYNPATAKEIINVGHSFHVNFEDNDNRSVLKGGPFSDSYRLFQFHFHWGSTNEHGSEHTVDGVKYSAELHIAHWNSAKYSNLAEAASKADGLAVIGVLMKVGEANPKLQKVLDALQAIKTKGKRAPFTNFDPSTLLPSSLDFWTYPGSLTHPPLYESVTWIICKESISVSSEQLAQFRSLLSNVEGDNAVPMQHNNRPTQPLKGRTVRASF

SEQ ID NO: 19047 - protein, 260 aa, Homo sapiens
ASPDWGYDDKNGPEQWSKLYPIANGNNQSPVDIKTSETKHDTSLKPISVSYNPATAKEIINVGHSFHVNFEDNQDRSVLKGGPFSDSYRLFQFHFHWGSTNEHGSEHTVDGVKYSAELHVAHWNSAKYSSLAEAASKADGLAVIGVLMKVGEANPKLQKVLDALQAIKTKGKRAPFTNFDPSTLLPSSLDFWTYPGSLTHPPLYESVTWIICKESISVSSEQLAQFRSLLSNVEGDNAVPMQHNNRPTQPLKGRTVRASF

SEQ ID NO: 19048 - protein, 261 aa, Homo sapiens
  unsure (1)..(261): unsure at all Xaa locations
XASPDWGYDDKNGPEQWSKLYPIANGNNQSPVDIKTSETKHDTSLKPISVSYNPATAKEIINVGHSFHVNFEDNQDRSVLKGGPFSDSYRLFQFHFHWGSTNEHGSEHTVDGVKYSAELHVAHWNSAKYSSLAEAASKADGLAVIGVLMKVGEANPKLQKVLDALQAIKTKGKRAPFTNFDPSTLLPSSLDFWTYPGSLTHPPLYESVTWIICKESISVSSEQLAQFRSLLSNVEGDNAVPMQHNNRPTQPLKGRTVRASF

SEQ ID NO: 19049 - protein, 260 aa, Homo sapiens
ASPDWGYDDKNGPEQWSKLYPIANGNNQSPVDIKTSETKHDTSLKPISVSYNPATAKEIINVGHSFRVNFEDNDNRSVLKGGPFSDSYRLFQFHFHWGSTNEHGSEHTVDGVKYSAELHVAHWNSAKYSSLAEAASKADGLAVIGVLMKVGEANPKLQKVLDALQAIKTKGKRAPFTNFDPSTLLPSSLDFWTYPGSLTHPPLYESVTWIICKESISVSSEQLAQFRSLLSNVEGDNAVPMQHNNRPTQPLKGRTVRASF

SEQ ID NO: 19050 - protein, 261 aa, Homo sapiens
MASPDWGYDDKNGPEQWSKLYPIANGNNQSPVDIKTSETKHDTSLKPISVSYNPATAKEIINVGHSFHVNFEDNDNRSVLKGGPFSDSYRLFQFHFHWGSTNEHGSEHTVDGVKYSAELHVAHWNSAKYSSLAEAASKADGLAVIGVLMKVGEANPKLQKVLDALQAIKTKGKRAPFTNFDPSTLLPSSLDFWTYPGSLTHPPLYESVTWIICKESISVSSEQLAQFRSLLSNVEGDNAVPMQHNNRPTQPLKGRTVRASF

SEQ ID NO: 19051 - protein, 260 aa, Homo sapiens
ASPDWGYDDKNGPEQWSKLYPIANGNNQSPVDIKTSETKHDTSLKPISVSYNPATAKEIINVGHSFHVNFEDNDNRSVLKGGPFSDSYRLFQFHFHWGSTNEHGSEHTVDGVKYSAELHVAHWNSAKYSSLAEAASKADGLAVIGVLMKVGEANPKLQKVLDALQAIKTKGKRAPFTNFDPSTLLPSSLDFWTYPGSLTHPPLYESVTWIICKESISVSSEQLAQFRSLLSNVEGDNAVPMQHNNRPTQPLKGRTVRASF

SEQ ID NO: 19052 - protein, 258 aa, Homo sapiens
HHWGYGKHNGPEHWHKDFPIAKGERQSPVDIDTHTAKYDPSLKPLSVSYDQATSLRILNNGHTFNVEFDDSQDKAVLKGGPLDGTYRLIQFHFHWGSLDGQGSEHTVDKKKYAAELHLVHWNTKYGDFGKAVQQPDGLAVLGIFLKVGSAKPGLQKVVDVLDSIKTKGKSADFTNFDPRGLLPESLDYWTYPGSLTTPPLLECVTWIVLKEPISVSSEQVLKFRKLNFNGEGEPEELMVDNWRPAQPLKNRQIKASFK

SEQ ID NO: 19053 - protein, 258 aa, Homo sapiens
HHWGYGKHNGPEHWHKDFPIAKGERQSPVDIDTHTAKYDPSLKPLSVSYDQATSLRILNNGHSFNVEFDDSQDKAVLKGGPLDGTYRLIQFHFHWGSLDGQGSEHTVDKKKYAAELHLVHWNTKYGDFGKAVQQPDGLAVLGIFLKVGSAKPGLQKVVDVLDSIKTKGKSADFTNFDPRGLLPESLDYWTYPGSLTTPPLLECVTWIVLKEPISVSSEQVLKFRKLNFNGEGEPEELMVDNWRPAQPLKNRQIKASFK

SEQ ID NO: 19054 - protein, 260 aa, Homo sapiens
  unsure (1)..(260): unsure at all Xaa locations
XSHHWGYGKHNGPEHWHKDFPIAKGERQSPVDIDTHTAKYDPSLKPLSVSYDQATSLRILNNGHAFNVEFDDSQDKAVLKGGPLDGTYRLIQFHFHWGSLDGQGSEHTVDKKKYAAELHLVHWNTKYGDFGKAVQQPDGLAVLGIFLKVGSAKPGLQKVVDVLDSIKTKGKSADFTNFDPRGLLPESLDYWTYPGSLTTPPLLECVTWIVLKEPISVSSEQVLKFRKLNFNGEGEPEELMVDNWRPAQPLKNRQIKASFX

SEQ ID NO: 19055 - protein, 260 aa, Homo sapiens
  unsure (1)..(260): unsure at all Xaa locations
XSHHWGYGKHNGPEHWHKDFPIAKGERQSPVDIDTHTAKYDPSLKPLSVSYDQATSLRILNNGHAFNVEFDDSQDKAVLKGGPLDGTYRLIQFHFHWGSLDGQGSEHTVDKKKYAAELHLVHWNTKYGDFGKAVQQPDGLAVLGIFLKVGSAKPGLQKVVDVLDSIKTKGKSADFTNFDPRGLLPESLDYWTYPGSLTTPPLLECVTWIVLKEPISVSSEQVLKFRKLNFNGEGEPEELMVDNWRPAQPLKNRQIKASFK

SEQ ID NO: 19056 - protein, 259 aa, Homo sapiens
SHHWGYGKHNGPEHWHKDFPIAKGERQSPVDIDTHTAKYDPSLKPLSVSYDQATSLRILNNGHAFNVEFDDSQDKAVLKGGPLDGTYRLIQFHFHWGSLDGQGSEHTVDKKKYAAELHLVHWNTKYGDFGKAVQQPDGLAVLGIFLKVGSAKPGLQKVVDVLDSIKTKGKSADFTNFDPRGLLPESLDYWTYPGSLTTPPLLECVTWIVLKEPISVSSEQVLKFRKLNFNGEGEPEELMVDNWRPAQPLKNRQIKASFK

SEQ ID NO: 19057 - protein, 259 aa, Homo sapiens
SHHWGYGKHNGPEHWHKDFPIAKGERQSPVDIDTHTAKYDPSLKPLSVSYDQATSLRILNNGHAFNVEFDDSQDKAVLKGGPLDGTYRLIQFHFHWGSLDGQGSEHTVDKKKYAAELHLVHWNTKYGDVGKAVQQPDGLAVLGIFLKVGSAKPGLQKVVDVLDSIKTKGKSADFTNFDPRGLLPESLDYWTYPGSLTTPPLLECVTWIVLKEPISVSSEQVLKFRKLNFNGEGEPEELMVDNWRPAQPLKNRQIKASFK

SEQ ID NO: 19058 - protein, 260 aa, Homo sapiens
MSHHWGYGKHNGPEHWHKDFPIAKGERQSPVDIDTHTAKYDPSLKPLSVSYDQATSLRILNNGAAFNVEFDDSQDKAVLKGGPLDGTYRLIQFHFHWGSLDGQGSEHTVDKKKYAAELHLVHWNTKYGDFGKAVQQPDGLAVLGIFLKVGSAKPGLQKVVDVLDSIKTKGKSADFTNFDPRGLLPESLDYWTYPGSLTTPPLLECVTWIVLKEPISVSSEQVLKFRKLNFNGEGEPEELMVDNWRPAQPLKNRQIKASFK

SEQ ID NO: 19059 - protein, 260 aa, Homo sapiens
MSHHWGYGKHNGPEHWHKDFPIAKGERQSPVDIDTHTAKYDPSLKPLSVSYDQATSLRILNNGHAFNVEFDDSQDKAVLKGGPLDGTYRLIQFHFHWGSLDGQGSEHTVDKKKYAAELHLVHWNTKYGDFGKAVQQPDGLAVLGIFLKVGSAKPGLQKVVDVLDSIKTKGKSADFTNFDPRGLLPESLDYWTYPGSLTTPPLLECVTWIVLKEPISVSSEQVLKFRKLNFNGEGEPEELMVDNWRPAQPLKNRQIKASFK

SEQ ID NO: 19060 - protein, 258 aa, Homo sapiens
HHWGYGKHNGPEHWHKDFPIAKGERQSPVDIDTHTAKYDPSLKPLSVSYDQATSLRILNNGHLFNVEFDDSQDKAVLKGGPLDGTYRLIQFHFHWGSLDGQGSEHTVDKKKYAAELHLVHWNTKYGDFGKAVQQPDGLAVLGIFLKVGSAKPGLQKVVDVLDSIKTKGKSADFTNFDPRGLLPESLDYWTYPGSLTTPPLLECVTWIVLKEPISVSSEQVLKFRKLNFNGEGEPEELMVDNWRPAQPLKNRQIKASFK

SEQ ID NO: 19061 - protein, 258 aa, Homo sapiens
HHWGYGKHNGPEHWHKDFPIAKGERQSPVDIDTHTAKYDPSLKPLSVSYDQATSLRILNNGHHFNVEFDDSQDKAVLKGGPLDGTYRLIQFHFHWGSLDGQGSEHTVDKKKYAAELHLVHWNTKYGDFGKAVQQPDGLAVLGIFLKVGSAKPGLQKVVDVLDSIKTKGKSADFTNFDPRGLLPESLDYWTYPGSLTTPPLLECVTWIVLKEPISVSSEQVLKFRKLNFNGEGEPEELMVDNWRPAQPLKNRQIKASFK

SEQ ID NO: 19062 - protein, 258 aa, Homo sapiens
HHWGYGKHNGPEHWHKDFPIAKGERQSPVDIDTHTAKYDPSLKPLSVSYDQATSLRILNNGHGFNVEFDDSQDKAVLKGGPLDGTYRLIQFHFHWGSLDGQGSEHTVDKKKYAAELHLVHWNTKYGDFGKAVQQPDGLAVLGIFLKVGSAKPGLQKVVDVLDSIKTKGKSADFTNFDPRGLLPESLDYWTYPGSLTTPPLLECVTWIVLKEPISVSSEQVLKFRKLNFNGEGEPEELMVDNWRPAQPLKNRQIKASFK

SEQ ID NO: 19063 - protein, 258 aa, Homo sapiens
HHWGYGKHNGPEHWHKDFPIAKGERQSPVDIDTHTAKYDPSLKPLSVSYDQATSLRILNNGHFFNVEFDDSQDKAVLKGGPLDGTYRLIQFHFHWGSLDGQGSEHTVDKKKYAAELHLVHWNTKYGDFGKAVQQPDGLAVLGIFLKVGSAKPGLQKVVDVLDSIKTKGKSADFTNFDPRGLLPESLDYWTYPGSLTTPPLLECVTWIVLKEPISVSSEQVLKFRKLNFNGEGEPEELMVDNWRPAQPLKNRQIKASFK

SEQ ID NO: 19064 - protein, 260 aa, Homo sapiens
MSHHWGYGKHNGPEHWHKDFPIAKGERQSPVDIDTHTAKYDPSLKPLSVSYDQATSLRILNNGHAFNVEFDDSQDKAVLKGGPLDGTYRLIQFHFHWGSLDGQGSEHTVDKKKYAAELHLVHWNTKYGDFGKAVQQPDGLAVLGIFLKVGSAKPGLQKVVDVLDSIKTKGKSADFTNFDPRGLLPESLDYWTYPGSLPTPPLLESVTWIVLKEPISVSSEQVLKFRKLNFNGEGEPEELMVDNWRPAQPLKNRQIKASFK

SEQ ID NO: 19065 - protein, 260 aa, Homo sapiens
  unsure (1)..(260): unsure at all Xaa locations
XSHHWGYGKHNGPEHWHKDFPIAKGERQSPVDIDTHTAKYDPSLKPLSVSYDQATSLRILNNGHAFNVEFDDSQDKAVLKGGPLDGTYRLIQFHFHWGSLDGQGSQHTVDKKKYAAELHLVHWNTKYGDFGKAVQQPDGLAVLGIFLKVGSAKPGLQKVVDVLDSIKTKGKSADFTNFDPRGLLPESLDYWTYPGSLTTPPLLECVTWIVLKEPISVSSEQVLKFRKLNFNGEGEPEELMVDNWRPAQPLKNRQIKASFK

SEQ ID NO: 19066 - protein, 260 aa, Homo sapiens [sequence omitted]

SEQ ID NO: 19067 - protein, 259 aa, Homo sapiens
SHHWGYGKHNGPEHWHKDFPIAKGERQSPVDIDTHTAKYDPSLKPLSVSYDQATSLRILNNGHAFNVEFDDSQDKAVLKGGPLDGTYRLIQFHFHWGSLDGQGSEHTVDKKKYAAQLHLVHWNTKYGDFGKAVQQPDGLAVLGIFLKVGSAKPGLQKVVDVLDSIKTKGKSADFTNFDPRGLLPESLDYWTYPGSLTTPPLLECVTWIVLKEPISVSSEQVLKFRKLNFNGEGEPEELMVDNWRPAQPLKNRQIKASFK

SEQ ID NO: 19068 - protein, 259 aa, Homo sapiens
SHHWGYGKHNGPEHWHKDFPIAKGERQSPVDIDTHTAKYDPSLKPLSVSYDQATSLRILNNGHAFNVEFDDSQDKAVLKGGPLDGTYRLIEFHFHWGSLDGQGSEHTVDKKKYAAELHLVHWNTKYGDFGKAVQQPDGLAVLGIFLKVGSAKPGLQKVVDVLDSIKTKGKSADFTNFDPRGLLPESLDYWTYPGSLTTPPLLECVTWIVLKEPISVSSEQVLKFRKLNFNGEGEPEELMVDNWRPAQPLKNRQIKASFK

SEQ ID NO: 19069 - protein, 260 aa, Homo sapiens
  unsure (1)..(260): unsure at all Xaa locations
XSHHWGYGKHNGPEHWHKDFPIAKGERQSPVDIDTHTAKYDPSLKPLSVSYDQATSLRILNNGHAFNVEFDDSQDKAVLKGGPLDGTYRLIQFHFHWGSLDGQGSDHTVDKKKYAAELHLVHWNTKYGDFGKAVQQPDGLAVLGIFLKVGSAKPGLQKVVDVLDSIKTKGKSADFTNFDPRGLLPESLDYWTYPGSLTTPPLLECVTWIVLKEPISVSSEQVLKFRKLNFNGEGEPEELMVDNWRPAQPLKNRQIKASFK

SEQ ID NO: 19070 - protein, 259 aa, Homo sapiens
SHHWGYGKHNGPEHWHKDFPIAKGERQSPVDIDTHTAKYDPSLKPLSVSYDQATSLRILNNGHAFNVEFDDSQDKAVLKGGPLDGTYRLIQFHFHWGSLDGQGSEHTVDKKKYAAELHLVHWNTKYGDFGKAVQQPDGLAVLGIFLKVGSAKPGLQKVVDVLDSIKTKGKSADFTNFDPRGLLPESLDYWTYPGSFTTPPLLECVTWIVLKEPISVSSEQVLKFRKLNFNGEGEPEELMVDNWRPAQPLKNRQIKASFK

SEQ ID NO: 19071 - protein, 260 aa, Homo sapiens
MSHHWGYGKHNGPEHWHKDFPIAKGERQSPVDIDTHTAKYDPSLKPLSVSYDQATSLRILNNGHAFNVEFDDSQDKAVLKGGPLDGTYRLIQFHFHWGSLDGQGSEHTVDKKKYAAELHLVHWNTKYGDFGKAVQQPDGLAVLGIFLKVGSAKPGLQKVVDVLDSIKTKGKSADFTNFDPRGLLPESLDYWTYPGSLTSPPLLECVTWIVLKEPISVSSEQVLKFRKLNFNGEGEPEELMVDNWRPAQPLKNRQIKASFK

SEQ ID NO: 19072 - protein, 260 aa, Homo sapiens
MSHHWGYGKHNGPEHWHKDFPIAKGERQSPVDIDTHTAKYDPSLKPLSVSYDQATSLRILNNGHAFNVEFDDSQDKAVLKGGPLDGTYRLIQFHFHWGSLDGQGSEHTVDKKKYAAELHLAHWNTKYGDFGKAVQQPDGLAVLGIFLKVGSAKPGLQKVVDVLDSIKTKGKSADFTNFDPRGLLPESLDYWTYPGSLTTPPLLECVTWIVLKEPISVSSEQVLKFRKLNFNGEGEPEELMVDNWRPAQPLKNRQIKASFK

SEQ ID NO: 19073 - protein, 260 aa, Homo sapiens
MSHHWGYGKHNGPEHWHKDFPIAKGERQSPVDIDTHTAKYDPSLKPLSVSYDQATSLRILNNGHAFNVEFDDSQDKAVLKGGPLDGTYRLIQFHFHWGSLDGQGSEHTVDKKKYAAELHLVHWNTKYGDFGKAVQQPDGLAFLGIFLKVGSAKPGLQKVVDVLDSIKTKGKSADFTNFDPRGLLPESLDYWTYPGSLTTPPLLECVTWIVLKEPISVSSEQVLKFRKLNFNGEGEPEELMVDNWRPAQPLKNRQIKASFK

SEQ ID NO: 19074 - protein, 260 aa, Homo sapiens
  unsure (1)..(260): unsure at all Xaa locations
XSHHWGYGKHNGPEHWHKDFPIAKGERQSPVDIDTHTAKYDPSLKPLSVSYDQATSLRILNNGHAFNVEFDDSQDKAVLKGGPLDGTYRLIQFHFHWGSLDGQGSEHTVDKKKYAAELHLVHWNTKYGDFGKAVQQPDGLAVLGIFLKVGSAKPGLQKVVDVLDSIKTKGKSADFTNFDPRGLLPESLDYWTYPGSLATPPLLECVTWIVLKEPISVSSEQVLKFRKLNFNGEGEPEELMVDNWRPAQPLKNRQIKASFK

SEQ ID NO: 19075 - protein, 260 aa, Homo sapiens
MSHHWGYGKHNGPEHWHKDFPIAKGERQSPVDIDTHTAKYDPSLKPLSVSYDQATSLRILNNGHAFNVEFDDSQDKAVLKGGPLDGTYRLIQFHFHWGSLDGQGSEHTVDKKKYAAELHLVHWNTKYGDFGKAVQQPDGLAYLGIFLKVGSAKPGLQKVVDVLDSIKTKGKSADFTNFDPRGLLPESLDYWTYPGSLTTPPLLECVTWIVLKEPISVSSEQVLKFRKLNFNGEGEPEELMVDNWRPAQPLKNRQIKASFK

SEQ ID NO: 19076 - protein, 260 aa, Homo sapiens
MSHHWGYGKHNGPEHWHKDFPIAKGERQSPVDIDTHTAKYDPSLKPLSVSYDQATSLRILNNGHAFNVEFDDSQDKAVLKGGPLDGTYRLIQFHFHWGSLDGQGSEHTVDKKKYAAELHLVHWNTKYGDFGKAVQQPDGLAVLGIFLKVGSAKPGLQKVVDVLDSIKTKGKSADFTNFDPRGLLPESLDYWTYPGSATTPPLLECVTWIVLKEPISVSSEQVLKFRKLNFNGEGEPEELMVDNWRPAQPLKNRQIKASFK

SEQ ID NO: 19077 - protein, 260 aa, Homo sapiens
MSHHWGHGKHNGPEHWHKDFPIAKGERQSPVDIDTHTAKYDPSLKPLSVSYDQATSLRILNNGHAFNVEFDDSQDKAVLKGGPLDGTYRLIQFHFHWGSLDGQGSEHTVDKKKYAAELHLVHWNTKYGDFGKAVQQPDGLAVLGIFLKVGSAKPGLQKVVDVLDSIKTKGKSADFTNFDPRGLLPESLDYWTYPGSLTTPPLLECVTWIVLKEPISVSSEQVLKFRKLNFNGEGEPEELMVDNWRPAQPLKNRQIKASFK

SEQ ID NO: 19078 - protein, 259 aa, Homo sapiens
SHHWGYGKHNGPEHWHKDFPIAKGERQSPVDIDTHTAKYDPSLKPLSVSYDQATSLRILNNGHAFNVEFDDSQDKAVLKGGPLDGTYRLINFHFHWGSLDGQGSEHTVDKKKYAAELHLVHWNTKYGDFGKAVQQPDGLAVLGIFLKVGSAKPGLQKVVDVLDSIKTKGKSADFTNFDPRGLLPESLDYWTYPGSLTTPPLLECVTWIVLKEPISVSSEQVLKFRKLNFNGEGEPEELMVDNWRPAQPLKNRQIKASFK

SEQ ID NO: 19079 - protein, 259 aa, Homo sapiens
SHHWGYGKHNGPEHWHKDFPIAKGERQSPVDIDTHTAKYDPSLKPLSVSYDQATSLRILNNGHAFNVEFDDSQDKAVLKGGPLDGTYRLIQFHFHWGSLDGQGSEHTVDKKKYAAELHLVHWNTKYGDFGKAVQQPDGLAVLGIFLKVGSAKPGLQKVVDVLDSIKTKGKSADFTNFDPRGLLPESLDYWTYPGSLVTPPLLECVTWIVLKEPISVSSEQVLKFRKLNFNGEGEPEELMVDNWRPAQPLKNRQIKASFK

SEQ ID NO: 19080 - protein, 259 aa, Homo sapiens
SHHWGYGKHNGPEHWHKDFPIAKGERQSPVDIDTHTAKYDPSLKPLSVSYDQATSLRILNNGHAFNVEFDDSQDKAVLKGGPLDGTYRLIAFHFHWGSLDGQGSEHTVDKKKYAAELHLVHWNTKYGDFGKAVQQPDGLAVLGIFLKVGSAKPGLQKVVDVLDSIKTKGKSADFTNFDPRGLLPESLDYWTYPGSLTTPPLLECVTWIVLKEPISVSSEQVLKFRKLNFNGEGEPEELMVDNWRPAQPLKNRQIKASFK

SEQ ID NO: 19081 - protein, 260 aa, Homo sapiens
MSHHWGYGKHNGPEHWHKDFPIAKGERQSPVDIDTHTAKYDPSLKPLSVSYDQATSLRILNNGHAFNVEFDDSQDKAVLKGGPLDGTYRLIQFHFHWGSLDGQGSEHTVDKKKYAAELHLVHWNTKYGDFGKAVQQPDGLAVLGIFLKVGSAKPGLQKVVDVLDSIKTKGKSADFTNFDPRGLLPESLDYWTYPGSRTTPPLLECVTWIVLKEPISVSSEQVLKFRKLNFNGEGEPEELMVDNWRPAQPLKNRQIKASFK

SEQ ID NO: 19082 - protein, 260 aa, Homo sapiens
MSHHWGYGKHNGPEHWHKDFPIAKGERQSPVDIDTHTAKYDPSLKPLSVSYDQATSLRILNNGHAFNVEFDDSQDKAVLKGGPLDGTYRLIQFHFHWGSLDGQGSEHTVDKKKYAAELHLVHWNTKYGDFGKAVQQPDGLAVLGIFLKVGSAKPGLQKVVDVLDSIKTKGKSADFTNFDPRGLLPESLDYWTYPGSLCTPPLLECVTWIVLKEPISVSSEQVLKFRKLNFNGEGEPEELMVDNWRPAQPLKNRQIKASFK

SEQ ID NO: 19083 - protein, 259 aa, Homo sapiens
SHHWGYGKHNGPEHWHKDFPIAKGERQSPVDIDTHTAKYDPSLKPLSVSYDQATSLRILNNGHAFNVEFDDSQDKAVLKGGPLDGTYRLIQFHFHWGSLDGQGSEHTVDKKKYAAELHLVHWNTKYGDFGKAVQQPDGLAVLGIFLKVGSAKPGLQKVVDVLDSIKTKGKSADFTNFDPRGLLPESLDYWTYPGSLDTPPLLECVTWIVLKEPISVSSEQVLKFRKLNFNGEGEPEELMVDNWRPAQPLKNRQIKASFK

SEQ ID NO: 19084 - protein, 259 aa, Homo sapiens
SHHWGYGKHNGPEHWHKDFPIAKGERQSPVDIDTHTAKYDPSLKPLSVSYDQATSLRILNNGHAFNVEFDDSQDKAVLKGGPLDGTYRLIQFHFHWGSLDGQGSEHTVDKKKYAAELHLVHWNTKYGDFGKAVQQPDGLAVLGIFLKVGSAKPGLQKVVDVLDSIKTKGKSADFTNFDPRGLLPESLDYWTYPGSRTTPPLLECVTWIVLKEPISVSSEQVLKFRKLNFNGEGEPEELMVDNWRPAQPLKNRQIKASFK

SEQ ID NO: 19085 - protein, 259 aa, Homo sapiens
SHHWGYGKHNGPEHWHKDFPIAKGERQSPVDIDTHTAKYDPSLKPLSVSYDQATSLRILNNGHAFNVEFDDSQDKAVLKGGPLDGTYRLIQFHFHWGSLDGQGSEHTVDKKKYAAELHLVHWNTKYGDFGKAVQQPDGLAVLGIFLKVGSAKPGLQKVVDVLDSIKTKGKSADFTNFDPRGLLPESLDYWTYPGSLETPPLLECVTWIVLKEPISVSSEQVLKFRKLNFNGEGEPEELMVDNWRPAQPLKNRQIKASFK

SEQ ID NO: 19086 - protein, 260 aa, Homo sapiens
  unsure (1)..(260): unsure at all Xaa locations
XSHHWGYGKHNGPEHWHKDFPIAKGERQSPVDIDTHTAKYDPSLKPLSVSYDQATSLRILNNGHAFNVEFDDSQDKAVLKGGPLDGTYRLIQFHFHWGSLDGQGSAHTVDKKKYAAELHLVHWNTKYGDFGKAVQQPDGLAVLGIFLKVGSAKPGLQKVVDVLDSIKTKGKSADFTNFDPRGLLPESLDYWTYPGSLTTPPLLECVTWIVLKEPISVSSEQVLKFRKLNFNGEGEPEELMVDNWRPAQPLKNRQIKASFK

SEQ ID NO: 19087 - protein, 260 aa, Homo sapiens
MSHHWGYGKHNGPEHWHKDFPIAKGERQSPVDIDTHTAKYDPSLKPLSVSYDQATSLRILNNGHAFNVEFDDSQDKAVLKGGPLDGTYRLIQFHMHVGSLDGQGSEHTVDKKKYAAELHLVHWNTKYGDFGKAVQQPDGLAVLGIFLKVGSAKPGLQKVVDVLDSIKTKGKSADFTNFDPRGLLPESLDYWTYPGSLTTPPLLECVTWIVLKEPISVSSEQVLKFRKLNFNGEGEPEELMVDNWRPAQPLKNRQIKASFK

SEQ ID NO: 19088 - protein, 259 aa, Homo sapiens
SHHWGYGKHNGPEHWHKDFPIAKGERQSPVDIDTHTAKYDPSLKPLSVSYDQATSLRILNNGHAFNVEFDDSQDKAVLKGGPLDGTYRLIQFHFHWGSLDGQGSEHTVDKKKYAAALHLVHWNTKYGDFGKAVQQPDGLAVLGIFLKVGSAKPGLQKVVDVLDSIKTKGKSADFTNFDPRGLLPESLDYWTYPGSLTTPPLLECVTWIVLKEPISVSSEQVLKFRKLNFNGEGEPEELMVDNWRPAQPLKNRQIKASFK

SEQ ID NO: 19089 - protein, 260 aa, Homo sapiens
MSHHWGYGKHNGPEHWHKDFPIAKGERQSPVDIDTHTAKYDPSLKPLSVSYDQATSLRILNNGHAFNVEFDDSQDKAVLKGGPLDGTYRLIQFHFHWGSLDGQGSEHTVDKKKYAAELHLVHWNTKYGDFGKAVQQPDGLAVLGIFLKVGSAKPGLQKVVDVLDSIKTKGKSADFTNFDPRGLLPESLDYWTYPGSHTTPPLLECVTWIVLKEPISVSSEQVLKFRKLNFNGEGEPEELMVDNWRPAQPLKNRQIKASFK

SEQ ID NO: 19090 - protein, 260 aa, Homo sapiens
MSHHWGYGKHNGPEHWHKDFPIAKGERQSPVDIDTHTAKYDPSLKPLSVSYDQATSLRILNNGHAFNVEFDDSQDKAVLKGGPLDGTYRLIQFHFHWGSLDGQGSEHTVDKKKYAAELHLVHWNTKYGDFGKAVQQPDGLAGLGIFLKVGSAKPGLQKVVDVLDSIKTKGKSADFTNFDPRGLLPESLDYWTYPGSLTTPPLLECVTWIVLKEPISVSSEQVLKFRKLNFNGEGEPEELMVDNWRPAQPLKNRQIKASFK

SEQ ID NO: 19091 - protein, 260 aa, Homo sapiens
  unsure (1)..(260): unsure at all Xaa locations
XSHHWGYGKHNGPEHWHKDFPIAKGERQSPVDIDTHTAKYDPSLKPLSVSYDQATSLRILNNGHAFNVEFDDSQDKAVLKGGPLDGTYRLIQFHFHWGSLDGQGSEHTVDKKKYAAELHLVHWNTKYGDFGKAVQQPDGLAVLGIFLKVGSAKPGLQKVVDVLDSIKTKGKSADFTNFDPRGLLPESLDYWTYPGSLTHPPLLECVTWIVLKEPISVSSEQVLKFRKLNFNGEGEPEELMVDNWRPAQPLKNRQIKASFK

SEQ ID NO: 19092 - protein, 260 aa, Homo sapiens
MSHHWGYGKHNGPEHWHKDFPIAKGERQSPVDIDTHTAKYDPSLKPLSVSYDQATSLRILNNGHAFNVEFDDSQDKAVLKGGPLDGTYRLIQFHFHWGSLDGQGSEHTVDKKKYAAELHLVHWNTKYGDFGKAVQQPDGLAVLGIFLKVGSAKPGLQKVVDVLDSIKTKGKSADFTNFDPRGLLPESLDYWTYPGSETTPPLLECVTWIVLKEPISVSSEQVLKFRKLNFNGEGEPEELMVDNWRPAQPLKNRQIKASFK

SEQ ID NO: 19093 - protein, 260 aa, Homo sapiens
MSHHWGYGKHNGPEHWHKDFPIAKGERQSPVDIDTHTAKYDPSLKPLSVSYDQATSLRILNNGHAFNVEFDDSQDKAVLKGGPLDGTYRLIQFHFHWGSLDGQGSEHTVDKKKYAAELHLVHWNTKYGDFGKAVQQPDGLAHLGIFLKVGSAKPGLQKVVDVLDSIKTKGKSADFTNFDPRGLLPESLDYWTYPGSLTTPPLLECVTWIVLKEPISVSSEQVLKFRKLNFNGEGEPEELMVDNWRPAQPLKNRQIKASFK

SEQ ID NO: 19094 - protein, 259 aa, Homo sapiens
SHHWGYGKHNGPEHWHKDFPIAKGERQSPVDIDTHTAKYDPSLKPLSVSYDQATSLRILNNGHAFNVEFDDSQDKAVLKGGPLDGTYRLILFHFHWGSLDGQGSEHTVDKKKYAAELHLVHWNTKYGDFGKAVQQPDGLAVLGIFLKVGSAKPGLQKVVDVLDSIKTKGKSADFTNFDPRGLLPESLDYWTYPGSLTTPPLLECVTWIVLKEPISVSSEQVLKFRKLNFNGEGEPEELMVDNWRPAQPLKNRQIKASFK

SEQ ID NO: 19095 - protein, 259 aa, Homo sapiens
SHHWGYGKHNGPEHWHKDFPIAKGERQSPVDIDTHTAKYDPSLKPLSVSYDQATSLRILNNGHAFNVEFDDSQDKAVLKGGPLDGTYRLIQFHFHWGSLDGQGSEHTVDKKKYAAELHLVHWNTKYGDFGKAVQQPDGLAVLGIFLKVGSAKPGLQKVVDVLDSIKTKGKSADFTNFDPRGLLPESLDYWTYPGSLHTPPLLECVTWIVLKEPISVSSEQVLKFRKLNFNGEGEPEELMVDNWRPAQPLKNRQIKASFK

SEQ ID NO: 19096 - protein, 259 aa, Homo sapiens
SHHWGYGKHNGPEHWHKDFPIAKGERQSPVDIDTHTAKYDPSLKPLSVSYDQATSLRILNNGHAFNVEFDDSQDKAVLKGGPLDGTYRLIQFNFHWGSLDGQGSEHTVDKKKYAAELHLVHWNTKYGDFGKAVQQPDGLAVLGIFLKVGSAKPGLQKVVDVLDSIKTKGKSADFTNFDPRGLLPESLDYWTYPGSLTTPPLLECVTWIVLKEPISVSSEQVLKFRKLNFNGEGEPEELMVDNWRPAQPLKNRQIKASFK

SEQ ID NO: 19097 - protein, 259 aa, Homo sapiens
SHHWGYGKHNGPEHWHKDFPIAKGERQSPVDIDTHTAKYDPSLKPLSVSYDQATSLRILNNGHAFNVEFDDSQDKAVLKGGPLDGTYRLIQFHFHWGSLDGQGSEHTVDKKKYAAELNLVHWNTKYGDFGKAVQQPDGLAVLGIFLKVGSAKPGLQKVVDVLDSIKTKGKSADFTNFDPRGLLPESLDYWTYPGSLTTPPLLECVTWIVLKEPISVSSEQVLKFRKLNFNGEGEPEELMVDNWRPAQPLKNRQIKASFK

SEQ ID NO: 19098 - protein, 259 aa, Homo sapiens
SHHWGYGKHNGPEHWHKDFPIAKGERQSPVDIDTHTAKYDPSLKPLSVSYDQATSLRILNNGHAFNVEFDDSQDKAVLKGGPLDGTYRLIQFHFHWGSLDGQGSEHTVDKKKYAAELHLVHWNTKYGDFGKAVQQPDGLAVLGIFLKVGSAKPGLQKVVDVLDSIKTKGKSADFTNFDPRGLLPESLDYWTYPGSETTPPLLECVTWIVLKEPISVSSEQVLKFRKLNFNGEGEPEELMVDNWRPAQPLKNRQIKASFK

SEQ ID NO: 19099 - protein, 259 aa, Homo sapiens
SHHWGYGKHNGPEHWHKDFPIAKGERQSPVDIDTHTAKYDPSLKPLSVSYDQATSLRILNNGHAFNVEFDDSQDKAVLKGGPLDGTYRLIQFHFHWGSLDGQGSEHTVDKKKYAAELQLVHWNTKYGDFGKAVQQPDGLAVLGIFLKVGSAKPGLQKVVDVLDSIKTKGKSADFTNFDPRGLLPESLDYWTYPGSLTTPPLLECVTWIVLKEPISVSSEQVLKFRKLNFNGEGEPEELMVDNWRPAQPLKNRQIKASFK

SEQ ID NO: 19100 - protein, 256 aa, Homo sapiens
HWGYGKHNGPEHWHKDFPIAKGERQSPVDIDTHTAKYDPSLKPLSVSYDQATSLRILNNGHAFNVEFDDSQDKAVLKGGPLDGTYRLIQFHFHWGSLDGQGSEHTVDKKKYAAELHLVHWNTKYGDFGKAVQQPDGLAVLGIFLKVGSAKPGLQKVVDVLDSIKTKGKSADFTNFDPRGLLPESLDYWTYPGSLTTPALLECVTWIVLKEPISVSSEQVLKFRKLNFNGEGEPEELMVDNWRPAQPLKNRQIKASF

SEQ ID NO: 19101 - protein, 259 aa, Homo sapiens
SHHWGYGKHNGPEHWHKDFPIAKGERQSPVDIDTHTAKYDPSLKPLSVSYDQATSLRILNNGHAFNVEFDDSQDKAVLKGGPLDGTYRLIQFHFHWGSLDGQGSEHTVDKKKYAAELDLVHWNTKYGDFGKAVQQPDGLAVLGIFLKVGSAKPGLQKVVDVLDSIKTKGKSADFTNFDPRGLLPESLDYWTYPGSLTTPPLLECVTWIVLKEPISVSSEQVLKFRKLNFNGEGEPEELMVDNWRPAQPLKNRQIKASFK

SEQ ID NO: 19102 - protein, 259 aa, Homo sapiens
SHHWGYGKHNGPEHWHKDFPIAKGERQSPVDIDTHTAKYDPSLKPLSVSYDQATSLRILNNGHAFNVEFDDSQDKAVLKGGPLDGTYRLIQFDFHWGSLDGQGSEHTVDKKKYAAELHLVHWNTKYGDFGKAVQQPDGLAVLGIFLKVGSAKPGLQKVVDVLDSIKTKGKSADFTNFDPRGLLPESLDYWTYPGSLTTPPLLECVTWIVLKEPISVSSEQVLKFRKLNFNGEGEPEELMVDNWRPAQPLKNRQIKASFK

SEQ ID NO: 19103 - protein, 257 aa, Homo sapiens
  unsure (1)..(257): unsure at all Xaa locations
HWGYGKHNGPEHWHKDFPIAKGERQSPVDIDTHTAKYDPSLKPLSVSYDQATSLRILNNGHAFNVEFDDSQDKAVLKGGPLDGTYRLIQFHFHWGSLDGQGSEHTVDKKKYAAELHLVHWNTKYGDFGKAVQQPDGLAVLGIFLKVGSAKPGLQKVVDVLDSIKTKGKSADFTNFDPRGLLPESLDYWTYPGSLTTPPLLECXVTWIVLKEPISVSSEQVLKFRKLNFNGEGEPEELMVDNWRPAQPLKNRQIKASF

SEQ ID NO: 19104 - protein, 259 aa, Homo sapiens
SHHWGYGKHNGPEHWHKDFPIAKGERQSPVDIDTHTAKYDPSLKPLSVSYDQATSLRILNNGHAFNVEFDDSQDKAVLKGGPLDGTYRLIQFAFHWGSLDGQGSEHTVDKKKYAAELHLVHWNTKYGDFGKAVQQPDGLAVLGIFLKVGSAKPGLQKVVDVLDSIKTKGKSADFTNFDPRGLLPESLDYWTYPGSLTTPPLLECVTWIVLKEPISVSSEQVLKFRKLNFNGEGEPEELMVDNWRPAQPLKNRQIKASFK

SEQ ID NO: 19105 - protein, 259 aa, Homo sapiens
SHHWGYGKHNGPEHWHKDFPIAKGERQSPVDIDTHTAKYDPSLKPLSVSYDQATSLRILNNGHAFNVEFDDSQDKAVLKGGPLDGTYRLIQFCFHWGSLDGQGSEHTVDKKKYAAELHLVHWNTKYGDFGKAVQQPDGLAVLGIFLKVGSAKPGLQKVVDVLDSIKTKGKSADFTNFDPRGLLPESLDYWTYPGSLTTPPLLECVTWIVLKEPISVSSEQVLKFRKLNFNGEGEPEELMVDNWRPAQPLKNRQIKASFK

SEQ ID NO: 19106 - protein, 260 aa, Homo sapiens
MSHHWGYGKHNGPEHWHKDFPIAKGERQSPVDIDTHTAKYDPSLKPLSVSYDQATSLRILNNGHAFNVEFDDSQDKAVLKGGPLDGTYRLIQFCFHWGSLDGQGSEHTVDKKKYAAELHLVHWNTKYGDFGKAVQQPDGLAVLGIFLKVGSAKPGLQKVVDVLDSIKTKGKSADFTNFDPRGLLPESLDYWTYPGSLTTPPLLECVTWIVLKEPISVSSEQVLKFRKLNFNGEGEPEELMVDNWRPAQPLKNRQIKASFK

SEQ ID NO: 19107 - protein, 255 aa, Homo sapiens
WGYGKHNGPEHWHKDFPIAKGERQSPVDIDTHTAKYDPSLKPLSVSYDQATSLRILNNGHAFNVEFDDSQDKAVLKGGPLDGTYRLIQFHFCWGSLDGQGSEHTVDKKKYAAELHLVHWNTKYGDFGKAVQQPDGLAVLGIFLKVGSAKPGLQKVVDVLDSIKTKGKSADFTNFDPRGLLPESLDYWTYPGSLTTPPLLECVTWIVLKEPISVSSEQVLKFRKLNFNGEGEPEELMVDNWRPAQPLKNRQIKASF

SEQ ID NO: 19108 - protein, 260 aa, Homo sapiens
MSHHWGYGKHNGPEHWHKDFPIAKGERQSPVDIDTHTAKYDPSLKPLSVSYDQATSLRILNNGHAFNVEFDDSQDKAVLKGGPLDGTYRLIQIHMHVGSLDGQGSEHTVDKKKYAAELHLVHWNTKYGDFGKAVQQPDGLAVLGIFLKVGSAKPGLQKVVDVLDSIKTKGKSADFTNFDPRGLLPESLDYWTYPGSLTTPPLLECVTWIVLKEPISVSSEQVLKFRKLNFNGEGEPEELMVDNWRPAQPLKNRQIKASFK

SEQ ID NO: 19109 - protein, 255 aa, Homo sapiens
WGYGKHNGPEHWHKDFPIAKGERQSPVDIDTHTAKYDPSLKPLSVSYDQATSLRILNNGHAFNVEFDDSQDKAVLKGGPLDGTYRLIQFHFHWGSLDGQGSEHTVDKKKYAAELCLVHWNTKYGDFGKAVQQPDGLAVLGIFLKVGSAKPGLQKVVDVLDSIKTKGKSADFTNFDPRGLLPESLDYWTYPGSLTTPPLLECVTWIVLKEPISVSSEQVLKFRKLNFNGEGEPEELMVDNWRPAQPLKNRQIKASF

SEQ ID NO: 19110 - protein, 260 aa, Homo sapiens [sequence omitted]

SEQ ID NO: 19111 - protein, 259 aa, Homo sapiens [sequence omitted]

SEQ ID NO: 19112 - protein, 260 aa, Homo sapiens
MSHHWGYGKHNGPEHWHKDFPIAKGERQSPVDIDTHTAKYDPSLKPLSVSYDQATSLRILNNGHAFNVEFDDSQDKAVLKGGPLDGTYRLIQSHLHMGSLDGQGSEHTVDKKKYAAELHLVHWNTKYGDFGKAVQQPDGLAVLGIFLKVGSAKPGLQKVVDVLDSIKTKGKSADFTNFDPRGLLPESLDYWTYPGSLTTPPLLECVTWIVLKEPISVSSEQVLKFRKLNFNGEGEPEELMVDNWRPAQPLKNRQIKASFK

SEQ ID NO: 19113 - protein, 260 aa, Homo sapiens
MAKEWGYASHNGPDHWHELFPNAKGENQSPVELHTKDIRHDPSLQPWSVSYDGGSAKTILNNGKTCRVVFDDTYDRSMLRGGPLPGPYRLRQFHLHWGSSDDHGSEHTVDGVKYAAELHLVHWNPKYNTFKEALKQRDGIAVIGIFLKIGHENGEFQIFLDALDKIKTKGKEAPFTKFDPSCLFPACRDYWTYQGSFTTPPCEECIVWLLLKEPMTVSSDQMAKLRSLLSSAENEPPVPLVSNWRPPQPINNRVVRASFK

SEQ ID NO: 19114 - protein, 264 aa, Homo sapiens [sequence omitted]

SEQ ID NO: 19115 - protein, 262 aa, Homo sapiens
MSRLSWGYREHNGPIHWKEFFPIADGDQQSPIEIKTKEVKYDSSLRPLSIKYDPSSAKIISNSGHSFNVDFDDTENKSVLRGGPLTGSYRLRQVHLHWGSADDHGSEHIVDGVSYAAELHVVHWNSDKYPSFVEAAHEPDGLAVLGVFLQIGEPNSQLQKITDTLDSIKEKGKQTRFTNFDLLSLLPPSWDYWTYPGSLTVPPLLESVTWIVLKQPINISSQQLAKFRSLLCTAEGEAAAFLVSNHRPPQPLKGRKVRASFH

SEQ ID NO: 19116 - protein, 305 aa, Homo sapiens
MLGRNTWKTSAFSFLVEQMWAPLWSRSMRPGRWCSQRSCAWQTSNNTLHPLWTVPVSVPGGTRQSPINIQWRDSVYDPQLKPLRVSYEAASCLYIWNTGYLFQVEFDDATEASGISGGPLENHYRLKQFHFHWGAVNEGGSEHTVDGHAYPAELHLVHWNSVKYQNYKEAVVGENGLAVIGVFLKLGAHHQTLQRLVDILPEIKHKDARAAMRPFDPSTLLPTCWDYWTYAGSLTTPPLTESVTWIIQKEPVEVAPSQLSAFRTLLFSALGEEEKMMVNNYRPLQPLMNRKVWASFQATNEGTRS

SEQ ID NO: 19117 - protein, 317 aa, Homo sapiens
MVVMNSLRVILQASPGKLLWRKFQIPRFMPARPCSLYTCTYKTRNRALHPLWESVDLVPGGDRQSPINIRWRDSVYDPGLKPLTISYDPATCLHVWNNGYSFLVEFEDSTDKSVIKGGPLEHNYRLKQFHFHWGAIDAWGSEHTVDSKCFPAELHLVHWNAVRFENFEDAALEENGLAVIGVFLKLGKHHKELQKLVDTLPSIKHKDALVEFGSFDPSCLMPTCPDYWTYSGSLTTPPLSESVTWIIKKQPVEVDHDQLEQFRTLLFTSEGEKEKRMVDNFRPLQPLMNRTVRSSFRHDYVLNVQAKPKPATSQATP

SEQ ID NO: 19118 - protein, 343 aa, Homo sapiens
MPRRSLHAAAVLLLVILKEQPSSPAPVNGSKWTYFGPDGENSWSKKYPSCGGLLQSPIDLHSDILQYDASLTPLEFQGYNLSANKQFLLTNNGHSVKLNLPSDMHIQGLQSRYSATQLHLHWGNPNDPHGSEHTVSGQHFAAELHIVHYNSDLYPDASTASNKSEGLAVLAVLIEMGSFNPSYDKIFSHLQHVKYKGQEAFVPGFNIEELLPERTAEYYRYRGSLTTPPCNPTVLWTVFRNPVQISQEQLLALETALYCTHMDDPSPREMINNFRQVQKFDERLVYTSFSQGIILSLALAGILGICIVVVVSIWLFRRKSIKKGDNKGVIYKPATKMETEAHA

SEQ ID NO: 19119 - protein, 354 aa, Homo sapiens
MPRRSLHAAAVLLLVILKEQPSSPAPVNGSKWTYFGPDGENSWSKKYPSCGGLLQSPIDLHSDILQYDASLTPLEFQGYNLSANKQFLLTNNGHSVKLNLPSDMHIQGLQSRYSATQLHLHWGNPNDPHGSEHTVSGQHFAAELHIVHYNSDLYPDASTASNKSEGLAVLAVLIEMGSFNPSYDKIFSHLQHVKYKGQEAFVPGFNIEELLPERTAEYYRYRGSLTTPPCNPTVLWTVFRNPVQISQEQLLALETALYCTHMDDPSPREMINNFRQVQKFDERLVYTSFSQVQVCTAAGLSLGIILSLALAGILGICIVVVVSIWLFRRKSIKKGDNKGVIYKPATKMETEAHA

SEQ ID NO: 19120 - protein, 263 aa, Homo sapiens
ASKWTYFGPDGENSWSKKYPSCGGLLQSPIDLHSDILQYDASLTPLEFQGYNLSANKQFLLTNNGHSVKLNLPSDMHIQGLQSRYSATQLHLHWGNPNDPHGSEHTVSGQHFAAELHIVHYNSDLYPDASTASNKSEGLAVLAVLIEMGSFNPSYDKIFSHLQHVKYKGQEAFVPGFNIEELLPERTAEYYRYRGSLTTPPCNPTVLWTVFRNPVQISQEQLLALETALYCTHMDDPSPREMINNFRQVQKFDERLVYTSFSQ

SEQ ID NO: 19121 - protein, 208 aa, Homo sapiens
MSLSITNNGHSVQVDFNDSDDRTVVTGGPLEGPYRLKQFHFHWGKKHDVGSEHTVDGKSFPSELHLVHWNAKKYSTFGEAASAPDGLAVVGVFLETGDEHPSMNRLTDALYMVRFKGTKAQFSCFNPKCLLPASRHYWTYPGSLTTPPLSESVTWIVLREPICISERQMGKFRSLLFTSEDDERIHMVNNFRPPQPLKGRVVKASFRA

SEQ ID NO: 19122 - protein, 337 aa, Homo sapiens
MLFSALLLEVIWILAADGGQHWTYEGPHGQDHWPASYPECGNNAQSPIDIQTDSVTFDPDLPALQPHGYDQPGTEPLDLHNNGHTVQLSLPSTLYLGGLPRKYVAAQLHLHWGQKGSPGGSEHQINSEATFAELHIVHYDSDSYDSLSEAAERPQGLAVLGILIEVGETKNIAYEHILSHLHEVRHKDQKTSVPPFNLRELLPKQLGQYFRYNGSLTTPPCYQSVLWTVFYRRSQISMEQLEKLQGTLFSTEEEPSKLLVQNYRALQPLNQRMVFASFIQAGSSYTTGEMLSLGVGILVGCLCLLLAVYFIARKIRKKRLENRKSVVFTSAQATTEA

SEQ ID NO: 19123 - protein, 290 aa, Homo sapiens
MADLSFIEDTVAFPEKEEDEEEEEEGVEWGYEEGVEWGLVFPDANGEYQSPINLNSREARYDPSLLDVRLSPNYVVCRDCEVTNDGHTIQVILKSKSVLSGGPLPQGHEFELYEVRFHWGRENQRGSEHTVNFKAFPMELHLIHWNSTLFGSIDEAVGKPHGIAIIALFVQIGKEHVGLKAVTEILQDIQYKGKSKTIPCFNPNTLLPDPLLRDYWVYEGSLTIPPCSEGVTWILFRYPLTISQLQIEEFRRLRTHVKGAELVEGCDGILGDNFRPTQPLSDRVIRAAFQ

SEQ ID NO: 19124 - protein, 337 aa, Homo sapiens [sequence omitted]

SEQ ID NO: 19125 - protein, 289 aa, Homo sapiens
ADLSFIEDTVAFPEKEEDEEEEEEGVEWGYEEGVEWGLVFPDANGEYQSPINLNSREARYDPSLLDVRLSPNYVVCRDCEVTNDGHTIQVILKSKSVLSGGPLPQGHEFELYEVRFHWGRENQRGSEHTVNFKAFPMELHLIHWNSTLFGSIDEAVGKPHGIAIIALFVQIGKEHVGLKAVTEILQDIQYKGKSKTIPCFNPNTLLPDPLLRDYWVYEGSLTIPPCSEGVTWILFRYPLTISQLQIEEFRRLRTHVKGAELVEGCDGILGDNFRPTQPLSDRVIRAAFQ

SEQ ID NO: 19126 - protein, 308 aa, Homo sapiens
MRALVLLLSLFLLGGQAQHVSDWTYSEGALDEAHWPQHYPACGGQRQSPINLQRTKVRYNPSLKGLNMTGYETQAGEFPMVNNGHTVQISLPSTMRMTVADGTVYIAQQMHFHWGGASSEISGSEHTVDGIRHVIEIHIVHYNSKYKSYDIAQDAPDGLAVLAAFVEVKNYPENTYYSNFISHLANIKYPGQRTTLTGLDVQDMLPRNLQHYYTYHGSLTTPPCTENVHWFVLADFVKLSRTQVWKLENSLLDHRNKTIHNDYRRTQPLNHRVVESNFPNQEYTLGSEFQFYLHKIEEILDYLRRALN

SEQ ID NO: 19127 - protein, 459 aa, Homo sapiens
MAPLCPSPWLPLLIPAPAPGLTVQLLLSLLLLMPVHPQRLPRMQEDSPLGGGSSGEDDPLGEEDLPSEEDSPREEDPPGEEDLPGEEDLPGEEDLPEVKPKSEEEGSLKLEDLPTVEAPGDPQEPQNNAHRDKEGDDQSHWRYGGDPPWPRVSPACAGRFQSPVDIRPQLAAFCPALRPLELLGFQLPPLPELRLRNNGHSVQLTLPPGLEMALGPGREYRALQLHLHWGAAGRPGSEHTVEGHRFPAEIHVVHLSTAFARVDEALGRPGGLAVLAAFLEEGPEENSAYEQLLSRLEEIAEEGSETQVPGLDISALLPSDFSRYFQYEGSLTTPPCAQGVIWTVFNQTVMLSAKQLHTLSDTLWGPGDSRLQLNFRATQPLNGRVIEASFPAGVDSSPRAAEPVQLNSCLAAGDILALVFGLLFAVTSVAFLVQMRRQHRRGTKGGVSYRPAEVAETGA

SEQ ID NO: 19128 - protein, 308 aa, Homo sapiens
MRALVLLLSLFLLGGQAQHVSDWTYSEGALDEAHWPQHYPACGGQRQSPINLQRTKVRYNPSLKGLNMTGYETQAGEFPMVNNGHTVQIGLPSTMRMTVADGIVYIAQQMHFHWGGASSEISGSEHTVDGIRHVIEIHIVHYNSKYKTYDIAQDAPDGLAVLAAFVEVKNYPENTYYSNFISHLANIKYPGQRTTLTGLDVQDMLPRNLQHYYTYHGSLTTPPCTENVHWFVLADFVKLSRTQVWKLENSLLDHRNKTIHNDYRRTQPLNHRVVESNFPNQEYTLGSEFQFYLHKIEEILDYLRRALN

SEQ ID NO: 19129 - protein, 308 aa, Homo sapiens [sequence omitted]

SEQ ID NO: 19130 - protein, 308 aa, Homo sapiens
MRALVLLLSLFLLGGQAQHVSDWTYSEGALDEAHWPQHYPACGGQRQSPINLQRTKVRYNPSLKGLNMTGYETQAGEFPMVNNGHTVQIGLPSTMRMTVADGIVYIAQQMHFHWGGASSEISGSEHTVDGIRHVIEIHIVHYNSKYKTYDIAQDAPDGLAVLAAFVEVKNYPENTYYSNFISHLANIKYPGQRTTLTGLDVQDMLPRNLQHYYTYHGSLTTPPCTENVHWFVLADFVKLSRTQVWKLENSLLDHRNKTIHNDYRRTQPLKHRVVESNFPNQEYTLGSEFQFYLHKIEEILDYLRRALN

SEQ ID NO: 19131 - protein, 328 aa, Homo sapiens
MEIVWEVLFLLQANFIVCISAQQNSPKIHEGWWAYKEVVQGSFVPVPSFWGLVNSAWNLCSVGKRQSPVNIETSHMIFDPFLTPLRINTGGRKVSGTMYNTGRHVSLRLDKEHLVNISGGPMTYSHRLEEIRLHFGSEDSQGSEHLLNGQAFSGEVQLIHYNHELYTNVTEAAKSPNGLVVVSIFIKVSDSSNPFLNRMLNRDTITRITYKNDAYLLQGLNIEELYPETSSFITYDGSMTIPPCYETASWIIMNKPVYITRMQMHSLRLLSQNQPSQIFLSMSDNFRPVQPLNNRCIRTNINFSLQGKDCPNNRAQKLQYRVNEWLLK

SEQ ID NO: 19132 - protein, 267 aa, Homo sapiens
GPPFWGLVNAAWSLCAVGKRQSPVDVELKRVLYDPFLPPLRLSTGGEKLRGTLYNTGRHVSFLPAPRPVVNVSGGPLLYSHRLSELRLLFGARDGAGSEHQINHQGFSAEVQLIHFNQELYGNFSAASRGPNGLAILSLFVNVASTSNPFLSRLLNRDTITRISYKNDAYFLQDLSLELLFPESFGFITYQGSLSTPPCSETVTWILIDRALNITSLQMHSLRLLSQNPPSQMFQSLSGNSRPLQPLAHRALRGNRDPRHPERRCRG

SEQ ID NO: 19133 - protein, 1445 aa, Homo sapiens
  unsure (1)..(1445): unsure at all Xaa locations
MRRLLEPCWWILFLKITSSVLHYVVCFPALTEGYVGALHENRHGSAVQIRRRKASGDPYWAYSGAYGPEHWVTSSVSCGGRHQSPIDILDQHARVGEEYQELQLDGFDNESSNKTWMKNTGKTVAILLKDDYFVSGAGLPGRFKAEKVEFHWGHSNGSAGSEHSINGRRFPVEMQIFFYNPDDFDSFQTAISENRIIGAMAIFFQVSPRDNSALDPIIHGLKGVVHHEKETFLDPFVLRDLLPASLGSYYRYTGSLTTPPCSEIVEWIVFRRPVPISYHQLEAFYSIFTTEQQDHVKSVEYLRNNFRPQQRLHDRVVSKSAVRDSWNHDMTDFLENPLGTEASKVCSSPPIHMKVQPLNQTALQVSWSQPETIYHPPIMNYMISYSWTKNEDEKEKTFTKDSDKDLKATISHVSPDSLYLFRVQAVCRNDMRSDFSQTMLFQANTTRIFQGTRIVKTGVPTASPASSADMAPISSGSSTWTSSGIPFSFVSMATGMGPSSSGSQATVASVVTSTLLAGLGFGGGGISSFPSTVWPTRLPTAASASKQAVRPVLATTEALASPGPDGDSSPTKDGEGTEEGEKDEKSESEDGEREHEEDGEKDSEKKEKSGVTHAAEERNQTEPSPTPSSPNRTAEGGHQTIPGHEQDHTAVPTDQTGGRRDAGPGLDPDMVTSTQVPPTATEEQYAGSDPKRPEMPSKKPMSRGDRFSEDSRFITVNPAEKNTSGMISRPAPGRMEWIIPLIVVSALTFVCLILLTAVLVYWRGCNKIKSKGFPRRFREVPSSGERGEKGSRKCFQTAHFYVEDSSSPRVVPNESIPIIPIPDDMEAIPVKQFVKHIGELYSNNQHGFSEDFEEVQRCTADMNITAEHSNHPENKHKNRYINILAYDHSRVKLRPLPGKDSKHSDYINANYVDGYNKAKAYIATQGPLKSTFEDFWRMIWEQNTGIIVMITNLVEKGRRKCDQYWPTENSEEYGNIIVTLKSTKIHACYTVRRFSIRNTKVKKGQKGNPKGRQNERVVIQYHYTQWPDMGVPEYALPVLTFVRRSSAARMPETGPVLVHCSAGVGRTGTYIVIDSMLQQIKDKSTVNVLGFLKHIRTQRNYLVQTEEQYIFIHDALLEAILGKETEVSSNQLHSYVNSILIPGVGGKTRLEKQFKLVTQCNAKYVECFSAQKECNKEKNRNSXVVPSERARVGLAPLPGMKGTDYINASYIMGYYRSNEFIITQHPLPHTTKDFWRMIWDHNAQIIVMLPDNQSLAEDEFVYWPSREESMNCEAFTVTLISKDRLCLSNEEQIIIHDFILEATQDDYVLEVRHFQCPKWPNPDAPISSTFELINVIKEEALTRDGPTIVHDEYGAVSAGMLCALTTLSQQLENENAVDVFQVAKMINLMRPGVFTDIEQYQFIYKARLSLVSTKENGNGPMTVDKNGAVLIADESDPAESMESLV

SEQ ID NO: 19134 - protein, 328 aa, Homo sapiens [sequence omitted]

SEQ ID NO: 19135 - protein, 328 aa, Homo sapiens
MGAAARLSAPRALVLWAALGAAAHIGPAPDPEDWWSYKDNLQGNFVPGPPFWGLVNAAWSLCAVGKRQSPVDVELKRVLYDPFLPPLRLSTGGEKLRGTLYNTGRHVSFLPAPRPVVNVSGGPLLYSHRLSELRLLFGARDGAGSEHQINHQGFSAEVQLIHFNQELYGNFSAASRGPNGLAILSLFVNVASTSNPFLSRLLNRDTITRISYKNDAYFLQDLSLELLFPESFGFITYQGSLSTPPCSETVTWILIDRALNITSLQMHSLRLLSQNPPSQIFQSLSGNSRPLQPLAHRALRGNRDPRHPERRCRGPNYRLHVDGVPHGR

SEQ ID NO: 19136 - protein, 328 aa, Homo sapiens [sequence omitted]

SEQ ID NO: 19137 - protein, 1445 aa, Homo sapiens
MRRLLEPCWWILFLKITSSVLHYVVCFPALTEGYVGALHENRHGSAVQIRRRKASGDPYWAYSGAYGPEHWVTSSVSCGSRHQSPIDILDQYARVGEEYQELQLDGFDNESSNKTWMKNTGKTVAILLKDDYFVSGAGLPGRFKAEKVEFHWGHSNGSAGSEHSINGRRFPVEMQIFFYNPDDFDSFQTAISENRIIGAMAIFFQVSPRDNSALDPIIHGLKGVVHHEKETFLDPFVLRDLLPASLGSYYRYTGSLTTPPCSEIVEWIVFRRPVPISYHQLEAFYSIFTTEQQDHVKSVEYLRNNFRPQQRLHDRVVSKSAVRDSWNHDMTDFLENPLGTEASKVCSSPPIHMKVQPLNQTALQVSWSQPETIYHPPIMNYMISYSWTKNEDEKEKTFTKDSDKDLKATISHVSPDSLYLFRVQAVCRNDMRSDFSQTMLFQANTTRIFQGTRIVKTGVPTASPASSADMAPISSGSSTWTSSGIPFSFVSMATGMGPSSSGSQATVASVVTSTLLAGLGFGGGGISSFPSTVWPTRLPTAASASKQAARPVLATTEALASPGPDGDSSPTKDGEGTEEGEKDEKSESEDGEREHEEDGEKDSEKKEKSGVTHAAEERNQTEPSPTPSSPNRTAEGGHQTIPGHEQDHTAVPTDQTGGRRDAGPGLDPDMVTSTQVPPTATEEQYAGSDPKRPEMPSKKPMSRGDRFSEDSRFITVNPAEKNTSGMISRPAPGRMEWIIPLIVVSALTFVCLILLIAVLVYWRGCNKIKSKGFPRRFREVPSSGERGEKGSRKCFQTAHFYVEDSSSPRVVPNESIPIIPIPDDMEAIPVKQFVKHIGELYSNNQHGFSEDFEEVQRCTADMNITAEHSNHPENKHKNRYINILAYDHSRVKLRPLPGKDSKHSDYINANYVDGYNKAKAYIATQGPLKSTFEDFWRMIWEQNTGIIVMITNLVEKGRRKCDQYWPTENSEEYGNIIVTLKSTKIHACYTVRRFSIRNTKVKKGQKGNPKGRQNERVVIQYHYTQWPDMGVPEYALPVLTFVRRSSAARMPETGPVLVHCSAGVGRTGTYIVIDSMLQQIKDKSTVNVLGFLKHIRTQRNYLVQTEEQYIFIHDALLEAILGKETEVSSNQLHSYVNSILIPGVGGKTRLEKQFKLVTQCNAKYVECFSAQKECNKEKNRNSSVVPSERARVGLAPLPGMKGTDYINASYIMGYYRSNEFIITQHPLPHTTKDFWRMIWDHNAQIIVMLPDNQSLAEDEFVYWPSREESMNCEAFTVTLISKDRLCLSNEEQIIIHDFILEATQDDYVLEVRHFQCPKWPNPDAPISSTFELINVIKEEALTRDGPTIVHDEYGAVSAGMLCALTTLSQQLENENAVDVFQVAKMINLMRPGVFTDIEQYQFIYKARLSLVSTKENGNGPMTVDKNGAVLIADESDPAESMESLV

SEQ ID NO: 19138 - protein, 312 aa, Homo sapiens
MRMLLALLALSAARPSASAESHWCYEVQAESSNYPCLVPVKWGGNCQKDRQSPINIVTTKAKVDKKLGRFFFSGYDKKQTWTVQNNGHSVMMLLENKASISGGGLPAPYQAKQLHLHWSDLPYKGSEHSLDGEHFAMEMHIVHEKEKGTSRNVKEAQDPEDEIAVLAFLVEAGTQVNEGFQPLVEALSNIPKPEMSTTMAESSLLDLLPKEEKLRHYFRYLGSLTTPTCDEKVVWTVFREPIQLHREQILAFSQKLYYDKEQTVSMKDNVRPLQQLGQRTVIKSGAPGRPLPWALPALLGPMLACLLAGFLR

SEQ ID NO: 19139 - protein, 266 aa, Homo sapiens
AESHWCYEVQAESSNYPCLVPVKWGGNCQKDRQSPINIVTTKAKVDKKLGRFFFSGYDKKQTWTVQNNGHSVMMLLENKASISGGGLPAPYQAKQLHLHWSDLPYKGSEHSLDGEHFAMEMHIVHEKEKGTSRNVKEAQDPEDEIAVLAFLVEAGTQVNEGFQPLVEALSNIPKPEMSTTMAESSLLDLLPKEEKLRHYFRYLGSLTTPTCDEKVVWTVFREPIQLHREQILAFSQKLYYDKEQTVSMKDNVRPLQQLGQRTVIKS

SEQ ID NO: 19140 - protein, 294 aa, Homo sapiens
MRMLLALLALSAARPSASAVPVKWGGNCQKDRQSPINIVTTKAKVDKKLGRFFFSGYDKKQTWTVQNNGHSVMMLLENKASISGGGLPAPYQAKQLHLHWSDLPYKGSEHSLDGEHFAMEMHIVHEKEKGTSRNVKEAQDPEDEIAVLAFLVEAGTQVNEGFQPLVEALSNIPKPEMSTTMAESSLLDLLPKEEKLRHYFRYLGSLTTPTCDEKVVWTVFREPIQLHREQILAFSQKLYYDKEQTVSMKDNVRPLQQLGQRTVIKSGAPGRPLPWALPALLGPMLACLLAGFLR

SEQ ID NO: 19141 - protein, 1445 aa, Homo sapiens
MRRLLEPCWWILFLKITSSVLHYVVCFPALTEGYVGALHENRHGSAVQIRRRKASGDPYWAYSGAYGPEHWVTSSVSCGSRHQSPIDILDQYARVGEEYQELQLDGFDNESSNKTWMKNTGKTVAILLKDDYFVSGAGLPGRFKAEKVEFHWGHSNGSAGSEHSINGRRFPVEMQIFFYNPDDFDSFQTAISEWRIIGAMAIFFQVSPRDNSALDPIIHGLKGVVHHEKETFLDPFVLRDLLPASLGSYYRYTGSLTTPPCSEIVEWIVFRRPVPISYHQLEAFYSIFTTEQQDHVKSVEYLRNNFRPQQRLHDRVVSKSAVRDSWNHDMTDFLENPLGTEASKVCSSPPIHMKVQPLNQTALQVSWSQPETIYHPPIMNYMISYSWTKNEDEKEKTFTKDSDKDLKATISHVSPDSLYLFRVQAVCRNDMRSDFSQTMLFQANTTRIFQGTRIVKTGVPTASPASSADMAPISSGSSTWTSSGIPFSFVSMATGMGPSSSGSQATVASVVTSTLLAGLGFGGGGISSFPSTVWPTRLPTAASASKQAARPVLATTEALASPGPDGDSSPTKDGEGTEEGEKDEKSESEDGEREHEEDGEKDSEKKEKSGVTHAAEERNQTEPSPTPSSPNRTAEGGHQTIPGHEQDHTAVPTDQTGGRRDAGPGLDPDNVTSTQVPPTATEEQYAGSDPKRPEMPSKKPMSRGDRFSEDSRFITVNPAEKNTSGMISRPAPGRMEWIIPLIVVSALTFVCLILLIAVLVYWRGCNKIKSKGFPRRFREVPSSGERGEKGSRKCFQTAHFYVEDSSSPRVVPNESIPIIPIPDDMEAIPVKQFVKHIGELYSNNQHGFSEDFEEVQRCTADMNITAEHSNHPENKHKNRYINILAYDHSRVKLRPLPGKDSKHSDYINANYVDGYNKAKAYIATQGPLKSTFEDFWRMIWEQNTGIIVMITNLVEKGRRKCDQYWPTENSEEYGNIIVTLKSTKIHACYTVRRFSIRNTKVKKGQKGNPKGRQNERVVIQYHYTQWPDMGVPEYALPVLTFVRRSSAARMPETGPVLVHCSAGVGRTGTYIVIDSMLQQIKDKSTVNVLGFLKHIRTQRNYLVQTEEQYIFIHDALLEAILGKETEVSSNQLHSYVNSILIPGVGGKTRLEKQFKLVTQCNAKYVECFSAQKECNKEKNRNSSVVPSERARVGLAPLPGMKGTDYINASYIMGYYRSNEFIITQHPLPHTTKDFWRMIWDHNAQIIVMLPDNQSLAEDEFVYWPSREESMNCEAFTVTLISKDRLCLSNEEQIIIHDFILEATQDDYVLEVRHFQCPKWPNPDAPISSTFELINVIKEEALTRDGPTIVHDEYGAVSAGMLCALTTLSQQLENENAVDVFQVAKMINLMRPGVFTDIEQYQFIYKARLSLVSTKENGNGPMTVDKNGAVLIADESDPAESMESLV

SEQ ID NO: 19142 - protein, 222 aa, Homo sapiens
MMLLENKASISGGGLPAPYQAKQLHLHWSDLPYKGSEHSLDGEHFAMEMHIVHEKEKGTSRNVKEAQDPEDEIAVLAFLVEAGTQVNEGFQPLVEALSNIPKPEMSTTMAESSLLDLLPKEEKLRHYFRYLGSLTTPTCDEKVVWTVFREPIQLHREQILAFSQKLYYDKEQTVSMKDNVRPLQQLGQRTVIKSGAPGRPLPWALPALLGPMLACLLAGFLR

SEQ ID NO: 19143 - protein, 130 aa, Homo sapiens
MVSVIGVFLKLGAHHQMLQRLVDVLLEVKHKDARAAMRPFDPSALLPTCWDYWTYVGSLTTPPLTESVTWIIQKEPVEVAPSQLSAFRTLLFSALGEEKKMTVNNYRPLQPLMNWKVWASFQATNEGTRS

SEQ ID NO: 19144 - protein, 130 aa, Homo sapiens
MLSVIGVFLKLGAHHQMLQRLVDILLEVKHKDAQAAMRPFDPSALLPTCWDYWTYVGSLTTPPLTESVTWIIQKEPVEVAPSQLSAFRTLLFSALGEEKKMMVNNYRPLQPLMNWKVWASFQATNEGTRS

SEQ ID NO: 19145 - protein, 1005 aa, Homo sapiens
MRILKRFLACIQLLCVCRLDWANGYYRQQRKLVEEIGWSYTGALNQKNWGKKYPTCNSPKQSPINIDEDLTQVNVNLKKLKFQGWDKTSLENTFIHNTGKTVEINLTNDYRVSGGVSEMVFKASKITFHWGKCNMSSDGSEHSLEGQKFPLEMQIYCFDADRFSSFEEAVKGKGKLRALSILFEVGTEENLDFKAIIDGVESVSRFGKQAALDPFILLNLLPNSTDKYYIYNGSLTSPPCTDTVDWIVFKDTVSISESQLAVFCEVLTMQQSGYVMLMDYLQNNFREQQYKFSRQVFSSYTGKEEIHEAACRSEPENVQADPENYTSLLVTWERPRVVYDTMIEKFAVLYQQLDGEDQTKHEFLTDGYQDLGAILNNLLPNMSYVLQIVAICTNGLYGKYSDQLIVDMPTDNPELDLFPELIGTEEIIKEEEEGKDIEEGAIVNPGRDSATNQIRKKEPQISTTTHYNRIGTKYNEAKTNRSPTRGSEFSGKGDVPNTSLNSTSQPVTKLATEKDISLTSQTVTELPPHTVEGTSASLNDGSKTVLRSPHMNLSGTAESLNTVSITEYEEESLLTSFKLDTGAEDSSGSSPATSAIPFISENISQGYIFSSENPETITYDVLIPESARNASEDSTSSGSEESLKDPSMEGNVWFPSSTDITAQPDVGSGRESFLQTNYTEIRVDESEKTTKSFSAGPVMSQGPSVTDLEMPHYSTFAYFPTEVTPHAFTPSSRQQDLVSTVNVVYSQTTQPVYNGETPLQPSYSSEVFPLVTPLLLDNQILNTTPAASSSDSALHATPVFPSVDVSFESILSSYDGAPLLPFSSASFSSELFRHLHTVSQILPQVTSATESDKVPLHASLPVAGGDLLLEPSLAQYSDVLSTTHAASETLEFGSESGVLYKTLMFSQVEPPSSDAMMHARSSGPEPSYALSDNEGSQHIFTVSYSSAIPVHDSVGVTYQGSLFSGPSHIPIPKSSLITPTASLLQPTHALSGDGEWSGAEFDIKL

SEQ ID NO: 19146 - protein, 2314 aa, Homo sapiens
MRILKRFLACIQLLCVCRLDWANGYYRQQRKLVEEIGWSYTGALNQKNWGKKYPTCNSPKQSPINIDEDLTQVNVNLKKLKFQGWDKTSLENTFIHNTGKTVEINLTNDYRVSGGVSEMVFKASKITFHWGKCNMSSDGSEHSLEGQKFPLEMQIYCFDADRFSSFEEAVKGKGKLRALSILFEVGTEENLDFKAIIDGVESVSRFGKQAALDPFILLNLLPNSTDKYYIYNGSLTSPPCTDTVDWIVFKDTVSISESQLAVFCEVLTMQQSGYVMLMDYLQNNFREQQYKFSRQVFSSYTGKEEIHEAVCSSEPENVQADPENYTSLLVTWERPRVVYDTMIEKFAVLYQQLDGEDQTKHEFLTDGYQDLGAILNNLLPNMSYVLQIVAICTNGLYGKYSDQLIVDMPTDNPELDLFPELIGTEEIIKEEEEGKDIEEGAIVNPGRDSATNQIRKKEPQISTTTHYNRIGTKYNEAKTNRSPTRGSEFSGKGDVPNTSLNSTSQPVTKLATEKDISLTSQTVTELPPHTVEGTSASLNDGSKTVLRSPHMNLSGTAESLNTVSITEYEEESLLTSFKLDTGAEDSSGSSPATSAIPFISENISQGYIFSSENPETITYDVLIPESARNASEDSTSSGSEESLKDPSMEGNVWFPSSTDITAQPDVGSGRESFLQTNYTEIRVDESEKTTKSFSAGPVMSQGPSVTDLEMPHYSTFAYFPTEVTPHAFTPSSRQQDLVSTVNVVYSQTTQPVYNGETPLQPSYSSEVFPLVTPLLLDNQILNTTPAASSSDSALHATPVFPSVDVSFESILSSYDGAPLLPFSSASFSSELFRHLHTVSQILPQVTSATESDKVPLHASLPVAGGDLLLEPSLAQYSDVLSTTHAASETLEFGSESGVLYKTLMFSQVEPPSSDAMMHARSSGPEPSYALSDNEGSQHIFTVSYSSAIPVHDSVGVTYQGSLFSGPSHIPIPKSSLITPTASLLQPTHALSGDGEWSGASSDSEFLLPDTDGLTALNISSPVSVAEFTYTTSVFGDDNKALSKSEIIYGNETELQIPSFNEMVYPSESTVMPNMYDNVNKLNASLQETSVSISSTKGMFPGSLAHTTTKVFDHEISQVPENNFSVQPTHTVSQASGDTSLKPVLSANSEPASSDPASSEMLSPSTQLLFYETSASFSTEVLLQPSFQASDVDTLLKTVLPAVPSDPILVETPKVDKISSTMLHLIVSNSASSENMLHSTSVPVFDVSPTSHMHSASLQGLTISYASEKYEPVLLKSESSHQVVPSLYSNDELFQTANLEINQAHPPKGRHVFATPVLSIDEPLNTLINKLIHSDEILTSTKSSVTGKVFAGIPTVASDTFVSTDHSVPIGNGHVAITAVSPHRDGSVTSTKLLFPSKATSELSHSAKSDAGLVGGGEDGDTDDDGDDDDDRDSDGLSIHKCMSCSSYRESQEKVMNDSDTHENSLMDQNNPISYSLSENSEEDNRVTSVSSDSQTGMDRSPGKSPSANGLSQKHNDGKEENDIQTGSALLPLSPESKAWAVLTSDEESGSGQGTSDSLNENETSTDFSFADTNEKDADGILAAGDSEITPGFPQSPTSSVTSENSEVFHVSEAEASNSSHESRIGLAEGLESEKKAVIPLVIVSALTFICLVVLVGILIYWRKCFQTAHFYLEDSTSPRVISTPPTPIFPISDDVGAIPIKHFPKHVADLHASSGFTEEFETLKEFYQEVQSCTVDLGITADSSNHPDNKHKNRYINIVAYDHSRVKLAQLAEKDGKLTDYINANYVDGYNRPKAYIAAQGPLKSTAEDFWRMIWEHNVEVIVMITNLVEKGRRKCDQYWPADGSEEYGNFLVTQKSVQVLAYYTVRNFTLRNTKIKKGSQKGRPSGRVVTQYHYTQWPDMGVPEYSLPVLTFVRKAAYAKRHAVGPVVVHCSAGVGRTGTYIVLDSMLQQIQHEGTVNIFGFLKHIRSQRNYLVQTEEQYVFIHDTLVEAILSKETEVLDSHIHAYVNALLIPGPAGKTKLEKQFQLLSQSNIQQSDYSAALKQCNREKNRTSSIIPVERSRVGISSLSGEGTDYINASYIMGYYQSNEFIITQHPLLHTIKDFWRMIWDHNAQLVVMIPDGQNMAEDEFVYWPNKDEPINCESFKVTLMAEEHKCLSNEEKLIIQDFILEATQDDYVLEVRHFQCPKWPNPDSPISKTFELISVIKEEAANRDGPMIVHDEHGGVTAGTFCALTTLMHQLEKENSVDVYQVAKMINLMRPGVFADIEQYQFLYKVILSLVSTRQEENPSTSLDSNGAALPDGNIAESLESLV

SEQ ID NO: 19147 - protein, 2307 aa, Homo sapiens
MRILKRFLACIQLLCVCRLDWANGYYRQQRKLVEEIGWSYTGALNQKNWGKKYPTCNSPKQSPINIDEDLTQVNVNLKKLKFQGWDKTSLENTFIHNTGKTVEINLTNDYRVSGGVSEMVFKASKITFHWGKCNMSSDGSEHSLEGQKFPLEMQIYCFDADRFSSFEEAVKGKGKLRALSILFEVGTEENLDFKAIIDGVESVSRFGKQAALDPFILLNLLPNSTDKYYIYNGSLTSPPCTDTVDWIVFKDTVSISESQLAVFCEVLTMQQSGYVMLMDYLQNNFREQQYKFSRQVFSSYTGKEEIHEAVCSSEPENVQADPENYTSLLVTWERPRVVYDTMIEKFAVLYQQLDGEDQTKHEFLTDGYQDLGAILNNLLPNMSYVLQIVAICTNGLYGKYSDQLIVDMPTDNPELDLFPELIGTEEIIKEEEEGKDIEEGAIVNPGRDSATNQIRKKEPQISTTTHYNRIGTKYNEAKTNRSPTRGSEFSGKGDVPNTSLNSTSQPVTKLATEKDISLTSQTVTELPPHTVEGTSASLNDGSKTVLRSPHMNLSGTAESLNTVSITEYEEESLLTSFKLDTGAEDSSGSSPATSAIPFISENISQGYIFSSENPETITYDVLIPESARNASEDSTSSGSEESLKDPSMEGNVWFPSSTDITAQPDVGSGRESFLQTNYTEIRVDESEKTTKSFSAGPVMSQGPSVTDLEMPHYSTFAYFPTEVTPHAFTPSSRQQDLVSTVNVVYSQTTQPVYNGETPLQPSYSSEVFPLVTPLLLDNQILNTTPAASSSDSALHATPVFPSVDVSFESILSSYDGAPLLPFSSASFSSELFRHLHTVSQILPQVTSATESDKVPLHASLPVAGGDLLLEPSLAQYSDVLSTTHAASETLEFGSESGVLYKTLMFSQVEPPSSDAMMHARSSGPEPSYALSDNEGSQHIFTVSYSSAIPVHDSVGVTYQGSLFSGPSHIPIPKSSLITPTASLLQPTHALSGDGEWSGASSDSEFLLPDTDGLTALNISSPVSVAEFTYTTSVFGDDNKALSKSEIIYGNETELQIPSFNEMVYPSESTVMPNMYDNVNKLNASLQETSVSISSTKGMFPGSLAHTTTKVFDHEISQVPENNFSVQPTHTVSQASGDTSLKPVLSANSEPASSDPASSEMLSPSTQLLFYETSASFSTEVLLQPSFQASDVDTLLKTVLPAVPSDPILVETPKVDKISSTMLHLIVSNSASSENMLHSTSVPVFDVSPTSHMHSASLQGLTISYASEKYEPVLLKSESSHQVVPSLYSNDELFQTANLEINQAHPPKGRHVFATPVLSIDEPLNTLINKLIHSDEILTSTKSSVTGKVFAGIPTVASDTFVSTDHSVPIGNGHVAITAVSPHRDGSVTSTKLLFPSKATSELSHSAKSDAGLVGGGEDGDTDDDGDDDDDRDSDGLSIHKCMSCSSYRESQEKVMNDSDTHENSLMDQNNPISYSLSENSEEDNRVTSVSSDSQTGMDRSPGKSPSANGLSQKHNDGKEENDIQTGSALLPLSPESKAWAVLTSDEESGSGQGTSDSLNENETSTDFSFADTNEKDADGILAAGDSEITPGFPQSPTSSVTSENSEVFHVSEAEASNSSHESRIGLAEGLESEKKAVIPLVIVSALTFICLVVLVGILIYWRKCFQTAHFYLEDSTSPRVISTPPTPIFPISDDVGAIPIKHFPKHVADLHASSGFTEEFEEVQSCTVDLGITADSSNHPDNKHKNRYINIVAYDHSRVKLAQLAEKDGKLTDYINANYVDGYNRPKAYIAAQGPLKSTAEDFWRMIWEHNVEVIVMITNLVEKGRRKCDQYWPADGSEEYGNFLVTQKSVQVLAYYTVRNFTLRNTKIKKGSQKGRPSGRVVTQYHYTQWPDMGVPEYSLPVLTFVRKAAYAKRHAVGPVVVHCSAGVGRTGTYIVLDSMLQQIQHEGTVNIFGFLKHIRSQRNYLVQTEEQYVFIHDTLVEAILSKETEVLDSHIHAYVNALLIPGPAGKTKLEKQFQLLSQSNIQQSDYSAALKQCNREKNRTSSIIPVERSRVGISSLSGEGTDYINASYIMGYYQSNEFIITQHPLLHTIKDFWRMIWDHNAQLVVMIPDGQNMAEDEFVYWPNKDEPINCESFKVTLMAEEHKCLSNEEKLIIQDFILEATQDDYVLEVRHFQCPKWPNPDSPISKTFELISVIKEEAANRDGPMIVHDEHGGVTAGTFCALTTLMHQLEKENSVDVYQVAKMINLMRPGVFADIEQYQFLYKVILSLVSTRQEENPSTSLDSNGAALPDGNIAESLESLV

SEQ ID NO: 19148 - protein, 260 aa, Equus caballus
AHSDWGYDSPBGPZEWVKLYPIABGBBQSPIDIKTSETKHDTSLKPFSVSYDPATAKEIVNVGHSFQVKFEDSDNRSVLKDGPLPGSYRLVQFHFHWGSTDDYGSEHTVDGVKYSAELHLVHWNSSKYSSFDEASSQADGLAILGVLMKVGEANPKLQKVLDALNEVKTKGKKAPFKNFDPSSLLPSSPDYWTYSGSLTHPPLYESVTWIVCKENISISSQQLSQFRSLLSNVEGGKAVPIQHNNRPPQPLKGRTVRAFF

SEQ ID NO: 19149 - protein, 259 aa, Equus caballus
SHHWGYGEHDGPKHWHKDFPIAKGERQSPVDIDTKAAVHDAALKPLAVHYQEATSRRIVNNGHSFNVEFDDSEDKAVLEGGPLTGTYRLIQFHFHWGSSNGQGSEHTVDKKKYAAELHLVHWNTKYGDFGKAVQEPDGLAVVGVFLKVGGAKPGLQKVLDVLDSIKTKGKSADFTNFDPRGLLPESLDYWTYPGSLTTPPLLECVTWIVLREPISVSSEQLLKFRSLNFNAEGKPEDPMVDNWRPAQPLNNRQIRASFK

SEQ ID NO: 19150 - protein, 259 aa, Equus caballus
AKEWGYADHNGPDHWHEFYPIAKGDNQSPIELHTKDINHDPSLKAWTASYDPGSAKTILNNGRTCRVVFDDTYDRSMLRGGPLTAPYRLRQFHLHWGSSDDHGSEHTVDGVKYAAELHLVHWNPKYNTYGGALKQPDGIAVVGVFLKIGREKGEFQLFLDALDKIKTKGKEAPFTNFDPSCLFPTCRDYWTYRGSFTTPPCEECIVWLLLKEPITVSSDQVAKLRSLFSSAENEPPVPLVRNWRPPQPLKGRVVRASFK

SEQ ID NO: 19151 - protein, 331 aa, Sus scrofa
MGGAARLSAPRALVLWAVLGAAAHIGPAPDPEDWWSYKDNLQGNFVPGPPFWGLVNAAWSLCAVGKRQSPVDVELKRVLYDPFLPPLRLSTGGEKLRGTLYNTGRHVSFLPAPRPVVNVSGGPLLYSHRLSELLLLFGAHDGAGSEHQINHQGFSAEVQLIHFNQELYGNLSAASRGPNGLAILSLFVNVSQVAGNSNPFLSRLLNRDTITRISYKNDAYFLQDLSLELLFPESFGFITYQGSLSTPPCSETVTWILIDRALNITSLQMHSLRLLSQNPPSQIFQSLSGNGRPLQPLAHRALRGNRDPRHPERRCRGPNYRLHVDGAPHGR

SEQ ID NO: 19152 - protein, 260 aa, Bos taurus
MSHHWGYGKHNGPEHWHKDFPIANGERQSPVDIDTKAVVQDPALKPLALVYGEATSRRMVNNGHSFNVEYDDSQDKAVLKDGPLTGTYRLVQFHFHWGSSDDQGSEHTVDRKKYAAELHLVHWNTKYGDFGTAAQQPDGLAVVGVFLKVGDANPALQKVLDALDSIKTKGKSTDFPNFDPGSLLPNVLDYWTYPGSLTTPPLLESVTWIVLKEPISVSSQQMLKFRTLNFNAEGEPELLMLANWRPAQPLKNRQVRGFPK

SEQ ID NO: 19153 - protein, 259 aa, Bos taurus
SHHWGYGKHBGPZHWHKDFPIANGERQSPVNIDTKAVVQDPALKPLALVYGEATSRRMVNNGHSFNVEYDDSQDKAVLKDGPLTGTYRLVQFHFHWGSSBBQGSEHTVDRKKYAAELHLVHWNTKYGDFGTAAQQPDGLAVVGVFLKVGDANPALQKVLDALDSIKTKGKSTDFPNFDPGSLLPNVLDYWTYPGSLTTPPLLESVTWIVLKEPISVSSQQMLKFRTLNFNAEGEPELLMLANWRPAQPLKNRQVRGFPK

SEQ ID NO: 19154 - protein, 319 aa, Bos taurus
MITLLFLLVVGAQAQHEWTYSEGVLDEKHWRLQYPDCGGTRQSPIDLKMKKVRYNPSLRALNLTGYGLRQGEFPMTNNGHTVQISLPSSMRMTTSDGSQYLAKQMHFHWGGDSSEISGSEHTVDGMRYIIEIHVVHYHSKYGSYEEAQNEPDGLAVLAALVEVKDYAENTYYSNFISHLEDIRYAGQSTVLRDLDIQDMLPGDLRYYYSYLGSLTTPSCTENVHWFVVADTVKLSKTQIEKLENSLLNHQNETIQNNYRSTQPLNHRVVEANFVSHPHQEYTLGSKLHFYLNNIDQNLEYLRRFIEQKITKRKKEKYWP

SEQ ID NO: 19155 - protein, 312 aa, Bos taurus
MRLLLALLVLAAAPPQARAASHWCYQIQVKPSNYTCLEPDEWEGSCQNNRQSPVNIVTAKTQLDPNLGRFSFSGYNMKHQWVVQNNGHTVMVLLENKPSIAGGGLSTRYQATQLHLHWSRAMDRGSEHSFDGERFAMEMHIVHEKEKGLSGNASQNQFAEDEIAVLAFMVEDGSKNVNFQPLVEALSDIPRPNMNTTMKEGVSLFDLLPEEESLRHYFRYLGSLTTPTCDEKVVWTVFQKPIQLHRDQILAFSQKLFYDDQQKVNMTDNVRPVQSLGQRQVFRSGAPGLLLAQPLPTLLAPVLACLTVGFLR

SEQ ID NO: 19156 - protein, 328 aa, Bos taurus
MGAAARLSAPRALVLWAALGAAAHIGPAPDPEDWWSYKDNLQGNFVPGPPFWGLVNAAWSLCVVGKRQSPVDVELKRVLYDPFLPPLRLSTGGEKLRGTLYNTGRHVSFLPAPRPVVNVSGGPLLYSHRLSELRLLFGARDGAGSEHQINHQGFSAEVQLIHFNQELYGNLSAATRGPNGLAILSLFVNVAGSSNPFLSRLLNRDTITRISYKNDAYFLQDLSLELLFPESFGFITYQGSLSTPPCSETVTWILIDRALNITSLQMHSLRLLSQNPPSQIFQSLSGNGRPLQPLAHRALRGNRDPRHPERRCRGPNYRLHVDGAPHGR

SEQ ID NO: 19157 - protein, 261 aa, Ovis aries
MASPDWGYDGENGPEHWCKLHPIANGNNQSPIDIKTSETKRDPSLKPLSISYNPATAKEIVNVGHSFHVNFEDSDNRSVLKGGPLPESYRLRQFHFHWGSTDDCGSEHLVDGATFSAELHLVHWNSAKYPSFADAASQADGLVVVGVLMKVGQANPNLQKVLDALKTVKTKNKKAPFTNFDPSVLLPSCPDYWAYFGSLTHPPLHESVTWIIFKETISVSAEQLAQFRSLLANAEGDKEVCIKQNYRPPQPLKGRTVKASF

SEQ ID NO: 19158 - protein, 259 aa, Ovis aries
SHHWGYGEHNGPEHWHKDFPIADGERQSPVDIDTKAVVPDPALKPLALLYEQAASRRMVNNGHSFNVEFDDSQDKAVLKDGPLTGTYRLVQFHFHWGSSDDQGSEHTVDRKKYAAELHLVHWNTKYGDFGTAAQQPDGLAVVGVFLKVGDANPALQKVLDVLDSIKTKGKSADFPNFDPSSLLKRALNYWTYPGSLTNPPLLESVTWVVLKEPTSVSSQQMLKFRSLNFNAEGEPELLMLANWRPAQPLKNRQVRVFPK

SEQ ID NO: 19159 - protein, 307 aa, Ovis aries
GHGVEWTYSEGMLDEAHWPLEYPKCGGRRQSPIDLQMKKVQYNPSLRALNLTGYGLWHGEFPVTNNGHTVQISLPSTMSMTTSDGTQYLAKQMHFHWGGASSEISGSEHTVDGMRYVIEIHVVHYNSKYNSYEEAQKEPDGLAVLAALVEVKDYTENAYYSKFISHLEDIRYAGQSTVLRGLDIEDMLPGDLRYYYSYLGSLTTPPCTENVHWFVVADTVKLSKTQVEKLENSLLNHQNKTIQNDYRRTQPLNHRVVEANFMSRPHQEYTLASKLHFYLNNIDQTLEYLRRFIEQKIPKRKKQENWP

SEQ ID NO: 19160 - protein, 307 aa, Ovis aries
GHGVEWTYSEGMLDEAHWPLEYPKCGGRRQSPIDLQMKKVQYNPSLRALNLTGYGLWHGEFPVTNNGHTVQISLPSTMSMTTSDGTQYLAKQMHFHWGGASSEISGSEHTVDGMRYVIEIHVVHYNSKYNSYEEAQKEPDGLAVLAALVEVKDYTENAYYSKFISHLEDIRYAGQSTVLRGLDIEDMLPGDLRYYYSYLGSLTTPPCTENVHWFVVADTVKLSKTQVEKLENSLLNHQNKTIQNDYRRTQPLNHRVVEANFMSRPHQEYTLASKLHFYLNNIDQTLEYLRRFIEQKMPKRKKQENWP

SEQ ID NO: 19161 - protein, 328 aa, Ovis aries
MGAAPRLSAPRVLVLWAALGAAAHIGPAPDPEDWWSYKDNLQGNFVPGPPFWGLVNAAWSLCAVGKRQSPVDVDLKRVLYDPFLPPLRLSTGGEKLRGTLYNTGRHVSFLPAPRPVVNVSGGPLLYSHRLSELRLLFGARDGAGSEHQINHQGFSAEVQLIHFNQELYGNLSAATRGPNGLAILSLFVNVAGSSNPFLSRLLNRDTITRISYKNDAYFLQDLSLELLFPESFGFITYQGSLSTPPCSETVTWILIDRALNITSLQMHSLRLLSQNPPSQIFQSLSGNGRPLQPLAHRALRGNRDPRHPERRCRGPNYRLHVDDVPHGL

SEQ ID NO: 19162 - protein, 259 aa, Oryctolagus cuniculus
SHHWGYGKHNGPEHWHKDFPIADGERQSPIDIDTDAAKHDPSLKPLRVSYEHPISRRIINNGHSFNVEFDDSHDKSVLKEGPLEGTYRLIQFHFHWGSSDGEGSEHTVNKKKYAAELHLVHWNTKYGDFGKAVKHPDGLAVLGIFLKIGSATPGLQKVVDTLSSIKTKGKSVDFTNFDPRGLLPESLDYWTYPGSLTTPPLLQCVTWIVLKEPITVSSEQMLKFRNLNFNKEAEPEEPMVDNWRPTQPLKGRQVKASFV

SEQ ID NO: 19163 - protein, 259 aa, Oryctolagus cuniculus
SHHWGYGKHNGPEHWHKDFPIANGERQSPIDIDTNAAKHDPSLKPLRVCYEHPISRRIINNGHSFNVEFDDSHDKTVLKEGPLEGTYRLIQFHFHWGSSDGQGSEHTVNKKKYAAELHLVHWNTKYGDFGKAVKHPDGLAVLGIFLKIGSATPGLQKVVDTLSSIKTKGKSVDFTDFDPRGLLPESLDYWTYPGSLTTPPLLECVTWIVLKEPITVSSEQMLKFRNLNFNKEAEPEEPMVDNWRPTQPLKGRQVKASFV

SEQ ID NO: 19164 - protein, 235 aa, Oryctolagus cuniculus
GNKQSPVDIKSSEVKHDTSLKPFSVSYNPASAKEIINVGHSFHVNFEDDSQSVLKGGPLSDNYRLSQFHFHWGKTDDYGSEHTVDGAKFSAELHLVHWNSGKYPNIADSVSKADGLAIVAVFLKVGQANPKLQKVLDALSAVKTKGKKASFTNFDPSTLLPPSLDYWTYSGSLTHPPLHESVTWLICKDSISISSEQLAQFRSLLSNAEGEAAVPILHNNRPPQPLKGRTVKASF

SEQ ID NO: 19165 - protein, 235 aa, Oryctolagus cuniculus
  unsure (1)..(235): unsure at all Xaa locations
GXKQSPVDIKSSEVKHDTSLKPFSVSYNPASAKEIINVGHSFHVNFEDDSQSVLKGGPLSDNYRLSQFHFHWGKTDDYGSEHTVDGAKFSAELHLVHWNSGKYPNIADSVSKADGLAIVAVFLKVGQANPKLQKVLDALSAVKTKGKKASFTNFDPSTLLPPSLDYWTYSGSLTHPPLHESVTWLICKDSISISSEQLAQFRSLLSNAEGEAAVPILHNNRPPQPLKGRTVKASF

SEQ ID NO: 19166 - protein, 232 aa, Oryctolagus cuniculus
GKHNGPEHWHKDFPIANGERQSPIDIDTNAAKHDPSLKPLRVCYEHPISRRIINNGHSFNVEFDDSHDKTVLKEGPLEGTYRLIQFHFHWGSSDGQGSEHTVNKKKYAAELHLVHWNTKYGDFGKAVKHPDGLAVLGIFLKIGSATPGLQKVVDTLSSIKTKGKSVDFTDFDPRGLLPESLDYWTYPGSLTTPPLLECVTWIVLKEPITVSSEQMLKFRNLNFNKEAEPEEP

SEQ ID NO: 19167 - protein, 355 aa, Oryctolagus cuniculus
MPVGSLRAAAVLLLGIAQLPPSSAAPRNGSKWTYVGADGERSWFKKYPSCGGRLQSPIDLHGDTLQYDASLTPLEFQGYNVSADKQFNLTNDGHSVRLNLPPDMYLQGLPSRYTATQLHLHWGNRNDPYGSEHTVGGKQFAAELHIVHYNSDSYPDISTASNKSEGLAVLAVLIEKGYFNPYYDRIFSFLRYVKYKGQNVRIPTFNIEELLPEKPAEYYRYRGSLTTPPCYPSVLWTVFRNPVTISQEQLLALQTALYFTRADDPAPREMINNFRPIQNFGVRLVHASFQEVQILPGTGLSVGIILSVALAGVLGICIVLAVCIWFFRRKKGSKKGDNKGVIYNPAIKMETEAHA

SEQ ID NO: 19168 - protein, 308 aa, Oryctolagus cuniculus
MQLLFALLALGALRPLAGEELHWCYEIQASNYSCLGPDKWQEDCQKSRQSPINIVTTKAEVDHSLGRFHFSGYDQREARLVENNGHSVMVSLGDEISISGGGLPARYRATQLHLHWSQELDRGSEHSLDGERSAMEMHIVHQKETGTSGNEVQDSDDSIAVLAFLVEAGPTMNEGFQPLVTALSAISIPGTNTTMAPSSLWDLLPAEEELRHYFRYMGSLTTPACSETVVWTVFQEPIRLHRDQILEFSSKLYYDQERKMNMKDNVRPLQRLGDRSVFKSQAAGQLLPLPLPTLLVPTLACVMAGLLR

SEQ ID NO: 19169 - protein, 307 aa, Mesocricetus auratus
MVNPTTSEVHPTMGVKIFSAGVAACLADIITFPLDTAKVRLQIQGEGQISSTIRYKGVLGTITTLAKTEGLPKLYSGLPAGIQRQISFASLRIGLYDTVQEYFSSGKETPPTLGNRISAGLMTGGVAVFIGQPTEVVKVRLQAQSHLHGIKPRYTGTYNAYRIIATTESFSTLWKGTTPNLLRNVIINCVELVTYDLMKGALVNNQILADDVPCHLLSAFVAGFCTTFLASPADVVKTRFINSLPGQYPSVPSCAMTMLTKEGPTAFFKGFVPSFLRLASWNVIMFVCFEQLKKELSKSRQTVDCTT

SEQ ID NO: 19170 - protein, 309 aa, Phodopus sungorus
MVGFKATDVPPTATVKFLGAGTAACIADLITFPLDTAKVRLQVQGESQGLARTAANAQYRGVLGTILTMVRTEGPRSLYNGLVAGLQRQMSFASVRIGLYDSVKQFYTKGSEHAGIGSRLLAGSTTGALAVAVAQPTDVVKVRFQAQARAGGGRRYQSTVEAYKTIAREEGIRGLWKGTSPNVARNAIVNCAELVTYDLIKDTLLKANLMTDDLPCHFTSAFGAGFCTTVIASPVDVVKTRYMNSALGQYHSAGHCALTMLRKEGPRAFYKGFMPSFLRLGSWNVVMFVTYEQLKRALMAAYESREAPF

SEQ ID NO: 19171 - protein, 299 aa, Phodopus sungorus
MVGLQPSEVPPTTVVKFLGAGTAACFADLLTFPLDTAKVRLQIQGENPGTQRVQYRGVLGTILTMVRTEGPCSPYSGLVAGLHRQMSFASIRIGLYDSVKQFYTPKGADHSSIAIRILAGCTTGAMAVTCAQPTDVVKVRFQAMIRLGTGGERKYKGTMDAYRTIAREEGIRGLWKGTWPNITRNAIVNCAEMVTYDIIKEKLLDSHLFTDNFPCHFVSAFGAGFCATVVASPVDVVKTRYMNAPPGRYLSPLHCMLKMVAQEGPTAFYKGFVPSFLRLGAWNVMMFVTYEQLKRALES

SEQ ID NO: 19172 - protein, 307 aa, Phodopus sungorus
MVSQTTSEVQPTMGVKIFSAGVAACLADIITFPLDTAKVRLQIQGEGQTSSTIRYKGVLGTITTLAKTEGLPKLYSGLPAGIQRQISFASLRIGLYDTVQEYFSSGKETPPTLVNRISAGLMTGGVAVFIGQPTEVVKVRLQAQSHLHGIKPRYTGTYNAYRIIATTESLSTLWKGTTPNLLRNVIINCTELVTYDLMKGALVNNQILADDVPCHLLSALVAGFCTTFLASPADVVKTRFINSLPGQYPSVPSCAMTMFTKEGPTAFFKGFVPSFLRLASWNVIMFVCFEQLKKELMKSRQTVDCTT

SEQ ID NO: 19173 - protein, 306 aa, Mus musculus
MALDFLAGCAGGVAGVIVGHPFDTVKVRLQVQSTEKPQYRGTLHCFQSIIKQESVLGLYKGLGSPLMGLTFINALVFGVQGNTLRALGQDSPLNQFLAGAAAGAIQCVICCPMELAKTRLQLQAVGPARTYKGSLDCLVQIYRHEGLRGINRGMVSTLLRETPSFGVYFLTYDVMTRAMGCEPGDRLLVPKLLLAGGTSGITSWLSTYPMDVVKSRLQADGLQGTPRYRGIVDCMRQSYQAEGWQVFTRGLASTLLRAFPVNAATFATVTVVLTYTRGEEAQVDSEAALGTSPTPAGSALAQPSSL

SEQ ID NO: 19174 - protein, 306 aa, Mus musculus
MALDFLAGCAGGVAGVIVGHPFDIVKVRLQVQSTEKPQYRGTLHCFQSIIKQESVLGLYKGLGSPLMGLTFINALVFGVQGNTLRALGQDSPLNQFLAGAAAGAIQCVICCPMELAKTRLQLQAVGPARTYKGSLDCLVQIYRHEGLRGINRGMVSTLLRETPSFGVYFLTYDVMTRAMGCEPGDRLLVPKLLLAGGTSGITSWLSTYPMDVVKSRLQADGLQGTPRYRGIVDCMRQSYQAEGWQVFTRGLASTLLRAFPVNAATFATVTVVLTYTRGEEAQVDSEAALGTSPTPAGSALAQPSSL

SEQ ID NO: 19175 - protein, 301 aa, Mus musculus
MADEPKPISPFKNLLAGGFGGMCLVFVGHPLDTVKVRLQTQPPSLSGQPPMYSGTLDCFRKTLMREGITGLYRGMAAPIIGVTPMFAVCFFGFGLGKKLQQKSPEDELSYPQLFTAGMLSGVFTTGIMTPGERIKCLLQIQASSGENKYSGTLDCAKKLYQEFGIRGFYKGTVLTLMRDVPASGMYFMTYEWLKNLFTPEGKSVSDLSVPRILVAGGFAGIFNWAVAIPPDVLKSRFQTAPPGKYPNGFRDVLRELIREEGVTSLYKGFNAVMIRAFPANAACFLGFEIAMKFLNWIAPNL

SEQ ID NO: 19176 - protein, 301 aa, Mus musculus
MKSNPAIQAAIDLTAGAAGGTACVLTGQPFDTMKVKMQTFPDLYRGLTDCCLKTYSQVGFRGFYKGTSPALIANIAENSVLFMCYGFCQQVVRKVVGLDQQAKLSDLQNAAAGSFASAFAALVLCPTELVKCRLQTMYEMETSGKIAASQNTVWSVVKEIFRKDGPLGFYHGLSSTLLREVPGYFFFFGGYELSRSFFASGRSKDELGPVPLMLSGGFGGICLWLAVYPVDCIKSRIQVLSMTGKQTGLVRTFLSIVKNEGITALYSGLKPTMIRAFPANGALFLAYEYSRKLMMNQLEAW

SEQ ID NO: 19177 - protein, 306 aa, Mus musculus
MGSFQLEDFVAGWIGGVASVIVGYPLDTVKTRLQAGVGYANTFNCIRMVYKRERVFGFFKGMSFPLASIAIYNSVVFGVFSNTQRFLSKYRCGELEAGPGRSLSDLLLASMLTGVVSVGLGGPVELIKIRLQMQTQPFREASHGLKSRAVAAYQGPVHCIATIVQMEGLTGLYRGASAMLLRDIPGYCFYFIPYVFLSEWITPEACTGPSPYAAWLAGGIAGAISWGTATPMDVVKSRIQADGVYLNKYRGVVDCISQSYQQEGFKVFFRGITVNAVRGFPMSAAMFLGYELSLKALRGEHTVRSE

SEQ ID NO: 19178 - protein, 306 aa, Mus musculus
MGSFQLEDFVAGWIGGVASVIVGYPLDTVKTRLQAGVGYANTFNCIRMVYKRERVFGFFKGMSFPLASIAIYNSVVFGVFSNTQRFLSKYRCGELEAGPGRSLSDLLLASMLTGVVSVGLGGPVELIKIRLQMQTQPFREASHGLKSRAVAAYQGPVHCIATIVQMEGLTGLYRGANAMLLRDIPGYCFYFIPYVFLSEWITPEACTGPSPYAAWLAGGIAGAISWGTATPMDVVKSRIQADGVYLNKYRGVVDCISQSYQQEGFKVFFRGITVNAVRGFPMSAAMFLGYELSLKALRGEHTVRSE

SEQ ID NO: 19179 - protein, 310 aa, Mus musculus
MDFVAGAIGGVCGVAVGYPLDTVKVRIQTEAKYAGIWHCIRDTYRQERVWGFYRGLSLPVCTVSLVSSVSFGTYHHCLAHICRFRYGSTDAKPTKADITLSGCASGLVRVFLTSPTEVAKVRLQTQTQAQTQQRRSSASWTSGAPALCPTPTACLEPRPKYSGPLHCLVTVAREEGLRGLYKGSSALLLREGHSFATYFLSYAMLCEWLTPAGHSQPDVLGVLVAGGCAGVLAWAVATPMDVIKSRLQADGQGQHRYRGLLHCVVTSVREEGPRVLFKGLALNCCRAFPVNMVVFVAYEAVLRLTQSLLT

SEQ ID NO: 19180 - protein, 294 aa, Mus musculus
PTRPQKMPVEEFVAGWISGAVGLVLGHPFDTVKVRLQTQSTYQGIVDCVVKTYRHESVLGFFKGMSFPIASVALVNSVLFGVYSNTLLALTATSHQERRAQPPSYTNIFIAGCTGGLLQAYCLAPFDLIKVRLQNQTEPRMQISSSMPRYRGPVHCAASILREEGPQGLFRGSWALVLRDTPTLGMYFVTYEGLCRQYTPEGQNPSSATVLVAGGFAGIASWITATPFDVIKSRMQMDGLKGRKYGGMLDCMASSFRQEGIGVFFKGMTLNSARAFPVNAATFLSYEYLLRLWR

SEQ ID NO: 19181 - protein, 288 aa, Mus musculus
MPVEEFVAGWISGAVGLVLGHPFDTVKVRLQTQSTYQGIVDCVVKTYRHESVLGFFKGMSFPIASVALVNSVLFGVYSNTLLALTATSHQERRAQPPSYTNIFIAGCTGGLLQAYCLAPFDLIKVRLQNQTEPRMQISSSMPRYRGPVHCAASILREEGPQGLFRGSWALVLRDTPTLGMYFVTYEGLCRQYTPEGQNPSSATVLVAGGFAGIASWITATPFDVIKSRMQMDGLKGRKYGGMLDCMASSFRQEGIGVFFKGMTLNSARAFPVNAATFLSYEYLLRLWR

SEQ ID NO: 19182 - protein, 265 aa, Mus musculus
MQTFPQLYKGLADCFLKTYNQVGIRGLYRGTSPALLAYVTQGSVLFMCFGFCQQFVRKVARVEQNAELNDLETATAGSLASAFAALALCPTELVKCRLQTMYEMKMSGKIAQSYNTIWSMVKSIFMKDGPLGFYRGLSTTLAQEIPGYFFYFGGYEISRSFFASGGSKDELGPVPLMLSGGFAGICLWLIIFPVDCIKSRIQVLSMFGKPAGLIETFISVVRNEGISALYSGLKATLIRAIPSNAALFLVYEYSRKMMMNMVEEY

SEQ ID NO: 19183 - protein, 677 aa, Mus musculus
MAVKVHTTKRGDPHELRNIFLQYASTEVDGEHYMTPEDFVQRYLGLYNDPNSNPKIVQLLAGVADQTKDGLISYQEFLAFESVLCAPDSMFIVAFQLFDKSGNGEVTFENVKEIFGQTIIHHHIPFNWDCEFIRLHFGHNRKKHLNYVEFTQFLQELQLEHARQAFALKDKSKSGMISGLDFSDVMVTIRSHMLTPFVEENLVSAAGGGTSHQVSFSYFNAFNSLLNNMELVRKIYSTLAGTRKDIEVTKEEFAQSAIRYGQVTPLEIDILYQLADLYNASGRLTLADIERIAPLAEGALPYNLAELQRQQSPGLGRPIWLQIAESAYRFTLGSVAGAVGATAVYPIDLVKTRMQNQRGTGSVVGELMYKNSFDCFKKVLRYEGFFGLYRGLIPQLIGVAPEKAIKLTVNDFVRDKFTKRDGSIPLPAEILAGGCAGGSQVIFTNPLEIVKIRLQVAGEITTGPRVSALNVLQDLGLFGLYKGAKACFLRDIPFSAIYFPVYAHCKLLLADENGRVGGINLLTAGALAGVPAASLVTPADVIKTRLQVAARAGQTTYSGVVDCFRKILREEGPSAFWKGTAARVFRSSPQFGVTLVTYELLQRWFYIDFGGLKPSGSEPTPKSRIADLPPANPDHIGGYRLATATFAGIENKFGLYLPKFKSPSVAVAQPKAAAAAQ

SEQ ID NO: 19184 - protein, 409 aa, Mus musculus
MEVDILFQLADLYEPRGRMTLADIERIAPLEEGMLPFNLAEAQRQKASGDAARPFLLQLAESAYRFGLGSIAGAVGATAVYPIDLVKTRMQNQRSTGSFVGELMYKNSFDCFKKVLRYEGFFGLYRGLLPQLLGVAPEKAIKLTVNDFVRDKFMHKDGSVPLLAEIFAGGCAGGSQVIFTNPLEIVKIRLQVAGEITTGPRVSALSVVRDLGFFGIYKGAKACFLRDIPFSAIYFPCYAHVKASFANEDGQVSPGSLLLAGAIAGMPAASLVTPADVIKTRLQVAARAGQTTYNGVTDCFRKILREEGPKALWKGVAARVFRSSPQFGVTLLTYELLQRWFYVDFGGVKPVGSEPVPKSRITLPAPNPDHVGGYKLAVATFAGIENKFGLYLPLFKPSASTSKVTAGDS

SEQ ID NO: 19185 - protein, 676 aa, Mus musculus
MAAAKVALTKRADPAELKAIFLKYASIEKNGEFFMSPHDFVTRYLNIFGESQPNPKTVELLSGVVDQTKDGLISFQEFVAFESVLCAPDALFMVAFQLFDKAGKGEVTFEDVKQIFGQTTIHQHIPFNWDSEFVQLHFGKERKRHLTYAEFTQFLLEIQLEHAKQAFVQRDNAKTGKVSAIDFRDIMVTIRPHVLTPFVEECLVAAAGGTRSHQVSFSYFNGFNSLLNNMELIRKIYSTLAGNRKDVEVTKEEFALAAQKFGQVTPMEVDILFQLADLYEPRGRMTLADIERIAPLEEGMLPFNLAEAQRQQKASGDAARPFLLQLAESAYRFGLGSIAGAVGATAVYPIDLVKTRMQNQRSTGSFVGELMYKNSFDCFKKVLRYEGFFGLYRGLLPQLLGVAPEKAIKLTVNDFVRDKFMHKDGSVPLLAEIFAGGCAGGSQVIFTNPLEIVKIRLQVAGEITTGPRVSALSVVRDLGFFGIYKGAKACFLRDIPFSAIYFPCYAHVKASFANEDGQVSPGSLLLAGAIAGMPAASLVTPADVIKTRLQVAARAGQTTYNGVTDCFRKILREEGPKALWKGVAARVFRSSPQFGVTLLTYELLQRWFYVDFGGVKPVGSEPVPKSRITLPAPNPDHVGGYKLAVATFAGIENKFGLYLPLFKPSASTSKVTAGDS

SEQ ID NO: 19186 - protein, 675 aa, Mus musculus
MAAAKVALTKRADPAELKAIFLKYASIEKNGEFFMSPHDFVTRYLNIFGESQPNPKTVELLSGVVDQTKDGLISFQEFVAFESVLCAPDALFMVAFQLFDKAGKGEVTFEDVKQIFGQTTIHQHIPFNWDSEFVQLHFGKERKRHLTYAEFTQFLLEIQLEHAKQAFVQRDNAKTGKVSAIDFRDIMVTIRPHVLTPFVEECLVAAAGGTRSHQVSFSYFNGFNSLLNNMELIRKIYSTLAGNRKDVEVTKEEFALAAQKFGQVTPMEVDILFQLADLYEPRGRMTLADIERIAPLEEGMLPFNLAEAQRQKASGDAARPFLLQLAESAYRFGLGSIAGAVGATAVYPIDLVKTRMQNQRSTGSFVGELMYKNSFDCFKKVLRYEGFFGLYRGLLPQLLGVAPEKAIKLTVNDFVRDKFMHKDGSVPLLAEIFAGGCAGGSQVIFTNPLEIVKIRLQVAGEITTGPRVSALSVVRDLGFFGIYKGAKACFLRDIPFSAIYFPCYAHVKASFANEDGQVSPGSLLLAGAIAGMPAASLVTPADVIKTRLQVAARAGQTTYNGVTDCFRKILREEGPKALWKGVAARVFRSSPQFGVTLLTYELLQRWFYVDFGGVKPVGSEPVPKSRITLPAPNPDHVGGYKLAVATFAGIENKFGLYLPLFKPSASTSKVTAGDS

SEQ ID NO: 19187 - protein, 676 aa, Mus musculus
MAAAKVALTKRADPAELKAIFLKYASIEKNGEFFMSPHDFVTRYLNIFGESQPNPKTVELLSGVVDQTKDGLISFQEFVAFESVLCAPDALFMVAFQLFDKAGKGEVTFEDVKQIFGQTTIHQHIPFNWDSEFVQLHFGKERKRHLTYAEFTQFLLEIQLEHAKQAFVQRDNAKTGKVSAIDFRDIMVTIRPHVLTPFVEECLVAAAGGTRSHQVSFSYFNGFNSLLNNMELIRKIYSTLAGNRKDVEVTKEEFALAAQKFGQVTPMEVDILFQLADLYEPRGRMTLADIERIAPLEEGMLPFNLAEAQRQQKASGDAARPFLLQLAESAYRFGLGSIAGAVGATAVYPIDLVKTRMQNQRSTGSFVGELMYKNSFDCFKKVLRYEGFFGLYRGLLPQLLGVAPEKAIKLTVNDFVRDKFMHKDGSVPLLAEIFAGGCAGGFQVIFTNPLEIVKIRLQVAGEITTGPRVSALSVVRDLGFFGIYKGAKACFLRDIPFSAIYFPCYAHVKASFANEDGQVSPGSLLLAGAIAGMPAASLVTPADVIKTRLQVAARAGQTTYNGVTDCFRKILREEGPKALWKGVAARVFRSSPQFGVTLLTYELLQRWFYVDFGGVKPVGSEPVPKSRITLPAPNPDHVGGYKLAVATFAGIENKFGLYLPLFKPSASTSKVTAGDS

SEQ ID NO: 19188 - protein, 372 aa, Rattus norvegicus
MALDFLAGCAGAVRARLVTPRDLLEGCPDPGAQRYQCDALSCWKVQERRRRVYPVVKSVVMILQRSEALGHRYLSLPGVAGVIVGHPFDTVKVRLQVQNTEKPQYRGTLHCFQSIIKQESVLGLYKGLGSPLMGLTFINALVFGVQGNTLRALGQDSPLNQFLAGAAAGAIQCVICCPMELAKTRLQLQAAGPARAYKGSLDCLVQIYRHEGLRGINRGMVSTLLRETPSFGVYFLTYDVLTRAMGCEPGDRLLVPKLLLAGGTSGITSWLSTYPMDVVKSRLQADGLQGTPRYRGIVDCMRQSYQAEGWQVFTRGLASTLLRAFPVNAATFATVTVVLTYIRGEEDQPPGPKGFYGSTHVPQLFIIAPLRS

SEQ ID NO: 19189 - protein, 301 aa, Rattus norvegicus
MAEEPKPISPLKNLLAGGFGGVCLVFVGHPLDTVKVRLQTQPPSLPGQPPMYSGTIDCFRKTLFREGITGLYRGMAAPIIGVTPMFAVCFFGFGLGKRLQQKSPEDELTYPQLFTAGMLSGVFTTGIMTPGERIKCLLQIQASSGKNKYSGTLDCAKKLYQEFGIRGFYKGTALTLMRDVPASGMYFMTYEWLKNLFTPQGKSVHDLSVPRVLVAGGFRGIFNWVVAIPPDVLKSRFQTAPPGKYPNGFRDVLRELIREEGVTSLYKGFNAVMIRAFPANAACFLGFEIPMKILNWIAPNL

SEQ ID NO: 19190 - protein, 301 aa, Rattus norvegicus
MKSNPAIQAAIDLTAGAAGGTACVLTGQPFDTMKVKMQTFPDLYRGLTDCCLRTYSQVGFRGFYKGTSPALIANIAENSVLFMCYGFCQQVVRKVVGLDRQAKLSDLQNAAAGSFASAFAALVLCPTELVKCRLQTMYEMETSGKIAASQNTVWSVVKEIFRKDGPLGFYHGLSSTLLREVPGYFFFFGGYELSRSFFASGRSKDELGPIPLMLSGGFGGICLWLAVYPVDCIKSRIQVLSMTGKQTGLIRTFLSIVKNEGITALYSGLKPTMIRAFPANGALFLAYEYSRKLMMSQLEAC

SEQ ID NO: 19191 - protein, 319 aa, Rattus norvegicus
MGAYRDLASGDTLGSVEEHEIHPAIQAAIDLTAGAAGAAACVLTGQPFDTVKVKMQTFPYMYKGLADCFLKTYNQVGVHGLYRGTSPALLAYVAQGSVLFLCYGFCQQFVRKVARVEQSAELNDFETATAGSLASAFAALVLCPTELVKCRLQTMHEMRVAGKTKHSHNTIWSMVKSIFMKDGPLGFYRGLSTTLAQEIPGYFFYFGGYEISRSFFASGGSKDELGPVPLMLSGSFAGVCLWLIIFPVDCIKSRIQVLSMFGKPAGLIKTFINVVRNEGILALYSGLKATLIRAIPSNAALFVVYEYSRKMMMNVVEEY

SEQ ID NO: 19192 - protein, 342 aa, Rattus norvegicus
MNIKVFKEQDLQEPVSAAHTARPEPFLLPTLSMDFVAGAIGGVCGVAVGYPLDTVKVKIQTEAKYTSIWHCVRDTYRQERLWGFYRGLSLPVCTVSLVSSVSFGTYHHCLAHICRFRYGSTDVKPTKADITLSGCASGLVRVFLTSPTEVAKVRLQTQAQSQTQQRRPSASWTSVAPALCPAPTACLEPRPKYSGPLHCLVTVAREEGLRGLYKGSSALLLREGHSFATYFLSYAVLSEWLTPAGQSQPDVLGVLVAGGCAGVLAWAVATPMDVIKSRLQADGQGQQRYRGLLHCVVTSVREEGPRVLFKGLALNCCRAFPVNMVVFVAYEAVLRLTQGLLT

SEQ ID NO: 19193 - protein, 1031 aa, Rattus norvegicus
MQLKLLSEQENLAREMLRSVERVRLCSRWTTGSLGTVQTSSIKPHELLLGKRDWHRNWRKENAKGLGNIFLPTWKQAVDFALRDRKCTAAMFRKGHGGVPQPWSKETEKLEVRGVEIHTVLASSLSALLSVDRTTETFVFFTPGLLLGEDLECLYQQLRDTSLQDREPLGSPSLSFCTYEQPTAFEELAQQAAVGPGPEAGWSGQGGLFFEDSAPPSGFFPYYRSQEEHLPSATVPQGCCWCLASRDLFPGSETQDGCHKVTARDGCLKPRREARHQSRASLLGAGELTRVTPTWWCAGVKAAGTSCSKTSWSVKDKGNRNGGPYSSCHLPWDHSWPNQISQPVPTCVHQLRGKSEESQAVLGPRNLVQKKVQELQDPALAFWEMFLLLRGACLRILAEKNVAICGFRSGSCLAGGNASQLYHLSSCEKAPNTGAAIQARPIHKKGLCAHIRGDAGVSFWRRLREAEAHTASAMGSFQLEDFAAGWIGGECACESPPHHRANCLAVPCQLFAPGVASVIVGYPLDTVKELMSCCGPKSRQTRLQAGVGYANTFNCIRMVYKRESVFGFFKGMSFPLASVAIYNSVVFGVFSNTQRFLSQYRCRELEDCPGRSLSDLLLASMVTGMVSVGLGGPVDLIKIRLQMQTQPFQEGGSEMPTGSGGWGTGSLEVEEGGLRGCALSINTLVKVACVGASHGLKSRAVAAYQGPVHCFATIVRTEGLTGLYRGASAMLLRDIPGYCFYFIPYVFLRAISWGTATPMDVVKSRIQADGVYLNKYRGVLDCISQSYQQEGFKVFFRGITVNAVRGFPMSAAMFLGYELSLKALRGDHTVWSRPQSMWQSHELSEDVNNNASLLIWSPKWRRQCISDNPGTLTAGPKKWHRLKGRVEELRQSFRASLLDSLTGRGWPNPHFSITGRILSAKLLSKKIPEARDSVVKSRELYIQRSVPSSPQVYPPHPRCALLAPGVPSSPQVYPPHPRCTLLTPGVPSSPQVVPPIAARLQTSQGSSLQFWAQAYDTVYYQVFERWTLYLL

SEQ ID NO: 19194 - protein, 322 aa, Hordeum vulgare subsp. vulgare
MDTSTRAAKIPSLPQQTEINWDNLDMTKLYVVGAGMFSCVTVALYPVSVIKTRMQVASGEAMRRNALATFKNILKVDGVPGLYRGFGTVITGAIPARIIFLTALEKTKATSLKLVEPLQLSESMEAALANGLGGLTASLCSQAVFVPIDVVSQKLMVQGYSGHVRYKGGIDVVQKIMKADGPRGLYRGFGLSVMTYAPSSAVWWASYGFSQRVIWSALGRLDDKEDTPSQLKIVGVQATGGMVAGAVTSCVSTPLDTIKTRLQVNINKPKASEVVRRLIAEDGWKGFYRGLGPRFFSSSAWGTSMIVCYEYLKRVCAKVEEA

SEQ ID NO: 19195 - protein, 295 aa, Gibberella moniliformis
MSLYDKSVTATRSAHRTSDTLHSLVAGSSDTVAKTRLQLNQVSGRNKQNVPWPRFGLQWYSGCIPFLIGNSVKTSIRFVSFDGYQKLLADDDGNISRFGILLAGFGAGATESLLAVTPSERIKTIIIEDRRLEKPRIRNSFHAMSIIARDHGLSGFFQGFWPTTARQSAGSAIRLGSYTFLKQVVQSRTPQGGKIGTVKTFIIGSLAGLITVYLTQPLDTIKTRMQRLEARTRYGNAFICARGILEQEGFTAFWSGAVARSLRLVMSGGIVFMVYEKVVEGLDVISPAKRYEIAA

SEQ ID NO: 19196 - protein, 224 aa, Pagrus major
YRGVFGTISTMIKTEGPRSLYNGLVAGLQRQMCFASIRIGLYDNVKNFYTGGKDNPNVLIRILAGCTTGAMAVSFAQPTDVVKVRFQAQSNLDGVARRYTGTMQAYKHIFQNEGMRGLWKGTLPNITRNALVNCTELVTYDLIKEAILKHNLLSDNLPCHFVSAFGAGFVTTVIASPVDVVKTRYMNSPPGQYKSAINCAWTMMTKEGPTAFYKGFVPSFLRLG

SEQ ID NO: 19197 - protein, 304 aa, Eupetomena macroura
MVALKSQEMPPTAAIKFFSAGTAACFADLCTFPLDTAKVRLQLQGEVRIPRVSGAVEYRGVLGTLSTMVRTEGARSLYRGLAAGLQRQMSFASIRIGLYDSVKQLYTPKGAESTGLAPRLLAGCTTGAVAVACAQPTDVVKVRFQAHGAMPESTRRYNGTLDAYRTIAREEGVRGLWRGTLPNIARNAVINCGELVTYDLIKDALLREHLMADDVPCHFVAAFGAGFCATVVASPVDVVKTRYMNAGPGQYRNALSCLLALLMQDGITGFYKGFVPSFLRLGSWNVVMFICYEQLQRAAVLALS

SEQ ID NO: 19198 - protein, 326 aa, Aspergillus nidulans
MSAAESPASDAVQETVKAAETKAVNQTAAQIRSFAAGGVGGVCAVIVGHPFDLVKVRMQTAAQGVYSGAIDVVKKTVAREGLVRGLYAGVSAPLVGVTPMFAVSFWGYDLGKTLVSNLSEVEVKNNTPQYSIAQVSAAGFFSAIPMTLITAPFERVKVLLQIQGQNPPPPGQKPKYSGGVDVVRQLYKEGGIRSVFRGSAMTLARDGPGSAAYFAAYEYIKRSLTPKDANGNATGDLSLPAVLAAGGAAGIAMWIPVFPVDTVKSRLQSAPGKPTISGTIRTVYAAGGFKAFFPGFGPALARAVPANAATFAGVELAHQFMNKLFD

SEQ ID NO: 19199 - protein, 326 aa, Aspergillus nidulans
MAATESALTIHNDISMELPELAPNQGLEAFKDIVFGSAAGMIGKVIEYPFDTVKVRLQSQPDHLPLRYNGPLDCFRQSFQAEGLRGLYRGISAPMAGAAVENSCLFFSYRVVQELLQASYYSSTEPLPLTALVFSGAASGSITSLALTPIELIKCKMQVPSEPSSARVGPLKIIVSVFRQDGVLGFWRGQLGTLIRETGGGAAWFGGYEGVSALFRSYHYSPSTTFSSEVESGSLPLYQQMLAGAAAGVSYNFLFYPADTIKSRLQTEDINNTSSKRQTFGGAARALWHQQGLRGLYRGCGITCARSAPSSAFIFTVFEGLRSYFG

SEQ ID NO: 19200 - protein, 385 aa, Aspergillus nidulans
MAATESALTIHNDISMELPELAPNQGLEAFKDILFGSAAGMIGKVIEYPFDTVKVRLQSQPDHLPLRYNGPLDCFRQSFQAEGLRGLYRGISAPMAGAAVENSCLFFSYRVVQELLQASYYSSTEPLPLTALVFSGAASGSITSLALTPIELIKCKMQVPSEPSSARVGPLKIIVSVFRQDGVLGFWRGQLGTLIRETGGGAAWFGGYEGVSALFRSYHYSPSTTFSSEVESGSLPLYQQMLAGAAAGVSYNFLFYPADTIKSRLQTEDINNTSSKRQTFGGAARLSGMSKDFAAYIEAVVSLVRGLPQARHSFLHYLKAYGVTLDERIRYVIRFDFDSRRFFGPFLLIDDTYDLSRLRFSCLIIRLFNQLALGPRSKVRWRKET

SEQ ID NO: 19201 - protein, 418 aa, Anopheles gambiae str. PEST
TAYCQQLIFNLGSMALDFAAGCLGGCAGVLVGFPFDTVKVHLQTQNHRNPLYRGTYDCFRKIVVREGVHGLYRGMSSPMAGVAVVNAIVFGVYGNIQRRTANPDSLYSHFLAGSAAGLAQSIVCSPMELIKTRLQLQDNLPRAAERFSGPMDCTRAIWRREGYRGIFRGLGITAARDMPGFSSYFVAYEYMVRCVANPSPFVILMAGGLAGTFSWLVTFPLDVVKSRLQADGISGKPQYNGLIDCVRKSHAAEGWAFLSRGLASTLLRAFPMNAVCFLVVSYTMKLFDDPKVSSVVEELGATAATVETPLLIVPTVVPQVPIATAPKLSVPAPAYNKRASHHDHDSHLLSIKQNTYRFLRSLGAFSEAVCCAEMGELTDDLYDRDEAEQRRASYAKLNELLLSTDPEDSSNRYPFLGD

SEQ ID NO: 19202 - protein, 304 aa, Anopheles gambiae str. PEST
CHAMSENKSPIKYFLSGGFGGICTVLAGHPLDTIKVRLQTMPLPAAGQAPLYAGTLDCAKKTIAREGFRGLYKGMSAPITGVAPIFAVSFFGFGLGKRLQQKTPDEELNYTQLFAAGAFSGIFTTTVMAPGERIKCLLQIQQGGNSPQKYSGMVDCAKQLYAEGGMRSIYKGAFATLLRDVPASGMYFLTYEYIQRALAPKAGEQKDASIGLLGTIFAGGMAGIANWAIGMPADVLKSRLQTAPEGTYPNGIRDVFRELMRREGPLALYKGVTPVMLRAFPANAACFIGVEVFMKFLNVVAPGL

SEQ ID NO: 19203 - protein, 299 aa, Anopheles gambiae str. PEST
MHGAGESSSLKTGMIDFIAGTLGGVALVYVSQPMDTVKVKMQTFPGLYKGLVNCTLQTFRRDGIVRGLYAGTLPAVVANVAENSVLFAAYGCQQAVGRLVHKPAVADLSALENATAGFLAAFFSSFTLCPTELIKCKLQALRETAGGGKGRPTISSYALVSQILRTEGVPGMFRGLTSTFAREMPGYFFFFGGYEQTRALLARPGQSKDEIGPVRTMVAGAVGGVALWTVIFPADVIKSRIQVYSMRASMTQVGLDIFRKEGALAFYNGLLPTIVRTIPATAVLFVVYEYTKKTLTKLL

SEQ ID NO: 19204 - protein, 731 aa, Anopheles gambiae str. PEST
ASCVRYRAKTGQEGTRYAAAQQKHLLQSPNISEHTTTGSDDTAITMKLESRPITEVTGTREERVVGARGNKVTNPMHIKRASTEKLREIFGKYATQQINGEPYMTSADFVRSFLGQSYNEESIKLIAGIADTSKDGLISFAEFQAFEGLLCTPDALYKTAFQLFDRNGNGSVTYSEFVDVFKKTDLHAKIPFKLDGPFIQLYFGKDRQRVINYVEFSQFLHDFHEECAMEAFRLKDTSGSGFISALDFQDIMVNVKKHLLTSEVRDNLIAVTEGHRVSFPYFMAFNSLLNNMELIKRIYLNATSGNRAEPITKDELLHSAQTMSQITPLEIDILFQLTGVIHQSGRIVYNDLSNIAPEHYIKNITHRLAEIKAVESPADRSFLIQMLESTYRFTLGSVAGAVGATAVYPIDLVKTRMQNQRTGSFIGEVAYRNSWDCCKKVIRHEGFLGLYRGLVPQLMGVAPEKAIKLTVNDFVRDKLTDKQGNIPRWGEVLAGACAGGSQVIFTNPLEIVKIRLQVAGEIAGGAKVRALSVVRELGLFGLYKGARACLLRDVPFSAIYFPMYAHTKAAFADEEGYNHPLTLLAAGAIAGIPAASLVTPADVIKTRLQVVARSGQTTYSGVMDAARKIMAEEGPRAFWKGTVARVFRSSPQFGVTLVTYELLQRMLYVDFGGSRPAGSDVAKAKVDVARVNPDHIGGYQAALPMLNGIETKFGLSLPRFGAPAAVKRQAS

SEQ ID NO: 19205 - protein, 297 aa, Anopheles gambiae str. PEST
RMNPVLCDFIAGSFGGACGLLVGHPMDTIKAWQQNSNYGMGSAMYNIIIRNNGLRGFYRGMYFPLLSNGALNSVVFAVYGSHLRYLQKHTRSDRLRKAYWRKHVFFAGSMAGLAQVFLACPIEVVKVRLQTLSFIGHPWACLKDIFRREGFSGIYRGITPMMFRDVLPYGVYMYVYEYMLEIEERLHRLSKERLTGVPVGGALQASLIATAGAVAGVASWMFIVPFDVVKTVMQAETDPTVHKSMMHCFRSMIKKHGWRSLFRGSLVIIARAAPVNSATFLGYEYCLEKCQHLLDEK

SEQ ID NO: 19206 - protein, 302 aa, Anopheles gambiae str. PEST
MDGTDFLLGGVGSMAATLITNPLEVVKTRMQLQGELAAKGTYHKPYRSVVDAFITIAKNDGYAALQKGLAPSLCFQFILNSCRLGIYNTANEHGWTKQSNGNQSILKSAFWGAAGGFVGSALASPFFMLRTHLQSQAKAEIAVGYQHQHSGMISAMKDIFRKHGVQGLYRGVAVTMPRALLGSGGQLAAFGYTKDFLVRHPVSAQQSDTFVSTVAGAVGGTVMAITMTPPDVIATRLYNQGVDAKGRGIYYNGVVDCFVKILKAEGVAGLYKGFWPHYMRIGPHATLVLLFFDELKTMRRKY

SEQ ID NO: 19207 - protein, 426 aa, Anopheles gambiae str. PEST
SPNFESQTRARSLAHQPIPRAFRLAVRAIPRLLPALERIHSPQRNISHNDALSRVRNEPLPNELPDRRAPTHQAHSRQHSSPIGETTILQNKPPKPTMDRLGLLATAYGQPNKHSSQFRNPFGGRPWMEQSGAAAAAPGAKGLKGIVAGGITGGIEICITFPTEYVKTQLQLDEKGATKQYNGIMDCVKKTVKTNGVLGLYRGLSVLLYGSIPKSAVRFGAFESLKGRLMDSNGQLSTSGKLLAGLGAGVAEAILAVTPMETVKVKFINDQRSGTPKYKGFFHGVGMIVRQEGLSGVYKGLTATILKQGSNQAIRFYVMETLKDMYKGDDPSKPVPKMMVGAFGAVAGAASVFGNTPIDVVKTRMQGLEAAKYKNTADCALQIWKNEGPMAFYKGTVPRLSRVCLDVAITFMIYDSFMDLFNKFWR

SEQ ID NO: 19208 - protein, 344 aa, Anopheles gambiae str. PEST
RSVGVRTTSDPNYTRSHPGARSHRVRSVPLLKCVSEMSDKKRPVYVQYVLGGLSGIGATCVVQPLDLVKTRMQISGMGGAAKEYNNTFDAIGKIMRREGVLAMYKGLSAAIMRQATYTTTRLGVYTSLNDAYKQKTNKTPNLLASMAMGMTAGAIGSFVGNPSELILIRMTADGRLPVDERRNYTGFFNALFRIAREEGVLSLWRGCVPTMGRAMVVNAAQLASYSQAKAYLVSSQLLQEGIGLHFTASMFSGLITTAASLPVDIAKTRIQNMKVAPGEVPPYKSTVDVIVKVIRHEGLFALWKGFTAYYGRLGPHTVLTFIILEQLNGLYNKHMGVEGSKSGL

SEQ ID NO: 19209 - protein, 343 aa, Anopheles gambiae str. PEST
PSTGEAAAAASDGDTTMQQTAAATGRTEMRPVKYHYADSFWCTYLVSVFAASIAETVTYPLDLTKTRLQIQGEAAATAVDAEGAVKKLKYRGMFATATGIIREEGALKLWQGITPALYRHLVYSGVRIVTYDALRKKLRNGKETFSLWQSALSGVGAGALAQWLASPADLVKVHVQMEGKRRAMGLEPRVHSAAHAFREIVSRGGVFGLWKGSVPNVQRAALVNLGDLTTYDTVKHFIMHKTGLPDCHVVHIMSSICAGLVAATMGTPADVVKTRIMNQPTDSSGRGLLYKGSIDCLQQTIGKEGFFALYKGFLPVWIRMAPWSLTFWLSFEQIRASLGASGY

SEQ ID NO: 19210 - protein, 306 aa, Anopheles gambiae str. PEST
AEMEFLLGGASSMCAVLFTNPFDVLKTRQQLEGELIAKQNLKERAYKGIRQSVLTVVRTDGLRGLQKGLPAALLYQFSMNGVRLGTYQTAENLGWTKSTSNPSLTPLLSVFWGGCAGLASATASCPFYVVKTQLQAVTSGSYTARFQHHHSGTLSAFVNIYRQSGVRGLFRGYTATLARLVVGSSVQMSSFSACKEFFLRYQVFQESIVLTALASSTVAGFLTSVLMSPCDVVTTRMTNQAVSANGKGLLYTNIFDCFLKIYRSEGIHGYYKGFVPMYLRVAPHTMLNLTFWEFFKGLHDRYGKQH

SEQ ID NO: 19211 - protein, 304 aa, Helicodiceros muscivorus
MGGHDSGRSDISFGGRFASSAFAACFAELCTIPLDTAKVRLQLQKKSVAGDGVSLPKYRGMLGTVATIAREEGLSALWKGIVPGLHRQCLFGGLRIGLYEPVKSFYVGEGFVGDVPLSKKILAGLTTGALAITVANPTDLVKVRLQAEGKLSPGIPRRYSGALNAYSTIVKQEGLGALWTGLGPNIARNAIINAAELASYDQVKQTILKIPGFSDNIFTHILAGLGAGFVAVCIGSPVDVVKSRMMGDSTYKSTLDCFIKTFKNDGPLAFYKGFIPNFGRLGSWNVIMFLTLEQVKKVFIKEAP

SEQ ID NO: 19212 - protein, 303 aa, Symplocarpus foetidus
MGDHGPRTEISFAGSSRAAFAACFAELCTIPLDTAKVRLQLQKKAVTGDVVALPKYRGMLGTVATIAREEGLSALWKGIVPGLHRQCLFGGLRIGLYEPVKSFYVGDNFVGDIPLSKKILAGLTTGALAIIVANPTDLVKVRLQSEGKLPPGVPRRYSGALNAYSTIVKKEGLGALWTGLGPNIARNAIINAAELASYDQVKQTILKLPGFSDNIFTHILAGLGAGFFAVCIGSPVDVMKSRMMGDSAYKSTFDCFIKTLKNDGLLAFYKGFIPNFGRLGSWNVIMFLTLEQVKKFFIKEVPN

SEQ ID NO: 19213 - protein, 305 aa, Kluyveromyces lactis
MSTDKKQSNFAIDFLMGGVSAAVSKTAAAPIERVKLLIQNQDEMIKQGSLDRRYTGIVECFKRTAADEGVASFWRGNTANVIRYFPTQALNFAFKDKIKAMFGFKKEEGYAKWFAGNLASGGLAGGLSLLFVYSLDYARTRLAADSKSAKKGGERQFNGLVDVYKKTLASDGVAGLYRGFLPSVVGIVVYRGLYFGLYDSLKPLLLTGSLENSFLASFLLGWAVTTGASTASYPLDTVRRRMMMTSGQAVKYDGAFDAFRKIVAAEGIKSLFKGCGANILRGVAGAGVISMYDQLQVILFGKTFK

SEQ ID NO: 19214 - protein, 242 aa, Mangifera indica
RLQLQKKGVGGDGLVLPKYKGLLGTVGTIAREEGLAALWKGIVPGLHRQCLFGGLRIGLYEPVKTFYVGSDFVGDVPLSKKILAAFTTGAIGITIANPTDLVKVRLQAEGKLPPGVPRRYSGALNAYSTIVRQEGLGALWTGLGPNVARNAIINAAELASYDQVKQTILKIPGFTDNVVTHLLSGLGAGFFAVCIGSPVDVVKSRMMGDSAYKSTLDCFIKTLKNDGPLAFYKGFIPNFGRL

SEQ ID NO: 19215 - protein, 339 aa, Chlorella kessleri
MLSSALYQQAGLSGLLRASAMGPQTPFIASPKETQADPMAFVKDLLAGGTAGAISKTAVAPIERVKLLLQTQDSNPMIKSGQVPRYTGIVNCFVRVSSEQGVASFWRGNLANVVRYFPTQAFNFAFKDTIKGLFPKYSPKTDFWRFFVVNLASGGLAGAGSLLIVYPLDFARTRLAADVGSGKSREFTGLVDCLSKVVKRGGPMALYQGFGVSVQGIIVYRGAYFGLYDTAKGVLFKDERTANFFAKWAVAQAVTAGAGVLSYPFDTVRRRLMMQSGGERQYNGTIDCWRKVAQQEGMKAFFKGAWSNVLRGAGGAFVLVLYDEIKKFINPNAVSSASE

SEQ ID NO: 19216 - protein, 301 aa, Aspergillus terreus
MESKVQTNVPLPKAPLTQKARGKRTKGIPALVAGACAGAVEISITYPFESAKTRAQLKRRNHDVAAIKPGIRGWYAGYGATLVGTTLKASVQFASFNIYRSALSGPNGELSTGASVLAGFGAGVTEAVLAVTPAEAIKTKIIDARKVGNAELSTTFGAIAGILRDRGPLGFFSAVGPTILRQSSNAAVKFTVYNELIGLARKYSKNGEDVHPLASTLVGSVTGVCCAWSTQPLDVIKTRMQSLQARQLYGNTFNCVKTLLRNEGIGVFWSGVWFRTGRLSLTSAIMFPVYEKVYKFLTQPN

SEQ ID NO: 19217 - protein, 300 aa, Arabidopsis thaliana
MADAWKDLASGTVGGAAQLVVGHPFDTIKVKLQSQPTPAPGQLPRYTGAIDAVKQTVASEGTKGLYKGMGAPLATVAAFNAVLFTVRGQMEGLLRSEAGVPLTISQQFVAGAGAGFAVSFLACPTELIKCRLQAQGALAGASTTSSVVAAVKYGGPMDVARHVLRSEGGARGLFKGLFPTFAREVPGNATMFAAYEAFKRFLAGGSDTSSLGQGSLIMAGGVAGASFWGIVYPTDVVKSVLQVDDYKNPRYTGSMDAFRKILKSEGVKGLYKGFGPAMARSVPANAACFLAYEMTRSSLG

SEQ ID NO: 19218 - protein, 294 aa, Arabidopsis thaliana
MADAWKDLASGTVGGAAQLVVGHPFDTIKVKLQSQPTPAPGQLPRYTGAIDAVKQTVASEGTKGLYKGMGAPLATVAAFNAVLFTVRGQMEGLLRSEAGVPLTISQQFVAGAGAGFAVSFLACPTELIKCRLAGASTTSSVVAAVKYGGPMDVARHVLRSEGGARGLFKGLFPTFAREVPGNATMFAAYEAFKRFLAGGSDTSSLGQGSLIMAGGVAGASFWGIVYPTDVVKSVLQVDDYKNPRYTGSMDAFRKILKSEGVKGLYKGFGPAMARSVPANAACFLAYEMTRSSLG

SEQ ID NO: 19219 - protein, 296 aa, Arabidopsis thaliana
MDFWPEFMATSWGREFVAGGFGGVAGIISGYPLDTLRIRQQQSSKSGSAFSILRRMLAIEGPSSLYRGMAAPLASVTFQNAMVFQIYAIFSRSFDSSVPLVEPPSYRGVALGGVATGAVQSLLLTPVELIKIRLQLQQTKSGPITLAKSILRRQGLQGLYRGLTITVLRDAPAHGLYFWTYEYVRERLHPGCRKTGQENLRTMLVAGGLAGVASWVACYPLDVVKTRLQQGHGAYEGIADCFRKSVKQEGYTVLWRGLGTAVARAFVVNGAIFAAYEVALRCLFNQSPSPDIVTGD

SEQ ID NO: 19220 - protein, 296 aa, Arabidopsis thaliana
MDFWPEFMATSWGREFVAGGFGGVAGIISGYPLDTLRIRQQQSSKSGSAFSILRRMLAIEGPSSLYRGMAAPLASVTFQNAMVFQIYAIFSRSFDSSVPLVEPPSYRGVALGGVATGAVQSLLLTPVELIKIRLQLQQTKSGPITLAKSILRRQGLQGLYRGLTITVLRDAPAHGLYFWTYEYVRERLHPGCRKTGQENLRTMLVAGGLAGVASWVACYPLDVVKTILQQGHGAYEGIADCFRKSVKQEGYTVLWRGLGTAVARAFVVNGAIFAAYEVALRCLFNQSPSPDIVTGD

SEQ ID NO: 19221 - protein, 311 aa, Arabidopsis thaliana
MGESKTTTGEGFGFYKEYVAGMMAGLATVAVGHPFDTVKVKLQKHNTDVQGLRYKNGLHCASRILQTEGVKGLYRGATSSFMGMAFESSLMFGIYSQAKLFLRGTLPDDGPRPEIIVPSAMFGGAIISFVLCPTELVKCRMQIQGTDSLVPNFRRYNSPLDCAVQTVKNDGVTGIFRGGSATLLRECTGNAVFFTVYEYLRYHIHSRLEDSKLKDGYLVDMGIGVLTGGLGGIACWSAVLPFDVAKTIIQTSSEKATERNPFKVLSSIHKRAGLKGCYAGLGPTIVRAFPANAAAIVAWEFSMKMLGIKRD

SEQ ID NO: 19222 - protein, 306 aa, Arabidopsis thaliana
MVAAGKSDLSLPKTFACSAFAACVGEVCTIPLDTAKVRLQLQKSALAGDVTLPKYRGLLGTVGTIAREEGLRSLWKGVVPGLHRQCLFGGLRIGMYEPVKNLYVGKDFVGDVPLSKKILAGLTTGALGIMVANPTDLVKVRLQAEGKLAAGAPRRYSGALNAYSTIVRQEGVRALWTGLGPNVARNAIINAAELASYDQVKETILKIPGFTDNVVTHILSGLGAGFFAVCIGSPVDVVKSRMMGDSGAYKGTIDCFVKTLKSDGPMAFYKGFIPNFGRLGSWNVIMFLTLEQAKKYVRELDASKRN

SEQ ID NO: 19223 - protein, 339 aa, Arabidopsis thaliana
MIPTTATVDDEPGQIKRALIDASAGAISGGVSRSVTSPLDVIKIRFQVQLEPTTSWGLVRGNLSGASKYTGMVQATKDIFREEGFRGFWRGNVPALLMVMPYTSIQFTVLHKLKSFASGSTKTEDHIHLSPYLSFVSGALAGCAATLGSYPFDLLRTILASQGEPKVYPTMRSAFVDIIQSRGIRGLYNGLTPTLVEIVPYAGLQFGTYDMFKRWMMDWNRYKLSSKIPINVDTNLSSFQLFICGLGAGTSAKLVCHPLDVVKKRFQIEGLQRHPRYGARVERRAYRNMLDGLRQIMISEGWHGLYKGIVPSTVKAAPAGAVTFVAYEFTSDWLESISW

SEQ ID NO: 19224 - protein, 306 aa, Arabidopsis thaliana
MVAAGKSDLSLPKTFACSAFAACVGEVCTIPLDTAKVRLQLQKSALAGDVTLPKYRGLLGTVGTIAREEGLRSLWKGVVPGLHRQCLFGGLRIGMYEPVKNLYVGKDFVGDVPLSKKILAGLTTGALGIMVANPTDLVKVRLQAEGKLAAGAPRRYSGALNAYSTIVRQEGVRALWTVLGPNVARNAIINAAELASYDQVKETILKIPGFTDNVVTHILSGLGAGFFAVCIGSPVDVVKSRMMGDSGAYKGTIDCFVKTLKSDGPMAFYKGFIPNFGRLGSWNVIMFLTLEQAKKYVRELDASKRN

SEQ ID NO: 19225 - protein, 300 aa, Glycine max
  unsure (1)..(300): unsure at all Xaa locations
MGDVAKDLAAGTVGGAAQLICGHPFDTIKVKLQSQPAPLPGXQLPKYSGAFDXAVKQTIAAEGPRGLYKGMGAPLATVAAFNAVLFTVRGQMETLVRSNPGAPLTVDQQFVCGAGAGVAVSILACPTELIKCRLQAQSALAGSETATVAVKYGGPMDVARHVLRSEGGVKGLFKGLVPTMGREIPGNAVMFGVYEALKRKFAGGTDTSXGLGRGSLMFSGGLAGAAFWLSVYPTDVVKSVIQVDDYKNPKFSGSIDAFRKISASEGIKGLYKGFGPAMARSVPANAACFLAYEMTRSALG

SEQ ID NO: 19226 - protein, 249 aa, Glycine max
  unsure (1)..(249): unsure at all Xaa locations
XHEVLSRAFDSSVSAKDPPSYKGVALGGTGTGAIQSLLISPVELTKVRLQLQNAGQMTETAKGPLMLAKNIWRKEGLRGIYRGLGVTVMRDGPSHGLYFWTYEYMREQLHPGCRKSGEESLNTMLIAGGLAGVTSWISCYPFDVVKTRLQAQTPSSIKYKGIIDCFKKSVNEEGYGVLWRGLGTTVARAFLVNGAIFSAYEISLRLLFNNGNIQMQETLXQKIKHHSNSSWCAENNQNSAFIFNNHYKM

SEQ ID NO: 19227 - protein, 315 aa, Glycine max
  unsure (1)..(315): unsure at all Xaa locations
QSSSYVADYGGDFKFRXYKEYAAGLFAGVAAVATGHPFDTVKVMLQKHNAEAHKIQYKNGWHCTARILKTEGIKGLYRGATSSFVGMAVEGSLFFGIYSQTKVYLQGGVQSGEPRPQVIIPSAAYSGAIISFVLGPTELIKCRMQIQGTDSLVPKSSRYNSPLDCALKTVKTEGVXXGIFRGGCATLLRESIGNAVFFSVYEYVRYYMHSNIKAASSDYTNLVDIGIGIVSGGLGGVAFWLTVLPLDVAKTLIQTNPDKNCPRNPFRVLSSIYQRAGFKGCYTGLGPTVSRAFPANAATIVAWELALKMLGIKHD

SEQ ID NO: 19228 - protein, 424 aa, Glycine max
  unsure (1)..(424): unsure at all Xaa locations
QLRSPPPPIPSKWGPLGSVTTPCCHDNTTRPRSALLLLLLSFCSEAFTFNFSSQPSPIDRLSCAIPCDQKPRASPPSSSLISLTTTTTPTSPWTPRPHPRSSTHRLHRRLSSPKTEQIASQSTEALKDIVFGSIAGMLGKIVEYPFDTVKVRLQSQPDHLPLRYAGPLDCFRQSIHQDGVRGLYRGVSAPLLGAAAETSCLFFSYRVAQDVIRATKSKADDKLPLPQLVAAGAMSGAVTSLILTPIELVKCRMQVPLTSSMDPTLRNASIGPAAVIRDVYRREGIAGFWRGQLGTLLRETGGGAAWFGCYETFSLFFRQXXAQAATGEKDPTLPIWQSMLAGAGAGLGYNFSFYPADTIKSKMQTGDLSSIGAKRQTFFGVGRALFHTHGLKGLYRGCGITLLRSGPSSALIFTIYESLRTYFG

SEQ ID NO: 19229 - protein, 364 aa, Glycine max
  unsure (1)..(364): unsure at all Xaa locations
PYNLSTFQSNQFQCRLSSPSSSHPAEKGGESVCVAAMEEPSKLKRAMIDSWAGAISGGISRTVTSPLDVIKIRFQVQLEPTSSWALLRKDLAAASKYTGMFQATKDILREEGVQGFWRGNVPALLMVMPYTAIQFTVLHKLKTFASGSSKSENHINLSPCLSYLSGALAGCAATLGSYPFDLLRTILASQGEPKVYPNMRSAFMDIIHTRGFQGLYAGLSPTLVEIIPYAGLQFGTYDTFKRWTMAWNQRQYSNXXTAESLSSFQLFLCGLAAGTCAKLVCHPLDVVKKRFQIEGLQRHPRYGARVEHRAYKNMLDAMKRILQMEGWAGLYKGILPSTVKAAPAGAVTFVAYELTVDWLESFLT

SEQ ID NO: 19230 - protein, 368 aa, Glycine max
  unsure (1)..(368): unsure at all Xaa locations
EPSFFSKNLFKTLEERSQLVTCSMAVQSSTSSESQASENVMHRHFFLWREFLWGAVAGAFGEGMMHPVDTVKTRLQSQAILNGIQNQKNILQMVRYVWQVDGLKGFYRGVTPGIIGSLATGATYFGVIESTKKWIEDSHPSLGGHWAHFFAGGVGDTLGSFVYVPCEAMKHRMQIQGTIASPGTQIYGDYTGMLHAGCSIWKAQGLKGLYAGYLSTLARDVPFAGLMVVFYEALKDAKDYVEQRCPNWHVNNSVEGLVLGGLAGGLSAYLPTPLDVVKTRLQVQGSTLRKKGWLDAIRNIWATEGMKGMFRGSVPRITWYIPASALTFMAVEFLRDHFYERVPNDNLXEDVGRLSVDHKSAGGLKVSH

SEQ ID NO: 19231 - protein, 342 aa, Glycine max
KGKGGERVFAAMEEPSKLKRAMIDSLAGAISGGISRTVTSPLDVIKIRFQVQLEPTSSWALLRKDLASATAAASKYTGMLQATKDILREEGVQGFWRGNVPALLMVMPYTAIQFTVLHKLKTFASGSSKTENHINLSPYLSYISGALAGCAATVGSYPFDLLRTILASQGEPKVYPNMRSAFMDIVHTRGFQGLYSGLSPTLVEIIPYAGLQFGTYDTFKRWGMAWNHRYSNTAAEDNLSSFQLFLCGLAAGTCAKLVCHPLDVVKKRFQIEGLQRHPRYGARVEHRAYRNMLDAMQRILQLEGWAGLYKGIIPSTVKAAPAGAVTFVAYELTSDWLESTFN

SEQ ID NO: 19232 - protein, 334 aa, Glycine max
VFSRGDQREEEGKDSNLHTQPLVPFPTLTMVADSKSNSDLSFGKIFASSAFSACFAEVCTIPLDTAKVRLQLQKQAVAGDVVSLPKYKGMLGTVGTIAREEGLSALWKGIVPGLHRQCLYGGLRIGLYEPVKTFYVGKDHVGDVPLSKKILAAFTTGAFAIAVANPTDLVKVRLQAEGKLPPGVPRRYSGSLNAYSTIVRQEGVGALWTGLGPNIARNGIINAAELASYDQVKQTILKIPGFTDNVVTHLLAGLGAGFFAVCIGSPVDVVKSRMMGDSSYKNTLDCFIKTLKNDGPLAFYKGFLPNFGRLGSWNVIMFLTLEQTKKFVKSLESS

SEQ ID NO: 19233 - protein, 347 aa, Glycine max
FNFAADPGGESVCVAAMEEPSKLKRAMIDSWAGAISGGISRTVTSPLDVIKIRFQVQLEPTSSWALLRKDLASATAAASKYTGMLQATKDILREEGVQGFWRGNVPALLMVMPYTAIQFTVLHKLKTFASGSSKTENHINLSPYLSYISGALAGCAATVGSYPFDLLRTILASQGEPKVYPNMRSAFMDIIHTRGFQGLYSGLSPTLVEIIPYAGLQFGTYDTFKRWGMAWNHRYSNTSAEDNLSSFQLFLCGLAAGTCAKLVCHPLDVVKKRFQIEGLQRHPRYGARVEHRAYRNMPDAMQRIFRLEGWAGLYKGIIPSTVKAAPAGAVTFVAYELTSDWLESTFN

SEQ ID NO: 19234 - protein, 364 aa, Glycine max
  unsure (1)..(364): unsure at all Xaa locations
PYNLSTFQSNQFQCRLSSPSSSHPAEKGGESVCVAAMEEPSKLKRAMIDSWAGAISGGISRTVTSPLDVIKIRFQVQLEPTSSWALLRKDLAAASKYTGMFQATKDILREEGVQGFWRGNVPALLMVMPYTAIQFTVVHKLKTFASGSSKSENHINLSPCLSYLSGALAGCAATVGSYPFDLLRTILASQGEPKVYPNMRAALVDILQTRGFRGLYAGLSPTLVEIIPYAGLQFGTYDTFKRWTMAWNQRQYSNXXTAESLSSFQLFLCGLAAGTCAKLVCHPLDVVKKRFQVDGRLWHPSSPPRVEHRAYKNMLDAMQRILQLEGWAGLYKGILPSTVKAAPAGAVTLGAYELTAHWLEYTNN

SEQ ID NO: 19235 - protein, 314 aa, Glycine max
  unsure (1)..(314): unsure at all Xaa locations
PLVPFPTLTMVADSKSKSDLSFGKTFASSAFSACFAEVCTIPLDTAKVRLQLQKQAATGDVVSLPKYKGMLGTVATIAREEGLSALWKGIVPGLHRQCLYGGLRIGLYDPVKTFYVGKDHVGDVPLSKKILAAFTTGAFAIAVANPTDLVKVRLQAEGKLPPGVPRRYSGSLNAYSTIVRQEGVGALWTGLXPHIARNGIINAAELAAYDQVKQTILKIPGFTDNVVTHLLAGLGAGFFAVCVGSPVDVVKSRMMGDSSYKSTLDCFVKTLKNDGPFAFYKGFIPNFGRLGSWNVIMFLTLEQAKKFVKTLESA

SEQ ID NO: 19236 - protein, 317 aa, Glycine max
MTADTHAAPNINPKGLLCNAAAGASAGVIAATFVCPLDVIKTRFQVHGVPQLAHRSAKGSIIVASLEQVFHKEGLRGMYRGLAPTVLALLPNWAVYFSAYEQLKSLLQSDDSHHLSIGANMIAASGAGAATTMFTNPLWVVKTRLQTQGMRPGVVPYRGTLSALRRIAHEEGIRGLYSGLVPALAGISHVAIQFPTYETIKFYLANQDDTAMEKLGARDVAIASSVSKIFASTLTYPHEVVRSRLQEQGHHSEKRYSGVIDCIRKVFHQEGVSGFYRGCATNLLRTTPAAVITFTSFEMIHRFLVSYFPSDPRPHIL

SEQ ID NO: 19237 - protein, 316 aa, Oryza sativa (japonica cultivar-group)
MGDVAKDLTAGTVGGAAQLVVGHPFDTIKVKLQSQPTPPPGQPPKFAGAMDAVKQTLAAEGPRGLYKGMGAPLATVAAFNALLFTVRGQMEAVLRSEPGAPLTVSQQVVAGAGAGVAVSFLACPTELIKCRLQAQSALASAAPAAAAAAASPVGGGAATATASVAAVKYGGPVDVAKQVLRSEGGVGGLFKGLGPTLAREVPGNALMFGVYEAIKQYLAGGQDTSSLGRGSLVVAGGLAGASFWGSVYPTDVVKSVIQVDDYKNPKYSGSMDAFRKILAADGVKGLYKGFGPAMARSVPANAACFLAYEVTRSALG

SEQ ID NO: 19238 - protein, 296 aa, Oryza sativa (japonica cultivar-group)
MGDVVKDLVAGTVGGAANLIVGHPFDTIKVKLQSQPTPAPGQFPKYAGAVDAVKQTIATEGPRGLYKGMGAPLATVAAFNALLFTVRGQMEALLRSEPGQPLTVNQQVVAGAGAGVAVSFLACPTELIKCRLQAQSALAEAAAASGVALPKGPIDVAKHVVREAGMKGLFKGLVPTMGREVPGNAVMFGVYEGTKQYLAGGQDTSNLGRGSLILSGGLAGAVFWLSVYPTDVVKSVIQVDDYKKPRYSGSVDAFKKILAADGVKGLYKGFGPAMARSVPANAATFLAYEITRSALG

SEQ ID NO: 19239 - protein, 322 aa, Oryza sativa (japonica cultivar-group)
MEFWPEFLASSWGKEFVAGGVGGMAGVLAGHPLDTLRIRLQQPPPPASPGITAAPGRPASAASLLRGILRAEGPSALYRGMGAPLASVAFQNAMVFQVFAILSRSIDQPSSMSEPPSYTSVALAGVGTGALQTLILSPVELVKIRLQLEAAGQKHRRPGDHHGPVDMARDILRKEGVRGIYRGLAVTALRDAPAHGVYFWTYEYARERLHPGCRGHGGEQESLATMLVSGGLAGVASWVCCYPLDVVKSRLQAQGYPPRYRGIADCFRRSVREEGLPVLWRGLGTAVARAFVVNGAIFSAYELALRFLASSSNDQRLVMEEN

SEQ ID NO: 19240 - protein, 306 aa, Lycopersicon esculentum
MGGGDHGGKSDISFAGIFASSAFAACFAEACTLPLDTAKVRLQLQKKAVEGDGLGLPKYRGLLGTVGTIAKEEGVASLWKGIVPGLHRQCIYGGLRIGMYEPVKNLYVGKDHVGDVPLSKKILAALTTGALGITVANPTDLVKVRLQAEGKLPAGVPRRYSGALNAYSTIVKQEGVRALWTGLGPNIGRNAIINAAELASYDQVKEAVLRIPGFTDNVVTHLIAGLGAGFFAVCIGSPVDVVKSRMMGDSAYKNTLDCFVKTLKNDGPLAFYKGFIPNFGRLGSWNVIMFLTLEQAKKFVKNLESP

SEQ ID NO: 19241 - protein, 300 aa, Nicotiana tabacum
MGDKAKSTSSAGAWPTVKPFANGGASGMLATCVIQPIDMIKVRIQLGQGSAGEVTRTMLKNEGFGAFYKGLSAGLLRQATYTTARLGSFRVLTNKAIEANDGKPLPLYQKALCGLTAGAIGACFGSPADLALIRMQADATLPVAQRRNYTNAFHALYRIVADEGVLSLWKGAGPTVVRAMALNMGMLASYDQSVEFFKDNLGMGEAATVVGASSVSGFFAAACSLPFDYVKTQIQKMQPDAQGKYPYTGSFDCAMKTLKSGGPFKFYTGFPVYCVRIAPHVMMTWIFLNQIQKVEKKIGL

SEQ ID NO: 19242 - protein, 297 aa, Nicotiana tabacum
MGEKPKSGGVWPTVKPFVNGGASGMLATCVIQPIDMIKVRIQLGQGSAVDVTKTMLKNEGFGAFYKGLSAGLLRQATYTTARLGSFRSLTNKAIEANEGKPLPLYQKALCGLTAGAIGACVGSPADLALIRMQADATLPLAQRRHYTNAFHALSRIVADEGVLALWKGAGPTVVRAMALNMGMLASYDQSVEFCRDNLGMSEAATVVGASSVSGFFAAACSLPFDYVKTQIQKMQPDAEGKLPYSGSFDCAMKTLKAGGPFKFYTGFPVYCVRIAPHVMMTWIFLNQIQKAEKKLGL

SEQ ID NO: 19243 - protein, 297 aa, Nicotiana tabacum
MVEKPKSGGVWPTVKPFVNGGASGMLATCVIQPIDMIKVRIQLGQGSAVDVTKTMLKNEGFGAFYKGLSAGLLRQATYTTARLGSFRILTNKAIEANEGKPLPLYQKALCGLTAGAIGACFGSPADLALIRMQADATLPLAQRRHYTNAFHALSRIVADEGVLALWKGAGPTVVRAMALNMGMLASYDQSVEFCRDNLGMSEAATVVGASSVSGFFAAACSLPFDYVKTQIQKMQPDAEGKLPYSGSFDCAMKTLKAGGPFKFYTGFPVYCVRIAPHVMMTWIFLNQIQKAEKKLGL

SEQ ID NO: 19244 - protein, 295 aa, Nicotiana tabacum
EKPKSGGVWPTVKPFVNGGASGMLATCVIQPIDMIKVRIQLGQGSAVDVTKTMLKNEGFGAFYKGLSAGLLRQATYTTARLGSFRILTNKAIEANEGKPLPLYQKALCGLTAGAIGACFGSPADLALIRMQADATLPLAQRRHYTNAFHALSRIVADEGVLALWKGAGPTVVRAMALNMGMLASYDQSVEFCRDNLGMSEAATVVGASSVSGFFAAACSLPFDYVKTQIQKMQPDAEGKLPYSGSFDCAMKTLKAGGPFKFYTGFPVYCVRIAPHVMMTWIFLNQIQKAEKKLGL

SEQ ID NO: 19245 - protein, 226 aa, Nicotiana tabacum
ELRQATDTTARLGSFRVLTNKAIEANDGNPLPLYQKALCGLTAGAIGACFGSPADLALIRMQADATLPVAQRRNYTNAFHALYRIVADEGVLSLWKGAGPTVVRAMALNMGMLASYDQSVEFFKDNLGMGEAATVVGASSVSGFFAAACSLPFDYVKTQIQKMQPDAQGKYPYTGSFDCAMKTLKSGGPFKFYTGFPVYCVRIAPHVMMTWIFLNQIQKVEKKIGL

SEQ ID NO: 19246 - protein, 306 aa, Solanum tuberosum
MGGGDHGGKSDISFAGIFASSAFAACFAEACTLPLDTAKVRLQLQKKAVEGDGLALPKYRGLLGTVGTIAKEEGIASLWKGIVPGLHRQCIYGGLRIGMYEPVKNLYVGKDHVGDVPLSKKILAALTTGALGITIANPTDLVKVRLQAEGKLPAGVPRRYSGALNAYSTIVKQEGVRALWTGLGPNIGRNAIINAAELASYDQVKEAVLRIPGFTDNVVTHLIAGLGAGFFAVCIGSPVDVVKSRMMGDSAYKNTLDCFVKTLKNDGPLAFYKGFIPNFGRLGSWNVIMFLTLEQAKKFVKSLESP

SEQ ID NO: 19247 - protein, 297 aa, Solanum tuberosum
MGEKPVSGGVWPTVKPFINGGVSGMLATCVIQPIDMIKVRIQLGQGSAADVTKTMLKNEGFGAFYKGLSAGLLRQATYTTARLGSFRILTNKAIEANEGKPLPLYQKALCGLTAGAIGATVGSPADLALIRMQADATLPLAQRRNYTNAFHALSRIAVDEGVLALWKGAGPTVVRAMALNMGMLASYDQSVEFFRDNLGMGEAATVVGASSVSGFFAAACSLPFDYVKTQIQKMQPDAEGKLPYTGSFDCAMKTLKAGGPFKFYTGFPVYCIRIAPHVMMTWIFLNQIQKVEKKIGL

SEQ ID NO: 19248 - protein, 436 aa, Dictyostelium discoideum
MENNNKNINTTNNSTTINTNNNNNPINKNNNNNNINNNNNNNINNINNINNVNNNNNNNNNNNNNNNNNNNNNNNNNNNNNNNNNNINNNNNNINNNNINKKNINNINKNKINNNNNNEIGEEKAVEGGFLAGLSRNVTRIIGSFSSGMAEESAGYPLDLIKTRIQLSQSGVSGGGGTNTSIIKIFKDVIKTEGVIGLFKGLSSPLILSALVTAIQFGLFEDTLKYFRKHQYFKNHDTLSLLFSGSIAGFAQSFITCPVDLVKIQMQIQGIPSSQPNSNNNNNNNKAKGNSYFTKLIYREKGLLGFYQGLSPTLFRDVPGLAIFFTTYETLKKQFGQPELSTQSPTEFIKSFIPIVLSGGSAGVFYHGLTHPFDIAKTLIQSDRSATKYKGTFDCLKQVYQNQGPKSLFKGFSAVAIKSFQSNAVGFLVYEMVINL

SEQ ID NO: 19249 - protein, 935 aa, Oryza sativa
  unsure (1)..(935): unsure at all Xaa locations
MGVNGIVIETGPVIELVRRPTSRGFATSTLRALPTTAPPFPTTPTSKVPFXLAPMSAPAAASRHHSGPCPPPAEGEREKEREKGGRRKREMTCGAHMLTVGTVLCCICGVAMQPNPANMCARCIRARVDITEGVPRHAAVVYCPDCTSYLQPPRSWLRAGPESPELMQILLRRLNRPLARLRVSLSAAEFVFSEPHSKRLRLKLRLRREVFNAVVLEQTHPVEFTVHDRLCDACARAQSNPDQWVAVVQLRQHVPHRRTFLYLEQLLLKHGQASLALRVAAAPGGLDFFFGSRSHAARLVDFLATVAPVQTQTAKQLVSHDTKSNVYNYKHTFSVEICPICREDLIALSPQVSRDLGGLGPIVLCIKVTNAIALLDPLTLRVHHLEEKKYRVYNFKAALTSKQLVEYIVLDIEHESPEITIDGSRYQLAYAQVARVSDFGKNDTMFTVRTHLGHLLNPGDLALGYDLYGANLNDDDMDTAMMRHSLPEVILVKKSFAKRPRTRRWKLKRLPMEEDAVNKAKGELEKRADEYEEFLRDLEHNSDIRFQIDLYKDEDYRSEMASTIGDDVPTVPIEELIEDLSLGDDEEEDEAAASASPPFHITPTSSAIAIATNPIEKQTPPPRFESPPSQTQNSQIDQIMGDVVKDLVAGTVGGAANLIVGHPFDTIKVKLQSQPTPAPGQFPKYAGAVDAVKQTIATEGPRGLYKGMGAPLATVAAFNALLFTVRGQMEALLRSEPGQPLTVNQQVVAGAGAGVAVSFLACPTELIKCRLQAQSALAEAAAASGVALPKGPIDVAKHVVREAGMKGLFKGLVPTMGREVPGNAVMFGVYEGTKQYLAGGQDTSNLGRGSLILSGGLAGAVFWLSVYPTDVVKSVIQVDDYKKPRYSGSVDAFKKILAADGVKGLYKGFGPAMARSVPANAATFLAYEITRSALG

SEQ ID NO: 19250 - protein, 296 aa, Oryza sativa; identical to SEQ ID NO: 19238

SEQ ID NO: 19251 - protein, 595 aa, Oryza sativa
  unsure (1)..(595): unsure at all Xaa locations
MGDVVKDLVAGTVGGAANLIVGHPFDTIKVKLQSQPTPAPGQFPKYAGAVDAVKQTIATEGPRGLYKGMGAPLATVAAFNALLFTVRGQMEALLRSEPGQPLTVNQQVVAGAGAGVAVSFLACPTELIKCRLQAQSALAEAAAASGVALPKGPIDVAKHVVREAGMKGLFKGLVPTMGREVPGNAVMFGVYEGTKQYLAGGQDTSNLGRGSLILSGGLAGAVFWLSVYPTDVVKSVIQVDDYKKPRYSGSVDAFKKILAADGVKGLYKGFGPAMAREEMGDVAKDLTAGTVGGAAQLVVGHPFDTIKVKLQSQTTPTPGQPPKFAGAMDAVKQTLAAEGPRGLYKGMGAPLATVAAFNALLFTVRGQTDAVXLRSEPGAPLTVSQQVVAGAGAGVAVSFLACPTELIKCRLQAQSALASAAPAAAAAAASPVGGGAATATASVAAVKYGGPVDVAKQVLRSEGRVGRLSKGLGPTLAREVPGNALMFGVYEAIKQYLAGGQDTSSLGRGSLVVAGGLAGASFWGSVYPTDVVKSVIQVDDYKNPKYSGSMDAFRKILAADGVKGLYKGFGPAMARSVPANAACFLAYEVTRSALG

SEQ ID NO: 19252 - protein, 322 aa, Oryza sativa; identical to SEQ ID NO: 19239

SEQ ID NO: 19253 - protein, 119 aa, Oryza sativa
  unsure (1)..(119): unsure at all Xaa locations
MSCTAGGQMYNETLMEVEHTPPVHKRILDIMPGVPGGXVARIMVGQPFDTIKTRLQALGKGTIGAAGMPPEMVYTSGMDCVRKDRSRAEGPLXSLYKGTXVAPLLGNMVLLGXIHFPTX

SEQ ID NO: 19254 - protein, 244 aa, Oryza sativa
  unsure (1)..(244): unsure at all Xaa locations
XTTRSFSAGYAQMSSILFIFLLQNAMVFQVFAILSRSIDQPSSMSEPPSYTSVALAGVGTGALQTLILSPVELVKIRLQLEAAGQGPVDMARDILRKEGVRGIYRGLAVTALRDAPAHGVYFWTYEYARERLHPGCRGHGGEQESLATMLVFGGLAGVASWVCCYPLDVVKSRMQAQGYPPRYRGIADCFRRSVREEGLPVLWRGLGTDVARAFVVNGAIFSAYELALRFLASSSNDQRLVMEE

SEQ ID NO: 19255 - protein, 302 aa, Panicum miliaceum
MADAKQQQAVAPSAAWMTVKPFVNGGASGMLATCVIQPIDMVKVKIQLGEGSAATVTKKMLANEGIGSFYKGLSAGLLRQATYTTARLGSFRVLTNKAVEANEGKPLPLLQKAVIGLTAGAIGASVGSPADLALIRMQADSTLPAAQRRNYKNAFHALYRIVADEGVLALWKGAGPTVVRAMSLNMGMLASYDQSVELFRDTLGAGELSTMLGASAVSGFCASACSLPFDYVKTQIQKMQPDANGKYPYTGSLDCVMKTLKSGGPFKFYTGFPVYCVRIAPHVMLTWIFLNQIQKFEKDIGL

SEQ ID NO: 19256 - protein, 302 aa, Panicum miliaceum
MADAKQQQAVAPSAAWMMVKPFVNGGASGMLATCVIQPIDMVKVKIQLGEGSAATVTKKMLANEGIGSFYKGLSAGLLRQATYTTARLGSFRVLTNKAVEANEGKPLPLLQKAVIGLTAGAIGASVGSPADLALIRMQADSTLPAAQRRNYKNAFHALYRIVADEGVLALWKGAGPTVVRAMSLNMGMLASYDQSVELFRDKLGAGELSTMLGASAVSGFCASACSLPFDYVKTQIQKMQPDANGKYPYTGSLDCVMKTLKSGGPFKFYTGFPVYCVRIGPHVMLTWIFLNQIQKFEKDMGL

SEQ ID NO: 19257 - protein, 323 aa, Sorghum bicolor
MDTTSRAAKIPSLHQTEINWDNLDKTKLYVVGAGMFSGVTVALYPVSVVKTRMQVASGDAMRRNALATFKNILKMDGVPGLYRGFATVIIGAVPTRIIFLTALETTKAASLKLVEPFKLSEPVRAAFANGLAGLSASTCSQAIFVPIDVISQKLMVQGYSGNARYKGGLDVARKVIKADGIRGLYRGFGLSVMTYAPSSAVWWASYGSSQRIIWSALGHLHDKEEAPSQLKLVGVQASGGVFAGAVTSFVTTPIDTIKTRLQVMDNENKPKAREVVKRLIAEDGWKGLYRGLGPRFFSSSAWGTSMIVCYEYLKRLCAKVEEV

SEQ ID NO: 19258 - protein, 296 aa, Triticum aestivum
MGDIAKDLTAGTVGGIANLVVGHPFDTIKVKLQSQPSPAPGQLPKYAGAFDAVKQTVAAEGPRGLYKGMGAPLATVAAFNALLFTVRGQMETLLRSEPGAPLTVKQQVVAGAGAGLAVSFLACPTELIKCRLQAQSSLAEAGAVSGVALPKGPMDVARHVMRDAGIKGLFKGIVPTMGREIPGNAIMFGVYEAVKQYMAGGRDTSGLGQGSLILAGGLAGGALWLTVYPTDVVKSVIQVDDYKKPRYSGSIDALKKIVAADGVKGLYKGFGPAMARSVPANAATFVAYEITRSAMG

SEQ ID NO: 19259 - protein, 322 aa, Triticum monococcum
MDTSTRAAKIPSLPQQTEINWDNLDMTKLYVVGAGMFSCVTVALYPVSVIKTRMQVASGEAMRRNALATFKNILKVDGVPGLYRGFGTVITGAIPARIIFLTALEKTKATSLKLVEPLQLSESMEAALANGLGGLTASLCSQAVFVPIDVVSQKLMVQGYSGHVRYKGGIDVVQKIMKSDGPRGLYRGFGLSVMTYAPSSAVWWASYGFSQRMIWSALGHLNDKEDAPSQLKIVGVQATGGMIAGAVTSCVSTPLDTIKTRLQVNQNKPKASEVVRRLIAEDGWKGFYRGLGPRFFSSSAWGTSMIVCYEYLKRVCAKVEEA

SEQ ID NO: 19260 - protein, 302 aa, Zea mays
  unsure (1)..(302): unsure at all Xaa locations
MGDVAKDLTAGTVGGAANLIVGHPFDTIKVKLQSQPTPAPGQLPKYAGAIDAVKQTVAAEGPRGLYKGMGAPLATVAAFNAVLFSVRGQMEALLRSEPGVPLTVKQQIVAGAGAGIAVSFLACPTELIKCRLQAQSSLAEAAAXASGVALSKGPIDVAXKHVVRDAGAKGLFKGLVPTMGTXEVPGNALMFGVYEATKQYLAGGPGTRRGLGRGXSQVLAGGLAGAAFWLSVYPTDVVKSVIQVDDYKKPKYSGSLDALRKIVAADGVKGLYKGFGXPAMARSVPANAATFVAYEITRSALG

SEQ ID NO: 19261 - protein, 337 aa, Zea mays
  unsure (1)..(337): unsure at all Xaa locations
MVAAGTYSDDTSGGGCGSMEFWPEFLASSGGREFVAGGVGGMAGVLAGHPLDTLRIRLQQPPAAGAPXXAATRTXSAPRLLRGILRAEGPCALYRGMAAPLASVAFQNAMVFQVYAVLSRSLGXXATSEPPSYASVALAGVSTGALQTLILSPVELVKIRLQLEAASGHGPVEMVREILRREGLRGVYRGLAVTALRDAPAHGVYFWTYERARERLHPGCRRSSSSQDQDGDEGLGTMLVAGGLAGVASWVCCYPLDVVKSRLQAQGAASASAPRYRGVVDCFQRSVREEGLPVLWCGLGTAVARAFVVNGAIFSAYELALRFIASGGGPRLVMEDK

SEQ ID NO: 19262 - protein, 339 aa, Zea mays
  unsure (1)..(339): unsure at all Xaa locations
RRRNSGGTGPSSPLVPQFCISLFADIRVGPAASSSDGRSGRXAAKEYVAGSAAGVAQVVVGHPFDTVKVKLQAHNTTAHGKVYKNAFHCTSRILLDEGITGLYKGASSSFIGIAVESSLFFGTYSQAKQLLQGSYEVGRPHLQVIIPSAACSGALISCILTPTELTKCRMQVQGKDVIHGARYSSPLDCAVKTLESEGVXXGIFRGGLATLFREAIGNAVFFCTYEYSRYWMHNYLDSSRFSGSSHLDIGIGVVSGGVSGMAFWTATLPLDVAKTIIQTDPDPHVSRNPLQILSMVYKRAGLGGCYAGLGPTLARAFPANAAAIVAWEYSAKILGIKRG

SEQ ID NO: 19263 - protein, 404 aa, Zea mays
  unsure (1)..(404): unsure at all Xaa locations
RKPCPWRAVLNPKPFDLLYTRPHRESHASATMAASPSSPHAAPGVREPVPLSAVSPPPXNYFMWREFVWGGIAGAFGEGMMHPVDTLKTRLQSQAIMTGAKAQKNILQMVRTVWASDGLRGFYRGISPGVTGSLATGATYFGIIESTKAWLEIANPNLSGHWSHFIAGAIGDTLGSFVYVPCEVMKQRMQIQGTQKSWASAVAKGNISQTHGIEMYGYYNGMFHAGCSIWRDHGLKGLYAGYWSTLARDVPFAGLMVTFYEAMKKMSEYGKTKYLPHSDLHVSNSFEGLVLGGLAGGCSAYLTTPLDVIKTRLQVQGSMSRYNGWLDAITKTWTSEGVRGLFKGSVPRIIWYVPASAFTFMAVEFLRDHFNDKVDADAHEVTSLSIDTKSEVEKSAXRSFSYDI

SEQ ID NO: 19264 - protein, 302 aa, Schizosaccharomyces pombe
MHEKGDKNLLAILVFSFTKDFLAGVSGGVAQVLVGQPFDCVKVRLQSQSNVSPIYNNALDCVKKISKNEGLAAFYKGTVLPLLGIGFCVSIQFTTFEYCKRFFSRDGTPVTMPQYYVSGAISGLANSFLVGPVEHVRIRLQIQTGKNVLYHGPWDCIKKISSQYGLSGIMKGYNPTAAREAHGLGMYFLAYEALVKNTMAKHHLTDRSQTPGWKLCVFGAGAGYAMWLAAYPFDIVKSKIQTDGFLSKATYKNSWQCAKGIYTKAGLRGFYRGFVPVLVRAAPANAVTFYVYETVSQHIRHL

SEQ ID NO: 19265 - protein, 320 aa, Schizosaccharomyces pombe
MSEKQTIKALPAHNPTQVKKLGPVSGFLSGGLAACGAVTLTNPFEVIKTRFQLQGQLTKLDPSKRIYKSVGQAFSLIARHEGIRGLQRGLGTAYVYQICLNGCRLGFYEPIRRTLNTWFLDDPKGNKLAINVASGAGSGLCGALFGSPFFLVKTRMQSYSPKFPVGQQYGYKHIFNAFSRIIKENGVKGLFVGADAAILRTVSGSSVQLPIYNWAKRMIEHYNLLEEGMIKHLTASAVSGFGVCCTMQIFDTVMTRMYNQKNKELYKNPIDCILKTIRSEGFFALYKGFGAHLARIAPHTIFCLTFVEQTNKLFLKFQKD

SEQ ID NO: 19266 - protein, 291 aa, Schizosaccharomyces pombe
MSTVAKTNPKSSNKPGPVKSIIAGGVAGAIEISITYPAEFAKTRLQLYRNVEGTKAKLPPFGLEWYRGCSTVIVGNSLKAAVRFFAFDSIKKSLSDEHGHLTGPRTVLAGLGAGVAESVLVLTPFESIKTAIIDDRKRPNPRLKGFLQASRIIVHENGIRGLYRGLAATVARQAANSGVRFTAYNSIKQSLQSRLPPDEKLSTVTTFLVGSVAGIITVYCTQPIDTVKSRMQSLSASKEYKNSIHCAYKILTQDGLLRFWSGATPRLARLILSGGIVFTVYEKVMEILKPF

SEQ ID NO: 19267 - protein, 305 aa, Pichia jadinii
MATEKKQSTFLIDFLMGGVSAAISKTAAAPIERVKLLIQNQDEMIKQGRLAKRYDGIADCFRRTAGDEGVVSFWRGNTANVIRYFPTQALNFAFKDKFKAMFGFKKEEGYWKWFAGNLASGGLAGGSLFGSVYSLDYARTRLANDAKSAKGTGERDSTGLLDVYKKTLASDGIAGLYRGFLPSVVGIVVYRGLYFGLYDSLKPVLLTGSLENNSWAAFLLGWVVTTGASTASYPLDTVRRRMMMTSGQAVKYDGAFDAFRKIVAAEGVKSLFKGCGANILRGVAGAGVISLYDQLQVILFGKKFK

SEQ ID NO: 19268 - protein, 305 aa, Pichia jadinii
MATEKKQSTFLIDFLMGGVSAAISKTAAAPIERVKLLIQNQDEMIKQGRLAKRYDGIADCFRRTAGEEGVVSFWRGNTANVIRYFPTQALNFAFKDKFKAMFGFKKEEGYWKWFAGNLASGGLAGGSLFGSVYSLDYARTRLANDAKSAKGTGERDSTGLLDVYKKTLASDGIAGLYRGFLPSVVGIVVYRGLYFGLYDSLKPVLLTGSLENNSWAAFLLGWVVTTGASTASYPLDTVRRRMMMTSGQAVKYDGAFDAFRKIVAAEGVKSLFKGCGANILRGVAGAGVISLYDQLQVILFGKKFK

SEQ ID NO: 19269 - protein, 307 aa, Saccharomyces cerevisiae
MSEEFPSPQLIDDLEEHPQHDNARVVKDLLAGTAGGIAQVLVGQPFDTTKVRLQTSSTPTTAMEVVRKLLANEGPRGFYKGTLTPLIGVGACVSLQFGVNQAMKRFFHHRNADMSSTLSLPQYYACGVTGGIVNSFLASPIEHVRIRLQTQTGSGTNAEFKGPLECIKKLRHNKALLRGLTPTILREGHGCGTYFLVYEALIANQMNKRRGLERKDIPAWKLCIFGALSGTALWLMVYPLDVIKSVMQTDNLQKPKFGNSISSVAKTLYANGGIGAFFKGFGPTMLRAAPANGATFATFELAMRLLG

SEQ ID NO: 19270 - protein, 307 aa, Saccharomyces cerevisiae
MSEEFPSPQLIDDLEEHPQHDNARVVKDLLAGTAGGIAQVLVGQPFDTTKVRLQTSSTPTTAMEVVRKLLANEGPRGFYKGTLTPLIGVGACVSLQFGVNEAMKRFFHHRNADMSSTLSLPQYYACGVTGGIVNSFLASPIEHVRIRLQTQTGSGTNAEFKGPLECIKKLRHNKALLRGLTPTILREGHGCGTYFLVYEALIANQMNKRRGLERKDIPAWKLCIFGALSGTALWLMVYPLDVIKSVMQTDNLQKPKFGNSISSVAKTLYANGGIGAFFKGFGPTMLRAAPANGATFATFELAMRLLG

SEQ ID NO: 19271 - protein, 329 aa, Saccharomyces cerevisiae
MSEEFPTPQLLDELEDQQKVTTPNEKRELSSNRVLKDIFAGTIGGIAQVLVGQPFDTTKVRLQTATTRTTTLEVLRNLVKNEGVFAFYKGALTPLLGVGICVSVQFGVNEAMKRFFQNYNASKNPNMSSQDVDLSRSNTLPLSQYYVCGLTGGVVNSFLASPIEQIRIRLQTQTSNGGDREFKGPWDCIKKLKAQGGLMRGLFPTMIRAGHGLGTYFLVYEALVAREIGTGLTRNEIPPWKLCLFGAFSGTMLWLTVYPLDVVKSIIQNDDLRKPKYKNSISYVAKTIYAKEGIRAFFKGFGPTMVRSAPVNGATFLTFELVMRFLGEE

SEQ ID NO: 19272 - protein, 292 aa, Saccharomyces cerevisiae
MEDSKKKGLIEGAILDIINGSIAGACGKVIEFPFDTVKVRLQTQASNVFPTTWSCIKFTYQNEGIARGFFQGIASPLVGACLENATLFVSYNQCSKFLEKHTNVFPLGQILISGGVAGSCASLVLTPVELVKCKLQVANLQVASAKTKHTKVLPTIKAIITERGLAGLWQGQSGTFIRESFGGVAWFATYEIVKKSLKDRHSLDDPKRDESKIWELLISGGSAGLAFNASIFPADTVKSVMQTEHISLTNAVKKIFGKFGLKGFYRGLGITLFRAVPANAAVFYIFETLSAL

SEQ ID NO: 19273 - protein, 327 aa, Saccharomyces cerevisiae
MSSDTSLSESSLLKEESGSLTKSRPPIKSNPVRENIKSFVAGGVGGVCAVFTGHPFDLIKVRCQNGQANSTVHAITNIIKEAKTQVKGTLFTNSVKGFYKGVIPPLLGVTPIFAVSFWGYDVGKKLVTFNNKQGGSNELTMGQMAAAGFISAIPTTLVTAPTERVKVVLQTSSKGSFIQAAKTIVKEGGIASLFKGSLATLARDGPGSALYFASYEISKNYLNSRQPRQDAGKDEPVNILNVCLAGGIAGMSMWLAVFPIDTIKTKLQASSTRQNMLSATKEIYLQRGGIKGFFPGLGPALLRSFPANAATFLGVEMTHSLFKKYGI

SEQ ID NO: 19274 - protein, 292 aa, Saccharomyces cerevisiae
MEDSKKKGLIEGAILDIINGSIAGACGKVIEFPFDTVKVRLQTQASNVFPTTWSCIKFTYQNEGIARGFFQGIASPLVGACLENATLFVSYNQCSKFLEKHTNVSPLGQILISGGVAGSCASLVLTPVELVKCKLQVANLQVASAKTKHTKVLPTIKAIITERGLAGLWQGQSGTFIRESFGGVAWFATYEIVKKSLKDRHSLDDPKRDESKIWELLISGGSAGLAFNASIFPADTVKSVMQTEHISLTNAVKKIFGKFGLKGFYRGLGITLFRAVPANAAVFYIFETLSAL

SEQ ID NO: 19275 - protein, 312 aa, Neurospora crassa
MAASAADVDSHDGQNAGLQTAKDLFSGAVGGIAQVLIGQPFDIVKVRLQTSTQYSSALTAAASIYKHEGALAFYKGTLTPLLGIGACVSIQFGAFHSARRFLEQRRAATDKSFIPGVSNLGYGEYYAAGAFAGVANSVISGPIEHVRIRLQAQPHGAGRLYSGPWDCVRKLSQQAGGVLPGLYRGEVVTVLREAQAYGLWFLAFEWLMNADAARNKIDRKEIPSYKIALYGGLAGEALWLGSYPLDVVKSKMQTDGFGAGQKYKSMRDCFAQTFRAEGMRGFWKGIGPTLLRAMPVSAGTFAVVEMTMRAIN

SEQ ID NO: 19276 - protein, 324 aa, Neurospora crassa
MGANLKEHQEQAPGPATAPVAVQKAAANYKGFVAGVFSGIAKLSVGHPFDTIKVRLQTSDATRFSGPLQCLTQTIRNEGILGLYKGASPPLVGWMFMDSVMLGSLTVYRRLLRDNLFNPPWHPLHDPAKPLPSHGHGLAGILAGMTVSFIAAPVEHVKARLQIQYAARKEERMYKGPIDCLKKVYTHHGIRGVYHGLGATILFRSFFFFWWGTYDVFSRWMKQYTQMSTPAINFWAGGLSAQVFWLTSYPSDVVKQRFMTDNLGGGLGDGVRRFPRWRDAAVAVYRENGAKGYWRGFLPCFLRAFPANAMALLVFEGVMRSLPG

SEQ ID NO: 19277 - protein, 342 aa, Neurospora crassa
MSSTTSSPGAKIQQAVTDKLPHLPETKEELKAEIKAEAKAAASAGASQLRSFVAGGFGGVCAVVVGHPFDLAKVRLQTAEKGVYTGAIDVVKKSIAKDGLRRGLYAGVSAPLVGVTPMFAVSFWGYDLGKQIVRATSTVAPDGNLSIAQISAAGFFSAIPMTAITAPFERVKVILQVQGQQKLAPGEKPKYSGGMDVVRQLYKEGGVRSVFRGSVATLARDGPGSAAYFAAYEYIKKALTPKDPVTGEASGKLSLGAITVAGAGAGVAMWIPVFPIDTVKSRLQTAEGNVTIGGVVKQLYRAGGYKAFFPGFAPALARAVPANAATFLGVELAHQAMNKAFN

SEQ ID NO: 19278 - protein, 363 aa, Neurospora crassa
MDSVPAQTHQGFKEAGAASASHLTTTTSLPTKVESRTAVMEALEDIVYGSAAGIVGKYIEYPFDTVKVRLQSQPDHLPLRYTGPLDCFRQSIRADGFLGLYRGISAPLVGAALENSSLFFFERIGRSLLYSSGFAPRDSELSLSALWFTGGFSGAFTSLILTPVELVKCKIQVPDEPGGAGARQRQLKPIPVIKEIFRHEGLRGFWHGQLGTLIREAGGCAAWFGSKETTSKWFRGRNERALLKRGASQEEVVASRERPLPLWQQAIAGASAGMSYNFLFFPADTVKSRMQTSPIGGGGDNGGKGAATMMPKKSFGEEARALWKQAGIKGFYRGCGITVLRSAPSSAFIFMVYDGLKKYFPMA

SEQ ID NO: 19279 - protein, 706 aa, Neurospora crassa
MSTAAVVKEAVKETLIGSDEHAAADQVQPTAQTKARFTHYAVQDSETGELFLGPDQFIDAVAPPHEDYHKIKREQYSILFSVADRANKGKVTLSDWTYFENLLEKPDAEYEIAFRLFDVERLGTVKYDDFRRLYELNKGPNSIPFDWDCEWAKLYIGSKTKRHNLDYQQFSQMLRGLQGERIRQAFQLFDKDGDGFIEPGDFERIIMETSKHKLSDHLLENLNTLCNISQGSKVSYANVRAFQNIIKEMDLVELIIRKACGKSQDGKITRTEFLNQAAKITRFSLFTPMEADILFHFASVGNPSGRLGLEDFAKVLDPSWRNRHEAEARLLPQAVQTKGQQFAHRAGESAYNFILGSLSGAFGAFMVYPIDLVKTRMQNQRGASPGSRLYDNSIDCFRKVIRNEGFRGLYSGVLPQLVGVAPEKAIKLTVNDLVRGAFTDKQGNISVIHEIIAGGTAGGCQVVFTNPLEIVKIRLQVQGEVAKSVEGAPKRSAMWIVRNLGLVGLYKGASACLLRDVPFSAIYFPTYSHLKKDLFGESKTKKLGVLQLLTAGAIAGMPAAYLTTPCDVIKTRLQVEARKGDTQYTGLRHAAKTIWKEEGFRAFFKGGPARIFRSSPQFGFTLAAYELLQSVLPYPGQKAEKMHAGVADAVSMVKDSVGGDSPYTRSRNALKILLDLDEHFGRVKLDANAAGWKALPTWMQTPPKTA

SEQ ID NO: 19280 - protein, 309 aa, Neurospora crassa
MSTTAGAFIAGGIAACGAVTATHPFETVKIRMQLQGELQSSTSSPHFYRGPIHGVSVIVRNEGLGGIYRGIGCAYIYQILLNGCRLGFYEPMRHALATTLFNDAKTQNLGINMFAGAASGIMGAMAGSPFFLAKTRLQSYSPFLPVGTQHQYKNAWDGLTKIYKGEGVKGLYRGVGAAMIRTGFGSSVQLPTYFFAKRRLVKHLGMEEGPALHLASSTASGFVVCVVMHPPDTIMSRLYNQNGNLYKGVFDCLAKTIRAEGFFAIYKGVIPHLTRILPHTILTLSLAEQTTKLVKKLEDKILGPETRVL

SEQ ID NO: 19281 - protein, 365 aa, Neurospora crassa
MSQQSNSQENSTSLKGSSKDGSNGGTSTSTSSLTNAGPSSDGQFWNSTQRLAKKYRTEVAASASSVLSTMSTFPLDSVKTRMQTYKYAGFVDCVKQTYHTERLRGFFRGVTAPMLSITAVRTVSFSIYQRSKYAYSDWVKRNFGFDVMSHVASHGSLPNFWTVATFGAAGATAGSCITLIACPFELTKLSAQVSVLMADKKNCLKPGSHAIAASYQNKGTLKTMGNIVKHRGLGGLYTGFGLHLTRDTLGTAMYFITYESSKQLLTTFGGAGTHNNPFAVLIAGGMCGIVSWALIYPVDSAKSIYQRNSLMYSKGEKVEPVKIRFFQRNMYRGLGVSMARSCAVNAVFFSSFEFLKKRIKAMEDH

SEQ ID NO: 19282 - protein, 331 aa, Neurospora crassa
MSSVKQSAQAATSDVVDTAKNATAETVTAATDFLHTPAVRAALPFINGGLSGMVATTVIQPIDMIKVRIQLAGEGKAGGPKPTPLGVTRDIIASGKAMDLYTGLSAGLLRQAVYTTARIGCFDTFMSRLSARAKEKGQSVGFKERASAGLAAGGLAAMIGNPADLALIRMQSDGLKPVAERKNYKSVIDALGGIARNEGVAALWAGAAPTVVRAMALNFGQLAFFSEAKAQLKARTQWSSKVQTLSASAIAGFFASFFSLPFDFVKTRLQKQTRGPDGKLPYNGMVDCFAKVAKQEGVFRFYRGFGTYYVRIAPHAMVTLLVADYLGWLTK

SEQ ID NO: 19283 - protein, 1796 aa, Neurospora crassa
MSSVKQSAQAATSDVVDTAKNATAETVTAATDFLHTPAVRAALPFINGGLSGMVATTVIQPIDMIKVRIQLAGEGKAGGPKPTPLGVTRDIIASGKAMDLYTGLSAGLLRQAVYTTARIGCFDTFMSRLSARAKEKGQSVGFKERASAGLAAGGLAAMIGNPADLALIRMQSDGLKPVAERKNYKSVIDALGGIARNEGVAALWAGAAPTVVRAMALNFGQLAFFSEAKAQLKARTQWSSKVQTLSASAIAGFFASFFSLPFDFVKTRLQKQTRGPDGKLPYNGMVDCFAKVAKQEGVFRFYRGFGTYYVRIAPHAMVTLLVADYLGWLTKQMFGVLGCVAYPSPIHPDYHAGPASTIAFDNQDELLWIGTQKGFAGSFIGRELKRFTAFRIHPETDGPLRQFLFVDKGVIFLGSRSVYMAARSGVPIWSIRHESMQDLRAMSFTSKGTSEILVAGWQNKMLVIDVNKGEVVKELPTQDQYSFLKMSRYICAATNKGTVNILDPITFTIKKQWQAHGAFINDLDTSNDFIVTCGGSHRQTHNTPAILDPYVKVFDLKNMSAMNPVPFAPLAAHVRMHPRMLTTAIVVNQAGQIHVTDLLNPSNSQVCYTQPQGVVLHFDVSRTGEGKALADNKHNTYVWGSPNKIQFTEIGIPPRLPDPPQPSLLPPDPDMLEELPLSRIGLPYYREQLFSALPPDIISDVGAPPQQIDPNILSTLTKTDWGYIGPNKTGLQRNQYMDTRSTMKTSNTIRAPKFLSEKARESQTGSEDNTLATNETAMMTPNNDHWSLRPEAPPEYRICEIKYSKFGVDDFDFGFFNNTPYPGLENNITNSYANSLLQVMHYTPLLRNMALQHAATACLADPCLLCELGYVFDMLQKGEGPSCHATNMLRALNHTSNASVSGVLEDIAKDKNPSTLVKNLTMFLFDKISQDYKGTPPISTELERTLFKLNQPPNPLDLVKRLLETDARYQIKCMHCQHVSPRTATTFVNKLCYPAAKPNIRGMKAQRITFSQVLKAGLENEAVNKGYCTKCQRYQNLDQRKIIFNIPAVLALCTEITTAEHRKLWSTPGWLPEEIGIIVDQGHVYCYEGDDLKLHLNRGIHNITVYSLVGTVVNVETKSPQKSHLVATVNVGRAEPESKDQDRWHLFNDFSVRGISKVEALTFNAAWKMPVVVMFQVKAANHRFNMDWKTRLDTSVLFRDNNPHALKTYELLDRETEIPGPDTVIAIDTEFIRLKEREIHIDEDGKSKTIRPISHAIARASVVRGQGSREGVAFIDDYIHIKETIVDYLTEWSGITPTDLDPINSQRNLVSPKTAYKKLWVLVNLGCKFLGHGLSQDFRVINIQVPRNQVIDTSIIFMKPPSQRKISLAFLAWYLLKEDIQQNTHDSIEDAQTALKLYRKYEEFMANGSFHDVLEALYKKGKTLNFKPPRISTGAAKDAGFGAVHRVGTPPVPAPGTTEGSFEISNSSTATTGGSALSATGGMGSASASSSMPSTPVRKPIGLGGPFTVAGVVKPSPATSLDNFGAGAVGTGITTAAATMGGGYGGYGTDGAYWGGPNDMAPTSMIGGSAFIPAKFPPGPPETRGFIPYRPQVLLAEREAAAAAAAAAAAAAANNDVGGRGGVACGNGGAGGEQGKQDEESDNDEMRRQQQELFAPEPYAPGFEQNLFEASRRDEGSPVVEYVSPPAVEEDDSSTIKEVSSPVVKEVASPTASLSSPAAVVGEEEEKQKDEDVPPAIEEAAADPSVTTGSSSTLAAEKQRKQEEEEGSSAVGGGGGGEEGKQEKQDDQGSTPALAP

SEQ ID NO: 19284 - protein, 310 aa, Neurospora crassa
MTQPNAIDEEDYDYESLPPNFSLIQNMAAGAFAGIAEHCAMYPIDAVKTRMQIVNSNPSAVYHGVIQSTYRIASTEGIFSLWRGMSSVIAGAGPAHAVYFATYEAVKHLMGGNKVGEHHFLAAATSGACATIASDALMNPFDVIKQRMQIQNSAKMYRSMLDCAKYVYRNEGLGAFYVSYPTTLSMTVPFTALQFLAYESISTSMNPTKKYDPATHCLAGAVAGGFAAALTTPMDVIKTMLQTRGAAQDAEVRAVNGFVAGCKLLYRREGVKGFFKGLKPRVLTTMPSTAICWSAYEASKAYFIHQNSQS

SEQ ID NO: 19285 - protein, 327 aa, Neurospora crassa
MATKVNQDPKKRTSAATNLIAGGGAGMMEALVCHPLDTIKVRMQLSKRGRVPGQAKRGFIRTGVEIVKKETALGLYKGLGAVLTGIVPKMAIRFTSFEWYKQLLADKQTGVVSGQATFFAGLAAGVTEAVAVVTPMEVIKIRLQAQHHSMADPLDVPKYRNAAHALYTVVKEEGFGALYRGVSLTALRQGSNQAVNFTAYSYFKKWLYDYQPEYVGQNLPSYQTTLIGLVSGAMGPLSNAPIDTIKTRLQKSVAQPGETAFQRITKISAEMFKQEGFHAFYKGITPRIMRVAPGQAVTFTVYEFLKQKLERSGPAALTGGSTAEAKL

SEQ ID NO: 19286 - protein, 334 aa, Podospora anserina
MSADFWAGYLSGAASIIIGNPLDVLKVRLQASSSSSSSSSSSSSSSSSSSSSSSSSSSSSSSSPSTTTTTTNPRILTTPRNLLLGTAAPILTYGALNALLFVSYNRSESYLNSLFPSPSQPGQQGGKGSNLTTTFLAGCLSGLATFLVSCPTEIIKVRSQTSSTSSWNVTTQILRQNGVKGLYQAGGVTVLRDSIGYGFYFWGYELSSGWYNSFFGTTTEETIGRALLCGGVAGVLTWASIFPLDVVKTRMQTRDTAGEQQGLLGSGGKGKGAWQTGREIYAREGIKPFFRGLGVCSLRAFVVNAVQFAVYEGAMARLTGRDEKVGVLQEGFAG

SEQ ID NO: 19287 - protein, 315 aa, Podospora anserina
MAQPNVVPEEDYDYEALPPNFSLLQNMAAGAFAGIAEHCAMYPIDAVKTRMQIVNPSAGSVYSGVFQSTYKMASTEGILSLWRGMSSVIVGAGPAHAVYFATYEAVKHVMGGNQAGVHHPLAAATSGACATIASDALMNPFDVIKQRMQIAESAKLYRSMTDCAKYVYKNEGIKAFYVSYPTTLSMTVPFTALQFLAYESISTSMNPTKAYDPFTHCVAGAVAGGFAAALTTPMDVIKTMLQTRGSAHDAELRTVNGFMAGCRLLFKREGAKGFFKGVQPRVLTTMPSTAICWSAYEASKAYFIRQNDSASESST

SEQ ID NO: 19288 - protein, 284 aa, Candida albicans
MDDVDSALADNVKSFAAGGFGGICAVLTGHPFDLVKVRLQTGLYNSSVQCVKQTIAKDGLTGLYRGVLPPLLGVTPMFAVSFWGYDVGKRLVSTYTGKSIDQFEIKEISTAGFISAIPTTLVAAPFERVKVMMQIQEGNKSKSMAGVVAEMYKTGGLRSIFKGSVATLARDGPGSALYFATYEYLKKELSSPGEDLSLFAIMTAGGFAGVSMWLGVFPIDTIKSTQQSSNVPISILQTTKNIYAKGGVKAFFPGVGPALARSFPANAATFLGVELARKALDSII

SEQ ID NO: 19289 - protein, 316 aa, Trichomonas vaginalis
MAQPAEQILIATSPKPSLSPVERLSVGFIAGTLSRTLTSPLDVVKMLMQVSSRGGSAKDTIAQLWKEQGIAGFWRGNWAACIRLGPQSAIKFYAYEELEKRIGKGKPLVGIQRTVFGSLSGVISQVLTYPLDVIRTRITVYSGKYTGIFNCAFTMLKEEGFTSLFAGIVPTVMGVIPYEGAQFYAYGGLKQLYTTKIAPGKPISPWANCLIGAAAGMFSQTFSYPFDVIRKRMMLKDEKGKPIYSGMMQAFSTVYAKEGVAGLYRGVGLNLIKVVPFAALQFTILEETRRAFFKVRAAIDQKKVEEIKGKVAPKKK

SEQ ID NO: 19290 - protein, 318 aa, Toxoplasma gondii
MAAPTVSAGGKEKKGNADSQLMNTAKDFLAGGISAGVSKTIVAPIERVKMLIQTQDSIPEIKEGKIPRYTGIVDCFRRVSAEQGVASLWRGNMANVIRYFPTQAFNFAFKDTFKRMFPRYDQKKEFWKFFCTNVASGGLAGASSLVIVYPLDFARTRLASDVGNGNEREFTGLVDCLGKIFRRTGFFSLYQGFGVSVQGIIVYRGAYFGLFDTAKAMLFGPNNDANLFYKWAVAQTVTAAAGVASYPFDTVRRRMMMMAGRKKGEQEIQYTGTADCWKKVYQQEGFKGFFKGAWANVLRGAGGALVLVFYDELKKMLM

SEQ ID NO: 19291 - protein, 307 aa, Oxytricha fallax
MEQDSNEKSLRNVFLNDLICGSFAGIVNVFMGHPLDSIKVRMQIDHRDKLGLRQIIKETYKNEGALAFYKGMCPPLFTVPIINSIVFASYEFCKRLMGIHAGQDYTFKQSLISGMFAGFVNSFVLSPIELVKCRLQVQREDKAHAYYRGPLHCVKRIIQEEGSRGLYKGLLSTISRETPCYAGQFGGYFLTKKSLAWLQKKDVHDLGHGSLFIAGGVGGFTCWLVSYPQDIIKTRLQVARSQEFANYSRYIRDGGMIECAKYIFKNEHGFMGFWRGFSACSARAVFANSFMFVAYEYAQKKARGIIE

SEQ ID NO: 19292 - protein, 183 aa, Oxytricha trifallax
MEQDSNEKSLRNVFLNDLICGSFAGIVNVFMGHPLDSIKVRMQIDHRDKLGLRQIIKETYKNEGALAFYKGMCPPLFTVPIINSIVFASYEFSKRLMGVHAGQDYTFKQSLISGMFAGFVNSFVLSPIELVKCRLQVQREDKAHAYYRGPLHCVKRIIKEEGSRGLYKGLLSTISRETPCYAG

SEQ ID NO: 19293 - protein, 360 aa, Caenorhabditis elegans
MSALLDLFAGSLGGAAGVLAGHPLDTVKVRLQTQSGPTPQYRGTFHCFKLIVQKEGFRGLYKGMSSPLLSLSAINAIVFGVHGGTCRQMEDPDSITSHFVGGCAAGMAQSVIAAPTERIKLLLQIQDDKAHTKFNGPIDATKQLLRTHGLKSLTRGFLATVARDAPAFGVYFASYEWMARSMCKDGETSTLSSGQLLFAGGTAGMLSWLFNYQTDIIKSRFQADNSYKSYMHCIKQTYLERGYRGFFVGLNSALIRAFPSNAATFFTVEWTYRILLDFNVIDNVTKEAEKICAESQLLPLTPTTQPPTRKEQEKTFVTTSQEKCKRLLTQTDFWATNNHFLLPEAGSTIVDPMLHGYRFF

SEQ ID NO: 19294 - protein, 310 aa, Caenorhabditis elegans
MSALLDLFAGSLGGAAGVLAGHPLDTVKVRLQTQSGPTPQYRGTFHCFKLIVQKEGFRGLYKGMSSPLLSLSAINAIVFGVHGGTCRQMEDPDSITSHFVGGCAAGMAQSVIAAPTERIKLLLQIQDDKAHTKFNGPIDATKQLLRTHGLKSLTRGFLATVARDAPAFGVYFASYEWMARSMCKDGETSTLSSGQLLFAGGTAGMLSWLFNYQTDIIKSRFQADNSYKSYMHCIKQTYLERGYRGFFVGLNSALIRAFPSNAATFFTVEWTYRILLDFNVIDNVTKEAEKICAESQLLPFEELTLSYLIL

SEQ ID NO: 19295 - protein, 312 aa, Caenorhabditis elegans
MSDVLLNFIAGGVGGSCTVIVGHPFDTVKVRIQTMPMPKPGEKPQFTGALDCVKRTVSKEGFFALYKGMAAPLVGVSPLFAVFFGGCAVGKWLQQTDPSQEMTFIQNANAGALAGVFTTIVMVPGERIKCLLQVQQAGSAGSGVHYDGPLDVVKKLYKQGGISSIYRGTGATLLRDIPASAAYLSVYEYLKKKFSGEGAQRTLSPGATLMAGGLAGIANWGVCIPADVLKSRLQTAPEGKYPDGIRGVLREVLREEGPRALFKGFWPVMLRAFPANAACFFGLELTLAAFRYFGIGGHPTPSTEVVPLPHDE

SEQ ID NO: 19296 - protein, 330 aa, Caenorhabditis elegans
MSDVLLNFIAGGVGGSCTVIVGHPFDTVKVRIQTMPMPKPGEKPQFTGALDCVKRTVSKEGFFALYKGMAAPLVGVSPLFAVFFGGCAVGKWLQQTDPSQEMTFIQNANAGALAGVFTTIVMVPGERIKCLLQVQQAGSAGSGVHYDGPLDVVKKLYKQGGISSIYRGTGATLLRDIPASAAYLSVYEYLKKKFSGEGAQRTLSPGATLMAGGLAGIANWGVCIPADVLKSRLQTAPEGKYPDGIRGVLREVLREEGPRALFKVIFFKRLGRCNYNLYKFQGFWPVMLRAFPANAACFFGLELTLAAFRYFGIGGHPTPSTEVVPLPHDE

SEQ ID NO: 19297 - protein, 301 aa, Caenorhabditis elegans
MHESGEPTTATGDASANHFKDGIIDLLAGTAGGIANVYAGQPLDTVKVKVQTFPNLYSNWIVCLKDTYKLDGIRGLYAGTLPALAANVAENAVLFTAYGYCQKTIATLNGLEDVRQMTPLENAFSGSLAAVFAATVLCPTELVKCKLQAAREMKKKCTPFSVCRDIMKDTGVRGFFVGMTPTLAREVPGYFFFFGAYETCRFLLTDEGQKKEEIGLVKTAMAGSVGGMALWTSIYPADVVKSRMQVTGGGTFMSTLGAVVKENGIRGLYKGLLPTNLRTCFASGCLFVAYEETRKFFHYVL

SEQ ID NO: 19298 - protein, 337 aa, Caenorhabditis elegans
MYADFIAGWAAEQLYFLLSITAKVIASYKNKVFERLRFLYDLKISILKKHLNINARYLFTVIPGGAGLLVGHPLDTVKARLQTMNIYKGIVDCMVKTMKQESVYGLYKGMFVPFISTGALHSLLFAGYGAGLKFLNPGDSNVMARKDLPMSDILIASICGTLVQVGPVIPVELLKTKLQVQRENIGHFSKHSRNLYAGPLECARETVRAEGVRGLFKGGSVVFCRDNIGYLFYIPVYEGLSRYFRSHNLENTWTQLFAGGCAGVSGWISVCPLEVVKNRIQADKSHKTLSPKEMTLKIYREDGLRAFYRGGWAISLRGFVVNAVIFVVYENTYSFFD

SEQ ID NO: 19299 - protein, 296 aa, Caenorhabditis elegans
MKIPDLTNYEHLIGGLCGGVTSTVVCHPFDLLKIRFSANEGSSLRPQYSSYADAVRKIVRVEGVRGLYQGWTPSLIGASLSWGLYFQWYNSLRTKIYENFSTGSKLANNLISGCISGSAIMCITNPIWLTKTRLCLQYENQQSKKYAGMMDCLKKTVKQEGFFGLYRGFVTGVIGTTHGAVQIAAYSWIIDKRCQSQGLPKDSFLSQTDYVIASSTSKVLATTITFPYQVLRTRMQDHNTDSRGVWKTTLKTIHNEGIGGLWKGCLIANVRQLPAAVVTFLTYENVKRLVGMTKQI

SEQ ID NO: 19300 - protein, 307 aa, Ascaris suum
MAEEKKSKKFVKDMKKFDAKKFFIDLATGGTAAAISKTAVAPIESVKILLQVQDAQKTIAAEKRYKGIVDVLVRVPSEQGLVALWSGNLANVISYFPTQALNFAFKDTFKDMFMKGIDKKTQFWKFFAGNLAAGGAAGAASMCFVYPLDFARTRLAADIGKGASREFKGLTDCIVKVFKSDGPIGLYSGFFVSVQGIIIYRAAYFGMFDTVKILFAADKKLNFFIAWAIAQVVTVSSGILSYPWDTVSSRMMMQSGRKDILYKNSADCAMKIISKEGFSALFKGALSTFPSAGGAVLAIYDEIQKYL

SEQ ID NO: 19301 - protein, 299 aa, Ethmostigmus rubripes
  unsure (1)..(299): unsure at all Xaa locations
MPIDAVSFLKDFIAGGVAAAISKTSVAPIERVKLLLQVQHASKQIAVDKQYKGMVDCFVRIPQEQGILSYWRGNLANVIRYFPTQALNFAFKDKYKQIFLGGVDKRTQFWRYFLGNLASGGAAGATSLCFVYPLXFARTRLAADIGKGLEQREFTGLGNCIAKIFKSDGLVGLYRGFGVSVQGIIIYRAAYFGTYDTAKGMLPDPKNTPIVISWLIAQTVTTCAGIISYPFDTVRRRMMMQSGRKKADILYKNTIDCWGKIYKTEGGAAFFKGAFSNILRGTGGAFVLVLYDEIKALIF

SEQ ID NO: 19302 - protein, 303 aa, Onchocerca volvulus
MSDTLCNPLPTCRWPVHLLAGSVAGLAEHCLMFPFDSVKTRLQSLCPCPETSCPTAMHSLMSMVKREGLLRSLKGVNAVVLGTIPAHAFYYTVYENSKAYLLNNPRVSNSVSYAISGALATVIHDAVMNPAEVVKQRMQMIFSPYGNSLECIRCIYIREGLRAFYRSYITQLTLNVPYQCTHFMIYEYMQNLLNPHHDYNPSSHLVSGGIAGGIAAAITTPLDCVKTVLNTQQTPRFNTTYRLLTQSEHTAYYKGLADGIKTIYYLRGTGGFFRGLQARIIFQIPSTALSWSAYELCKYMLSM

SEQ ID NO: 19303 - protein, 300 aa, Bombyx mori
MSNLADPVAFAKDFLAGGISAAVSKTAVAPIERVKLLLQVQHVSKQIAADQRYKGIVDAFVRIPKEQGLLSFWRGNFANVIRYFPTQALNFAFKDKYKQVFLGGVDKKTQFWRYFAGNLASGGAAGATSLCFVYPLDFARTRLAADVGKGDGQREFSGLGNCISKIFKSDGLIGLYRGFGVSVQGIIIYRASYFGFYDTARGMLPDPKNTPIVISWAIAQTVTTVAGIISYPFDTVRRRMMMQSGRAKSDILYKNTIHCWATIAKTEGTSAFFKGAFSNVLRGTGGAFVLVLYDEIKKVL

SEQ ID NO: 19304 - protein, 300 aa, Manduca sexta
MSNLTDPVAFAKDFLAGGISAAVSKTAVAPIERVKLLLQVQHVSKQIAEDQRYKGIVDAFVRIPKEQGFFSFWRGNLANVIRYFPTQALNFAFKDKYKQVFLGGVDKNTQFWRYFAGNLASGGAAGATSLCFVYPLDFARTRLAADVGKGEGQREFTGLGNCISKIFKSDGLIGLYRGFGVSVQGIIIYRASYFGFYDTARGMLPDPKNTPIVISWAIAQTVTTVAGIMSYPFDTVRRRMMMQSGRAKSDILYKNTLHCWATIARTEGTSAFFKGAFSNILRGTGGAFVLVLYDEIKKLL

SEQ ID NO: 19305 - protein, 201 aa, Drosophila grimshawi
MYSFSSLSNSANMAVKVENVESATTERKANPVKSFITGGFGGICNVLSGHPLDTIKVRLQTMPRPPPGEQPMYRGTFDCAAKTIRNEGVRGLYKGMSAPLTGVAPIFAMCFAGYALGKRLQQRGEDAKLTYSQIFVAGSFSGIFSTFIMAPGERIKVLLQTQGTGPGGVKKYNGMLDCAAKLYKEGGLRSVFKGSCATMLR

SEQ ID NO: 19306 - protein, 392 aa, Drosophila melanogaster
KLFQRIVDPYRKRGSEIGDIQLKATSETFSPKMVVDFVAGLLGGAAGVLVGHPFDTVKVHLQTDDPRNPKYKGTFHCFRTIVQRDKFIGLYRGISSPMGGIGLVNAIVFGVYGNVQRLSNDPNSLTSHFFAGSIAGVAQGFVCAPMELAKTRLQLSTQVDSGIKFTGPIHCLKYIVKTEGIRGAFKGLTATILRDIPGFASYFVSFEYLMRQVETPGVAYTLMAGGCAGMSSWLACYPIDVVKTHMQADALGANAKYNGFIDCAMKGFRNEGPQYFFRGLNSTLIRAFPMNAACFFVVSWVLDICNAKGGMDSVMHSDQPLTLVNLDNKSQADLEATAPTVEEVVRKIITDNAMSHQYVSTPKDVVHSHYTSSTINIPKESKARLASDCNLK

SEQ ID NO: 19307 - protein, 399 aa, Drosophila melanogaster
MYPITFIYRVNNDKDPYRKRGSEIGDIQLKATSETFSPKMVVDFVAGLLGGAAGVLVGHPFDTVKVHLQTDDPRNPKYKGTFHCFRTIVQRDKFIGLYRGISSPMGGIGLVNAIVFGVYGNVQRLSNDPNSLTSHFFAGSIAGVAQGFVCAPMELAKTRLQLSTQVDSGIKFTGPIHCLKYIVKTEGIRGAFKGLTATILRDIPGFASYFVSFEYLMRQVETPGVAYTLMAGGCAGMSSWLACYPIDVVKTHMQADALGANAKYNGFIDCAMKGFRNEGPQYFFRGLNSTLIRAFPMNAACFFVVSWVLDICNAKGGMDSVMHSDQPLTLVNLDNKSQADLEATAPTVEEVVRKIITDNAMSHQYVSTPKDVVHSHYTSSTINIPKESKARLASDCNLK

SEQ ID NO: 19308 - protein, 360 aa, Drosophila melanogaster
MVVDFVAGLLGGAAGVLVGHPFDTVKVHLQTDDPRNPKYKGTFHCFRTIVQRDKFIGLYRGISSPMGGIGLVNAIVFGVYGNVQRLSNDPNSLTSHFFAGSIAGVAQGFVCAPMELAKTRLQLSTQVDSGIKFTGPIHCLKYIVKTEGIRGAFKGLTATILRDIPGFASYFVSFEYLMRQVETPGVAYTLMAGGCAGMSSWLACYPIDVVKTHMQADALGANAKYNGFIDCAMKGFRNEGPQYFFRGLNSTLIRAFPMNAACFFVVSWVLDICNAKGGMDSVMHSDQPLTLVNLDNKSQADLEATAPTVEEVVRKIITDNAMSHQYVSTPKDVVHSHYTSSTINIPKESKARLASDCNLK

SEQ ID NO: 19309 - protein, 306 aa, Drosophila melanogaster
MTTTENVSTERKANPVKSFLTGGFGGICNVLSGHPLDTIKVRLQTMPRPAPGEQPLYRGTFDCAAKTIKNEGVRGLYKGMSAPLTGVAPIFAMCFAGYALGKRLQQRGEDAKLTYPQIFVAGSFSGLFSTLIMAPGERIKVLLQTQQGQGGERKYNGMIDCAGKLYKEGGLRSVFKGSCATMLRDLPANGLYFLVYEALQDVAKSKSETGQISTASTIFAGGVAGMAYWILGMPADVLKSRLQSAPEGTYKHGIRSVFKDLIVKDGPLALYRGVTPIMLRAFPANAACFFGIELANKFFNIVAPNF

SEQ ID NO: 19310 - protein, 306 aa, Drosophila melanogaster
MTTTENVSTERKANPVKSFLTGGFGGICNVLSGHPLDTIKVRLQTMPRPAPGEQPLYRGTFDCAAKTIKNEGVRGLYKGMSAPLTGVAPIFAMCFTGYALGKRLQQRGEDAKLTYPQIFVAGSFSGLFSTLIMAPGERIKVLLQTQQGQGGERKYNGMIDCAGKLYKEGGLRSVFKGSCATMLRDFAANGLYFLVYEALQDVAKSKSETGQISTASTIFAGGVAGMAYWILGMPADVLKSRLQSAPEGTYKHGIRSVFKDLIVKDGPLALYRGVTPIMLRAFPANAACFFGIELANKFFNIVAPNF

SEQ ID NO: 19311 - protein, 299 aa, Drosophila melanogaster
MEEVEISTEKKSNPVKSFIAGGVGGMCNVLVGHPLDTIKVRLQTMPTPPPGQPPRYKGVIDCAARTFRYEGFRGFYRGISAPLVGVTPIYAVDFAVYAAGKRLFQTDDHIRLTYPQIFAAGALAGVCSALVTVPTDRIKVLLQTQTVSNGPLLYNGTIDTAAKLYRQGGIRSLFKGTCACILRDSPTGFYFVTYEFLQELARKKSANGKISTTSTILSGGTAGIVFWTLAVPFDVLKSRLQSAPEGTYKHGIRSVFRNLMATEGPKALFRGILPILLRAFPSTAAVFFGVELTNDLLKA

SEQ ID NO: 19312 - protein, 305 aa, Drosophila melanogaster
MHGGGTGNNINFVEGLIDFLAGSLGGAAQVYVSQPLDTVKVKLQTFPEAYRGMLDCFLSTYRKDGVLRGLYAGSVPAVFANVAENSVLFAAYGGCQKFVAFCVGKETAGDLTTVQNACAGSLAACFSTLTLCPTELIKCKLQALREMKNFVEPAHPQDIRTPWTLTRYIWRTEGIRGFYRGLSSTFLREMPGYFFFFGSYEGTRELLRRDDQSKDDIGPLRTMIAGAIGGVCLWTSTFPADVIKSRIQVKNLNESMFAVGADIVRREGVLALYRGLLPSVLRTIPATATLFVVYEYTKRALSATL

SEQ ID NO: 19313 - protein, 459 aa, Drosophila melanogaster
MSECEQDTASAAAPTSNHNEDGDNEEAGSEAAEFVSLPPPLEPEPIKQRHPKSQPTDEAPPEPPPNEDEMPPPPPRIGSSQAGSSVLIMTPDEIIEAYERALQEGQEEDGETDGEKKKSGWLNRPISVKSTLRAVRDGLLFVVGGFLRFVRRLDMHGGGTGNNINFVEGLIDFLAGSLGGAAQVYVSQPLDTVKVKLQTFPEAYRGMLDCFLSTYRKDGVLRGLYAGSVPAVFANVAENSVLFAAYGGCQKFVAFCVGKETAGDLTTVQNACAGSLAACFSTLTLCPTELIKCKLQALREMKNFVEPAHPQDIRTPWTLTRYIWRTEGIRGFYRGLSSTFLREMPGYFFFFGSYEGTRELLRRDDQSKDDIGPLRTMIAGAIGGVCLWTSTFPADVIKSRIQVKNLNESMFAVGADIVRREGVLALYRGLLPSVLRTIPATATLFVVYEYTKRALSATL

SEQ ID NO: 19314 - protein, 303 aa, Drosophila melanogaster
MKWENYCDFVAGCFGGACGVLVAHPLDTIKVWQQASNSSVVTAIQQIYSRNNGVNGFYRGMFFPFISTGAINSLLFGIYGNHLRQLRKVCHSDYQREQLEYHNMFLAGSVAGFVQSFIACPMELIKVRLQTATYYSDYLYGQRRTAFGTFKRILKTDGISGLYRGLLPMMCRDVLPYGIYMLAYRQGVDYMDRRDFVRRRRSQSDGSSVNLLVTTLAGAWAGVISWVCVIPFDVVKTLMQADENHKYRGIFHCVRVQYRAYGWRSIFRGSWMLVARAVPFNAATFLGYEYALEWCQRWNGTYV

SEQ ID NO: 19315 - protein, 682 aa, Drosophila melanogaster
MPLTKSLPNSPSLLKRAGTEKLREVFLKYASIQKNGEHYMTSEDFVRKFLGLFSESAFNDESVRLLANIADTSKDGLISFSEFQAFEGLLCTPDALYRTAFQLFDRKGNGTVSYADFADVVQKTELHSKIPFSLDGPFIKRYFGDKKQRLINYAEFTQLLHDFHEEHAMEAFRSKDPAGTGFISPLDFQDIIVNVKRHLLTPGVRDNLVSVTEGHKVSFPYFIAFTSLLNNMELIKQVYLHATEGSRTDMITKDQILLAAQTMSQITPLEIDILFHLAGAVHQAGRIDYSDLSNIAPEHYTKHMTHRLAEIKAVESPADRSAFIQVLESSYRFTLGSFAGAVAPTVVYPIDLVKTRMQNQRAGSYIGEVAYRNSWDCFKKVVRHEGFMGLYRGLLPQLMGVAPEKAIKLTVNDLVRDKLTDKKGNIPTWAEVLAGGCAGASQVVFTNPLEIVKIRLQVAGEIASGSKIRAWSVVRELGLFGLYKGARACLLRDVPFSAIYFPTYAHTKAMMADKDGYNHPLTLLAAGAIAGVPAASLVTPADAIKTRLQVVARSGQTTYTGVWDATKKIMAEEGPRAFWKGTAARVFRSSPQFGVTLVTYELLQRLFYVDFGGTQPKGSEAHKITTPLEQAAASVTTENLDHIGGYRAAVPLLAGVESKFGLYLPRFGRGVTAASPSTATGS

SEQ ID NO: 19316 - protein, 695 aa, Drosophila melanogaster
MPMHIPFPFNWIPTLPVARCQESPSLLKRAGTEKLREVFLKYASIQKNGEHYMTSEDFVRKFLGLFSESAFNDESVRLLANIADTSKDGLISFSEFQAFEGLLCTPDALYRTAFQLFDRKGNGTVSYADFADVVQKTELHSKIPFSLDGPFIKRYFGDKKQRLINYAEFTQLLHDFHEEHAMEAFRSKDPAGTGFISPLDFQDIIVNVKRHLLTPGVRDNLVSVTEGHKVSFPYFIAFTSLLNNMELIKQVYLHATEGSRTDMITKDQILLAAQTMSQITPLEIDILFHLAGAVHQAGRIDYSDLSNIAPEHYTKHMTHRLAEIKAVESPADRSAFIQVLESSYRFTLGSFAGAVGATVVYPIDLVKTRMQNQRAGSYIGEVAYRNSWDCFKKVVRHEGFMGLYRGLLPQLMGVAPEKAIKLTVNDLVRDKLTDKKGNIPTWAEVLAGGCAGASQVVFTNPLEIVKIRLQVAGEIASGSKIRAWSVVRELGLFGLYKGARACLLRDVPFSAIYFPTYAHTKAMMADKDGYNHPLTLLAAGAIAGVPAASLVTPADVIKTRLQVVARSGQTTYTGVWDATKKIMAEEGPRAFWKGTAARVFRSSPQFGVTLVTYELLQRLFYVDFGGTQPKGSEAHKITTPLEQAAASVTTENVDHIGGYRAAVPLLAGVESKFGLYLPRFGRGVTAASPSTATGS

SEQ ID NO: 19317 - protein, 643 aa, Drosophila melanogaster
MTSEDFVRKFLGLFSESAFNDESVRLLANIADTSKDGLISFSEFQAFEGLLCTPDALYRTAFQLFDRKGNGTVSYADFADVVQKTELHSKIPFSLDGPFIKRYFGDKKQRLINYAEFTQLLHDFHEEHAMEAFRSKDPAGTGFISPLDFQDIIVNVKRHLLTPGVRDNLVSVTEGHKVSFPYFIAFTSLLNNMELIKQVYLHATEGSRTDMITKDQILLAAQTMSQITPLEIDILFHLAGAVHQAGRIDYSDLSNIAPEHYTKHMTHRLAEIKAVESPADRSAFIQVLESSYRFTLGSFAGAVGATVVYPIDLVKTRMQNQRAGSYIGEVAYRNSWDCFKKVVRHEGFMGLYRGLLPQLMGVAPEKAIKLTVNDLVRDKLTDKKGNIPTWAEVLAGGCAGASQVVFTNPLEIVKIRLQVAGEIASGSKIRAWSVVRELGLFGLYKGARACLLRDVPFSAIYFPTYAHTKAMMADKDGYNHPLTLLAAGAIAGVPAASLVTPADVIKTRLQVVARSGQTTYTGVWDATKKIMAEEGPRAFWKGTAARVFRSSPQFGVTLVTYELLQRLFYVDFGGTQPKGSEAHKITTPLEQAAASVTTENVDHIGGYRAAVPLLAGVESKFGLYLPRFGRGVTAASPSTATGS

SEQ ID NO: 19318 - protein, 682 aa, Drosophila melanogaster
MPLTKSLPNSPSLLKRAGTEKLREVFLKYASIQKNGEHYMTSEDFVRKFLGLFSESAFNDESVRLLANIADTSKDGLISFSEFQAFEGLLCTPDALYRTAFQLFDRKGNGTVSYADFADVVQKTELHSKIPFSLDGPFIKRYFGDKKQRLINYAEFTQLLHDFHEEHAMEAFRSKDPAGTGFISPLDFQDIIVNVKRHLLTPGVRDNLVSVTEGHKVSFPYFIAFTSLLNNMELIKQVYLHATEGSRTDMITKDQILLAAQTMSQITPLEIDILFHLAGAVHQAGRIDYSDLSNIAPEHYTKHMTHRLAEIKAVESPADRSAFIQVLESSYRFTLGSFAGAVGATVVYPIDLVKTRMQNQRAGSYIGEVAYRNSWDCFKKVVRHEGFMGLYRGLLPQLMGVAPEKAIKLTVNDLVRDKLTDKKGNIPTWAEVLAGGCAGASQVVFTNPLEIVKIRLQVAGEIASGSKIRAWSVVRELGLFGLYKGARACLLRDVPFSAIYFPTYAHTKAMMADKDGYNHPLTLLAAGAIAGVPAASLVTPADVIKTRLQVVARSGQTTYTGVWDATKKIMAEEGPRAFWKGTAARVFRSSPQFGVTLVTYELLQRLFYVDFGGTQPKGSEAHKITTPLEQAAASVTTENVDHIGGYRAAVPLLAGVESKFGLYLPRFGRGVTAASPSTATGS

SEQ ID NO: 19319 - protein, 311 aa, Drosophila melanogaster
MALVYGVEKKTVPTHMKFVMGGTSGMLATCIVQPLDLLKTRMQISGTLGTREYKNSFEVLSKVLKNEGILSLYNGLSAGLLRQATYTSAKMGVYQMELDWYRKNFGNYPSMVASMTMGIVAGAFGAMCGNPAEVALIRMMSDNRLIPEDRRNYKNVGDAFVRIVKDEGVVALWRGCLPTVGRAMVVNMVQLASYSLMKNQLHGYLSEGIPLHLTAALVSGLLTSVTSMPLDMAKTRIQQMKVIDGKPEYSGTIDVLKKVLKNEGAFAVWKGFTPYLMRMGPHTIFSFVFLEQMNKAYSKHMLSDSLSDSVP

SEQ ID NO: 19320 - protein, 311 aa, Drosophila melanogaster
MALVYGVEKKTVPTHMKFVMGGTSGMLATCIVQPLDLLKTRMQISGTLGTREYKNSFEVLSKVLKNEGILSLYNGLSAGLLRQATYTSAKMGVYQMELDWYRKNFGNYPSMVASMTMGIVAGAFGAMCGNPAEVALIRMMSDNRLMPEDRRNYKNVGDAFVRIVKDEGVVALWRGCLPTVGRAMVVNMVQLASYSLMKNQLHGYLSEGIPLHLTAALVSGLLTSVTSMPLDMAKTRIQQMKVIDGKPEYSGTIDVLKKVLKNEGAFAVWKGFTPYLMRMGPHTIFSFVFLEQMNKAYSKHMLSDSLSDSVP

SEQ ID NO: 19321 - protein, 317 aa, Drosophila melanogaster
MSATSVQEAPKKAVATNAIKFLFGGLSGMGATMVVQPLDLVKTRMQISGAGSGKKEYRSSLHCIQTIVSKEGPLALYQGIGAALLRQATYTTGRLGMYTYLNDLFREKFQRSPGITDSMAMGTIAGACGAFIGTPAEVALVRMTSDGRLPVAERRNYTNVANALARITREEGLTALWRGSLPTVGRAMVVNMTQLASYSQFKTYFRHGPLQMEEGIKLHFCASMLSGLLTTITSMPLDIAKTRIQNMKMVDGKPEYRGTADVLLRVARQEGVFALWKGFTPYYCRLGPHTVLTFIILEQLNQGYNKYVLGSNKSTGL

SEQ ID NO: 19322 - protein, 304 aa, Drosophila melanogaster
MNPIKAQSTGSPKKFNVFAHVKYEHLVAGVSGGVVSTLILHPLDLIKIRFAVNDGRTATVPQYRGLSSAFTTIFRQEGFRGLYKGVTPNVWGSGSSWGLYFMFYNTIKTFIQGGNTTMPLGPTMNMLAAAESGILTLLLTNPIWVVKTRLCLQCDAASSAEYRGMIHALGQIYKEEGIRGLYRGFVPGMLGVSHGAIQFMTYEELKNAYNEYRKLPIDTKLATTEYLAFAAVSKLIAAAATYPYQVVRARLQDHHHRYNGTWDCIKQTWRYERMRGFYKGLVPYLVHVTPNICMVMLIWEKLTS

SEQ ID NO: 19323 - protein, 360 aa, Drosophila melanogaster
MNPIKAQSTGSPKKFNVFAHVKYEHLVAGVSGGVVSTLILHPLDLIKIRFAVNDGRTATVPQYRGLSSAFTTIFRQEGFRGLYKGVTPNVWGSGSSWGLYFMFYNTIKTFIQGGNTTMPLGPTMNMLAAAESGILTLLLTNPIWVVKTRLCLQCDAASSAEYRGMIHALGQIYKEEGIRGLYRGFVPGMLGVSHGAIQFMTYEELKNAYNEYRKLPIDTKLATTEYLAFAAVSKLIAAAATYPYQVVRARLQDHHHRYNGTWDCIKQTWRYERMRGFYKGLVPYLVHVTPNICMPASFHLSKGSWQLEFEGYRGFYKGLKASLTRVVPACMVTFLVYENVSHFLLARRKRIETKEDASDV

SEQ ID NO: 19324 - protein, 319 aa, Drosophila melanogaster
MLEQVEQKNQEQKKPQKFNVFPKIINGGVAGIIGVACVYPLDMVKTRLQNQTIGPNGERMYTSIADCFRKTIASEGYFGMYRGSAVNIVLITPEKAIKLTANDFFRYHLASDDGVIPLSRATLAGGLAGLFQIVVTTPMELLKIQMQDAGRVAAADRAAGREVKTITALGLTKTLLRERGIFGLYKGVGATGVRDITFSMVYFPLMAWINDQGPRKSDGSGEAVFYWSLIAGLLSGMTSAFMVTPFDVVKTRLQADGEKKFKGIMDCVNRTLKEEGISAFFKGGLCRIMVLAPLFGIAQMFYFLGVGEKILGIERTKSV

SEQ ID NO: 19325 - protein, 303 aa, Drosophila melanogaster
MATSDFVLGGLASVGATFFTNPIEVIKTRIQLQGELAARGTYVEPYKGIVNAFITVAKNDGITGLQKGLAPALYFQFIINSFRLSIYSEAMERRWMHNRKGEVSYGMGLLWGAIGGVVGCYFSSPFFLIKTQLQSQAAKQIAVGYQHAHTSMTDALRQIYSRNGVRGLWRGSVAALPRAALGSGAQIATFGKTKALLVQYDLVTQPTLNSFSAGLIAGSIMSVAITPPDVITTRLYNQGVDAEGRGLLYRGWLDCFVKILRSEGVYGMYKGFWANYLRIAPHSTLVLLFFDELVAVRTKYSNQ

SEQ ID NO: 19326 - protein, 301 aa, Drosophila melanogaster
MAYSIEKKSIPGYMMYINGGLAGMLGTCIVQPLDLVKTRMQISATTGEYKSSFDCLLKVFKNEGILALYNGLSAGLMRQATYTTARMGFYQMEIDAYRKQFNAPPTVLASMGMGILAGAFGAMFGNPAEVALIRMMSDNRLPPAERRNYTGVLNAFVRIVKDEGVITLWKGCMPTVGRAMIVNMVQLASYSQLKAAFSEYFSGLSLHIAAAMMSGLLTTIASMPLDMAKTRIQQQKTAEYKGTMDVLMKVSKNEGIASLWKGFTPYLCRLGPHTVFAFIFLEQLTKAYKHIVLGDDSESNI

SEQ ID NO: 19327 - protein, 340 aa, Drosophila melanogaster
MAAKTDESSPAVASSTSSNPAPSSGRHQLRPVKFDYADSFACTYIVSVVAASIAELATYPLDLTKTRLQIQGEGAAHSAGKSNMQYRGMVATAFGIAREEGALKLWQGVTPALYRHVVYSGVRICSYDLMRKEFTQNGTQALPVWKSALCGVTAGAVAQWLASPADLVKVQIQMEGRRRLMGEPPRVHSAGHAFRQIVQRGGIKGLWKGSIPNVQRAALVNLGDLTTYDTIKHLIMNRLQMPDCHTVHVLASVCAGFVAAIMGTPADVVKTRIMNQPTDENGRGLLYRGSVDCLRQTVSKEGFVALYKGFLPCWIRMAPWSLTFWLSFEQIRKMIGASGY

SEQ ID NO: 19328 - protein, 238 aa, Drosophila miranda
ERVKLLLQVQHISKQISPDKQYKGMVDCFIRIPKEQGFSSFWRGNLANVIRYFPTQALNFAFKDKYKQVFLGGVDKNTQFWRYFMGNLASGGAAGATSLCFVYPLDFARTRLAADTGKGGQREFTGLGNCLTKIFKSDGLVGLYRGFGVSVQGIIIYRAAYFGFYDTARGMLPDPKNTPIYISWAIAQAVTTVAGIVSYPFDTVRRRMMMQSGRKATEIIYKNTLHCWGTIAKQEGTG

SEQ ID NO: 19329 - protein, 288 aa, Drosophila pseudoobscura
MGKDFDAIGFVKDFAAGGISAAVSKTAVAPIERVKLLLQVQHISKQISPDKQYKGMVDCFIRIPKEQGFSSFWRGNLANVIRYFPTQALNFAFKDKYKQVFLGGVDKNTQFWRYFMGNLASGGAAGATSLCFVYPLDFARTRLAADTGKGGQREFTGLGNCLTKIFKSDGLVGLYRGFGVSVQGIIIYRAAYFGFYDTARMLPDPKNTPIYISWAIAQAVTTVAGIVSYPFDTVRRRMMMQSGRKATEIIYKNTLHCWATIAKQEGSAFFKGAFSNVLRGTGGAFVLV

SEQ ID NO: 19330 - protein, 288 aa, Drosophila subobscura
MGKDFDAMGFVKDFAAGGISAAVSKTAVAPIERVKLLLQVQHISKQISPDKQYKGMVDCFIRIPKEQGFSSFWRGNLANVIRYFPTQALNFAFKDKYKQVFLGGVDKNTQFWRYFMGNLASGGAAGATSLCFVYPLDFARTRLAADTGKGGQREFTGLGNCLTKIFKSDGLVGLYRGFGVSVQGIIIYRAAYFGFYDTARMLPDPKNTPIYISWAIAQCVTTVAGIVSYPFDTVRRRMMMQSGRKATEIIYKNTIHCWGTIAKQEGTAFFKGAFSNVLRGTGGAFVLV

SEQ ID NO: 19331 - protein, 300 aa, Lucilia cuprina
MGKEAADPLGFVKDFAAGGISAAVSKTAVAPIERVKLLLQVQHISKQISPDKQYKGMIDCFVRIPKEQGFASYWRGNMANVIRYFPTQALNFAFKDKYKQVFLGGVDKNTQFWRYFLGNLASGGAAGATSLCFVYPLDFARTRLAADTGKGGQREFTGLGNCLAKIFKSDGLVGLYRGFGVSVQGIIIYRAAYFGFYDTARGMLPDPKNTPIYISWAIAQVVTTVAGIVSYPFDTVRRRMMMQSGRKATEIIYKNTLHCWATIAKQEGTGAFFKGAFSNVLRGTGGAFVLVLYDEIKKFL

SEQ ID NO: 19332 - protein, 304 aa, Halocynthia roretzi
MPWSAVDFAKDLAIGGTAAAISKTIVAPIERVKLLLQVQAVSTQMKAGTEYKGIIDAFVRIPKEQGFFSLWRGNLANVIRYFPTQALNFAFKDTYKKIFLAGVDKRKQFWRYFHGNLASGGAAGATGLCFVYPLDFARTRLAADIGSGGSRQFTGLGNCLATIVKKDGPRGLYQGFVVSIQGIIVYRAAYFGTYDTVKGMLPDPQNTPIIVSWAIAQVVTTGAGIISYPFDTVRRRMMMQSGRNKEDRMYKGTVDCWGKIYKNEGGKAFFKGALSNVIRGTGGALVLVLYDELKKLVFGTSVHN

SEQ ID NO: 19333 - protein, 289 aa, Ribes nigrum
MIAGSIAGSIEHMAMYPVDTLKTRIQAIGSCSAQSAGLRQALGSILKVEGPAGLYRGIGAMGLGAGPAHAVYFSVYEMCKETFSHGDPSNSGAHAVSGVFATVASDAVITPMDVVKQRLQLQSSPYKGVVDCVRRVLVEEGIGAFYASYRTTVVMNAPFTAVHFATYEATKKGLLEVSPETANDENLLVHATAGAAAGALAAVVTTPLDVVKTQLQCQGVCGCDRFSSSSIQDVIGSIVKKNGYVGLMRGWIPRMLFHAPAAAICWSTYEASKTFFQKLNESNSNSSVT

SEQ ID NO: 19334 - protein, 324 aa, Danio rerio
MTATISRQRHAAVAADSSGSSFSITANLLQLSKHIKYENLAAGLAGGVISTMVLHPLDLIKIRFAVSDGLKMRPQYDGMLDCMKTIWKLEGIRGLYQGVTPNIWGAGSSWGLYFLFYNAIKAYTQEGRQTELSACEHLVSAAEAGILTLCLTNPVWVTKTRLVLQYNADPSRKQYKGMMDALVKIYRHEGIPGLYRGFVPGLVGTSHAALQFMTYEGLKREQNKCKKMPSESLLSPLEYIAIAAISKIFAVAVTYPYQVVRARLQDQHNNYSGIVDVMRRTWSNEGVEGFYKGMVPNLVRVIPACCITFLVFENVSRLLLGEYH

SEQ ID NO: 19335 - protein, 310 aa, Cyprinus carpio
MVGFRAGDVPPTATVKFIGAGTAACIADLFTFPLDTAKVRLQIQGESKIPVNTGHGPVKYRGVFGTISTMVRVEGPRSLYSGLVAGLQRQMSFASVRIGLYDSVKQFYTKGSEHVGIGSRLMAGCTTGAMAVALAQPTDVVKVRFQAQNSAGANKRYHGTMDAYRTIAKEEGFRGLWKGTGPNITRNAIVNCTELVTYDLIKDALLKSSLMTDDLPCHFTSAFGAGFCTTVIASPVDVVKTRYMNSAPGQYCSALNCAVAMLTKEGPKAFYKGFMPSFLRLGSWNVVMFVTYEQLKRAMMAARHNWATPL

SEQ ID NO: 19336 - protein, 301 aa, Xenopus laevis
MAKQPQPISPMKNFFAGGFGGVCLVFAGHPLDTIKVRIQTQPKPTPGITPLYSGTFDCFKKTLVNEGIRGLYKGMAAPIIGVTPMFAVCFFGFGLGKKLQQKHPEDILTYPQLFAAGMLSGVFTTAIMAPGERIKCLLQIQAASGEVKYAGPMDCAKQLYREAGIRGIYKGTVLTLMRDVPASGMYFMTYEWLKNVLTPEGHSVSELSVPKILFAGGMAGIFNWAVAIPPDVLKSRFQTAPAGKYPNGFRDVLRELIREEGIGSLYKGFTAVMLRAFPANAACFLGFEVAMKFLNWMAPNL

SEQ ID NO: 19337 - protein, 307 aa, Xenopus laevis
MVGFKPTDVPPTAAVKFIGAGTAACIADLFTFPLDTAKVRLQIQGESKAVHMKTASYKGVFGTISTMVKMEGPKSLYNGLAAGLQRQMSFASVRIGLYDSVKQFYTKGSEHAGIGSRLAAGCTTGAMAVAVAQPTDVVKVRFQAQANSSANRRYKGTMDAYRTIAREEGMRGLWKGTVPNITRNAIVNCTELVTYDLIKDSILKANIMTDNLPCHFTSAFGAGFCTTVIASPVDVVKTRYMNSAKGQYTSALNCALTMFRKEGPRAFYKGFMPSFLRLGSWNVVMFVTYEQLKRAMMSAQRSREAPF

SEQ ID NO: 19338 - protein, 307 aa, Dicrostonyx groenlandicus
MVSLTTSEVHPTMGVKTFSAGISACLADIITFPLDTAKVRLQIQGEGQTSSTIRYKGVLGTITTLAKTEGWPKLYSGLPAGIQRQISFASLRIGLYDTVQEYFSSGKETPPTLGNRISAGLMTGGVAVFIGQPTEVVKVRLQAQSHLHGIKPRYTGTYNAYRIIATTESFSTLWKGTTPNLMRNVIINRTELVTYDLMKGALVNNQILADDVPCHLLSALVAGFCTTFLASPADVVKTRFINSLPGQYPSVPSCAMTMLTKEGPTAFFKGFVPSFLRLASWNVIMFVCFEQLKKELMKSRQTMDCTT

SEQ ID NO: 19339 - protein, 307 aa, Meleagris gallopavo
MVGLKPPEVPPTAAVKFFSAGTAACIADLCTFPLDTAKVRLQIQGEVRIPRSTNTVEYRGVLGTLSTMVRTEGPRSLYSGLVAGLQRQMSFASIRIGLYDSVKQLYTPKGAESTGLLARLLAGCTTGAVAVTCAQPTDVVKVRFQALGALPESNRRYSGTVDAYRTIAREEGVRGLWRGTLPNIARNAIINCGELVTYDLIKDTLLRAQLMTDNVPCHFVAAFGAGFCATVVASPVDVVKTRYMNASPGQYRNVPSCLLALLMQDGISGLYKGFVPSFLRLGSWNVVMFISYEQLQRVVMLARSAPP

SEQ ID NO: 19340 - protein, 301 aa, Macaca fascicularis
MADQPKPISPLKNLLAGGFGGVCLVFVGHPLDTVKVRLQTQPPSLPGQPPMYSGTFDCFRKTLFREGIRGLYRGMAAPIIGVTPMFAVCFFGFGLGKKLQQKHPEDVLSYPQLFAAGMLSGIFTTGIMTPGERIKCLLQIQASSGETKYTGTLDCAKKLYQEFGIRGIYKGTVVTLMRDVPASGMYFMTYEWVKNIFTPEGKRVSELSVPRVLVAGGIAGIFNWAVAIPPDVLKSRFQTAPPGKYPNGFRDVLRELIPDEGVTSLYKGFNAVMIRAFPANAACFLGFEVAMKFLNWATPNL

SEQ ID NO: 19341 - protein, 674 aa, Macaca fascicularis
MAAAKVALTKRADPAELRTIFLKYASIEKNGEFFTSPNDFVTRYLNIFGESQPNPKTVELLSGVADQTKDGLISFQEFVAFESVLCAPDALFMVAFQLFDKAGKGEVTFEDVKQVFGQTTIHQHIPFNWDSEFVQLHFGKERKRHLTYAEFTQFLLEIQLEHAKQAFVQRDNASTGRVTAIDFRDIMVTIRPHVLTPFVEECLVAAAGGTTSHQVSFSYFNGFNSLLNNMELTRKIYSTLAGNRKDVEVTKEEFVLAAQKFGQVTPMEVDILFRLADLYEPRGRMTLADIERIAPLEEGTLPFNLAEAQRQKASGDSARPVLLQVAESAYRFGLGSVAGAVGATAVYPIDLVKTRMQNQRSTGSFVGELMYKNSFDCFKKVLRYEGFFGLYRGLLPQLLGVAPEKAIKLTVNDFVRDKFMHKDGSVPLAAEILAGGCAGGSQVIFTNPLEIVKIRLQVAGEITTGPRVSALSVVRDLGFFGIYKGAKACFLRDIPFSAIYFPCYAHARASFANEDGQVSPGSLLLAGAIAGMPAASLVTPADVIKTRLQVAARAGQTTYSGVIDCFKKILREEGPKALWKGAARVFRSSPQFGVTLLTYELLQRWFYIDFGGVKPMGSEPVPKSRINLPAPNPDHVGGYKLAVATFAGIENKFGLYLPLFKPSVPTSEAIGGGP

SEQ ID NO: 19342 - protein, 315 aa, Macaca fascicularis
MTGQGHSASGSSAWSTVFRHVRYENLVAGVSGGVLSNLALHPLDPVKIRFAVSDGLELRPKYNGILHCLTTIWKLDGLRGLYQGVTPNVWGAGLSWGLYFFFYNAIKSYKTEGRAERLEATEYLVSAAEAGAMTLCITNPLWVTKTRLMLQYDAVINSPHRQYKGMFDTLVKIYKYEGVRGLYKGFVPGLFGTSRGALQFMAYELLKLKYNQHINRLPEAQLSTVEYISVAALSKIFAVAATYPYQVVRARLQDQHMFYSGVIDVITKTWRKEGIGGFYKGIAPNLIRVTPACCITFVVYENVSHFLLDLREKRK

SEQ ID NO: 19343 - protein, 315 aa, Macaca fascicularis
MTGQGHSASGSSAWSTVFRHVRYENLVAGVSGGVLSNLALHPLDLVKIRFAVSDGLELRPKYNGILHCLTTIWKLDGLRGLYQGVTPNVWGAGLSWGLYFFFYNAIKSYKTEGRAERLEATEYLVSAAEAGAMTLCITNPLWVTKTRLMLQYDAVINSPHRQYKGMFDTLVKIYKYEGVRGLYKGFVPGLFGTSHGALQFMAYELLKLKYNQHINRLPEAQLSTVEYISVAALSKIFAVAATYPYQVVRARLQDQHMFYSGVIDVITKTWRKEGIGGFYKGIAPNLIRVTPACCITFVVYENVSHFLLDLREKRK

SEQ ID NO: 19344 - protein, 193 aa, Macaca mulatta
GVKFLGAGTAACFADLLTFPLDTAKVRLQIQGENPVAQTARLVQYRGVLGTILTMVRTEGLCSPYNGLVAGLQRQMSFASIRIGLYDSVKQVYTPQGADSSSLTTRILAGCTTGAMAVTCAQPTDVVKVRFQASIHLGSSGSDRKYSGTMDAYRTIAREEGVRGLWKGTLPNIMRNAIVNCAEVVTYDILKEK

SEQ ID NO: 19345 - protein, 154 aa, Macaca mulatta
FKATDVPPTATVKFLGAGTAACIADLITFPLDTAKVRLQIQGESQGPVRATAGAQYRGVLGTILTMVRTEGPRSLYNGLVAGLQRQMSFASVRIGLYDSVKQFYTKGSEHASIGSRLLAGSTTGALAVAVAQPTDVVKVRFQAQARAGGRRYQS

SEQ ID NO: 19346 - protein, 400 aa, Homo sapiens
PHPGPAGRHEGRGARPEVRDRGPEGIQRVSCRRGTSAGLAAAAIPTIPDRACPGSAPGGAARPSPGTARSGTPTAPSPARGLRGRTRRKGGLAGDPAMALDFLAGCAGGVAGVLVGHPFDTVKVRLQVQSVEKPQYRGTLHCFKSIIKQESVLGLYKGLGSPLMGLTFINALVFGVQGNTLRALGHDSPLNQFLAGAAAGAIQCVICCPMELAKTRLQLQDAGPARTYKGSLDCLAQIYGHEGLRGVNRGMVSTLLRETPSFGVYFLTYDALTRALGCEPGDRLLVPKLLLAGGTSGIVSWLSTYPVDVVKSRLQADGLRGAPRYRGILDCVHQSYRAEGWRVFTRGLASTLLRAFPVNAATFATVTVVLTYARGEEAGPEGEAVPAAPAGPALAQPSSL

SEQ ID NO: 19347 - protein, 301 aa, Homo sapiens [sequence omitted]

SEQ ID NO: 19348 - protein, 301 aa, Homo sapiens
MADQPKPISPLKNLLAGGFGGVCLVFVGHPLDTVKVRLQTQPPSLPGQPPMYSGTFDCFRKTLFREGITGLYRGMAAPIIGVTPMFAVCFFGFGLGKKLQQKHPEDVLSYPQLFAAGMLSGVFTTGIMTPGERIKCLLQIQASSGESKYTGTLDCAKKLYQEFGIRGIYKGTVLTLMRDVPASGMYFMTYEWLKNIFTPEGKRVSELSAPRILVAGGIAGIFNWAVAIPPDVLKSRFQTAPPGKYPNGFRDVLRELIRDEGVTSLYKGFNAVMIRAFPANAACFLGFEVAMKFLNWATPNL

SEQ ID NO: 19349 - protein, 301 aa, Homo sapiens
MKSGPGIQAAIDLTAGAAGGTACVLTGQPFDTIKVKMQTFPDLYKGLTDCFLKTYAQVGLRGFYKGTGPALMAYVAENSVLFMCYGFCQQFVRKVAGMDKQAKLSDLQTAAAGSFASAFAALALCPTELVKCRLQTMYEMEMSGKIAKSHNTIWSVVKGILKKDGPLGFYHGLSSTLLQEVPGYFFFFGGYELSRSFFASGRSKDELGPVHLMLSGGVAGICLWLVVFPVDCIKSRIQVLSMYGKQAGFIGTLLSVVRNEGIVALYSGLKATMIRAIPANGALFVAYEYSRKMMMKQLEAY

SEQ ID NO: 19350 - protein, 301 aa, Homo sapiens [sequence omitted]

SEQ ID NO: 19351 - protein, 301 aa, Homo sapiens [sequence omitted]

SEQ ID NO: 19352 - protein, 301 aa, Homo sapiens
MKSNPAIQAAIDLTAGAAGGTACVLTGQPFDTMKVKMQTFPDLYRGLTDCCLKTYSQVGFRGFYKGTSPALIANIAENSVLFMCYGFCQQVVRKVAGLDKQAKLSDLQNAAAGSFASAFAALVLCPTELVKCRLQTMYEMETSGKIAKSQNTVWSVIKSILRKDGPLGFYHGLSSTLLREVPGYFFFFGGYELSRSFFASGRSKDELGPVPLMLSGGVGGICLWLAVYPVDCIKSRIQVLSMSGKQAGFIRTFINVVKNEGITALYSGLKPTMIRAFPANGALFLAYEYSRKLMMNQLEAY

SEQ ID NO: 19353 - protein, 328 aa, Homo sapiens
WWHQSPLRQADPGPPRHTLFMDFVAGAIGGVCGVAVGYPLDTVKVRIQTEPKYTGIWHCVRDTYHRERVWGFYRGLSLPVCTVSLVSSVSFGTYRHCLAHICRLRYGNPDAKPTKADITLSGCASGLVRVFLTSPTEVAKVRLQTQTQAQKQQRRLSASGPLAVPPMCPVPPACPEPKYRGPLHCLATVAREEGLCGLYKGSSALVLRDGHSFATYFLSYAVLCEWLSPAGHSRPDVPGVLVAGGCAGVLAWAVATPMDVIKSRLQADGQGQRRYRGLLHCMVTSVREEGPRVLFKGLVLNCCRAFPVNMVVFVAYEAVLRLARGLLT

SEQ ID NO: 19354 - protein, 308 aa, Homo sapiens
MDFVAGAIGGVCGVAVGYPLDTVKVRIQTEPKYTGIWHCVRDTYHRERVWGFYRGLSLPVCTVSLVSSVSFGTYRHCLAHICRLRYGNPDAKPTKADITLSGCASGLVRVFLTSPTEVAKVRLQTQTQAQKQQRRLSASGPLAVPPMCPVPPACPEPKYRGPLHCLATVAREEGLCGLYKGSSALVLRDGHSFATYFLSYAVLCEWLSPAGHSRPDVPGVLVAGGCAGVLAWAVATPMDVIKSRLQADGQGQRRYRGLLHCMVTSVREEGPRVLFKGLVLNCCRAFPVNMVVFVAYEAVLRLARGLLT

SEQ ID NO: 19355 - protein, 288 aa, Homo sapiens
MPVEEFVAGWISGALGLVLGHPFDTVKVRLQTQTTYRGIVDCMVKIYRHESLLGFFKGMSFPIASIAVVNSVLFGVYSNTLLVLTATSHQERRAQPPSYMHIFLAGCTGGFLQAYCLAPFDLIKVRLQNQTEPRAQPGSPPPRYQGPVHCAASIFREEGPRGLFRGAWALTLRDTPTVGIYFITYEGLCRQYTPEGQNPSSATVLVAGGFAGIASWVAATPLDVIKSRMQMDGLRRRVYQGMLDCMVSSIRQEGLGVFFRGVTINSARAFPVNAVTFLSYEYLLRWWG

SEQ ID NO: 19356 - protein, 237 aa, Homo sapiens
MGLTFINALVFGVQGNTLRALGHDSPLNQFLAGAAAGAIQCVICCPMELAKTRLQLQDAGPARTYKGSLDCLAQIYGHEGLRGVNRGMVSTLLRETPSFGVYFLTYDALTRALGCEPGDRLLVPKLLLAGGTSGIVSWLSTYPVDVVKSRLQADGLRGAPRYRGILDCVHQSYRAEGWRVFTRGLASTLLRAFPVNAATFATVTVVLTYARGEEAGPEGEAVPAAPAGPALAQPSSL

SEQ ID NO: 19357 - protein, 678 aa, Homo sapiens
MAVKVQTTKRGDPHELRNIFLQYASTEVDGERYMTPEDFVQRYLGLYNDPNSNPKIVQLLAGVADQTKDGLISYQEFLAFESVLCAPDSMFIVAFQLFDKSGNGEVTFENVKEIFGQTIIHHHIPFNWDCEFIRLHFGHNRKKHLNYTEFTQFLQELQLEHARQAFALKDKSKSGMISGLDFSDIMVTIRSHMLTPFVEENLVSAAGGSISHQVSFSYFNAFNSLLNNMELVRKIYSTLAGTRKDVEVTKEEFAQSAIRYGQVTPLEIDILYQLADLYNASGRLTLADIERIAPLAEGALPYNLAELQRQQSPGLGRPIWLQIAESAYRFTLGSVAGAVGATAVYPIDLVKTRMQNQRGSGSVVGELMYKNSFDCFKKVLRYEGFFGLYRGLIPQLIGVAPEKAIKLTVNDFVRDKFTRRDGSVPLPAEVLAGGCAGGSQVIFTNPLEIVKIRLQVAGEITTGPRVSALNVLRDLGIFGLYKGAKACFLRDIPFSAIYFPVYAHCKLLLADENGHVGGLNLLAAGAMAGVPAASLVTPADVIKTRLQVAARAGQTTYSGVIDCFRKILREEGPSAFWKGTAARVFRSSPQFGVTLAHYEVLQRWFYIDFGGLKPAGSEPTPKSRIADLPPANPDHIGGYRLATATFAGIENKFGLYLPKFKSPSVAVVQPKAAVAATQ

SEQ ID NO: 19358 - protein, 678 aa, Homo sapiens
MAVKVQTTKRGDPHELRNIFLQYASTEVDGERYMTPEDFVQRYLGLYNDPNSNPKIVQLLAGVADQTKDGLISYQEFLAFESVLCAPDSMFIVAFQLFDKSGNGEVTFENVKEIFGQTIIHHHIPFNWDCEFIRLHFGHNRKKHLNYTEFTQFLQELQLEHARQAFALKDKSKSGMISGLDFSDIMVTIRSHMLTPFVEENLVSAAGGSISHQVSFSYFNAFNSLLNNMELVRKIYSTLAGTRKDVEVTKEEFAQSAIRYGQVTPLEIDILYQLADLYNASGRLTLADIERIAPLAEGALPYNLAELQRQQSPGLGRPIWLQIAESAYRFTLGSVAGAVGATAVYPIDLVKTRMQNQRGSGSVVGELMYKNSFDCFKKVLRYEGFFGLYRGLIPQLIGVAPEKAIKLTVNDFVRDKFTRRDGSVPLPAEVLAGGCAGGSQVIFTNPLEIVKIRLQVAGEITTGPRVSALNVLRDLGIFGLYKGAKACFLRDIPFSAIYFPVYAHCKLLLADENGHVGGLNLLAAGAMAGVPAASLVTPADVIKTRLQVAARAGQTTYSGVIDCFRKILREEGPSAFWKGTAARVFRSSPQFGVTLVTYELLQRWFYIDFGGLKPAGSEPTPKSRIADLPPANPDHIGGYRLATATFAGIENKFGLYLPKFKSPSVAVVQPKAAVAATQ

SEQ ID NO: 19359 - protein, 676 aa, Homo sapiens
MAAAKVALTKRADPAELRTIFLKYASIEKNGEFFMSPNDFVTRYLNIFGESQPNPKTVELLSGVVDQTKDGLISFQEFVAFESVLCAPDALFMVAFQLFDKAGKGEVTFEDVKQVFGQTTIHQHIPFNWDSEFVQLHFGKERKRHLTYAEFTQFLLEIQLEHAKQAFVQRDNARTGRVTAIDFRDIMVTIRPHVLTPFVEECLVAAAGGTTSHQVSFSYFNGFNSLLNNMELIRKIYSTLAGTRKDVEVTKEEFVLAAQKFGQVTPMEVDILFQLADLYEPRGRMTLADIERIAPLEEGTLPFNLAEAQRQQKASGDSARPVLLQVAESAYRFGLGSVAGAVGATAVYPIDLVKTRMQNQRSTGSFVGELMYKNSFDCFKKVLRYEGFFGLYRGLLPQLLGVAPEKAIKLTVNDFVRDKFMHKDGSVPLAAEILAGGCAGGSQVIFTNPLEIVKIRLQVAGEITTGPRVSALSVVRDLGFFGIYKGAKACFLRDIPFSAIYFPCYAHVKASFANEDGQVSPGSLLLAGAIAGMPAASLVTPADVIKTRLQVAARAGQTTYSGVIDCFRKILREEGPKALWKGAGARVFRSSPQFGVTLLTYELLQRWFYIDFGGVKPMGSEPVPKSRINLPAPNPDHVGGYKLAVATFAGIENKFGLYLPLFKPSVSTSKAIGGGP

SEQ ID NO: 19360 - protein, 675 aa, Homo sapiens
MAAAKVALTKRADPAELRTIFLKYASIEKNGEFFMSPNDFVTRYLNIFGESQPNPKTVELLSGVVDQTKDGLISFQEFVAFESVLCAPDALFMVAFQLFDKAGKGEVTFEDVKQVFGQTTIHQHIPFNWDSEFVQLHFGKERKRHLTYAEFTQFLLEIQLEHAKQAFVQRDNARTGRVTAIDFRDIMVTIRPHVLTPFVEECLVAAAGGTTSHQVSFSYFNGFNSLLNNMELIRKIYSTLAGTRKDVEVTKEEFVLAAQKFGQVTPMEVDILFQLADLYEPRGRMTLADIERIAPLEEGTLPFNLAEAQRQKASGDSARPVLLQVAESAYRFGLGSVAGAVGATAVYPIDLVKTRMQNQRSTGSFVGELMYKNSFDCFKKVLRYEGFFGLYRGLLPQLLGVAPEKAIKLTVNDFVRDKFMHKDGSVPLAAEILAGGCAGGSQVIFTNPLEIVKIRLQVAGEITTGPRVSALSVVRDLGFFGIYKGAKACFLRDIPFSAIYFPCYAHVKASFANEDGQVSPGSLLLAGAIAGMPAASLVTPADVIKTRLQVAARAGQTTYSGVIDCFRKILREEGPKALWKGAGARVFRSSPQFGVTLLTYELLQRWFYIDFGGVKPMGSEPVPKSRINLPAPNPDHVGGYKLAVATFAGIENKFGLYLPLFKPSVSTSKAIGGGP

SEQ ID NO: 19361 - protein, 675 aa, Homo sapiens [sequence omitted]

SEQ ID NO: 19362 - protein, 246 aa, Homo sapiens
MVKIYRHESLLGFFKGMSFPIASIAVVNSVLFGVYSNTLLVLTATSHQERRAQPPSYMHIFLAGCTGGFLQAYCLAPFDLIKVRLQNQTEPRAQPGSPPPRYQGPVHCAASIFREEGPRGLFRGAWALTLRDTPTVGIYFITYEGLCRQYTPEGQNPSSATVLVAGGFAGIASWVAATPLDVIKSRMQMDGLRRRVYQGMLDCMVSSIRQEGLGVFFRGVTINSARAFPVNAVTFLSYEYLLRWWG

SEQ ID NO: 19363 - protein, 312 aa, Homo sapiens [sequence omitted]

SEQ ID NO: 19364 - protein, 300 aa, Homo sapiens
MAVKFLGAGTAACFADLVTFPLDTAKVRLQIQGENQAVQTARLVQYRGVLGTILTMVRTEGPCSPYNGLVAGLQRQMSFASIRIGLYDSVKQVYTPKGADNSSLTTRILAGCTTGAMAVTCAQPTDVVKVRFQASIHLGPSRSDRKYSGTMDAYRTIAREEGVRGLWKGTLPNIMRNAIVNCAEVVTYDILKEKLLDYHLLTDNFPCHFVSAFGAGFCATVVASPVDVVKTRYMNSPPGQYFSPLDCMIKMVAQEGPTAFYKGFTPSFLRLGSWNVVMFVTYEQLKRALMKVQMLRESPF

SEQ ID NO: 19365 - protein, 312 aa, Homo sapiens
MVGLKPSDVPPTMAVKFLGAGTAACFADLVTFPLDTAKVRLQIQGENQAVQTARLVQYRGVLGTILTMVRTEGPCSPYNGLVAGLQRQMSFASIRIGLYDSVKQVYTPKGADNSSLTTRILAGCTTGAMAVTCAQPTDVVKVRFQASIHLGPSRSDRKYSGTMDAYRTIAREEGVRGLWKGTLPNIMRNAIVNCAEVVTYDILKEKLLDYHLLTDNFPCHFVSAFGAGFCATVVASPVDVVKTRYMNSPPGQYFSPLDCMIKMVAQEGPTAFYKGFTPSFLRLGSWNVVMFVTYEQLKRALMKVQMLRESPF

SEQ ID NO: 19366 - protein, 309 aa, Homo sapiens [sequence omitted]

SEQ ID NO: 19367 - protein, 311 aa, Canis familiaris
MVGLKPSEVPPTTAVKFLGAGTAACFADLLTFPLDTAKVRLQIQGENQATQAARRIQYRGVLGTILTMVRTEGPRSPYNGLVAGLQRQMSFASIRIGLYDSVKQFYTPKGSDHSSITTRILAGCTTGAMAVSCAQPTDVVKVRFQASIHLGAGSNRKYSGTMDAYRTIAREEGVRGLWKGTLPNITRNAIVNCAEMVTYDIIKEKLLDYHLLTDNFPCHLISAFGAGFCATVVASPVDVVKTRYMNSPPGQYCSPLDCMLKMVTQEGPTAFYKGFTPSFLRLGTWNVVMFVTYEQLKRALMKVQMLRESPF

SEQ ID NO: 19368 - protein, 309 aa, Canis familiaris
MVGFKATDVPPTATVKFLGAGTAACIADLITFPLDTAKVRLQIQGERQGPVRAAASAQYRGVLCTILTMVRTEGPRSLYSGLVAGLQRQMSFASVRIGLYDSVKQFYTKGSEHAGIGSRLLAGSTTGALAVAVAQPTDVVKVRFQAQARAGSGRRYQSTVDAYKTIAREEGFRGLWKGTSPNVARNAIVNCAELVTYDLIKDALLKANLMTDDLPCHFTSAFGAGFCTTVIASPVDVVKTRYMNSALGQYSSAGHCALTMLQKEGPRAFYKGFMPSFLRLGSWNVVMFVTYEQLKRALMAACTSREAPF

SEQ ID NO: 19369 - protein, 309 aa, Canis familiaris
MLRAPGSDAPPTLSVRIAAAAGAACLADMITFPLDTAKVRLQIQGEGQGQPPRAPRYRGVLGTVATLARTEGLQKLYSGLPAGLQRQVGFASLRIGLYDSVREWLSPGQGAAASLGSRISAGVMTGGAAVFIGQPTEVVKVRLQAQSHLHGRKPRYTGTYNAYRIIATTEGLTGLWKGTTPNLMRNVIINCTELVTYDLMKEALVKNHLLADDLPCHFLSALVAGFCTTVLSSPVDVVKTRFVNSVPEQYTSVPNCAMTMLTKEGPLAFFKGFVPSFLRLGSWNVIMFVCFEQLKRELMKSGRTVDCAT

SEQ ID NO: 19370 - protein, 194 aa, Canis familiaris
FKATDVPPTATVKFLGAGTAACIADLITFPLDTAKVRLQIQGERQGPVRAAASAQYRGVLGTILTMVRTEGPRSLYSGLVAGLQRQMSFASVRIGLYDSVKQFYTKGSEHAGIGSRLLAGSTTGALAVAVAQPTDVVKVRFQAQARAGSGRRYQSTVDAYKTIAREEGFRGLWKGTSPNVARNAIVNCAELVTY

SEQ ID NO: 19371 - protein, 311 aa, Sus scrofa
MVGLKPSDVPPTMAVKFLGAGTAACFADLLTFPLDTAKVRLQIQGENQAVQTARSAQYRGVLGTILTMVRNEGPRSPYNGLVAGLQRQMSFASIRIGLYDSVKQLYTPKGSDHSSITTRILAGCTTGAMAVTCAQPTDVVKVRFQASIHAGPGSNRKYSGTMDAYRTIAREEGVRGLWKGILPNITRNAIVNCAEMVTYDVIKEKVLDYHLLTDNLPCHFVSAFGAGFCATVVASPVDVVKTRYMNSPPGQYQNPLDCMLKMVTQEGPTAFYKGFTPSFLRLGSWNVVMFVSYEQLKRALMKVQMLRESPF

SEQ ID NO: 19372 - protein, 309 aa, Sus scrofa
MVGFKATEVPPTATVKFLGAGTAACIADLITFPLDTAKVRLQIQGERRGPVQAAASAQYRGVLGTILTMVRNEGPRSLYNGLVAGLQRQMSFASVRIGLYDSVKHFYTKGSEHAGIGSRLLAGSTTGALAVAVAQPTDVVKVRFQAQARAGGGRRYRSTVDAYKTIAREEGLRGLWKGTSPNVARNAIVNCAELVTYDLIKDTLLKADLMTDDLPCHFTSAFGAGFCTTVIASPVDVVKTRYMNSAPGQYSSAGHCALTMLQKEGPRAFYKGFTPSFLRLGSWNVVMFVTYEQLKRALMAARASREAPF

SEQ ID NO: 19373 - protein, 308 aa, Sus scrofa
MVGLKPPEVPPTTAVKLLGAGTAACFADLLTFPLDTAKVRLQIQGENQAARSAQYRGVLGTILTMVRNEGPRSPYNGLVAGLQRQMSFASIRIGLYDSVKQLYTPKGSDHSSITTRILAGCTTGAMAVTCAQPTDVVKVRFQASIHAGPRSNRKYSGTMDAYRTIAREEGVRGLWKGILPNITRNAIVNCAEMVTYDVIKEKVLDYHLLTDNLPCHFVSAFGAGFCATVVASPVDVVKTRYMNSPPGQYQNPLDCMLKMVTQEGPTAFYKGFTPSFLRLGSWNVVMFVSYEQLKRALMKVQMLRESPF

SEQ ID NO: 19374 - protein, 311 aa, Bos taurus
MVGLQPSERPPTTSVKFLAAGTAACFADLLTFPLDTAKVRLQIQGENQAALAARSAQYRGVLGTILTMVRTEGPRSLYSGLVAGLQRQMSFASIRIGLYDSVKQFYTPKGSDHSSIITRILAGCTTGAMAVTCAQPTDVVKIRFQASMHTGLGGNRKYSGTMDAYRTIAREEGVRGLWKGILPNITRNAIVNCGEMVTYDIIKEKLLDYHLLTDNFPCHFVSAFGAGFCATLVASPVDVVKTRYMNSPPGQYHSPFDCMLKMVTQEGPTAFYKGFTPSFLRLGSWNVVMFVTYEQMKRALMKVQMLRDSPF

SEQ ID NO: 19375 - protein, 274 aa, Bos taurus
MVGLQPSERPPTTSVKFLAAGTAACFADLLTFPLDTAKVRLQIQGENQAALAARSAQYRGVLGTILTMVRTEGPRSLYSGLVAGLQRQMSFASIRIGLYDSVKQFYTPKGSDHSSIITRILAGCTTGAMAVTCAQPTDVVKIRFQASMHTGLGGNRKYSGTMDAYRTIAREEGVRGLWKGILPNITRNAIVNCGEMVTYDIIKEKLLDYHLLTDNFPCHFVSAFGAGFCATLVASPVDVVKTRYMNSPPGQYHSPFDCMLKMVTQEGPTAFYKG

SEQ ID NO: 19376 - protein, 475 aa, Nostoc sp. PCC 7120
MNLVWQRFTLSSLPLKQFLATSYLHRFLVGLLSSWRQTSFLLQWGDMIAAALLSLIYVLAPFVSSTLVGVLLIACVGFWLLLTLSDEPSSNNNSLVTPIHLLVLLYWGIAAVATALSPVKKAALTDLLTLTLYLLLFALCARVLRSPRLRSWIITLYLSASLVVSIYGMRQWRFGAPPLATWVDPESTLSKTTRVYSYLGNPNLLAGYLVPAVIFSLMAVFVWQGWARKSLAVTMLFVNTACLIFTYSRGGWIGLVVAVLGATALLVDWWSVQMPPFWRTWSLPILLGGLIGVLLIAVLFVEPVRFRVLSIFADRQDSSNNFRRNVWDAVFEMIRDRPIIGIGPGHNSFNKVYPLYQRPRYSALSAYSIFLEVAVEMGFVGLACFLWLIIVTINTAFVQLRQLRQSANVQGFWLVGALATLLGMLAHGTVDTIWFRPEVNTLWWLMVALIASYWTPLSANQCQELNLFKEEPTSN

SEQ ID NO: 19377 - protein, 397 aa, Chloroflexus aurantiacus
MVMQFPALITIYREHRLWMWLIGAAVTGCILGFTPPLVAVSWLIGLAALGLTLCDPVWPVALAVLSVPFQQLVILPGGLSLTQACFVLVALSLIGRIHQPWPKLTAPGLSLAVLVWCLALAAAATPLSRTEGLKETLRWGTVLLIYVATVWVLQDRLRAAWRRTVLVTCLLVAPAITALIGVTQFVNGFGPESFAIGGGRVRAYGTIGQPNSFAGYLNQSWPLAVGMLIALVETRQYHIRFWMLFSILLVATGSLLGGLLASFSRGGWIGALIGALAMGIAFGGRYGRAMLIRVGMAALLVGLSGLLLINSGLLPTALSNRVVSIIASLRPFDTRNVEITPENFAVVERMAHLQAAWHMVQERPLLGVGPGNFSIAYERLVYSGQSPTWIKPWYDSR

SEQ ID NO: 19378 - protein, 1083 aa, Chloroflexus aurantiacus
MPSHRLIVLQKLLLLLAPFSYLLSSISYLLSSTSYLLSSISYFLPNYASPLLLDIRHLLDYTLRAMWRNTVLRMFLLCSLGVLLTAALGVVVWLDNAALRGIASRSPISSPFPYTDGPALGVNVFNLHLEPDPTAADRTFALVRALGARYVRMQVPWEDIEIHGRGDFTDRRNEATIGVVSSWAKYDRIVDAAVAHGIELIMRVDRPPDWAREQGRSTPEFVAGLAVDGNSTGPPDDLADYGRFLTELVTRYRGKVTYFQIWNEPNLKNEWGWQEPKPADFLALLRVGYEAVKSANPDAVVLFPGLAPTDGLDPRAPMTELEYLDAIYRLGGAAYFDIMAAQNYGLGQPPTEHRYVFLRGRDNWNWHRPIDTRNDVSRVVLLREVMERHGDVATPVWVTEFGYNAAPDTIPAERRFVWGPPVDEQTKGAYLVAQIERARREWPWMGVMNIWMLRYGGYAEPDPADPTPYFALVSRDWQLLSSYQIVQAYMQAPPVAHVGVHDWSHPAVERTVDGWRVRFAGTGLEFYGGSPTTVLLDGDAITLKANAVHGLADTTHVIELRGGSAPTGFAVVRDLPWQFPADYGPLLLFAGIAVIGALTMRTALALLDHLIARWSQIAASRREWIIFALQGITLAIAYRASAQLPLTMIGLLPFIGLSIARPDLALRWVVITVPLYFLPKGLFDSRFGIRDSGIYLPLHEVTLIIAAVATLIRDWRRMRWPALPALPVAVWAMMPAVLVLIGGIWGVIIADMRGPALRELRWMIIEPLLFAALIWWHERQGRAVVYPALIGWLAAGAVSALVALAQVGGVNLVPLFGTKIGHGTDLVATEGVVRATGLYGHPNNLGLAMGRVWPLAAALAWAAWQQRRQWLALTFAGIALLALAALTVSFSRGAYLGALVAGGCLIFFAATPRLRYRLIIGAGVGVLLMAIMLSALGIERLSLLTGSSTIRLSTWRAALAMLADHPLGIGLDQFLVVYQQYIDPALRDTNEVYTAHPHNLILDLLLRGGPLLLLGLGWATWRMVRVPMHAPSLALAVGVAATMAGALTHGLVDAFYFWPDLAFSFWLLVVVREWSIPASTIPE

SEQ ID NO: 19379 - protein, 474 aa, Synechocystis sp. PCC 6803
MVSPISIWRSLMFGGFSPQEWGRGSVLHRLVGWGQSWIQASVLWPHFEALGTALVAIIFIAAPFTSTTMLGIFMLLCGAFWALLTFADQPGKGLTPIHVLVFAYWCISAIAVGFSPVKMAAASGLAKLTANLCLFLLAARLLQNKQWLNRLVTVVLLVGLLVGSYGLRQQVDGVEQLATWNDPTSTLAQATRVYSFLGNPNLLAAYLVPMTGLSLSALVVWRRWWPKLLGATMVIVNLLCLFFTQSRGGWLAVLALGATFLALCYFWWLPQLPKFWQRWSLPLAIAVAVILGGGALIAVEPIRLRAMSIFAGREDSSNNFRINVWEGVKAMIRARPIIGIGPGNEAFNQIYPYYMRPRFTALSAYSIYLEILVETGVVGFTCMLWLLAVTLGKGVELVKRCRQTLAPEGIWIMGALAAIIGLLVHGMVDTVWYRPPVSTLWWLLVAIVASQWASAQARLEASKEENEDKPLLAS

SEQ ID NO: 19380 - protein, 387 aa, Synechocystis sp. PCC 6803
MWAALTLWFLLTTITAHDRGEALLGLANFVPYFIVFLAFSQVICQFKQLNTLAWLLTANTVVLVIIGFGQVYGGWATPNWLVAIGTNLVAGGRPEGRMSSLLMYANLFSAWLLMVFPLSLGLLIQSVRRWHFTAPSNRFNLPPLVWALLVACILEAIALVLTGSRSAWGIGLLIGIAYAIYLSWYWLVALAGGATAMVLWASFGPFGKEPLRQIVPKYFWGRLSDELYPDRYRTALRSTQWQFSWDMFLDQPIFGQGLRNFTPLYQAAMNVWIGHPHNLVLMMLGETGLIGTALMLGAVGFILAQGMVLLIHLSRGGGFRRRSQHLLLLSYGIAFAALCLYNLFDVTIFDMRNNVLGWIFLAAIAGVSQRYGTKLAQGDPAKLQVPG

SEQ ID NO: 19381 - protein, 443 aa, Xylella fastidiosa Dixon
MTNSAPDIVSISKPALLLDVGRWAPVCVVLFVAFWPLPGLAATVLTLSALLASYYLIRYRFRGGTQLLDSPAWALTSVLFMAYWLPQVVSLFGALELSESLLKVATDLRYLPFMWLCAIAVGGPERRERTFKGLAVIGLIWTLDALAQAVLRTSPLFWSLNQLKQAISGYGFCSTQQMMLADRLSGIFGPCNLKLGQTLATLSPFVLFAMQRRGVALWLLVVAVLGIVLLLAGSRASWITYGLILMLSGWRVLGIRRLLGMGALFLPLVLAVIAFSPQTRERIDRTAAVFADHGAGVDQALSGRSQIWQAALCMIQAHPLSGVGVRGFRDAYPACNPTPERIPAWGAGPALHAHQIVLEILSETGVIGLLLWIAGAAMAWRAWCYATAAARDRARPAMISLLATVFPFNTHLAFYSSFWGALMLMLAGLYAGALLQNGVIKKT

SEQ ID NO: 19382 - protein, 443 aa, Xanthomonas axonopodis pv. citri str. 306
MTNSAAEALPRAPVLTPDAGRWAPLWVIVFVALWPTPGLAETVLSLGALFAAYRLLHARFRGGTRLLSGAAWALTSVLFLAYWLPQMLSAFDAVDAGRALRKSATDLRYLPFMWLCAIAVANAQRRRRTFTGLAVIGGVWTLDALLQAAFGTSPLFFGIDQIKQLISGHGLCTAQELALVDRLSGVLGPCNLKFGQTLASLSPFLLLALGRRHVLAWLVGAAAVGIVLVLAGSRASWITYGVIMLLSGWQLLGGRRLLAVAVAGALLAVAVVAVAPQARERIQRTTLAFGNGEQGVDQALSGRAQIWGAALCMIRKHPLDGVGARGFRQAYPACNPAPGQAPAWGDGPAFHAHQIVLEILAETGVIGLLLWLAGAAQAWRAWRYSSVVAREQARPAMIALVATVFPFNTHLAFYSSFWGGLSLMLAGLYAGALLNDDADRAPQ

SEQ ID NO: 19383 - protein, 463 aa, Thermosynechococcus elongatus BP-1
MDVLLRRLDVEGWRSHSGVGRLLGLLQGWQEKSWLGRWLPSLAVLLVGLVLVLAPLMPSGMIGMLLAAGSGFWLLWTLAGEREGRWSGVHLLVLLYWGIALLATVLSPVPRAAMVGLGKLTLYLLFFALAERVMRNERWRSRLLTVYLLTALMVSVEGVRQWIFGAEPLATWTDPESALANVTRVYSFLGNPNLLAGYLLPSVPLSAAAIAVWQGWLPKLLAVVMLGMNAASLILTFSRGGWLGLVAATIAGVVLLGIWFWPRLPLQWRRWGVPTMGGLAIALCMGTIVSVPPLRERAASIFVARGDSSNNFRINVWMAVQQMIWARPWLGIGPGNVAFNQIYPLYQVNVRFTALGAYSIFLEILVEVGFIGFGVFLWLLAVLGDRARRCFEELRATGSPQGFWLMGTIAAMIGMLTHGLVDTIWFRPEVATLWWLMVAIVASFTPFQSKTANGTFSNRDPEP

SEQ ID NO: 19384 - protein, 261 aa, Clostridium thermocellum ATCC 27405
MPGRIYATMSNPNNFGEILVMSLPFYVSVILNSKTFFKKMIYFIMALPPLLALFNTGSRSSWIGFAVSVIVITFLLNKRLLPFIILGGVMMIPFLPQYVYNRILTIFRAAQDTSTQTRVKILQTVEPMFKHYMLSGVGLGSDIFRQLIQNYKLYTKAVPPHTHILYLQIWIEMGLAGFVTFMWYIYRTIKNSVIGIYNSSLTLKTILAAGTAALCGILVTSLVEYSWYYPRVMVMFWVLLGIIAAATYLAELKNRRLSEMD

SEQ ID NO: 19385 - protein, 461 aa, Trichodesmium erythraeum IMS101
MNSVWKKLTLTNLSFSDSEWLNASYLYGLLNGSLYNWRRGSWLMQWGEPLGFVLLAIVFTLAPFVNTTLIGFLLLASAGFWVLLKVSDNTQEYLTPIHLLIFLYWSIATLAVVISPAKTAAFSGWVKLTLYLLLFASGSLVLRSPRLRSWLINIYLLVSLVVSFYGIRQWIDKVEPLATWNDPTSAQAGATRVYSYLGNPNLLGGYLLPAIALSFVAIFAWSSWARKSLAVTILLVSCACLRYTGSRGSWIGFLALMFAMLILMWYWWRSYMPSFWQIWSLPIAVGSFAGLLILAVVLLEPLRDRVLSVFAGRQDSSNNFRMNVWMSVFDMIRDRPILGIGPGNDVFNKIYPLYQRPRYSALSSYSVPLEIVVETGFIGLTAFLWLLLVTFNQGVLQLKRLRDADNPQGYWLIGAIAAMVGLIGHGLVDTVWYRPQVNTIWWLMVAIIASYSSQQGVRSRE

SEQ ID NO: 19386 - protein, 453 aa, Vibrio vulnificus CMCP6
MTVTPRYPHLAFVLTLCMVVALVWAWQPNPLVVVALCLLPIATLYVLNQTFWLVLLFVVFSFFRIHEAIPQLYSLKIPLLLSFGALAALGWHLIITRQLKPYWHPVMNWLVAFWLVVVIGLFFAGNRGVAFGAFSSVYWKIMVMTLAIMWLVTSAKHLNIISITITLSGLLIGCVALSNAMQGIGLVEGSRVTIGRDLGSMLGDPNDLALVLMFPFAFSVSLSFHRRTHVAVRLLAGVTCAILFLALLETQSRGGLLGAMAVLGYFANKTIRNKTVLILLGCVASLLLYAVAGISDRASGGSAEEGIDASAMGRLYAWEAAFKMALAHPLLGVGLQNFYYNYFFYSPHWDGLNHAVHSTWFGVLAETGFVGLTLFLGLIVCLIKTSLHSIRQIHCQKPTAIDIAANAVFAGLLGTIVSGTFLTQGFTWPIYILTALTIAISHIIKIDSQNENA

SEQ ID NO: 19387 - protein, 432 aa, Vibrio parahaemolyticus RIMD 2210633
MLWTVMPHPILIVAVCFAPLALLFVLNQTFWLVTLFVIFSFFRIHEAFPAIYSFKIPLLLSLGALAALAFHLLLSRQLTAFWHPSLKWLCIFWGLVIIGIVFASSRDIAITVFKNTYWKIIVMTLAITWLITKPQQLAQMSKAIIVAGMLIGLVALNNAANGIDLVEGTRVSIGRSIGSVLGDPNDLALVLMFPLAFTVSQLMEKRSPTLLRLFALITCFILFFAVIQTQSRGGLLGSLSVFAYFAFKHIKSKTLVLVLGAVAALALYAFAGISGRESGGAAEDGIDASAMGRLYAWEAAFKMALHHPFTGVGLDNFYFNYYFYSPHWDGINHAVHSTWFGVLAETGFVGLAVFITLIVSLIRTSLKSISLLTPDSDYALTVGANAVLSGLIGTIVSGTFLTQGFTWPIYILAALTVVVSRIVQSDCQNEKS

SEQ ID NO: 19388 - protein, 227 aa, Zea mays
  unsure (1)..(227): unsure at all Xaa locations
XSPVKMAAASGLAKLTANLCLFLLAARLLQNKQWLNRLVTVVLLVGLLVGSYGLRQQVDGVEQLATWNDPTSTLAQATRVYSFLGNPNLLAAYLVPMTGLSLSALVVWRRWWPKLLGATMVIVNLLCLFFTQSRGGWLAVLALGATFLALCYFWWLPQLPKFWQRWSLPLAIAVAVILGGGALIAVEPIRLRAMSIFAGREDSSNNFRINVWEGVKAMIPGYRLSKG

SEQ ID NO: 19389 - protein, 475 aa, Nostoc punctiforme
MFFMNLVWQLFTLSSLPLKEYLATSYVHRSLVGLLSSWRQTSVLIQWGDAIAAVLLSSIYALAPFASSTLVGLLLVACVGFWLLLTLSDEVTPANVSSVTPIHLLVLLYWGIAVIATALSPVKKAALNDLGTLTLYLLLFALCARVLRSPRLRSWILTLYLHVSLIVSVYGLRQWFFGATALATWVDPESPLSKTTRVYSYLGNPNLLAGYLLPAVIFSLVAIFAWQSWLKKALALTMLIVNTACLILTFSRGGWIGLVVAVLAVMALLVFWKSVEMPPFWRTWSLPIVLGGLIGILLLAVIFVEPVRLRVFSIFADRQDSSNNFRRNVWDAVFEMIRDRPIFGIGPGHNSFNKVYPLYQHPRYTALSAYSILFEVTVETGFVGLACFLWLIIVTFNTALLQVRRLRRLRSVEGFWLIGAIAILLGMLAHGTVDTVWYRPEVNTLWWLIVALIASYWTPLTQNQTNPSNPEPAVN

SEQ ID NO: 19390 - protein, 438 aa, Vibrio cholerae
MLSFHKTLFFAFLLFVFWLPIPLGSNRPWAWSLNEIYVAFLLLGCLFLLPAAQCWLAIQRAKVILIPVALFTLWSWMQSWPSLGLSSDQTLVFISAVKSLHYLQICLVAALLVDTPHKLKMLATTMIASGICQAFYAGVILLLELQTSPFFSLPLNQRASGSFVYHNHLANFLMLNLCLGFGLLIAELNHQTTQGWRNTLKKLLAILLSDKAFIRLGLVIMVIALVLTRSRMGNIAFFVALSIGSLLILLFYKSKPKSLYLLIVSLFIVDALVVSNWFGLDKVRQRLAETSLQNESRDDVVRDALNAIQERPLTGFGNGTFYSTFPSYNQGEVALFYDHAHNDYVQFTLESGLIATSVFGIMVLFCAWRALSAFRNRTNKTMRGIGLGSLMAIIGMLLHMSVDFPLQAPATALYFLFCLLIANWSMTLPTPKYRSSRT

SEQ ID NO: 19391 - protein, 439 aa, Prochlorococcus marinus str. MIT 9313
MPKTAAPQPLLLRWQGHIPSSEAMQMRLQWIAGLLLMMLLATLPMLTRTGLGLTILAAGALWIIWGCVTPAGRIGSISSCLLVFFAIACLATGFSPVPLAAAKGLIKLISYLGVYALMRQLLATSSDWWDRLVAALLTGELISSVIAIRQLYAPAEEMAHWADPNSVAAGTVRIYGPLGNPNLLAGYLMPILPLALVALLRWQGLGAKLYAMVALGLGITATLFSFSRGGWLGMLSALAVILVLLLLRSTSHWPLVWRRLLPLIVIVLGTAMLVIAATQIEPIRTRITSLIAGRSDSSNNFRINVWLSSLEMIQARPWLGIGPGNAAFNRIYPLFQQPKFNALSAYSVPLEILVETGLAGLMASLALVITGMRKGLAGLNSNHPLALPALASLAAIAGLAVHGITDTIFFRPEVQLVGWFCLATLAQTQPEQKQLQQTE

SEQ ID NO: 19392 - protein, 431 aa, SYNECHOCOCCUS SP. WH 8102
MADATDQRSIPLLLRWQGCLTPTASVQQRLELLSGVVLMLLLGSLPFVSRSGLGLELAAAGLLWLLWSLITPAKRLGAISRWVLLYLAIAWVCTGFSPVPIAAAKGLLKLTSYLGVYALMRTLLERQIVWWDRLLAALLGGGLFSSVLALRQLYASTDELAGWADPNSVSAGTIRIYGPLGNPNLLAGYLLPLVPLACIAVLRWKRLSCRLLAAVTALLAGSATVFTYSRGGWLGLLAALALAGMLILLRTTAHWPPLWRRLLPLAALLIAGIALALAITQLDPIRTRVLSLVAGRGDSSNNFRINVWLAAIEMVQDRPWLGIGPGNAAFNSIYPLYQQPKFDALSAYSVPLEILVETGIPGLLACLGLLLSSIQRGLRIHGQQGLIAIGSLAAIAGLLTQGITDTIFFRPEVQLIGWFALASLGATWLRD

SEQ ID NO: 19393 - protein, 424 aa, SYNECHOCOCCUS SP. WH 8102
MIRDRRIGGQAFRLGLFFLPSSALLAGIGLLIACVSGSRGREQPLWRDRWCQPLLLAGLLMLIGACLAENVGLAWAGLANWLPFVWAFWAFQPHLAKASQRRQAVWMLLAGTLPVLVTGFGQMLLGWQGPWQVGGGAIIWFLHPDGRPIGRLSGLFDYANITGAWLAVVWPLMLAAVFRPDGWRRRGGALLLSMATALAVLLTQSRNAMGGLVLALPFVLGPWQWMWLLPLLLLLASPLLLAVLPGVPVGLQQWGMRLLPDQVLVRVLESQGETAWKHTRLGQWQYALQLVSARPWFGWGAAAFSVLYPIHAAKRWHGHVHNLPLELAVSHGVPAMLLIVGTVLFLLVLAAQRGMLQKAPLERAWWAATLVLVVMHATDLPLFDSRLNILGWTLLAGLCAFSRQCQEPGPDRDARAVSQEQADP

SEQ ID NO: 19394 - protein, 264 aa, Nostoc sp. PCC 7120; identical to SEQ ID NO: 491

SEQ ID NO: 19395 - protein, 150 aa, Arabidopsis thaliana
MTIRKTDFNLVQCHWHSPSEHTVNGTRYDLELHMVHTSARGRTAVIGVLYKLGEPNEFLTKLLNGIKAVGNKEINLGMIDPREIRFQTRKFYRYIGSLTVPPCTEGVIWTVVKRVNTISMEQITALRQAVDDQQCIDLTYLLFSYTRDLK

SEQ ID NO: 19396 - protein, 259 aa, Zea mays
  unsure (1)..(259): unsure at all Xaa locations
MYAAAPSSSRVAAAAAAFFIVISLSPQLLVRPFGASTTVHWEELDEEDFSYRRNAGNGPARWGLIRREWATCNVGLLQSPIGLSDTLAGLADRSGRLGRSXXHAPSEHAINGRRYALELQMVHQSDTNRYAVVSQLYRISRRRPDRTIHRLERYIRRIIARRKNHEELIDEEVDPRRPVSRSTAYYKYTGSFTTPPCTEGVTWVVAHQTRRVTRRQVRLLRNAVHDGTRSNRRPLQEANGRAITFYYTSPAHGRGANGD

SEQ ID NO: 19397 - protein, 235 aa, Drosophila melanogaster
MEWNYLKNGKDWEDLCSSGKHQSPILLDSRTVSISLDIPVTSNGRKPFITGGRLKGRYYADGLHFHWGSYKSRGSEHLINKRRFDAEIHIVHRNEKYRNIAQAVRQKDGLAVVAIMVAIVRKDNAKSTPLSRLMEAVVRVPIEDSNATVFGQSSLDQLIGGVSHRDFFTYEGSLTTPLCDETVTWIVFTETTTVTMSSVSKFWLLRDHWGHRLINNYRIVQDLNNRTVFYKKRMS

SEQ ID NO: 19398 - protein, 320 aa, Canis familiaris
MRALALLLALPLLGARAQHGSLWTYSEGALDQVHWPREYPTCGGTRQSPIDLQRRKVQYNPSLKALKLTGYRIQVGEFPMINNGHTVQISLPPTMRMMASDGTEYIAQQMHFHWGGASSEISGSEHTIDGIRFVAEIHIVHYNSKYKSYDIAQHEPDGLAVLAALVKVEDYGENTYYSNFISHLNNIRYPGQSTVLSGLDIEDMLPENTHHYYTYRGSLTTPPCTENVHWFVLVHHVRLSSIQTWKLENSILDHQNKTLHSDYRRIQPLNGRVVESNFVNLPSQGSEFQFYVNKLNNKLEYLRRLLEKTKVEKKPHIHQA

SEQ ID NO: 19399 - protein, 614 aa, Arabidopsis thaliana
MSEDVEKYLNLNPPCSSSSSSSSAATFTNKSRNFKSSPPPCPDHVLENVLENVLQFLTSRCDRNAVSLVCRSWYRVEAQTRLEVFIGNCYSLSPARLIHRFKRVRSLVLKGKPRFADFNLMPPNWGAQFSPWVAATAKAYPWLEKVHLKRMFVTDDDLALLAESFPGFKELTLVCCEGFGTSGIAIVANKCRQLKVLDLMESEVTDDELDWISCFPEGETHLESLSFDCVESPINFKALEELVVRSPFLKKLRTNRFVSLEELHRLMVRAPQLTSLGTGSFSPDNVPQGEQQPDYAAAFRACKSIVCLSGFREFRPEYLLAISSVCANLTSLNFSYANISPHMLKPIISNCHNIRVFWALDSIRDEGLQAVAATCKELRELRIFPFDPREDSEGPVSGVGLQAISEGCRKLESILYFCQNMTNGAVTAMSENCPQLTVFRLCIMGRHRPDHVTGKPMDDGFGAIVKNCKKLTRLAVSGLLTDEAFSYIGEYGKLIRTLSVAFAGNSDKALRYVLEGCPKLQKLEIRDSPFGDVGLRSGMHRYSNMRFVWLSSCLISRGGCRGVSHALPNVVVEVFGADGDDDEDTVTGDYVETLYLYRSLDGPRKDAPKFVTIL

SEQ ID NO: 19400 - protein, 623 aa, Arabidopsis thaliana
MTEEDSSAKMSEDVEKYLNLNPPCSSSSSSSSAATFTNKSRNFKSSPPPCPDHVLENVLENVLQFLTSRCDRNAVSLVCRSWYRVEAQTRLEVFIGNCYSLSPARLIHRFKRVRSLVLKGKPRFADFNLMPPNWGAQFSPWVAATAKAYPWLEKVHLKRMFVTDDDLALLAESFPGFKELTLVCCEGFGTSGIAIVANKCRQLKVLDLMESEVTDDELDWISCFPEGETHLESLSFDCVESPINFKALEELVVRSPFLKKLRTNRFVSLEELHRLMVRAPQLTSLGTGSFSPDNVPQGEQQPDYAAAFRACKSIVCLSGFREFRPEYLLAISSVCANLTSLNFSYANISPHMLKPIISNCHNIRVFWALDSIRDEGLQAVAATCKELRELRIFPFDPREDSEGPVSGVGLQAISEGCRKLESILYFCQNMTNGAVTAMSENCPQLTVFRLCIMGRHRPDHVTGKPMDDGFGAIVKNCKKLTRLAVSGLLTDEAFSYIGEYGKLIRTLSVAFAGNSDKALRYVLEGCPKLQKLEIRDSPFGDVGLRSGMHRYSNMRFVWLSSCLISRGGCRGVSHALPNVVVEVFGADGDDDEDTVTGDYVETLYLYRSLDGPRKDAPKFVTIL

SEQ ID NO: 19401 - protein, 619 aa, Arabidopsis thaliana
MTQDRSEMSEDDDDQQSPPLDLPSTAIADPCSSSSSPNKSRNCISNSQTFPDHVLENVLENVLQFLDSRCDRNAASLVCKSWWRVEALTRSEVFIGNCYALSPARLTQRFKRVRSLVLKGKPRFADFNLMPPDWGANFAPWVSTMAQAYPCLEKVDLKRMFVTDDDLALLADSFPGFKELILVCCEGFGTSGISIVANKCRKLKVLDLIESEVTDDEVDWISCFPEDVTCLESLAFDCVEAPINFKALEGLVARSPFLKKLRLNRFVSLVELHRLLLGAPQLTSLGTGSFSHDEEPQSEQEPDYAAAFRACKSVVCLSGFRELMPEYLPAIFPVCANLTSLNFSYANISPDMFKPIILNCHKLQVFWALDSICDEGLQAVAATCKELRELRIFPFDPREDSEGPVSELGLQAISEGCRKLESILYFCQRMTNAAVIAMSENCPELTVFRLCIMGRHRPDHVTGKPMDEGFGAIVKNCKKLTRLAVSGLLTDQAFRYMGEYGKLVRTLSVAFAGDSDMALRHVLEGCPRLQKLEIRDSPFGDVALRSGMHRYYNMRFVWMSACSLSKGCCKDIARAMPNLVVEVIGSDDDDDNRDYVETLYMYRSLDGPRNDAPKFVTIL

SEQ ID NO: 19402 - protein, 665 aa, Glycine max
  unsure (1)..(665): unsure at all Xaa locations
KIEIPTLSPPFSSSSPISISILFFXVSRTKTKTSSTESNKXETSQTTNSEDDHRSSPSEITESSNSKTRTCGPFPGSGPSEPQAPFPDQVLENVLENVLHFLPSRRDRNAASLVCRSWYRAEALTRSELFIGNCYALSPTRATARFTRARSVTVKGKPRFADFDLMPPDWGAHFGPWASALAQAYPWLEKLHLKRMXCVTDADLALIADSFAAFRELVLVCCEGFGTPGLAVVVSKCRLLRVLELVESEVEDDEEVDWISCFPESQTNLESLVFDCVDVPINFEALEGLVARSPRLKKLRLNRYVSMAELYRLLLRAPQLTHLGTGSFSATEAGAVGDQEPDYQEPDYAAAFEACRSLVCLSGFREIWADYLPAIYPVCXADLTSLNVSYADVNTDQLKSVIRHCHKLQIFWVLDSIRDEGLQAVAATCKDLRELRVFPVNTREEIEGPVSEVGFEAISRGCRKLQSILFFCQRMTNAAVVAMSKNCPDLVVFRLCIIGRYRPDPVTQEPMDEGFGAIVMNCKKLTRLAVSGLLTDRAFEYIGTYGKLVRTLSVAFAGDTDVGLKYVLEGCPNLQKLEIRDSPFGDGALRSGLHHYYNMRFLWMSSCKLTRQACQEVARALPNLVLEVIKGDEEENAGDEVETLYMYRSLDGPRDDAPRFVTILQ

SEQ ID NO: 19403 - protein, 590 aa, Glycine max
  unsure (1)..(590): unsure at all Xaa locations
VRKSRGGPGDSKAEATRTLSPLPDQVLENVLESVLHFLTSRRDRNAASLVCKSWYRAEALTRTELFIGNCYAVSPRRATGRFPRVRSVTIKGKPRFADFDLMPLNWGAHFTPWATALSQSYPSLNKLHLKRMSLTDHDLTLLSHSFPSFQDLVLTCCEGFGTTALAALASNCRLLRVLELVECVVEVGDEEMDWISCFPETQTHLESLVFDCVECPVNFDALERLVARSPSLRKLRLNRYVSMSQLHRLMHRAPQLTHLGTGSFSASELDQELDFASAFAACKSLVCLSGFREFWADYLPAIYPACANLISLNFSFADISADQLKSVIRHCHKLQTFWVLDTICDEGLQAVAETCKDLRELRVFPVNTREEIEGPVSEVGFEAISRGCRKLQSILFFCQRMTNAAVVAMSNNCPDLVVFRLCIIGRYRPDPETLEPMDEGFGAIVMNCKKLTRLAVSGLLTDRAFNYIGTYGKLIRTLSVAFAGDTDLGLQYVLEGCPNLQKLEIRDSPFGDGALRSGLHHFYNMRFLWMSSCKLTRQACREVARMLPHLVLEVINSEXXDKADDIEILYMYRSLDRPRDDAPKVVTILC

SEQ ID NO: 19404 - protein, 419 aa, Glycine max
  unsure (1)..(419): unsure at all Xaa locations
XRLLRVLELVECVVEVGDEEMDWMSCFPETQTHLESLVFDCVECPVNFDALERLVARSPLLRKLRLNRYVSMSQLHRLMHRAPQLTHLGTGSFSASELDQELDFASAFASCKSLVCLSGFREFWADYLPAIYPACANLISLNFSFADISPDQLKSVIWHCHKLQIFWVLDSIRDEGLQAVAATCKDLRELRVFPMDAREETDGPVSEVGFEAISQGCRKLESILFLCQRMTNAAVVAMSKNCPDLVVFRLCIIGRYRPDPVTEEPMDEGFGAIVMNCKKLTRLAMSGLLTDRVFEYIGMYGKLVRTLSVAFAGDTDVGLKYVLEGCPNLQKLEIRDSPFGDGALRSGLHHYYNMRFLWMSSCKLTRQACREVARMLPHLVLEVINSEXXDKADDIEILYMYRSLDRPRDDAPKVVTILC

SEQ ID NO: 19405 - protein, 603 aa, Oryza sativa (japonica cultivar-group)
MSEEDDDQPPPLPAQKRPRASPPPDQVLDNVLETVLQFLDSARDRCAASLVCRSWSRAESATRASVAVRNLLAASPARVARRFPAARRVLLKGRPRFADFNLLPPGWAGADFRPWAAAVAAAAFPALASLFLKRITVTDDDLDLVSRSLPASFRDLSLLLCDGFSSAGLASIASHCRGLRVLDVVDCEMNDDDDEVVDWVAAFPPGTTDLESLSFECYVRPVSFAALEALVARSPRLTRLGVNEHVSLGQLRRLMANTPRLTHLGTGAFRPGDGPEDVGLDIEQMASAFASAGRTNTLVSLSGFREFEPEYLPTIAAVSGNLTNLDFSYCPVTPDQFLPFIGQCHNLERLYVLDSVRDEGLQATARTCKKLQVLHVLPLNALEDADELVSEVGLTAIAEGCRGLRSTLYFCQSMTNAAVIAISQNCVDLKVFRLCIMGRHQPDHVTGEPMDEGFGAIVRNCSKLTRLSTSGHLTDRAFEYIGKYAKSLRTLSVAFAGDSNLALQHILQGCSKLEKLEIRDCPFGDAGLLSGMHHFYNMRFLWMSGCNLTLQGCKEVARRLPRLVVELINSQPENERTDSVDILYMYRSLEGPREDVPPFVKIL

SEQ ID NO: 19406 - protein, 629 aa, Oryza sativa
  unsure (1)..(629): unsure at all Xaa locations
HTTPAPRWMSLTHTHLPPPPPXLRRGASPLHSTPRRPPTNHASAAAXASPPPDQVLDNVLETVLQFLDSARDRCAASLVCRSWSRAESATRASVAVRNLLAASPARVARRFPAARRVLLKGRPRFADFNLLPPGWAGADFRPWAAAVAAAAFPALASLFLKRITVTDDDLDLVSRSLPASFRDLSLLLCDGFSSAGLASIASHCRGLRVLDVVDCEMNDDEVDWVAAFPPGTTDLESLSFECYVRPVSFAALEALVARSPRLTRLGVNEHVSLGQLRRLMANTPRLTHLGTGAFRPGDGPEDVGLDIEQMASAFASAGRTNTLVSLSGFREFEPEYLPTIAAVSGNLTNLDFSYCPVTPDQFLPFIGQCHNLERLYVLDSVRDEGLQATARTCKKLQVLHVLPLNALEDADELVSEVGLTAIAEGCRGLRSTLYFCQSMTNAAVIAISQNCVDLKVFRLCIMGRHQPDHVTGEPMDEGFGAIVRNCSKLTRLSTSGHLTDRAFEYIGKYAKSLRTLSVAFAGDSNLALQHILQWCSKLEKLEXIRDSPFGDAGLLSGMHHFYNMRFLWMSGCNLTLQGCKEVARRLPRLVVELINSQPENERTDSVDILYMYRSLEGPREDVPPFVKIL

SEQ ID NO: 19407 - protein, 581 aa, Oryza sativa
  unsure (1)..(581): unsure at all Xaa locations
XCPRRTTTSRPAAGAEAAARXSPPPDQVLDNVLETVLQFLDSARDRCAASLVCRSWSRAESATRASVAVRNLLAASPARVARRFPAARRVLLKGRPRFADFNLLPPGWAGADFRPWAAAVAAAAFPALASLFLKRITVTDDDLDLVSRSLPASFRDLSLLLCDGFSSAGLASIASHCRGLRVLDVVDCEMNDDEVDWVAAFPPGTTDLESLSFECYVRPVSFAALEALVARSPRLTRLGVNEHVSLGQLRRLMANTPRLTHLGTGAFRPGDGPEDVGLDIEQMASAFASAGRTNTLVSLSGFREFEPEYLPTIAAVSGNLTNLDFSYCPVLDSVRDEGLQATARTCKKLQVLHVLPLNALEDADELVSEVGLTAIAEGCRGLRSTLYFCQSMTNAAVIAISQNCVDLKVFRLCIMGRHQPDHVTGEPMDEGFGAIVRNCSKLTRLSTSGHLTDRAFEYIGKYAKSLRTLSVAFAGDSNLALQHILQGCSKLEKLEIRDCPFGDAGLLSGMHHFYNMRFLWMSGCNLTLQGCKEVARRLPRLVVELINSQPENERTDSVDILYMYRSLEGPREDVPPFVKIL

SEQ ID NO: 19408 - protein, 518 aa, Triticum aestivum
  unsure (1)..(518): unsure at all Xaa locations
XPAWGAEAAPWVAAAADGWPLLEELSFKRMVVTDECLDMIASSFRNFQVLRLVSCEGFSTAGLAAITEGCRNLRELDLQENYIEDCSSHWLSYFPESFTSLETLNFSCLEGEVNFAVLERLVSRCRNLKTLKLNNAIPLDKVASLLRKAPQLVELGTGKFSAEYHSDLFAKLEAAFAGCKSLRRLSGAWDAVPDYLPAFYCVCEGLTSLNLSYATVRGPELIKFISRCKNLQQLWVMDLIEDHGLAVVAGSCSKLQELRVFPSDPFXXAGQVLLTERGLVDVSASCPMLESVLYFCGQMTNEALITIAKNRPNFXTCFRLCIXLEPRTPSYVTRQSLDAGFSAIVESCKGLRRLSVSGLLTDLVFKSIGANGNCLEMLSIAFAGNSDLGLHYILSGCKSLKKLEIRDCPFGNKPLLANAAKLETMRSLWMSSCSLTLGACRQLAEKMPRLTVEIMNDPGRTCPVESLPDDSPVETLYVYRTIAGPRSDTPDYVQIVXGYSGVFIFNLDWIGTFNTFLA

SEQ ID NO: 19409 - protein, 204 aa, Triticum aestivum
  unsure (1)..(204): unsure at all Xaa locations
XGLXXVAMCCKXXLQVLRVLPLDAHEDADELVSEVGLTAISEGCRDLRSILYFCQRMTNAAVISMSHNCPELKVFRLCIMGRHRPDHVTGEPMDEGFGAIVRNCSKLTRLSTSGHLTDRAFEYIGNYGSSLRTLSVAFAGDSDLALQHILQGCSKLEKLEIRDCPFGDAGLLSGMHHFYNMRFVWMSGCSLTLQGCQEVARQLX

SEQ ID NO: 19410 - protein, 325 aa, Triticum aestivum
  unsure (1)..(325): unsure at all Xaa locations
XFGADSGLYSIIQLCSSLNSLSGFVGTRRWSTPVLHSICQNVTCLNLSYAPMFRTVDLIGTIHQCQNLRHLWVLDHIGDAGLKVVASSCLELQELRIFPANANVLASTGVTEEGLVAVSTGCRKLYSVLNSCSPMTNFALITVSINCSRITSFRLHICLHGSVDAVTGQPLHECFGAIFRSCKGLRRLTMSGLLTDSVFLYIGMYAERLETLSVAFAGDSDDGMIYVLNGCKNLRKLEIRNCPFGNTALLAGTHRYEAMRSLWMSSCDITLGGCRSLAAAMPGLNVEVISQADGGANDAKKVEKLYVYRTLAGPRDDAPGFVSAL

SEQ ID NO: 19411 - protein, 376 aa, Prunus mume
MTFTLGKKEILIDILVRLPAKSLVRFLCTCKSWSDLIGSSSFVRTHLDRNVTKHAHVYLLCLHHPNFECAIDPNDPYIEEEVQWSLFSNETFEQCSKLSHPLGSTEHYVIYGSSNGLVCISDEILNFDSPIHIWNPSARKLKTPPISTNINIKFSCVVLQFGFHPGVNDYKAVRMMRTNKNALAVEVYSLRTNSWKMIEAIPPWLKCTWQHHKGIFFNGVAYHIIEKGPIFSIMSFDSGSEEFEEFIAPDAICSSLGLCIHVYKEQICLLSGFYGSEEEDMDKIDLWVLQEKRWKQLCPFIFPLDHCHRTIGFSADNELLMERRDFIKGITHLCLCNYESKQVLETGIRLAVMKYGDIEFLSAITYIESLVLLNNY

SEQ ID NO: 19412 - protein, 428 aa, Prunus mume
MMREMATLSKFSEDMMGNILSRLPPKSLMRFRCVLKSWHDLIDKPSFVDHHLSISMDNKVTSSTYVLLKHNVLTDPSIKDDEKAVRATLFNPDSNQRDILLSSLNLGSLVDDGLEIENHVVPPPMRGYALSLEISGSCDGLICLNTFNSEDIVLCNPALEEYRVLPKSCILLPPRVPRQFEENEDDDYYEEDDDDEIESNPKCVGFGYDPNSKDYKVVRAAQFVSGVFTQHPSKVEVYSLAADTWREVPVDIQPHGSLNPSYQMYFKGFFYWIAYWTEERNVILSFDMSEEVFHDIALPESGPDAYEYTSIAVWKDSLALLTYPVENEAPKTLDLWVLDEDLKGAKGLWTKHLAIGPLEKGVEAPLVFWKDKELLMVTTNGDVVNYSLDTQKLKHVPRHGLGEPTNIQAVPYVNSIVSIKPGNKIESI

SEQ ID NO: 19413 - protein, 397 aa, Prunus mume
MEVQILARLPPKSLMRFKCVCKSWHALLNNPHFVAKHLHLYNNQPSSTCVLFKRSVLSRTEHNKEELVFTFLILRNDNEINADHNLINCKVEDLHFPRSMGLKSRGQFIELPGLELGESVHIVGHCDGLFCLSLYTGELVFYNPAIKEFRVLPQSCLEDACSCTLGFGYDPKRKDYVLLSIVSYGEEIFDDERLVIHPPQAEIYTLSTNSWREIETHYLETETTYFWGNETFSAYFNGVFYWLGYEEKKEFVSFYDRLEEEKKQVIILFDTFDEVFHNMPLPDCFYEFPSHEMSLTVWNESIALFGFYRCEFEPFEVWVMDEFDGWTKHLSVVPKVDQEVDIPLALWRRNEVLLVDRDGRIFSYNFDTENLKYLPVHGASRGDFQAVVCVNSIVSVK

SEQ ID NO: 19414 - protein, 428 aa, Prunus mume
MMREMATLSKFSEDMMGNILSRLPPKSLMRFRCVLKSWHDLIDKPSFVDHHLSISMDNKVTSSTYVLLKHNVLTDPSIKDDEKAVRATLFNPDSNQRDILLSSLNLGSLVDDGLEIENHIVPPPMRGYALSLEISGSCDGLICLNTFNSEDIVLCNPALEEYRVLPKSCILLPPRVPRQFEENEDDDYYEEDDDDEIESNPKCVGFGYDPNSKDYKVVRAAQFVSGVFTQHPSKVEVYSLAADTWREVPVDIQPHGSLNPSYQMYFKGFFYWIAYWTEERNVILSFDMSEEVFHDIALPESGPDAYEYTSIAVWKDSLVLLTYPVENEAPKTLDLWVFDEDLKGAKGLWTKHLAIGPLEKGVEAPLVFWKDEELLMVTTNGDVVNYSLDTQKLKHVPRHGLGEPTNIQAVPYVNSIVSIKPGNKIESI

SEQ ID NO: 19415 - protein, 377 aa, Prunus mume
MTFSLRKKEILIDILVRLPAKSLVRFLCTCKSWGDLIGSSSFVSIHLNRNVTKHAHVYLLCLHHPNFERQVDPDDPYVEQKFHWSIFSNETFEECSKLSHPLGSTERYGIYGSSNGLVCISDEILNFDSPIHIWNPSVRKLRTPPMSANINVKFSHVALQFGFHPGLNDYKVVRMMRTNKNALAVEVYSLRTDSWKMIETIPPWLKCTWQHHKGTFFNGVAYHIIEKGPLFSIMSFDSGSEEFEEFLAPDAICNSWGLCIDVYKEQICLLFTFYDCEEEDMEKSDFWVLQEKRWKQLSPFIYPSNCYSTMGISIDNELLMQRRDHIKGGADLYLCNYESKQVLETGLRLGTVTYGEIEFLFSVTYIETLVLLNSLQY

SEQ ID NO: 19416 - protein, 374 aa, Prunus mume
MAFTLRKKEIVIDILVRLPVKSLVRFLCTCKSWSDLIGSSSFVSTHLHRNVTKHAHVYLLCLNHPNVEYLDDRDDPYVKQEFQWSIFPNEIFEECSKLTHPLRSTEDYMIYGSSNGLVCVSDEILNFDSPILIWNPSVKKFRTPPMSININIKFSYVALQFGFHPGVNDYKAVRMMRTNKNALAIEVYSLGTDSWKMIEAIPPWLKCTWQHLKGTFFNGVAYHVIQKGPIFSIISFDSGSEEFEEFIAPDAISTPWGLCIDVYREQICLLFDCYPFGEEGMEKIDLWVLQEKMWKQLRPFIYPEDYCYGIIGINVDNELLMGRRDLAKGVADLYLCNYESKQVIETGIKLGLMSYGEIEFLFSITYIESLVLLN

SEQ ID NO: 19417 - protein, 409 aa, Prunus mume
MWEEMALRPILPRLPSKSLMRFKCVRKSWYSLINNPTFVENHLSNSMHSKLCTCVLFSRFVQRDTNSDGKELAFSFLYLRNDYDDDEHNVNFVVEDIKFPLSSGRFIGLEDVESPSILGHCNGIVCISPCSDNLVLCNPAIKEIKLLPKSGLPDWWGCAVGFGYDPKSKDYKVCRIASYQAEIDGLIPPPRVEIYTLSTDSWREIKNNSLETDTTCFFPDYFQMYFQGICYWVGYEQPKQSVEYEDEEQKPIVIFFDTGDEIFHNLLFPDSFYKYEEGSSYAYEMSYLMYCDLRIILWNGSIALFGFNRFSIFPDSYGVWVLDDFDGAKGSWTKHLTFEPLMGIKRVLEFWRSDEILMVTEDGDIVSYNLATEKLKNLPMNSLSDFETIVYVNSLVSITRGNKLESVDI

SEQ ID NO: 19418 - protein, 399 aa, Prunus mume
MWEEMALRHILPRLPSKSLMRFKCVRKSWYTVINNPTFVENHLSNSMHNKLSTCILVSRFVQSDTNSDEKELAFSFLHLRNDYDDAEHNLNFVVEDIKFPLSSGRFIGLEDVESPSILGHCNGIVCLSPCSDNLVLCNPAIKEIKLLPKSGLPDWWGCAVGFGYDPKSKDYKVSRIASYQAEIDGLIPPPRVEIYTLSTDSWREINNNSLETDSTCFFPDYFQIYFQGICYWVGYEQPKQSVEYEDEEQKPMVIFFDTGDEIFHNLLFPDSFYMYEEGSSYAYEMSYLMYCDLRIILWDGSIALFGFNRFSVCPDSYGVWVLDDFDGAKGSWTKHLNFEPLMGIKRVLEFWRSDEILMVTEDGDIVSFNLAIEKLKNLPMKIPSDFETIVYVNSLLPIT

SEQ ID NO: 19419 - protein, 408 aa, Arabidopsis thaliana
MATIPMDIVNDIFLRLPAKTLVRCRALSKPCYHLINDPDFIESHLHRVLQTGDHLMILLRGALRLYSVDLDSLDSVSDVEHPMKRGGPTEVFGSSNGLIGLSNSPTDLAVFNPSTRQIHRLPPSSIDLPDGSSTRGYVFYGLGYDSVSDDYKVVRMVQFKIDSEDELGCSFPYEVKVFSLKKNSWKRIESVASSIQLLFYFYYHLLYRRGYGVLAGNSLHWVLPRRPGLIAFNLIVRFDLALEEFEIVRFPEAVANGNVDIQMDIGVLDGCLCLMCNYDQSYVDVWMMKEYNVRDSWTKVFTVQKPKSVKSFSYMRPLVYSKDKKKVLLELNNTKLVWFDLESKKMSTLRIKDCPSSYSAELVVSSLVLGCKGDLNNIKYRKEQQAKEAREAKIMQNTKRRCDFFVLL

SEQ ID NO: 19420 - protein, 394 aa, Arabidopsis thaliana
MAECPTDLINEMFLRLRATTLVKCRVLSKPCFSLIDSPEFVSSHLRRRLETGEHLMILLRGPRLLRTVELDSPENVSDIPHPLQAGGFTEVFGSFNGVIGLCNSPVDLAIFNPSTRKIHRLPIEPIDFPERDITREYVFYGLGYDSVGDDFKVVRIVQCKLKEGKKKFPCPVEVKVFSLKKNSWKRVCLMFEFQILWISYYYHLLPRRGYGVVVNNHLHWILPRRQGVIAFNAIIKYDLASDDIGVLSFPQELYIEDNMDIGVLDGCVCLMCYDEYSHVDVWVLKEYEDYKSWTKLYRVPKPESVESVEFIRPLICSKDRSKILLEINNAANLMWFDLESQSLTTAGIECDSSFTADILVSSLVLGCKGDPTQAQRSKDQKMMPKSTKRWYALL

SEQ ID NO: 19421 - protein, 417 aa, Arabidopsis thaliana
MASEKSFKKRKITDDVDGVGVGGGLESLPEDIIADIFSRLPISSIARLMFVCRSWRSVLTQHGRLSSSSSSPTKPCLLLHCDSPIRNGLHFLDLSEEEKRIKTKKFTLRFASSMPEFDVVGSCNGLLCLSDSLYNDSLYLYNPFTTNSLELPECSNKYHDQELVFGFGFHEMTKEYKVLKIVYFRGSSSNNNGIYRGRGRIQYKQSEVQILTLSSKTTDQSLSWRSLGKAPYKFVKRSSEALVNGRLHFVTRPRRHVPDRKFVSFDLEDEEFKEIPKPDCGGLNRTNHRLVNLKGCLCAVVYGNYGKLDIWVMKTYGVKESWGKEYSIGTYLPKGLKQNLDRPMWIWKNAENGKVVRVLCLLENGEILLEYKSRVLVAYDPKLGKFKDLLFHGLPNWFHTVVHAGTLSWFDTPLDLW

SEQ ID NO: 19422 - protein, 377 aa, Prunus dulcis
MTFTLRKKETLIDILVRLPAKSLVRFLCTCKSWMDLIGSSSFVSTHLHRNVTKHAHVSLLCLHHQSFECQVDPDDPYVGQELQWSLFCDETFVLCSKLSHPLGSTEQYYGIYGSSNGLVCISDEILNFDSPIYIWNPSVRKLRTPPLSTNINIKFSHVALQFGFHPGVNDYKTVRMMRTNKSALAVEVYSLRTDCWKMIEAIPPWLKCTWRHHKGTFLNGVAYHIIEKGPIFSIMSFNAGTEEFQEFIAPDAVCSLWELRIDVYKENICLLLDLYPSEEDGMEKIDLWVLQEKRWKQLCPFIYPSDHYYRTIGMSMDNKLLMPRRDYTSGIADLHLCDYESKQVLETGIKLAVMKYGEIEFLFSISYIESLVLLNNY

SEQ ID NO: 19423 - protein, 374 aa, Prunus dulcis
MTFKLGKKEILIDILARLTAKSLVRFLCTCKSWSDLIGRSSFVSTHINRNVTKHAHVYLLCLHHPTFERQNDNDDPFVEEELLWSLFSNETFEQFSKLSNPLGSTEHYGIYGSSNGLVCISDEILNYDSPIHIWNPSVRKFRTPPISPNNIKFVYVALQFGFHSGVNDYKAVRMMRSNKDTFAVEVYSLRTDSWKMIETIPPWLKCTWQHHTGTFFNGAAYHIIEKGPLFSIMSFDSGSEEFEEFIAPDAICNSRGLCIDAYKDQICLLFRFYGCEEEGMRKVDLWVLQEKRWKQLCPFIIPWKYCRTIGTSIDNELLLQKKDFNKGAADLCLCNYESKQVLETGIKLAIMTYGEIDFLFSFTYIESLVLLNNY

SEQ ID NO: 19424 - protein, 380 aa, Prunus dulcis
MTFTPRKKEILIDILVRLPAKSLVRFLFTCKVWSDLISSSSFVSTHLNRNVTKHAHVYFLCFHHPNFECLVDPDDPCFEQELQWSLFSYETFEQCSELSHPLGSPEPYRIYGSTNGLICISDAILSLESPIHIWNPSVRKLRTLPMTTNNIEFSYIDLHFGFHPGVNDYKAVRMMGIDKDAFAVEIYSLSTDSWKRIEVIPPWLKCDWQHYKGIFLNGVVYHLIEKGPTFSLMSFDSGNAEFEEFITPGAICRSRGLFIAVYKEQICLLFDFYCCEEEGMEKIDFWVLEEKQWTQLAPFVYPSDSYKIIGISIDNELLLRKHDFSSVGLADLYLCNYESKQVRQAGIKLAVMEYGHHELFFATTYIESLLFLNKSLKRDV

SEQ ID NO: 19425 - protein, 376 aa, Prunus dulcis
MTFALRKKEILIDILVRLPAKSLVRFLCTCKSWSDLIGSSSFVGTHLHRNVTGHAQAYLLCLHHPNFECQRDDDDPYFKEELQWSLFSNVTFEESSKLSHPLGSTEHYVIYGSSNGLVCISDEIMNFDSPIHIWNPSVKKLRTTPISTSINIKFSHVALQFGFHSGVNDYRAVRMLRTNQNALAVEIYSLRTDSWTMIEAIPPWLKCTWQHHQGTFFNGVAYHIIEKGPTFSVISFDSGSEEFEEFIAPDAICSLWRLCIHVYKEQICLLFGYYSCEEEGMENIDLWVLQEKRWKQLCPFIYDPLDDFYQIIGISTDNKLIMARKDFSKGGVELQLGNYESKQVLETGIKLAIMRYGESEFLFAMTYVESLALLNN

SEQ ID NO: 19426 - protein, 409 aa, Prunus dulcis
MWEEMALRHILPRLPSKSLMRFKCVRKSWYTLINNPTFVENHLSNSMQSKLSTCVLFSRFVQSDANSDEKELAFSLLYLRNDYDDDEHNVNFVVEDIKFPLSSGRFIGLEDVESPSILGHCNGIVCLSPCSDNLVLCNPAIKEIKLLPKSGLPDWWGCAVGFGYDPKSKDYKVSRIASYQAEIDGLIPPPRVEIYTLSTDSWREINNNSLETDSTCFFPDYFQMYFQGICYWVGYEQPKQSVEYEDEEQKPMVIFFDTGDEIFHNLLFPDSFYMYEEGSSYAYEMSYLMYCDLRIILWNGSIALFGFNRFSVFPDSYGVWVLDDFDGAKGSWTKHLTFEPLMGIKRVLEFWKSDEILMVTIDGDIVSYNLDTEKLKNLPMNIPSDFETIVHVNSLVSITGGNKLESVDI

SEQ ID NO: 19427 - protein, 409 aa, Prunus dulcis
MWEEMALRHILPRLPSKSLMRFKCVRKSWYTLINNPTFVENHLSNSMQSKLSTCVLFSRFVQSDANSDEKELAFSFIYLRNDYDDDEHNLNFVVEDIKFPLSSGQFIGLEDVESPSILGHCNGIVCLSPCSDNLVLCNPAIKEIKLLPKSGLPDWWGCAVGFGYDPKSKDYKVSRIASYQVEIDGLIPPPRVEIYSLSTDSWREIKNNSLETDTTCFFPDYFQMYFQGICYWVGYEQPKQSVEYEDEEQKPMVIFFDTGDEIFNHILFPDSFYMYEEGSSYAYEMSYLMYCDLRIILWNGSIALFGFNRFSVFPDSYGVWVLDDFDGAKGSWTKHLTFEPLMGIKRVLEFWRSDEILMVTEDGDIVSYNLATQKLENLPMNSLSDFETIVYVNSLVSITRGNKLESVDI

SEQ ID NO: 19428 - protein, 325 aa, Prunus dulcis
DDEHNLNFVVEDIKFPLSSGQFIGLEDVESPSILGHCNGIVCLSPCSDNLVLCNPAIKEIKLLPKSGLPDWWGCAVGFGYDPKSKDYKVSRIASYQVEIDGLIPPPRVEIYSLSTDSWREIKNNSLETDTTCFFPDYFQMYFQGICYWVGYEQPKQSVEYEDEEQKPMVIFFDTGDEIFNHILFPDSFYMYEEGSSYAYEMSYLMYCDLRIILWNGSIALFGFNRFSVFPDSYGVWVLDDFDGAKGSWTKHLTFEPLMGIKRVLEFWRSDEILMVTEDGDIVSYNLATQKLENLPMNSLSDFETIVYVNSLVSITRGNKLESVDI

SEQ ID NO: 19429 - protein, 449 aa, Oryza sativa (japonica cultivar-group)
MDNAAAPPSSGAAGKEMATAGALPDDLLDEILLRMPARSILRCRAVCKAWRSRTSHPYFLRAHAARSRIIAAAVVDTTAIPDGEFRTTISIRPLGDGDGDRSGAAVSSSSSFASVRFGSRPFVLGSWDGVVCLVPAGVVRPLSRIDRYVLVNPLTKACTSVPPPATRGIVICGYAHPTTSRYHLLHADDAYPYNHMAAATIRILRVGEKNNVWRKIARHPAPACVESRTYIRFGGAPPVSLHGCLHWLVAPLSAASARPLLSVFDMEREEFRQMDAPEQWARHGNLPHMMGVQIARLSGKLCAFVNEPSASALGMWTLEDYSDPSSWRMERSIDYSRHGAGSRNIARTFRNRFSAATTAVEVLPDGVSGNGDVGGGGEEEIMFLFNQFDTREAVYNVGRAAWRWRRILPPPTRRVMAHKECMLPREVSFGGAAHFVEESDIGGHRCICI

SEQ ID NO: 19430 - protein, 852 aa, Oryza sativa
  unsure (1)..(852): unsure at all Xaa locations
MNREETFSAAVESLIMSRDQYNYSRRITTLFSEVFTYHRRNLAPDVGLHRLSISGEGSCFGTATATRGFLHRAQSVPGEFDIVGMMAKRCTDILLAPRPRKTKRIDINSCRSRFLLPYIPDEVMFDVLLRLPSKSLMRFKSVCKAWHAMISSPIFINAHLEWSKLKPSSLLMAPGFYQKQKNGQNIAFLMGLYKYQGGNNNVVHLHDFPRDFPQVLDTWTRPVHCDGLLLVSNMSKKMIIYNPSTREIVSLPKGSRNLHKGTGIGFGFDPRSSKYKVARVFYQRDDKTSMLVCKFEVLTLGTINVWRQTEDPPYPIGKSTPVHVKGAIYWITSLCPDPPNTLVRFCLTDEKFSLFPCPMXNVKPSCLTGLGDELYCGYFFSQPLQLEIWXXCNVCGQKPEWTRRCALQIPPDVIKRPVASPLVVFHGKMLLLALKKVYKYDIQACKLEKIPLVVEDFMCYDRENNMYQTYSKKELRYILQRNNYLLLLLLKLRKVLTKKCATVLLLFQTMIFQRMRTLQTSSLEERLNQARSSKLLILGTICVCIDIGVYVLAKCAAREVGTKVPRPRLFGHMRARHRYDEARHEATTDCLKASHNGGFTGVSCTFNRGHPPPSRAMRQKGVGVHIKQGPPEGPMQDQGYRLLYVEELVLQQLVRQVGMNMFELAFSHPPLSPKGQRDAMVGGHRHVDYEGEARDKEAASEPFSVAQTPSCLSHSSSRRVVCPRQTNHHHHLIARAVTVLSLAKGLGSAQLARRRPLPSSQVKGHNAFRCSATSTLILPHWGVLLAAKALLRHPPHRAGSGTPGGPMDQGCGQPSGCHSLPNCCAEPLLRLHVDVPCGAESCTVAHSIKINL

SEQ ID NO: 19431 - protein, 287 aa, Oryza sativa
  unsure (1)..(287): unsure at all Xaa locations
MRRSADICXAGKDGGLLLSLGQGSCPLXIPDDVIFDILLRLPSKSLIRFKSVCKAWHAIISNPCFISAHLECSKQKPSIFMVPGVYEKQNNGENTSFLMGLYQYQGGNIMEQIHVQXTFHKALVXWSRPIHCNGMLLISTMNHEMIVCNPSTREIVSLPKGSYNLHAGPRAGFGFDPHSNKYKVARFFYQRDDDTSVEVLTLGTNLWRQTEDPPYPIXXGLTPVHVKGAIYWITPLCPDPPNAFLRFCLTNEKFSLLQYPPCNLKPIXVHRSGGXTMLCLLLQSGER

SEQ ID NO: 19432 - protein, 353 aa, Oryza sativa
  unsure (1)..(353): unsure at all Xaa locations
ADSGSWGRAARGKPAGVGGFGGAGEVASDRYIPDDVMFNILSWLPSKSLIRFKSVCKAWHAMISSPCFTDAHLECSKRNPSILMVPGAYEKQEDGENIAFMMVLYKYHGGKTMELVHXAELSARHWXVWTRPVHCNGLLLIPTMNLEMMICNPSTRQIVFLPKVSGNICTGTRAGFGFDPHSNKYKVARSFYQRDSETQVEVLTLGTNAWRQTEDPPYPIDAXNSSPCEXGAIYWIVCSSLCPDLLRFCLTDEKFSLFPCPPXXNVKSVRFTEVEGELCCACFFSETLALEIWNCSGGQNLXXWTRRYVIQIPPDVVMKYPVERPPLIVFREKMLLLXHSKRSTAVLTMKRNX

SEQ ID NO: 19433 - protein, 412 aa, Oryza sativa
  unsure (1)..(412): unsure at all Xaa locations
MMRDSKRTRSAPPREPLEMTEDMTPRSKRRKXXVPFGEGAVLPEEMLTEVFLRLPIKSILRFRAACHSRYAMLSSQEFCQLYITRTEAMPPQPKLLFISPTANFNSTAGTRARHRSPLMTYCSHSMMCVETMWXVAPSPCHGLTLLYNAVAPAYYVFNATTRAITRLPPYHVIHATAGVGFDARTKEFKVVRLFRGKSHEIHSVXVXDIHSWGXGRGSLEAYRWWSTFQVLXSFALSAIRNAVANKLQPVFVNGFLHWLINPSFLLKAPRAAIISFSLTDETFRWIRSPPFXGIQSAXLAELDDQLCMVRDLRNGLPTGSMFEIWRLNDYNSGDWSLDYRIGLXXGNLPRDLLEPRIVKVIGSFGSYRSSKKIIIATSKHKVCAYDPVSRTLETIVSIDQHGDLQCLSKREI

SEQ ID NO: 19434 - protein, 415 aa, Oryza sativa
  unsure (1)..(415): unsure at all Xaa locations
MMQQDSKRKRSVLPETATLAPGSKRRRRKSVPSXSCXXAMLPDELLTEVCLRLPVKSILRFRAACRSWDAMLSSEEFGQLYAARAEAKLLFVSPTANFNSTAVYKCSPSKPTDDLLLTLDDVPETMWSAPCHGLSLLYDGIAPAYYVMNATTRAVTRLPPFRDVAFATAGLGCDARTKKYKVVRLFEGNLLEKEFLKCEIYTLGGDEGDIWRPAAGGVPFRFYSFARSAISNELQPLFFNGYLHWVDQPNHVKLPRASILSFSLTDETFRWIRSPPFXXASGVHLVELDGNLCMVRDLRDRSTAVCKLEIWKLKDYNSGDWSLDHRIDLXXGQLPRDYLSHRXVKVSGSSGSCRSGTKSIIATSKHKVCSYDPVSRTLETITSISETCTSYQNEKSDIRFSLFKECLTATASVLX

SEQ ID NO: 19435 - protein, 449 aa, Oryza sativa; identical to SEQ ID NO: 19429

SEQ ID NO: 19436 - protein, 413 aa, Triticum aestivum
FLRRVVLLAVVICKLAMEDNNDEHNVSLPQDIQHTILASLPARVVLKFRTVCRFWRDCIQEPNFVDRHLNNALRSHQSIACFTSVDEGLVCMYTFDPTTLNCKSMDLVLSSRFQMSDPCHGLVCAYDLEGAVEVLNPTRRIHLRLPVSELQSLASEYFLGPVPSTKEYKVLCIHHRVRFLTFEVCTVGTQSWRAVRESAGLLKTTKAVIVNDVMHWLLLDEISSNFTRNILSFNLTDEMFSETAVPDAVKDRELHLFEGGGKLHLLAMPGEGSAPKTSEIWVANSTCAVWDHMCNIAFVLPLGMRPLFLHNNKLFYCNQRRFYYVDLQDGSGSYLNMPFGECIISAGIFVESLVLHSVTGLVDSRTTLQSPHDARSFPIGRGPSARGAGSSSAGPRRSFKKAKSNINMQWRLA

SEQ ID NO: 19437 - protein, 468 aa, Zea mays
IFFFSLVATPGRPSLPPTVPRSSCPPFAGAEHEKNCSCILSMDCNSDDLDKQNEVTGSRVFIPQDAQGVILAFLPGRDVVKLRSVCKFWLECVEEHSFMDRHLNNACRYHQSIACFTSLDHGLVHMYTFDPATMNFRSVELVFSSRFNMSAPCNGLVCAYDIKGDAEVLNPTTRKHLRLPDSALKSRSLYSEYFVGFVHSTKQYKVVSIRHHVRFLTFEICTIGAPSWRTIHESAELLVATKAVIVKDGMYWLLLDEASSYSSREILTLNLTDERFSKIAIPDAVKSHKLELFEGEGKLRLLSTHSDGSSNIVSDIWVADLAREDWVHLQTIIPLTHLGISPFFQLKTKVFFGNQKRLLCVDLQDGTVSYINMPSGETLISCGMFVESFAPAATGLVSSTASYGDRSRLAEPSMADPGPSFRGAGSSSASRGRSSGLTGWSSADLEQSFKRTKRTTNMQWKISKHRAI

SEQ ID NO: 19438 - protein, 405 aa, Zea mays
  unsure (1)..(405): unsure at all Xaa locations
XQRTYPQIPNFFCSANWLRLAGAASRRGAPTMMADEAERVPPWQQGGXGSDDENIIYDILLRLPPKSVVRCRAVCKSWLRLASDHIFLVDHHRCQPSLPLLYFIXSTTSATRISANCPRILQPRQLVDAPWPXERRLALHGSCDGVLLLSSDDSLYLYNPTTRHWGCLPPLHSDNTIAGFYWHRISDDYRVLYFRRHEDGKYCYYVMEAGTKRQRLVSRQVSLIHSSWPTKCARRTPPVLLHGNLHWPXLSHQGPXTIAVFDTVAEVLRFMLSPAVYGTACLTQMXSCLTWMGDDGPSRVDLWFLEDYNDRVWVCKYRIELPVEDISRFHEFEDVWNAVVVSHEGDVLVDLWNRLLGYDREGNSVANLLCDCSLMEIGPHMLKRSLVPHALLGMNNHSPNKPPFL

SEQ ID NO: 19439 - protein, 376 aa, Antirrhinum hispanicum
MMDRRFPRQDVTSEILLFSSVKSLLRFRLVSKSWCSLIKSNDFIDNHLLRRQTNGNVMVVKRYVRTPERDMFSFYNINSPELDELLPDLPNPYFKNIKFDYDYFYLPQRVNLMGPCNGLICLAYGDCVLLSNPALREIKRLPPTPFANPEGHCTDIIGYGFGNTCNDCYKVVLIESVGPEDHHINIYVYYSDTNSWKHIEDDSTPIKYICHFPCNELFFKGAFHWNANSTDIFYADFILTFDIITEVFKEMAYPHCLAQFSNSFLSLMSLNECLAMVRYKEWMEEPELFDIWVMKQYGVRESWTKQYVIGPQVVVCSHVCWKSDECLIVEDGNGQLVSCAFRTNEIKKLPIYAVEETLRVLIVDESLISLNRVLNF

SEQ ID NO: 19440 - protein, 376 aa, Antirrhinum hispanicum
MMDRRFPRQDVISEILLFSSVKSLLRFRCVSKSWCSLIKSNDFIDNHLLRRQTNGNVMVVKRYVRTPERDMFSFYNINSPELDELLPDLPNPYFKNIKFDYDYFYLPQRVNLMGPCNGLICLAYGDCVLLSNPALREIKRLPPTPFANPEGHCTDIIGYGFGNTCNDCYKVVLIESVGPEDHHINIYVYYSDTNSWKHIEDDSTPIKYICHFPCNELFFKGAFHWNANSTDIFYADFILTFDIITEVFKEMAYPHCLAQFSNSFLSLMSLNECLAMVRYKEWMEDPELFDIWVMNQYGVRESWTKQYVIGPQVVVCSHVCWKNDECLIVEDGNGQLVSCAFRTNKIEKLPIYAVEETLRVLIVDESLISLNRVLNL

SEQ ID NO: 19441 - protein, 518 aa, Arabidopsis thaliana
MGQSTSAAGNSILNRRRSKSFTLKFPIESIESEISQPDYTSSLPDECLALVFQFLNSGNRKRCALVCRRWMIVEGQNRYRLSLHARSDLITSIPSLFSRFDSVTKLSLKCDRRSVSIGDEALVKISLRCRNLKRLKLRACRELTDVGMAAFAENCKDLKIFSCGSCDFGAKGVKAVLDHCSNLEELSIKRLRGFTDIAPEMIGPGVAASSLKSICLKELYNGQCFGPVIVGAKNLKSLKLFRCSGDWDLLLQEMSGKDHGVVEIHLERMQVSDVALSAISYCSSLESLHLVKTPECTNFGLAAIAEKCKRLRKLHIDGWKANLIGDEGLVAVAKFCSQLQELVLIGVNPTTLSLGMLAAKCLNLERLALCGCDTFGDPELSCIAAKCPALRKLCIKNCPISDVGIENLANGCPGLTKVKIKKCKGVLGGCADWLRTVRPMLSVNADTMEQEHEEAASNDVVGGSQENGIEFPQLNSQIMASSIASSSRNRSGYFKSGIGLFSGMSLVPCTSRQRRASR

SEQ ID NO: 19442 - protein, 554 aa, Arabidopsis thaliana
MNIYIFSKEKKRKKVVCDNLSKTRGSRREHCEPHRRRMGQSTSKFRRSKTTFTSPVLPNLREQNSGADEPYDYISNLPDECLSLIFQSLTCADLKRCSLVCRRWLTIEGQCRHRLSLKAQSDLISVIPSLFTRFDSVTKLVLRSDRRSLGICDNAFVMISVRCRNLTRLKLRGCPEISDLGIIGFTENCRSLKKVSFGSCGFGVKGMNALLNTCLGLEELSVKRLRGIGAGAELIGPGGAAGSLKVICLKELHNGQCFAPLLSGAKGLRILKIFRCSGDWDRVFEAVRDKVNAIVEIHLERIQMSDLGLTALSKCSGVEVLHLVKTPDCTNVGLALVAERCKLLRKLHIDGWKTNRIGDEGLIVVAKYCWNLQELVLIGVNPTKLSLEAIVSNCLNLERLALCGSDTVGDTELCCIAEKCLALRKLCIKNCPITDDGIKALGNGCPNLLKVKVKKCRGVTTQGADLLRKRRALLVVNLDAPETPIVEGSVGEGGAQENAVEFPPSRLQIPTIGLASGSTSRSSSFKLRLGFLSQRNFVSCALRRLGSRSRSRNE

SEQ ID NO: 19443 - protein, 550 aa, Nicotiana tabacum
MGQYSSTHCGGGPKLRHRNLHPSPLPNHHRSTSESDFFSLMNSDEDESILPSDFENPDYTYELPDECLALIFQCLSSGDRKKCSLVWRRWLLVEGQSRHRLSLNAKAEFLPHIPTIFSRFDSGTKLALRCDRKSVSINDEALTLISLRCVNLTRLKLRGCRDVTDVGMSAFAKNCKSLKKFSCGSCMFGAKGMNALLDHCSTLEELSVKRLRGINDGFAADPIGPGAAASSLKSICLKELYNGQCFEPLIIGSKNLRTLKLLRCLGDWDRLFETIGSRENHVAEIHLERLQVSDTGLNAISNCPNLEILHLVKTPECTDAGVVAVARKCKLLRKLHIDGWRTNRIGDEGLVAIAENSLNLKELVLIGLNPTSPSLLAIASNCQKLERLALCGSDTIGDPEVSCIATKCMALKKLCIKGCEVTDEGFESFAWGCPNLVKIKVKKCKHVTGDVADWLRARRRSLAVNLDVGEVDVEPVDGSASDGGALEDAVEFQPIANTLPVIGAADIPSTSNVGRSAAAKSWFGFFGGRGLVACTLRRLSNGNGDSNESL

SEQ ID NO: 19444 - protein, 462 aa, Oryza sativa
  unsure (1)..(462): unsure at all Xaa locations
XLLGSADRKRCSLVCRRWLSVDAASRLRLALDARAPLHAALPGILARFPAVSKLALKCDRRAESVADPTLALLADRLAALRRLKLRSIRLVTDDGVAALAAAATNLRKLSVGSCTFGAKGIEAVLRSCLHLEELSIKRLRGLAQSEPVAVSSLCLHSLCLKELYNGQCFSSLITNSPNLKTLKIIRCSGDWDPVLQDLPQDAMLAELHLEKLQVSDRGVSALSGLEVLYLAKAPEVTDVGLGKLATRSPRLRKLHVDGWKANRIGDRGLAAVAQKCAALQELVLIGVNLTSASLELIAANCPALERLALCGSDTFGDAEISCVATKCAALRKLCIKACPVSDAGMDKLAQGCPRLVKVKVKKCQGVTPECAERLRASRKALAVNVDTRAGELQDARSVDESGVLENAGSEPDDLDDRIGGPDLSCGSSGRPSGWKARMGAFMSRSLSVSMFRRRPRVSCYES

SEQ ID NO: 19445 - protein, 497 aa, Oryza sativa
  unsure (1)..(497): unsure at all Xaa locations
PFLSSSSSSSSHGAAQGAADDAGGGGGRAAHRRRRRKVRGAAXXERDHTQDLPDEILSLVFAWVTPTDRNACSLTCARWKEVDASTRHRLSLDARAALGYAAQGIFARFTAVSKLALRCARGSVSDDGARQVAAALPSARLARLKLRGLRQLSDDGLASLAGATPVIRKLSVASCSFGPKAFVAVLRSCPLLEDLSVKRLRGLPDTAGATTAITEAASSLRSVCLKDLYSALCFVPLVASSPNLRSLKILRCSGSWDLPLEVIAARVPGLVELHLEKLQVGDRGLSAVSACANLEVLFLVKTPECTDAGIISVAEKCHKLRKLHIDGWRTNRIGDHGLMAVARGCPDLQELVLIGVNPTVQSLRMLGEHCRSLERLALCGCETVGDPEIICLAERCAALKKLCIKGCPVSDRGMWALNGGCPSLVKVKLKRCRGVSYECIENLKVVRGGSFSISLDIVLERDAGGAIENGGQEAGQDEERHVSTQEEVWQSSSSVMX

SEQ ID NO: 19446 - protein, 277 aa, Oryza sativa
  unsure (1)..(277): unsure at all Xaa locations
XARVPGLVELHLEKLQVGDRGLSAVSACANLEVLFLVKTPECTDAGIISVAEKCHKLRKLHIDGWRTNRIGDHGLMAVARGCSDLQELVLMGVTPTVQSLRMLGEHCRSLERLALCGCETVGDPEIICLAERCAALKKLCIKGCPVSDRGMWALNGGCPSLVKVKLKRCRGVSYECIEXTLKVVRGGSFSISWDIVLEREAGGANEXMAGKRLDRCKIQSLLDQMAAMDLPTNARNCTIILKKGFGLAFGRGTPTAQKERKKKKKKKLETSSLPRAE

SEQ ID NO: 19447 - protein, 266 aa, Oryza sativa
  unsure (1)..(266): unsure at all Xaa locations
EVDASTRHRPSLDARAALGYAAQGIFARFTAVSKLALRCARGSGTDSLSDDGARQVAVPSARLARLKLRGLRQLSDDGLASLAGATPFWAQGLRRRPPVGPLLEDLSVKRLRGLPDTAGATTAITEAPASSLRSVCLKDLYSALCFVPLVASSPNLRSLKILRCSGSWALPLEVIAARVPGLVELHLEKLQVGDRGLSAVSACANLEVLFLVKTPECTDAGIISVAEKCHKLRKLHIDXWRTNRIGDHGLMAVARGCPDLQELVLX

SEQ ID NO: 19448 - protein, 172 aa, Oryza sativa
  unsure (1)..(172): unsure at all Xaa locations
XPTDRNACSLTCARWKEVDASTRHRPSLDARAALGYAAQGIFARFTAVSKLALRCARGSVSDDGARQVAAALPSARLARLKLRGLRQLSDDGLASLAGATPVIRKLSVASAGATTAITEEILFPPASSLRSVCLKDLYSALCFVPLVASSPNLRSLKILRCSGSWALPLEVX

SEQ ID NO: 19449 - protein, 222 aa, Oryza sativa
  unsure (1)..(222): unsure at all Xaa locations
XMLGEHCXRSLERXLALCGCETVGDPXXIICLAERCAALKKLCIKGCPVSDRGMWALNGGCPSLVKVKLKRCRGVSYECIENLKVVRXWLIGGGGGVLYMERDAGGAIENGGQEAGQVQITELTDQMAAMDLPTNASNAQSSAQAGSRMRSVMSALRRRFGNPPALXCEIKKIDEPICYFMHSNLIFMFLRLLILLSSSRKIIMMDNSVLPLLFHQQLLPFL

SEQ ID NO: 19450 - protein, 163 aa, Oryza sativa
  unsure (1)..(163): unsure at all Xaa locations
MASPSPPIAAPGIEFTAPPPGRDHTQDCSLTYAQWKEVDASTRHRLPLDARAALGYTAQRIFARFMAITKLTLRYAQGSGTDSLSDEGHAMWSPRCRRLARLKLRGLRQLFDDGIASLAGATPVIRKLSVASISFGPKAFVTVLRSCPLLEDLSVKRLRGLLX

SEQ ID NO: 19451 - protein, 363 aa, Triticum aestivum
  unsure (1)..(363): unsure at all Xaa locations
INLRKLSVGSCTFGAKGIEAVLRSCPQLEELSVKRLRGLADSEPITVSSPRLQSLALKELYNGQCFSCLITRSPNLKTLKIIRCSGDWDPVLQAIPQGALLAELHLEKLQVSDLGVAALXXGLEVLYLAKAPEVTDVGLAALATKSPRLRKLHVDGWKANRIGDRGLATVAQKCAALQELVLLGXVNLTSASLELVAANCPTLERLALCGSDTFGDAEISCXAIKCXSLRKLCIKACPVSDAXXDKLAAGCPRLVKVKVKKXRRVTFEFSERLRASRHGALAVNFDTPGGAGELQDASVDESGLLENAGSDVVQVDDQIGVPDLLCGTSGRPSGWKAWMSALIPRSLSVSMFRRRPRGSSHNS

SEQ ID NO: 19452 - protein, 163 aa, Triticum aestivum
  unsure (1)..(163): unsure at all Xaa locations
XSGAVTATAITEDILFPLAMSLRSVCLKDLYSALCFVPLVSSSPNLRSLKILRCSGAWDLPLEVIAARAPGLVEIHLEKLQVGDRGLTAVSACANLEVLFLVKTPECTDGGIISVAQNCHKLRKLHIDGWRTNRIGDCGLMAVARGCPDLQELVLIGVNPTVX

SEQ ID NO: 19453 - protein, 194 aa, Triticum aestivum
  unsure (1)..(194): unsure at all Xaa locations
XDLQELVLIGVNPTVQSLRMLGEHCRALERLALCGCETVGDTEIICLAERCAALKKLCIKGCPVTDRGMGALNGGCPSLVKVKLKRCRGVSYECVEHLKMARGDSFSISLDIVLEHDAVAPSENGVQETGQQAQVTELTGQMAAMDLPTNAAGAQSFAQANSRMRSVMSARDLATLHQRDVGWKSMNSFAIDRF

SEQ ID NO: 19454 - protein, 517 aa, Zea mays
  unsure (1)..(517): unsure at all Xaa locations
MGHSLSSHSKSTLSSPPRRSRSLSPMSPPPLRLTAPDYTQDLPDEILALVFASLSPTDRNACSLACSRWMEVDATTRHRLSLDARAALGNAAPALFARFTAVTKLALRWARGSVSDYGAAAVATALPSGRLSRLKLRGLRQLSDAGLASLAAAAPAIRKLSVASCTFGPKAFVAVLQSCPLLEDLSVKRLRGLPDTAGATTSIAEAASSLRSVCLKDLYNALCFVPLVASSPNLRSLKILRCSGAWDLPLEVIAARAPGLVELHLEKLQVGDRGLAALSACANLEVLFLVKTPECTDSGIISVAEKCHKLRKLHVDGWRTNRIGDFGLMAVARGCPDLQELVLIGVNPTVLSLRMLGEHCRLLERLALCGCETVGDAEIICLAERWAALKKLCIKGCPVSDRGMEALNGGCPGLVKVKLKRCRGVSYECIENLKVTRGESFSISLDVVLEHDAGSTSXXNGAQENGQEITELAGQMTGMDLLTNAAGTQSSIHTINRMRSVMSAXPAXVWQSSATMM

SEQ ID NO: 19455 - protein, 522 aa, Zea mays
  unsure (1)..(522): unsure at all Xaa locations
MGHSPSSLSKSGPSSPPRRSRSFSPMAPPQQLRLTAPLQDYTQDLPDEILALVFASLSPTDRNACSLTCSRWMEVDATTRHRLSLDARAALGNAATALFSRFTAVTKLALRCARDSVSDHGAAALAAALPSERLARLKLRGLRQLSDAGLASLAAGAPAIRKLSIASCTFGPRAFVAVLQSCPPXLEDLSVKRLPSVADTSGAASSIAEAASSLRSVCVKDLYNALCFVPLVASSPNLRSLKILRCSGAWDLPLEVIAARAPGLVELHLEKLQVGDRGLAALSACANLEVLFLVKTPECTDSGIISVAEKCHKLRKLHVDGWRTNRIGDFGLMAVARGCPDLQELVLIGVNPTVLSLRMLGEHCRLLERLALCGCETVGDAEIICLAERWAALKKLCIKGCPVSDRGMEALNGGCPSLVKVKLKRCRGVSYECIENLKVTRGESFSISLDVVLEHDAGSTSXXNGAQENGQTQITELAGQMTGMDLLTNAAGTQSSIHTINRMRSVMSAXPAXVWQSSATMM

SEQ ID NO: 19456 - protein, 336 aa, Zea mays
  unsure (1)..(336): unsure at all Xaa locations
LEELSVKRLRGLAESEPISVSSPRLQSLSLKDLYNGQCFSCLITQSPNLKTLKIIRCAGNWDIVLQDVPRDSLLAELHLEKLQVSDWGVAALXXGLEVLYLAKAPEVTDIGLAELAAKSPRLRKLHVDGWKANRIGDRGLAAVAQKCXSLQELVLIGVNLTSLSLELIATNCPTLERLALCGSDTFGDAEMSCVASKCSALRKLCIKACPVSDAGMNKLAEGCPRLVKVKVKKCRRVTSECAEHLRASRKALAVNFDTPGGAGELQDGRSVDGGALDNGDVLPEDLDDRIGPDLSSGSSGRPSRWKALMGALMLRSFSVSIFQRQPRGACSTSHES

SEQ ID NO: 19457 - protein, 333 aa, Zea mays
  unsure (1)..(333): unsure at all Xaa locations
XLSADLIRVIIDTAGATTSIGEATSSLRSVCLKDLYSALCFVPLVASSPELRSLKILRCSGAWDLPLEVITARAPGLVELHLEKLQVGDRGLAALSACANLEVLFLVKTPECTDSGIISVAEKCHRLRKLHVDGWRTNRIGDFGLMAVARGCPNLQELVLIGVNPTVLSLRMLGEHCRTLERLALCGCETVGDAEIICLAERWAALKKLCIKGCPVSDRGMEALNGGCPSLVKVKLKRCRGVSYECIENLKVTRGGSFSISLDIVLEHDARSASXXNGAQENGQEITALTDQMAGMDLPVNAAGAXXSSTHTITRMRSVVSALRRRFGNPPPP

SEQ ID NO: 19458 - protein, 215 aa, Zea mays
  unsure (1)..(215): unsure at all Xaa locations
HGPLSLLAFQIHPLLLVCAARVIIDRDYTQDLPDEILALVFASLSPTDRNACSLACSRWMEVDATTRHRLSLDARAALGNAAPALFARFTAVTKLALRCGSGADSLSDYGAAAVATXRCRRLSRLKLRGLRQLSDAGLASLAAAAPAIRKLSVASCTFGPKAFVAVLQSCPLLEDLSVKRLRGLHTAGATTFIAEDIKSSSLRSCCLKELYSALC

SEQ ID NO: 19459 - protein, 273 aa, Mus musculus
MHRLPTQKEERASSPPVEVGEPREFVLQPAPQGRAVRCRLTRDKKGMDRGMYPSYFLHLDTEKKVFLLAGRKRKRSKTANYLISSDPTNLSRGGENFIGKLRSNLLGNRFTVFDNGQNPQRGGGGDVGSLRQELAAVVYETNVLGFRGPRRMTVIIPGMNSDNERVPIRPRNASDGLLVRWQNKTLESLIELHNKPPIWNEDSGSYTLNFQGRVTQASVKNFQIVHADDPDYIVLQFGRVAEDAFTLDYRYPLCALQAFAIALSSFDGKLACE

SEQ ID NO: 19460 - protein, 543 aa, Mus musculus
MPLQEETLREVWASDSGHEEDCLSPEPPLRPKQRPAQGQKLRKKKPETPDSLESKPRKAGAGRRKHEEPPADSAEPRAAQTVYAKFLRDPEAKKRDPRENFLVARAPDLGGEENSEEDSDDDDNDDDEEEEEKKEGKKEKSSLPPKKAPKEREKKAKALGPRGDVGSPDAPRKPLRTKKKEVGEGTKLRKAKKKGPGETDKDPAGSPAALRKEFPAAMFLVGEGGAAEKGVKKKGPPKGSEEEKKEEEEEVEEEVASAVMKNSNQKGRAKGKGKKKVKEERASSPPVEVGEPREFVLQPAPQGRAVRCRLTRDKKGMDRGMYPSYFLHLDTEKKVFLLAGRKRKRSKTANYLISSDPTNLSRGGENFIGKLRSNLLGNRFTVFDNGQNPQRGGGGDVGSLRQELAAVVYETNVLGFRGPRRMTVIIPGMNSDNERVPIRPRNASDGLLVRWQNKTLESLIELHNKPPIWNEDSGSYTLNFQGRVTQASVKNFQIVHADDPDYIVLQFGRVAEDAFTLDYRYPLCALQAFAIALSSFDGKLACE

SEQ ID NO: 19461 - protein, 505 aa, Mus musculus
MTSKPHSDWIPYSVLDDEGSNLRQQKLDRQRALLEQKQKKKRQEPLMVQANADGRPRSRRARQSEEQAPLVESYLSSSGSTSYQVQEADSIASVQLGATRPPAPASAKKSKGAAASGGQGGAPRKEKKGKHKGTSGPATLAEDKSEAQGPVQILTVGQSDHDKDAGETAAGGGAQPSGQDLRATMQRKGISSSMSFDEDEDEDENSSSSSQLNSNTRPSSATSRKSIREAASAPSPAAPEPPVDIEVQDLEEFALRPAPQGITIKCRITRDKKGMDRGMYPTYFLHLDREDGKKVFLLAGRKRKKSKTSNYLISVDPTDLSRGGDSYIGKLRSNLMGTKFTVYDNGVNPQKASSSTLESGTLRQELAAVCYETNVLGFKGPRKMSVIVPGMNMVHERVCIRPRNEHETLLARWQNKNTESIIELQNKTPVWNDDTQSYVLNFHGRVTQASVKNFQIIHGNDPDYIVMQFGRVAEDVFTMDYNYPLCALQAFAIALSSFDSKLACE

SEQ ID NO: 19462 - protein, 265 aa, Mus musculus
GSVDIEVQDLEEFALRPAPQGITIKCRITRDKKGMDRGMFPTYFLHLDREDGKKVFLLAGRKRKKSKTSNYLISVDPTDLSRGGDSYIGKLRSNLMGTKFTVYDNGVNPQKASSSTLESGTLRQELAAVCYETNVLGFKGPRKMSVIVPGMNMVHERVCIRPRNEHETLLARWQNKNTESIIELQNKTPVWNDDTQSYVLNFHGRVTQASVKNFQIIHGNDPDYIVMQFGRVAEDVFTMDYNYPLCALQAFAIALSSFDSKLACE

SEQ ID NO: 19463 - protein, 459 aa, Mus musculus
MVQANADGRPRSRRARQSEEQAPLVESYLSSSGSTSYQVQEADSIASVQLGATRPPAPASAKKSKGAAASGGQGGAPRKEKKGKHKGTSGPATLAEDKSEAQGPVQILTVGQSDHDKDAGETAAGGGAQPSGQDLRATMQRKGISSSMSFDEDEDEDENSSSSSQLNSNTRPSSATSRKSIREAASAPSPAAPEPPVDIEVQDLEEFALRPAPQGITIKCRITRDKKGMDRGMYPTYFLHLDREDGKKVFLLAGRKRKKSKTSNYLISVDPTDLSRGGDSYIGKLRSNLMGTKFTVYDNGVNPQKASSSTLESGTLRQELAAVCYETNVLGFKGPRKMSVIVPGMNMVHERVCIRPRNEHETLLARWQNKNTESIIELQNKTPVWNDDTQSYVLNFHGRVTQASVKNFQIIHGNDPDYIVMQFGRVAEDVFTMDYNYPLCALQAFAIALSSFDSKLACE

SEQ ID NO: 19464 - protein, 265 aa, Mus musculus
GSVDIEVQDLEEFALRPAPQGITIKCRITRDKKGMDRGMFPTYFLHLDREDGKKVFLLAGRKRKKSKTSNYLISVDPTDLSRGGDSYIGKLRSNLMGTKFTVYDNGVNPQKASSSTLESGTLRQELAAVCYETNVLGFKGPRKMSVIVPGMNMVHERVCIRPRNEHETLLARWQNKNTESIIELQNKTPVWNDDTESYVLNFHGRVTQASVKNFQIIHGNDPDYIVMQFGRVAEDVFTMDYNYPLCALQAFAIALSSFDSKLACE

SEQ ID NO: 19465 - protein, 564 aa, Mus musculus
GTRDREGPRGPRSGASQENEQWKKETLEDEFSGVRLQKLEQQRQLFEKKQRRKRQEPLMVQANPDATLRHRRPRRGEERFQSDSSWGLGVGSPFLQENVPQAHLPSGAHSALVTMSYVADGSGERAPLLSPRGAVYTRGNGPAVRHHLCWLPDSSDSDVEEVTMEDIPVISRPPQTNLANLRRGWLASPGPGISQEEKEEEVGSTDARVEDKTPSPDPDPDPTVNSDGDHGDLAPCKVEENTAQKNTETASGIGDEDREKGEVTESTETNYAPVASKVLQGDDGDASNHNAWNMTCPQPRIPGPRLGEDMEAYVLLPAPRDHMVQWRIVRNKHGMDKGMFPSYYLYLEGEDGVAHFLLAGRKRKRSKTSNYLISLDPKDMSRNGSNFVGKVRSNVLGTKFTIFDNGVNPERSYWVPDSARIREELGVVCYETNVLGFRGPRKMTVILPGMDSRKQRMKVQPQNDQDSILSRVQKGAGHGLLLLQNKAPSWSDESGAYVLNFHGRVTRASVKNFQIVHPDEPDHLVLQFGRVAPNIFTMDFRYPLCPLQAFAICLSSFDGKLACE

SEQ ID NO: 19466 - protein, 460 aa, Mus musculus
MEAARCAPGPRGDSAFDDETLRLRQLKLDNQRALLEKKQRKKRLEPLMVQPNPEARLRRLKPRGSEEHTPLVDPQMPRSDVILHGIDGPAAFLKPEAQDLESKPQVLSVGSPAPEEGTEGSADGESPEETAPKPDLQEILQKHGILSSVNYDEEPDKEEDEGGNLSSPSARSEESAAASQKAASETGASGVTAQQGDAQLGEVENLEDFAYSPAPRGVTVKCKVTRDKKGMDRGLFPTYYMHLEREENRKIFLLAGRKRKKSKTSNYLVSTDPTDLSREGESYIGKLRSNLMGTKFTVYDHGVNPVKAQGLVEKAHTRQELAAICYETNVLGFKGPRKMSVIIPGMNMNHERIPFRPRNEHESLLSKWQNKSMENLIELHNKAPVWNDDTQSYVLNFHGRVTQASVKNFQIVHGNDPDYIVMQFGRVADDVFTLDYNYPLCALQAFAIGLSSFDSKLACE

SEQ ID NO: 19467 - protein, 271 aa, Mus musculus
MTCPQPRIPGPRLGEDMEAYVLVPAPRDHMVQWRIVRNKHGMDKGMFPSYYLYLEGEDGVAHFLLAGRKRKRSKTSNYLISLDPKDMSRNGSNFVGKVRSNVLGTKFTIFDNGVNPERSYWVPDSARIREELGVVCYETNVLGFRGPRKMTVILPGMDSRKQRMKVQPQNDQDSILSRVQKGAGHGLLLLQNKAPSWSDESGAYVLNFHGRVSRASVKNFQIVHPDEPDHLVLQFGRVAPNIFTMDFRYPLCPLQAFAICLSSFDGKLACE

SEQ ID NO: 19468 - protein, 562 aa, Mus musculus
MDREGPRGPRSGASQENEQWKKETLEDEFSGVRLQKLEQQRQLFEKKQRRKRQEPLMVQANPDATLRHRRPRRGEERFQSDSSWGLGVGSPFLQENVPQAHLPSGAHSALVTMSYVADGSGERAPLLSPRGAVYTRGNGPAVRHHLCWLPDSSDSDVEEVTMEDIPVISRPPQTNLANLRRGWLASPGPGISQEEKEEEVGSTDARVEDKTPSPDPDPDPTVNSDGDHGDLAPCKVEENTAQKNTETASGIGDEDREKGEVTESTETNYAPVASKVLQGDDGDASNHNAWNMTCPQPRIPGPRLGEDMEAYVLLPAPRDHMVQCRIVRNKHGMDKGMFPSYYLYLEAEDGVAHFLLAGRKRKRSKTSNYLISLDPKDMSRNGSNFVGKVRSNVLGTKFTIFDNGVNPERSYWVPDSARIREELGVVCYETNVLGFRGPRKMTVILPGMDSRKQRMKVQPQNDQDSILSRVQKGAGHGLLLLQNKAPSWSDESGAYVLNFHGRVTRASVKNFQIVHPDEPDHLVLQFGRVAPNIFTMDFRYPLCPLQAFAICLSSFDGKLAFF

SEQ ID NO: 19469 - protein, 269 aa, Mus musculus
MTCPQPRIPGPRLGEDMEAYVLLPAPRDHMVQCRIVRNKHGMDKGMFPSYYLYLEAEDGVAHFLLAGRKRKRSKTSNYLISLDPKDMSRNGSNFVGKVRSNVLGTKFTIFDNGVNPERSYWVPDSARIREELGVVCYETNVLGFRGPRKMTVILPGMDSRKQRMKVQPQNDQDSILSRVQKGAGHGLLLLQNKAPSWSDESGAYVLNFHGRVTRASVKNFQIVHPDEPDHLVLQFGRVAPNIFTMDFRYPLCPLQAFAICLSSFDGKLA

SEQ ID NO: 19470 - protein, 486 aa, Mus musculus
MPLQEETLREVWASDSGHEEDCLSPEPPLRPKQRPAQGQKLRKKKPETPDSLESKPRKAGAGRRKHEEPPADSAEPRAAQTVYAKFLRDPEAKKRDPRENFLVARAPDLGGEENSEEDSDDDDNDDDEEEEEKKEGKKEKSSLPPKKAPKEREKKAKALGPRGDVGSPDAPRKPLRTKKKEVGEGTKLRKAKKKGPGETDKDPAGSPAALRKEFPAAMFLVGEGGAAEKGVKKKGPPKGSEEEKKEEEEEVEEEVASAVMKNSNQKGRAKGKGKKKVKEERASSPPVEVGEPREFVLQPAPQGRAVRCRLTRDKKGMDRGMYPSYFLHLDTEKKVFLLAGRKRKRSKTANYLISSDPTNLSRGGENFIGKLRSNLLGNRFTVFDNGQNPQRGGGGDVGSLRQELAAVVYETNVLGFRGPRRMTVIIPGMNSDNERVPIRPRNVSFYHPTPYPSEPCFLFNHSTGPGIQLGQVTLESARASDSSGHS

SEQ ID NO: 19471 - protein, 512 aa, Rattus norvegicus
MPLQEETLREVWASDSGHEEDWLSPEPPPRPKQRPAQGQKLRKKKPETPESPESKPPRRAGAGRRKHGEPPADPAEPRTEQTVYAKFLRDPEAKKRDPRETFLVARAPDVGGGDVGSPDAPQKPLKTKKKEVGEGTKLRKVKKKGAGETDKNPSESPATVRKKIPASMFLVGEGGTAEKGVKKKGSRMFPKVQSPFWLDVFHCRDMLLSTLKGNVHRPEYTVNPETRLRVLSTAPLRRETTQEPAPKEERAPSPPVEVGEPREFVLQPAPQGRAVRCRLTRDKKGMDRGMYPSYFLHLDTEKKVFLLAGRKRKRSKTANYLISSDPTNLSRGGENFIGKLRSNLLGNRFTVFDNGQNPQRGGGGDVESLRQELAAVVYETNVLGFRGPRRMTVIIPGMNSDNERVPIRPRNSSDGLLVRWQNKTLESLIELHNKPPIWNEDSGSYTLNFQGRVTQASVKNFQIVHADDPDYIVLQFGRVAEDAFTLDYRYPLCALQAFAIALSSFDGKLACE

SEQ ID NO: 19472 - protein, 298 aa, Rattus norvegicus
MALRKELLKSIWYAFTALDVEKSGKVSKSQLKKEERAPSPPVEVGEPREFVLQPAPQGRAVRCRLTRDKKGMDRGMYPSYFLHLDTEKKVFLLAGRKRKRSKTANYLISSDPTNLSRGGENFIGKLRSNLLGNRFTVFDNGQNPQRGGGGDVESLRQELAAVVYETNVLGFRGPRRMTVIIPGMNSDNERVPIRPRNSSDGLLVRWQNKTLESLIELHNKPPIWNEDSGSYTLNFQGRVTQASVKNFQIVHADDPDYIVLQFGRVAEDAFTLDYRYPLCALQAFAIALSSFDGKLACE

SEQ ID NO: 19473 - protein, 505 aa, Rattus norvegicus
MTSKPHSDWIPYSVLDDEGSNLRQQKLDRQRALLEQKQKKKRQEPLMVQANADGRPRSRRARQSEEQAPLVESYLSSSGSTSYQVQEADSLASVQPGATRPPAPASAKKTKGAAASGGQGGAPRKEKKGKHKGTSGPATLAEDKSEAQGPVQILTVGQSDHAKDAGETAAGGGAQPSGQDLRATMQRKGISSSMSFDEEEDEDENSSSSSQLNSNTRPSSATSRKSTREAASAPSPAAPEPPVDIEVQDLEEFALRPAPQGITIKCRITRDKKGMDRGMYPTYFLHLDREDGKKVFLLAGRKRKKSKTSNYLISVDPTDLSRGGDSYIGKLRSNLMGTKFTVYDNGVNPQKASSSTLESGTLRQELAAVCYETNVLGFKGPRKMSVIVPGMNMVHERVCIRPRNEHETLLARWQNKNTESIIELQNKTPVWNDDTQSYVLNFHGRVTQASVKNFQIIHGNDPDYIVMQFGRVAEDVFTMDYNYPLCALQAFAIALSSFDSKLACE

SEQ ID NO: 19474 - protein, 122 aa, Rattus norvegicus
MTVILPGMDSRKQRMKVQPQNDQDSILSRVQKGARHGLLLLQNKAPSWSDESGAYVLNFHGRVTRASVKNFQIVHPDEPDHLVLQFGRVAPNIFTMDFRYPLCPLQAFAICLSSFDGKLACE

SEQ ID NO: 19475 - protein, 657 aa, Rattus norvegicus
MTVGGDWLRLCKSFISAKLCHSPFALVYFLHLVARGGFAKPPHPWQMQPRASSLSILLWWSSRLIISGLRELARRWTLFQVIEWFSNLPSSGKSCGLKVFVPYPSTIYFSAEQILLIPDPIDFRETEKPVAILKVKAVLLATPPPTPILVLPVAFEDETLRLRQLKLDNQRALLEKKQRKKRLEPLMVQPNPEARLRRLKPRGSEEHTPLRALLEKKQRKKRLEPLMVQPNPEARLRRLKPRGSEEHTPLVDPQTPCSDVILHGIDGPAAFLKPEAQDLESKPQVLSVGSSPTPEEGTEGSADGESPVETASKPDLQEILQKHGILSSVNYDEEPDEEAEDEGENLSSLPAQSEKESAGASQKAASDTGASGMTAQQGDAQLGEVENLEDFAYSPAPRGVTVKCRVTRDKKGMDRGLFPTYYMHLEKEENRKIFLLAGRKRKKSKTSNYLVSTDPTNLSREGESYIGKLRKLQIIMSVAFSPHTRSNLMGTKFTVYDHGVNPVKAQGLVEKAHTRQELAAICYETNVLGFKGPRKMSVIIPGMNMNHERIPFRPRNEHESLLSKWQNKSMENLIELHNKAPVWNDDTQSYVLNFHGRVTQASVKNFQIVHGNDPDYIVMQFGRVADDVFTLDYNYPLCALQAFAIGLSSFDSKLACE

SEQ ID NO: 19476 - protein, 450 aa, Anopheles gambiae str. PEST
RQLMEAYIRQKRATPGMVQASDLQLVRPMSGVNRNGREVHAYDGPMQFMMSPTNPDQIMPTSPVGPVPTVAVGGTGPNVTATSITTTPTSPYSDSTMEKLTPSSQDSEDEESTPVDVLPLPASTKSPANGGAGGAILYDRPTVDGHHLLSHSAPISPALNNNNHTHHTNSSSGNVKSSEDSGTPPSGGGGGAPDTEGDVIGPIEQWVTQPAAQGVLYKCRITRDRKGMDRGLFPIYYLHLERDYGKKLFCLAGRKRKKSKTSNYIISCDPTDLSRQADGFVGKLRSNVFGTTFFVYDSGTKNDAAAPRLDLAVVIYDTNILGFKGPRNMTVLLPGMTEDDQRVQISSVDDQQGLLDCWKSKNMDNVVELHNKTPIWNDETQSYVLNFHGRVTQASVKNFQLVHDSDPEYIVMQFGRTADDIFTMDFRYPLCAFQAFAIALSSFDGKLACE

SEQ ID NO: 19477 - protein, 1436 aa, Anopheles gambiae str. PEST
LQEEGWKLNRTNYYQEGWLATGNVRGIVGVTFTTSHCKKNVDYPLRTNYNLRGHRSDVILVKWNEPYQKLASCDSSGIIFVWIKYEGRWSVELINDRNTPVTHFSWSHDGRMALICYQDGFVLVGSVAGQRYWSSMLNLDATITCGIWTPDDQQVYFGTTQGQIIVMDVHGAMVSQVPLGSDVGITAMAWSCEKFKMEEGEDTEPGVTNASKRSFVLAVSFQNGYIYLLKSYDDITPNQIHTGMNGELGIVMEWSNSRELLAVAGTELGSPHMTDIHGATVYNNLLKFYTESGNLLYTAKIPNSTVSVSALTWGHNDKRIFIATGTQVHIAWVSRRVASLQLFCRLKVQTSLASEALLPRLPLPGRIKALIGNLFAQTIRCCVPDLKSLREFVSRPPACSTRLHCTMIRHDDDSNQSSGTCYTLYLEFLGGLVPLLKGKRTSKIRPEFVIFDPQVDEVSTYCTYSSDSTTTTTTTKSASTSSHSTTGTNGRSDSSESDIDDDCRSPRLDRKRKTGTKKRNPSSNDRSPNQNSDSTENNEDLAYLDTLPEHVKLVEVTSNIWGTKFKIHGLAKTLPANLGQVTYKTSLLHLQPRQMKLVITELRDDFPTGPDPNFNPNIFSEDEGQHHAQHHSNGTHHGPSLMSSARESCGASALSRKLLTESAPPIAPMSPRPNRFPSRPRRQQQHQPSALAGCSGSSSGGLARNGVPGLGPLARAESYEDDTDGGESTTVVVVSDLHSAAARTPPRQSIGYSLVSRPSSASSNQSRVAISPLYCEGSVPTLQSPKNAVAPSDIIFDRPPAGQTTLMSYSSNNDYIGSLVQVKNALVSSDHHHGRSTMSAGMPLNLNLNLDRSEAGGRSLCTNGSSSGRDSQPSSARSTPKKQNLKFIDEATDSTNGLETPTSETVGGGMHRTPTVASVMTFMPAAGSSSGTATTRIPDSITRSCSVGYLDNMTIVPGEEALSMMRRDAPYKRLVLVDKKRQKKYKRNLDELRQATRLRVDAKSKSLDSCSDILQEVPNLNRDLINLFRQMPKVSELGKDPSGAGSSSGKGGGFFDRKSNHQQQQQQQQVPGSGSECSASTSEPAPAAPSNSTPSRSVARIVTSFTDSPLFSRRNRQPKAPDADSSKPQSESNTPILLRWNANRHNRQSKADSLDSPKKHRRNGSCPGPSNESTDGGESMGTASTSSQTDEPRPGGSGGGHTGPAGLISRWRDMEEGGRQSTPPASPARLARSSPASPTPSKKSKRHQSASPIRHILNSPLLNRRQRKKQHTESSDDENGGSGGGSGSGAGVAGSAGPNHSSPSNHTDDSSGSTSAKQYRDLETFQKAQLRQKLKRGKIEPNGVASSSQSPAPVRREFVMHNKAPMWNENSQVYQLDFGGRVTQESAKNFQIEFRGKQVMQFGRIDGNAYTLDFQYPFSALQAFAVALANVTQRLK

SEQ ID NO: 19478 - protein, 219 aa, Pyrus communis
GKLRSNFLGTKFTIFDGQPSHSGARIAKSRSTRLVNLKQETPRVPAGNYPVAQIQYELNMLGSRGPRRMQCTMDSIPSSSIEPGGVAPTQAEFSHNNAELFPSLSFNRSKSNRMESFLSGPLARQKDGVLVLRNKSPRWHEQLQCWCLNFHGRVTVASVRLSVGGFSGNGPPGPEHEKIILQFGKVGKDQFTMDYRYPISAFQAFSICLSSFDTKIACE

SEQ ID NO: 19479 - protein, 445 aa, Arabidopsis thaliana
MSFRGIVQDLRDGFGSLSRRSFDFRLSSLHKGKAQGSSFREYSSSRDLLSPVIVQTSRWANLPPELLFDVIKRLEESESNWPARKHVVACASVCRSWRAMCQEIVLGPEICGKLTFPVSLKQPGPRDAMIQCFIKRDKSKLTFHLFLCLSPALLVENGKFLLSAKRTRRTTRTEYIISMDADNISRSSNSYLGKLRSNFLGTKFLVYDTQPPPNTSSSALITDRTSRSRFHSRRVSPKVPSGSYNIAQITYELNVLGTRGPRRMHCIMNSIPISSLEPGGSVPNQPEKLVPAPYSLDDSFRSNISFSKSSFDHRSLDFSSSRFSEMGISCDDNEEEASFRPLILKNKQPRWHEQLQCWCLNFRGRVTVASVKNFQLVAARQPQPQGTGAAAAPTSAPAHPEQDKVILQFGKVGKDMFTMDYRYPLSAFQAFAICLSSFDTKLACE

SEQ ID NO: 19480 - protein, 455 aa, Arabidopsis thaliana
MSFRSIVRDVRDSIGSLSRRSFDFKLSSLNKEGGKSRGSVQDSHEEQLVVTIQETPWANLPPELLRDVIKRLEESESVWPARRHVVACASVCRSWRDMCKEIVQSPELSGKITFPVSLKQPGPRDATMQCFIKRDKSNLTYHLYLCLSPALLVENGKFLLSAKRIRRTTYTEYVISMHADTISRSSNTYIGKIRSNFLGTKFIIYDTQPAYNSNIARAVQPVGLSRRFYSKRVSPKVPSGSYKIAQVSYELNVLGTRGPRRMHCAMNSIPASSLAEGGTVPGQPDIIVPRSILDESFRSITSSSSRKITYDYSNDFSSARFSDILGPLSEDQEVVLEEGKERNSPPLVLKNKPPRWHEQLQCWCLNFRGRVTVASVKNFQLIAANQPQPQPQPQPQPQPLTQPQPSGQTDGPDKIILQFGKVGKDMFTMDFRYPLSAFQAFAICLSSFDTKLACE

SEQ ID NO: 19481 - protein, 415 aa, Arabidopsis thaliana
SRRSFDFRLSSLHKGKAQGSSFREYSSSRDLLSPVIVQTSRWANLPPELLFDVIKRLEESESNWPARKHVVACASVCRSWRAMCQEIVLGPEICGKLTFPVSLKQPGPRDAMIQCFIKRDKSKLTFHLFLCLSPALLVENGKFLLSAKRTRRTTRTEYIISMDADNISRSSNSYLGKLRSNFLGTKFLVYDTQPPPNTSSSALITDRTSRSRFHSRRVSPKVPSGSYNIAQITYELNVLGTRGPRRMHCIMNSIPISSLEPGGSVPNQPEKLVPAPYSLDDSFRSNISFSKSSFDHRSLDFSSSRFSEMGISCDDNEEEASFRPLILKNKQPRWHEQLQCWCLNFRGRVTVASVKNFQLVAARQPQPQGTGAAAAPTSAPAHPEQDKVILQFGKVGKDMFTMDYRYPLSAFQAFA

SEQ ID NO: 19482 - protein, 415 aa, Arabidopsis thaliana
SRRSFDFRLSSLHKGKAQGSSFREYSSSRDLLSPVIVQTSRWANLPPELLFDVIKRLEESESNWPARKHVVACASVCRSWRAMCQEIVLGPEICGKITFPVSLKQPGPRDAMIQCFIKRDKSKLTFHLFLCLSPALLVENGKFLLSAKRTRRTTRTEYIISMDADNISRSSNSYLGKLRSNFLGTKFLVYDTQPPPNTSSSALITDRTSRSRFHSRRVSPKVPSGSYNIAQITYELNVLGTRGPRRMHCIMNSIPISSLEPGGSVPNQPEKLVPAPYSLDDSFRSNISFSKSSFDHRSLDFSSSRFSEMGISCDDNEEEASFRPLILKNKQPRWHEQLQCWCLNFRGRVTVASVKNFQLVAARQPQPQGTGAAAAPTSAPAHPEQDKVILQFGKVGKDMFTMDYRYPLSAFQAFA

SEQ ID NO: 19483 - protein, 415 aa, Arabidopsis thaliana
SRRSFDFRLSSLHKGKAQGSSFREYSSSRDLLSPVIVQTSRWANLPPELLFDVIKRLEESESNWPARKHVVACASVCRSWRAMCQEIVLGPEICGKLTFPVSLKQPGPRDAMIQCFIKRDKSKLTFHLFLCLSPALLVENGKFLLSAKRTRRTTRTEYIISMDADNISRSSNSYLGKLRSNFLGTKFLVYDTQPPPNTSSSALITDRTSRSRFHSRRVSPKVPSGSFNIAQITYELNVLGTRGPRRMHCIMNSIPISSLEPGGSVPNQPEKLVPAPYSLDDSFRSNISFSKSSFDHRSLDFSSSRFSEMGISCDDNEEEASFRPLILKNKQPRWHEQLQCWCLNFRGRVTVASVKNFQLVAARQPQPQGTGAAAAPTSAPAHPEQDKVILQFGKVGKDMFTMDYRYPLSAFQAFA

SEQ ID NO: 19484 - protein, 429 aa, Arabidopsis thaliana
MSFLSIVRDVRDTVGSFSRRSFDVRVSNGTTHQRSKSHGVEAHIEDLIVIKNTRWANLPAALLRDVMKKLDESESTWPARKQVVACAGVCKTWRLMCKDIVKSPEFSGKLTFPVSLKQPGPRDGIIQCYIKRDKSNMTYHLYLSLSPAILVESGKFLLSAKRSRRATYTEYVISMDADNISRSSSTYIGKLKSNFLGTKFIVYDTAPAYNSSQILSPPNRSRSFNSKKVSPKVPSGSYNIAQVTYELNLLGTRGPRRMNCIMHSIPSLALEPGGTVPSQPEFLQRSLDESFRSIGSSKIVNHSGDFTRPKEEEGKVRPLVLKTKPPRWLQPLRCWCLNFKGRVTVASVKNFQLMSAATVQPGSGSDGGALATRPSLSPQQPEQSNHDKIILHFGKVGKDMFTMDYRYPLSAFQAFAISLSTFDTKLACE

SEQ ID NO: 19485 - protein, 415 aa, Arabidopsis thaliana
MSFLSIVRDVRDTVGSFSRRSFDVRVSNGTTHQRSKSHGVEAHIEDLIVIKNTRWANLPAALLRDVMKKLDESESTWPARSWFRYSLLPFDIMSVILTTLLMVKPGPRDGIIQCYIKRDKSNMTYHLYLSLSPAILVESGKFLLSAKRSRRATYTEYVISMDADNISRSSSTYIGKLKSNFLGTKFIVYDTAPAYNSSQILSPPNRSRSFNSKKVSPKVPSGSYNIAQVTYELNLLGTRGPRRMNCIMHSIPSLALEPGGTVPSQPEFLQRSLDESFRSIGSSKIVNHSGDFTRPKEEEGKVRPLVLKTKPPRWLQPLRCWCLNFKGRVTVASVKNFQLMSAATVQPGSGSDGGALATRPSLSPQQPEQSNHDKIILHFGKVGKDMFTMDYRYPLSAFQAFAISLSTFDTKLACE

SEQ ID NO: 19486 - protein, 411 aa, Cicer arietinum
MPLKNIVREFKGMKNGIGSKSKRGGDSKHWLCRSKSHVAPDVTPFEPIQQGQWASLPPELLLDIIRRVEESETSWPARAVVVFCASVCKSWRSVTKEIIKTPQQCGRITFPISLKQPGPRDCPIQCFIRRNRESSTFLLYLGLVPSEHESNKLLLVARKIRRATGTEIVISLAADDFSRASNNYVGKLRSNFWGTKFTIYDSQPPHDIIVQPNCRGGKFNSKQVSPRAPACSYLVSSISYELNTLWTRGPRRMHCVMNSIPVSAIEEGGNAPTPTLLPQIFDEPFSPSPALKGKSPMTDSYSGNLSELPELSQGSVEPLVLKNKAPRWHEQLQCWCLNFVGRVTVASVKNFQLVAAVDPSHNVSSEEQERVILQFGKIGKDIFTMDYSYPLSAFQAFAICLTSFDTKPACE

SEQ ID NO: 19487 - protein, 429 aa, Glycine max
  unsure (1)..(429): unsure at all Xaa locations
MSFRSIVRDVRDSFGSLSRRSFDVRLTGHHRGKSQGSVQDLHDQPLVIQNSRWASLPPELLFDIIRRLEESENTWPARNGLIACAAVCQSWRNMCKDIVKSPEFCGKLTFPVSLKQPGPRDGIIQCFIKRDKSNLTYHLFLCLSPALLVENGKFLLSAKRTRRTTYTEYVISMDADNISRSSNTYIGKLRSNFLGTRFIICDTQPPYSSAHICPPMTGKTSRRFYSKKVSPKVPSGSYNIAQVTYELNVLGTRGPRKMHCVMHSIPASALDAGGTVPGQPELLPRPLEDSFRSISFSKSLXXRSIEFSSSRFSEIGESIIXXDDDGKMRPLVLKNKPPRWHEQLQCWCLNFRGRVTVASVKNFQLIAATQPPAGAPTPSQPAPPEHDKIILQFGKVGKDMFTMDYRYPLSAFQAFAICLSSFDTKLACE

SEQ ID NO: 19488 - protein, 432 aa, Glycine max
  unsure (1)..(432): unsure at all Xaa locations
MSFRSIVREVRDGXFGSLSRRSFEVRLXXGHNRGKSRSSVHELQDQPPVIQNSRWASLPPELLRDVINRLEASESTWPGRKHVVACAAVCKSWREMCKEIVSSPEFCGKITFPVSLKQPGHRDGPILCGIKRDRSNLTYHLFLGLSPALLVENGKFVLSAXRTKRTTCTDYVISMDADNISRSSSTYIGKLRSNCLGTKFIIYDTQPPYNIAMLASPGXXARRFSKKVSPKVPSGSYNIAQVTYELNVLGTRGPRRMNCTMYSIPASSMEPNGVVPGQPELLPRALEDSFRSXXSFSKSIDNSTEFSSSRFSDIMGTGIEDEEGKVRPLVLKNKSPRWHEQLQCWCLNFRGRVTVASVKNFQLIASTPPAAVAPTGTGPTPSQPTPSDPDKIILQFGKVGKDMFTMDYRYPLSAFQAFAICLTSFDTKLACE

SEQ ID NO: 19489 - protein, 335 aa, Glycine max
  unsure (1)..(335): unsure at all Xaa locations
MSFRSIVRDVRDSFGSLSRRSFDVRLTGHHRGKSQGSVQDLHDQPLVIQNSRWASLPPELLFDIIRRLEESENTWPARNGSSACAAVCQSWRNMCKDIVKSPEFCGKLTFPVSLKQPGPRDGIIQCFIKRDKSNLTYHLFLCLSPALLVENGKFLLSAKRTRRTTYTEYVISMDADNISRSSNTYIGKLRSNFLGTRFIICDTQPPYSSAHICPPMTGKTSRRFYSKKVSPKVPSGSYNIAQVTYELNVLGTRGPRKMHCVMHSIPASALDAGGTVPGQPELLPRPLEDSFRSISFSKSLXXRSIEFSSSRFSEIGESIIXXDDDGKMRPLVLKX

SEQ ID NO: 19490 - protein, 291 aa, Glycine max
  unsure (1)..(291): unsure at all Xaa locations
MSFRSIVRDVRDGFGSLSRRSFEVRLXXGHNRGKSRSSVHELQDQPPVIQNSRWASLPPELLRDVINRLEASESTWPGRKHVVACAAVCKSWREMCKEIVSSPEFCGKITFPVSLKQPGHRDGPIQCFIKRDKSKLTYHLFLCLSPALLVENGKFLLSAKRTRRTTCTEYIISMDADNISRSSSTYIGKLRSNFLGTKFIIYDTQPPYHNAMLSPPGRSRRFSKKVSTKVPSGSYNIAHVTYELNVLGTRGPRRMNCTMYSIPASSMEPNGIVPGQPELLPRALEDSFGDX

SEQ ID NO: 19491 - protein, 418 aa, Glycine max
  unsure (1)..(418): unsure at all Xaa locations
MTILNMVHVVRDGCWNLARTNVGVRISGGVKMNSVVHEAHDTRXLVIQNSRWASLPPELLCDVFKRLVESESTWPARKHVVAWAAVCKSXWREMCKEIVTSPEFCGKITFPVSLKQPGSRDGTIQCFIKRDKSNLTYHLFLCLSPALLVENGKFLLSAKRTIRTTCTEYIISMDADNISRSNSTYIXGKLMSNILGTKFIIYDTQPPYNNAPLSPPVRGGRFYSKKVSPKVPSSSYNIAQITYELNVLGTRGPRRMNSSMHXFPMSALEPACTVPGQLELLLRALEDYVQSISFHRLIDNKAGAITTEECMEKMQLIVPKNQSSRWHQQLQWXSLKCRXSKTVASVKNFQLITXXTQPPSAAAPTPSSLPAQSDSDNTILQFGKXRXDIFSKDYRYPLSAFQAFPICLTSFDTKLACE

SEQ ID NO: 19492 - protein, 320 aa, Glycine max
  unsure (1)..(320): unsure at all Xaa locations
MSFRSIVRDVRDGFGSLSRRSFDVRLSGGGKSNSLXSMRSTNAFFFVQNSRWASLPPELLCDVIKRLGKSETTWPARKHVVACAAVCRSWRGMCKEIVNSPEFCGKITFPVSLKQPGHRDGPIQCFIKRDKSKLTYHLFLCLSPALLVENGKFLLSAKRTRRTTCTEYIISMDADNISRSSSTYIGKLRSNFLGTKFIIYDTQPPYHNAXXLSPPGRSRRFSKKVSPKVPSGSYNIAHVTYELNVLGTRGPRRMNCTMYSIPASSMEPNGIVPGQPELLPRALEDSFRSISFSKSIXXNSTEFSSSRFSDIMGIGNEDEE

SEQ ID NO: 19493 - protein, 280 aa, Glycine max
  unsure (1)..(280): unsure at all Xaa locations
XENGKFLLSAKRTRRTTCTEYIISMDADNISRSNSTYIGKLRSNFLGTKFIIYDTQPPYNNAQLSPPGRSRRFYSKKVSPKVPSGSYNIAQITYELNVLGTRGPRRMNCTMHSIPMSALEPGCTVPGQPELLPRSLQYSFRSISFGXXSIDNSTEFSSSRFSDIFVAGNEEEQXXKGRPLVLKNKSPRWHEQLQCWCLNFRGRVTVASVKNFQLIAATQPPAAGAPTPSSQPAQSDHDKIILQFGKVGKDIFTMDYRYPLSAFQAFAICLTSFDTKLACE

SEQ ID NO: 19494 - protein, 448 aa, Oryza sativa (japonica cultivar-group)
MSFRSIVRDVRDGFGSLSRRSFEVTLASLYGLTGHHKGKTQSSLDELDDSPAIIPESRWASLPPELLREVIRRLEADESTWPSRRNVVCFAAVCRTWREMCKETVLSPEFCGKLTFPVSIKQPGPRDGMIQCYIKRNRSKSTYHLYLCLSNVVTAEGGKFVLAAKRHRKTTCTEYTISMVSGNISRSSRTNIGKLRSNFLGTKFIIYDTQPPYNGAVVPHVGRTSKRFNSTKVSPKVPSVTYNIAQVSYELNVLGTRGPRRMRCMMHSIPASSVEPGGIVPGQPEQIVPRALEDSFRSTTSFSQSFRSTTSFSKSIMDPSMDFSSARFSDISGSIMGGDDNGEIKERPLVLRNKPPRWHEQLQCWCLNFRGRVTIASVKNFQLVAAPSPPPAGAPTPSQPGPADPEKVILQFGKVARDMFTMDYRYPLSAFQAFAICLSSFDTKLACE

SEQ ID NO: 19495 - protein, 440 aa, Oryza sativa
  unsure (1)..(440): unsure at all Xaa locations
MSFRSIVRDVRDGFGSLSRRSFEVTLASLYGLTGHHKGKTQSSLDELDDSPAIIPESRWASLPPELLREVIRRLEADESTWPSRRNVVCFAAVCRTWREMCKETVLSPEFCGKLTFPVSIKQPGPRDGMIQCYIKRNRSKSTYHLYLCLSNVVTAEGGKFVLAAKRHRKTTCTEYTISMVSGNISRSSRTNIGKLRSNFLGTKFIIYDTQPPYNGAVVPHVGRTSKRFNSTKVSPKVPSVTYNIAQVSYELNVLGTRGPRRMRCMMHSIPASSVEPGGIVPGQPEQIVPRALEDSFRSTTTSFSKSIMDPSMDFSSARFSDISGSIMGGDDNGEIKERPLVLRNKPPRWHEQLQCWCLNFRGRVTIASVKNFQLVAAPSPPPAGAPTPSQPGXXADPEKVILQFGKVARDMFTMDYRYPLSAFQAFAICLSSFDTKLACE

SEQ ID NO: 19496 - protein, 440 aa, Oryza sativa; identical to SEQ ID NO: 19495
  unsure (1)..(440): unsure at all Xaa locations

SEQ ID NO: 19497 - protein, 631 aa, Oryza sativa
  unsure (1)..(631): unsure at all Xaa locations
MEIIASISSTEFSIQCIPQLFSVGHMHIHLHQTIAKHAKNASHKESSGLIEFFLLISIKNAYRLASTHPEAFHSCQPQSGPDLPFLKVHTGTYPCNLSGLHAVFTHRIFRNVSNNKTNPNFPAAKQNCKRRLHLRKGEEPIFRTIQRDNRDNSVHDDRGGEDTCRCLEDESRLSRRGAPISIRRAEQGRGSCIVRDVRDSFGSLSRRSFEVSLSGLTGHHRGKSQSTVHELCDADLIIQESRWASLPPELLRDVIRRLEASESTWPSRKDVVSCAAVCKAWREMCKEIVLSPEFCGKLTFPLSLKQPGPRDGMIQCFIKRDKSKSTYHLYLCLSTAVLADSGKFLLSAKRHRKTTCTEYVISMDADNISRSSSTYIGKLRSNFLGTKFIIYDTQPSYNGAVIPPVGRSSRRFNSKKVSPKMPSGSYNIAQVTYELNVLGTRGPRRMHCVMHSIPASSVEPGGIVPGQPEQIVPRAFEESFRSXXTSFSKSSIMDRSMDFSSSRDFSSARFSDIAGGTINGDEEGQNKERPLVLRNKAPRWHEQLQCWCLNFRGRVTIASVKNFQLIAAPAQPPAGAPTPSQPAPXXEQDKIILQFGKVAKDMFTMDYRYPLSAFQAFAICLSSFDTKLACE

SEQ ID NO: 19498 - protein, 448 aa, Oryza sativa
  unsure (1)..(448): unsure at all Xaa locations
MSFRSIVRDVRDSFGSLSRRSFEVTLAGLSGLTGHHRGKSQSTVHELCDADLIIQESRWASLPPELLRDVIRRLEASESTXWPSRKDVVSCAAVCKAWREMCKEIVLSPEFCGKLTFPLSLKQPGPRDGMIQCFIKRDKSKSTYHLYLCLSTAVLADSGKFLLSAKRHRKTTCTEYVISMDADNISRSSSTYIGKLRSNFLGTKFIIYDTQPSYNGAVIPPVXXRSSRRFNSKKVSPKMPSGSYNIAQVTYELNVLGTRGPRRMHCVMHSIPASSVEPGGIVPGQPEQIVPRAFEESFRSTTSFSKSSIMDRSMGFQXFPXDFSSARFSDIAGGTSDEEGQNKERPLVLRNKAPRWXHEQLQCWCLNFRGRVTIASVKNFQLIAAXQHRPPAGAPTPSQPAPPEQDKIILQFGKVAKDMFTMDYRYPLSAFQAFAICLSSFDTKLACE

SEQ ID NO: 19499 - protein, 440 aa, Triticum aestivum
  unsure (1)..(440): unsure at all Xaa locations
MSFRSIVRDVRDGFGSLSRRGFDVRXXLGHRRGKSHSAVHELHDPAPVIQSSCWANLPPELLHDVIERLEASEATWPSRKHVVACAAVCRTWREMCQEIVKNPEFCGKITFPVSLKQPGPRDGTIQCFIKRDKSTQTYYLYLCLTSAVVAENGKFLLLAKRHSRPTCTEYTIFMNTDNTSRSSNMYIGKLRSNLLGTKFVIYDTQHPCNIPNVSQSGKTSRRFYSRKVSPKASPSTYSIAQVSYELNVLGTRGPRRMNCVMNSIPASSLVAGGTVLCQPDSAVAHSLDESFGSISFSKSSIRDRSIRFSSTRFSGISIGGSRNGGQALGDNDECKEWPLTLRNKAPRWHDQLQCWCLNFKGRVTVASVKNFQLVAATESTAEAPTPSQPAPPPPSEHDKVILQFGKGAKDMFTMDYRYPLSAFRAFAICLSSFDTKLACE

SEQ ID NO: 19500 - protein, 345 aa, Leishmania major
MAQSVLPMDPRERIYYRPRHRLLQCYLERRKRKGLGIASLLPGRHQSFQFFLEHTGDFVLAAVPRSFKTRTMVEDTSSGVGGQFYPVSQGGANIVFTINQQQLDSDTRAFVGKLSRRGKGMEMVLFSEGSKDARKEILAVLLHNLADTNRSSFTVLLPAIDPESGYIKPLEGGEVEFLRDGRGSSHAGIDEAMVNSSDDDVDAAYSTMSRATPNFAAVCDSPGASGAPAPSRSETAGRQKKWFLHGVLAREYRRNPGSPNIIVLKSKEPQWDGVLRGYKLDFHGRSTKASEKNFQLVAVSDPGKVVMLFGKQDDDRFALDFRYPLCGLQAAAIATTILTARKAIL

SEQ ID NO: 19501 - protein, 413 aa, Arabidopsis lyrata
SRRSFDFRLSSLHKGKAQGSSFREYSSSRDLLSPVIVQTSRWANLPPELLFDVIKRLEESESNWPARKHVVACASVCRSWRAMCQEIVLGPEICGKLTFPVSLKQPGPRDAMIQCFIKRDKSKLTFHLFLCLSPALLVENGKFLLSAKRTRRTTRTEYIISMDADNISRSSNSYLGKLRSNFLGTKFLVYDTQPPPNTSSSALITDRTSRSRFHSRRVSPKVPSGSYNIAQITYELNVLGTRGPRRMHCIMNSIPTSSLEPGGSVPNQPEKLVPAPYSLDDSFRSNISFSKSSFDHRSLDFSSSRFSEMGISCNDNEEETSFRPLILKNKQPRWHEQLQCWCLNFRGRVTVASVKNFQLVAARPSQPQGTGTAPATAPAHPEQDKVILQFGKVGKDMFTMDYRYPLSAFQAFA

SEQ ID NO: 19502 - protein, 272 aa, Encephalitozoon cuniculi
MEQGNGHATASIDHPHDVGDGEHCSLSPLVYGFSYSPSEDRIIEYLDSMSDNQAPESHIAASHRGYALEERRAIVLDPYPIGRISRGKVDVSYGFFNEYLYESHEHGPSKLLKAHRVMCGFEIYSLGQGDEEKVGCLRSNLFGTKYILYQGEKAVLEIKYATSIFKRRGPRSFSVLFTGISGSSLKEPVVMRNKEPYYNAETNSYSLNFNGRVTTPSVKNFQLIHPLEPTYVTLTFGKISRFKYILDYTYPWSGVQAFAIALAALDYKVGCD

SEQ ID NO: 19503 - protein, 426 aa, Caenorhabditis elegans
MTDTNSQWIEMNLQRQRKMLEDKQKQKRHQSAGSVRTTSTAMSMNSMKDYPTFDNSLPFSISDNSSVSVSMNTPLIPTQDPIAQPRMQSMPRQQPQQVQESLISIGDYPDNDINAKLSKVNLTSCVVSDDEDEDKRSYADSPWNTDVVADRIPSEVLPDYNFIKNNLAKFVEDPAVEHCLYKCSITRQKSGVDKGMFPTYFLHLEEFDTDKRQKIFLLAARKRKKSTTANYLLSTDPTNLSREGEGYCAKVRSNALGTQFTVYDSGQNPKKTTNHAAIRQELAAVIYETNVLGFKGPRKMTIVMPGIEPPTENRPAVRCPVRPIQDKHTLLERYRLNDLDSLKILSNKSPQWNDETQSYVLNFHGRVTQASVKNFQIIHQSSPEYIVMQFGRISDDEFTMDFRYPLSAVQAFGIAMTSFHGKLACE

SEQ ID NO: 19504 - protein, 425 aa, Caenorhabditis elegans
MLEDKQKQKRHQSAGSVRTTSTAMSMNSMKDYPTFDNSLPFSISDNSSVSVSMNTPLIPTQDPIAQPRMQSMPRQQPQQVQESLISIGDYPDNDINAKLSKVNLTSCVVSDDEDEDKRSYADSPWNTDVVADRIPSEVLPDYNFIKNNLAKFVEDPAVEHCLYKCSITRQKSGVDKGMFPTYFLHLEEFDTDKRQKIFLLAARKRKKSTTANYLLSTDPTNLSREGEGYCAKVRSNALGTQFTVYDSGQNPKKTTNHAAIRQELAAVIYETNVLGFKGPRKMTIVMPGIEPPTENRPAVRCPVRPIQDKHTLLERYRLNDLDSLKILSNKSPQWNDETQSYVLNFHGRVTQASVKNFQIIHQSSPEYIVMQFGRISDDEFTMDFRYPLSAVQAFGIAMTSFHGKLAYNPGKSWVQERQKCPGIFQ

SEQ ID NO: 19505 - protein, 869 aa, Caenorhabditis elegans
MKILWESDWQGARIEQTITHLSWIQQQDKPDHGLLGVGTETGSVGVTLTDFKPTPDDLTRYNFNLRGHHNAIRMVTWNKSQSKLASCDASGIIYVWVRNDDRWSVELVNDRGVKVSDLSWSPCGGSALICYDDNFVLIGSANGQRVWSNSFPLPAAVTCGVWAPDSRQLVLGFSTGTIQVLSNAGVNITSRSFTEDKLTQMAFSPLRTKVREVEWTLAMLSSANKIYMISAYDQLHPAIYRSKFQVIRMEWNTDGTILALINANNELVMIDTTCRVIHRERIPIADKEKTLIPNPPPTQKLTAFTWAHNGNVVIIAAGGCLTVGRILFGVPSLFEIVTYDLWKMMGCSSKKVDKLPIPLKEMNALRELDHHVIRCRIPRSQDMCSYVCSVVDARCYCTIRPLARGSHTYVLCFEHLGGLVPLLLGRQVNRFLPQFQIFMYQSKPPTSSPPSGSSAQVEDVNSIFRYSTGRNSLWRRSKRQIRALMSRHVRPTRPDTRLLQVTSNVWCTRFNISSLSPSLLPTFLGQVIYKTSVLHLQPRQMTIDLAVLQRKDGKELPEASVDGTTHMTSSPDQGLTSEERQFFQKILAECLSLRAVINSSNFGKPPPPAAASTISLPCQPSTSKEPDSSAHTTPISTRTVESKHDVTSMASSVSTWHEEIEALAFIDGDADEKAMLVQPALKTGWAAMEQASKKDAEVIRSHVDKLASIAEQLSKRHGDFNVKRDKASINKMRSQMKTLLRRVNEIEQKVANGDVKTEVRQLLNTLNEMKKALGEGVPKSGRSLNSTCKIETMTNKTPFWNEQNQVYQLDFGGRVTQESAKNFQIELDSKQVLQFGRIEGGSYTLDFRYPFSAAQAFAVALASITQRLK

SEQ ID NO: 19506 - protein, 443 aa, Drosophila melanogaster
MEAYIRQKRASPGMVQASDLQINRPMSGMRSNSRELHAYDGPMQFISSPQNPDQILTNGSPGGINPVAMNTSRNHSNNMRSLSTINQEADLIEEISSHELEDEESSPVTVIEQHQQSASHSANSTQSQKPRARQHSFSDNLDEDDYTNRNVAGAAPVRPAGMASSPYKDATLDGSSNGTGNGTGGESEGDVIGNIDQFVMQPAPQGVLYKCRITRDRKGMDRGLFPIYYLHLERDYGKKIFLLGGRKRKKSKTSNYIVSCDPTDLSRNADGFCGKLRSNVFGTSFTVFDNGNKESTESPRLDLAVIIYDTNILGFKGPRNMTVILPGMTEDDQRVKISSADPKQQGILDLWKMKNMDNIVELHNKTPVWNDETQSYVLNFHGRVTQASVKNFQLVHDSDPEYIVMQFGRTSEDVFTMDYRYPLCAMQAFAIALSSFDGKIACE

SEQ ID NO: 19507 - protein, 460 aa, Drosophila melanogaster
MSGINSRNQKMEQQRQLMEAYIRQKRASPGMVQASDLQINRPMSGMRSNSRELHAYDGPMQFISSPQNPDQILTNGSPGGINPVAMNTSRNHSNNMRSLSTINQEADLIEEISSHELEDEESSPVTVIEQHQQSASHSANSTQSQKPRARQHSFSDNLDEDDYTNRNVAGAAPVRPAGMASSPYKDATLDGSSNGTGNGTGGESEGDVIGNIDQFVMQPAPQGVLYKCRITRDRKGMDRGLFPIYYLHLERDYGKKIFLLGGRKRKKSKTSNYIVSCDPTDLSRNADGFCGKLRSNVFGTSFTVFDNGNKESTESPRLDLAVIIYDTNILGFKGPRNMTVILPGMTEDDQRVKISSADPKQQGILDLWKMKNMDNIVELHNKTPVWNDETQSYVLNFHGRVTQASVKNFQLVHDSDPEYIVMQFGRTSEDVFTMDYRYPLCAMQAFAIALSSFDGKIACE

SEQ ID NO: 19508 - protein, 460 aa, Drosophila melanogaster
MSAINSRNQKMEQQRQLMEAYIRQKRASPGMVQASDLQINRPMSGMRSNSRELHAYDGPMQFISSPQNPDQILTNGSPGGINPVAMNTSRNHSNNMRSLSTINQEADLIEEISSHELEDEESSPVTVIEQHQQSASHSANSTQSQKPRARQHSFSDNLDEDDYTNRNVAGAAPVRPAGMASPPYKDATLDGSSNGTGNGTGGESEGDVIGNIDQFVMQPAPQGVLYKCRITRDRKGMDRGLFPIYYLHLERDYGKKIFLLGGRKRKKSKTSNYIVSCDPTDLSRNADGFCGKLRSNVFGTSFTVFDNGNKESTESPRLDLAVIIYDTNILGFKGPRNMTVILPGMTEDDQRVKISSADPKQQGILDLWKMKNMDNIVELHNKTPVWNDETQSYVLNFHGRVTQASVKNFQLVHDSDPEYIVMQFGRTSEDVFTMDYRYPLCAMQAFAIALSSFDGKIACE

SEQ ID NO: 19509 - protein, 1497 aa, Drosophila melanogaster
MQSESGAYLPSQPAACRWWKMCEWARDDGSLACGNPFWKPVNGHLTRNWRLLRRTAKQLSAAVDIVFKWLSFSSPFFQDEGWKLNRTNYYQEGWLATGNVRGIVGVTFTTSHCRKNMDYPLRTNYNLRGHRSDVSCVVTIQSFKAPIIFGQQVILVKWNEPYQKLASCDSSGIIFVWIKYEGRWSIELINDRNTPVTHFSWSHDGRMALICYQDGFVLVGSVAGQRYWSSMLNLESTITCGIWTPDDQQVYFGTTQGQVIVMDVHGAMVSQVQLSNDVPITSMAWSCEKFKMEEGEEAEPGVTNAAKRSFVLAVSFQNGYIYLLKSFDDVSPAHINTCLNGALGMVMEWSNSRELLAVAGTLRTGVDGTKTEDMGTPSCYTNLVKFYTETGTCLYQAHIPCSSATVSAITWGHNDKRLFIATGTQVHIAWVSRRVASLQLLCRLEIQASVGSESLLPLLPLPSRIKSLIGNLFAQTIRCCVPDLKSLRDFVSRPPLCSTRLHCTMIRHDDDSNLSSGTCYTLYLEYLGGLVPLLKGKRTSKIRPEFVIFDPQVNDSPLYFQYSAEAKSSSGSSQSTTTGNSGRTDSSDSDFEERSRFGSPRTPRKKRVRPKRRHQAGDRLSASGGGVSNDPDSLDELAYVDTLPEEVKLVEVTSNIWGTKFKIHGLAKTVPANLGQVTYKTSLLHLQPRQMTLVITELRDDFPPGPDPSFNPNIFSEDEDEHHQHQGIHHDAVPQVNVITAQDGASLKPPIIPQRRLTDGASAPLIAPMSPRPNRILARHKNSLTVNGERGSGSSAGLSPLARAESYDDDSSNESQEAGAAGSQSTTVLLHQAPSNGSGPGPSCSKSITRPKTISSFKNSYSRSSSNSSCQSRHAISPLYCDGAVPTLQSPKNAVAPSDIIFERPAVPAAGQTTLMSYSSNADYANNVVQVKNALMSEPVRSANSHVNPVPLNLNLNLERMDARVKCTAPTTSSTAKRREMLYIDEETQSPTPTPSSSSMKRTPTVVSIAPALPDSITRSCSVGYLDSVAITPSDEALSALRKDAPNKRLILVDKKRNRRKRQQQEDARRHKLQQTGKSKSLDSCDLLSLQTKLSSKEHEQVVRKLQEISDSSACSSAANTLCFKCRNNMSPSSACKRCQPSASSVLDEITAVVPAVEPAKESPAVQAKPAPKKRFDVITSFTDSPLFTRKHRFGIGRSKETAGTENSTPLLGRKQDNGFSFVKQLSEVRWRRKEQPAQAQVNGSSNASTLERQPQPEITGAACGTVEATPVEAKASVSLHTQALTTLENIISRLRDLDEGRLTPPSTPQRLPRSSPASPAASKKNKRQQSNSPIRHILNSPLLNRRQRKKQSIIESSDDEGNQTNGSGEESNNAGNGKQYRDLETFQKAQLRQKLKRGKIEPNGSASCANPAPVRREFVMHNKAPMWNEMSQVYQLDFGGRVTQESAKNFQIEFRGKQVMQFGRIDGNAYTLDFQYPFSALQAFAVALANVTQRLK

SEQ ID NO: 19510 - protein, 428 aa, Lemna paucicostata
MSFRSILSDVRDSIGSFSRRRGAEVRISGVSDNHRGRNRVTAGDFPGEIGGEIPAIYQSRWAGLPPELLRDVIKRLEESESSWPARKHVVACAAVCTAWREMCKEIVSGPEFCGKLTFPVSLKQPGPREGTIQCFIKRDKSKSRYHLFLGLSPTLPAENGKFLLSQSASRALPARNTSSPWNADDISRSSSTYIGKLRSNFLGTKFIMFDTQPPTRHCRPAPSSGRVSRRFYSKVSPKVPSGNYAIAQVTYELNVLGKRGPRRMHCTMNSIPSSALDAGGRVPAAPERILSRSLEDSFRSVSLSKDLGSSRFSEFGGEMEREEEEEGDRKKSGPLVLKNKAPRWHEQLQCWCLNFRGRVTVASVKNFQLIADGQATAAQAGASEHDKIILQFGKVGKDTFTMDNRYPLSAFQAFAICLSSFDTKLACE

SEQ ID NO: 19511 - protein, 358 aa, Gallus gallus
MHHFSISPCLHVPTSLCPPAATGSDEEDDSDASTKPIRSGKKNPASLFQTGGDPPRERKTRKKAPKTAESEEETLETQQKNSNKKGKGKKSKKKEERPLSPVIEVDNLEKFVLSPAPQGVTIKCRVTRDKRGMDRGLYPTHYLHLDNDKKVFLLAGRKRKKSKTSNYLISIDPTDLSRGGENFIGKLRSNLMGTKFTVFDNGANPDRASADWSNVRQELSAVVYETNVLGFKGPRKMTVIIPGMNSDNERVPIRPRNDNDGLLMRWQNKNMDNIIELHNKAPVWNDETQSYVLNFHGRVTHASVKNFQIVHGSDPDYIVMQFGRVADDAFTMDYNYPLCAVQAFAIALSSFDGKLACE

SEQ ID NO: 19512 - protein, 489 aa, Homo sapiens
MPLRDETLREVWASDSGHEEESLSPEAPRRPKQRPAPAQRLRKKRTEAPESPCPTGSKPRKPGEEEEEEEDEEDEEEEAEEKKEKILLPPKKPLREKSSADLKERRAKAQGPRGDLGSPDPPPKPLRVRNKEAPAGEGTKMRKTKKKGSGEADKDPSGSPASARKSPAAMFLVGEGSPDKKALKKKGTPKGARKEEEEEEEAATVIKNSNQKGKAKGKGKKKAKEERAPSPPVEVDEPREFVLRPAPQGRTVRCRLTRDKKGMDRGMYPSYFLHLDTEKKVFLLAGRKRKRSKTANYLISIDPTNLSRGGENFIGKLRSNLLGNRFTVFDNGQNPQRGYSTNVASLRQELAAVIYETNVLGFRGPRRMTVIIPGMSAENERVPIRPRNASDGLLVRWQNKTLESLIELHNKPPVWNDDSGSYTLNFQGRVTQASVKNFQIVHADDPDYIVLQFGRVAEDAFTLDYRYPLCALQAFAIALSSFDGKLACE

SEQ ID NO: 19513 - protein, 542 aa, Homo sapiens
  unsure (1)..(542): unsure at all Xaa locations
MPLRDETLREVWASDSGHEEESLSPEAPRRPKQRPAPAQRLRKKRTEAPESPCPTGSKPRKPGAGRRGRPREEPSPDPAQARAPQTVYARFLRDPEAKKRDPRETFLVARAPDAEDEEEEEEEDEEDEEEEAEEKKEKILLPPKKPLREKSSADLKERRAKAQGPRGDLGSPDPPPKPLRVRNKEAPAGEGTKMRKTKKKGSGEADKDPSGSPASARKSPAAMFLVGEXSPDKKALKKKGTPKGARKEEEEEEEAATVIKNSNQKGKAKGKGKKKAKEERAPSPPVEVDEPREFVLRPAPQGRTVRCRLTRDKKGMDRGMYPSYFLHLDTEKKVFLLAGRKRKRSKTANYLISIDPTNLSRGGENFIGKLRSNLLGNRFTVFDNGQNPQRGYSTNVASLRQELAAVIYETNVLGFRGPRRMTVIIPGMSAENERVPIRPRNASDGLLVRWQNKTLESLIELHNKPPVWNDDSGSYTLNFQGRVTQASVKNFQIVHADDPDYIVLQFGRVAEDAFTLDYRYPLCALQAFAIALSSFDGKLACE

SEQ ID NO: 19514 - protein, 542 aa, Homo sapiens
MPLRDETLREVWASDSGHEEESLSPEAPRRPKQRPAPAQRLRKKRTEAPESPCPTGSKPRKPGAGRRGRPREEPSPDPAQARAPQTVYARFLRDPEAKKRDPRETFLVARAPDAEDEEEEEEEDEEDEEEEAEEKKEKILLPPKKPLREKSSADLKERRAKAQGPRGDLGSPDPPPKPLRVRNKEAPAGEGTKMRKTKKKGSGEADKDPSGSPASARKSPAAMFLVGEGSPDKKALKKKGTPKGARKEEEEEEEAATVIKNSNQKGKAKGKGKKKAKEERAPSPPVEVDEPREFVLRPAPQGRTVRCRLTRDKKGMDRGMYPSYFLHLDTEKKVFLLAGRKRKRSKTANYLISIDPTNLSRGGENFIGKLRSNLLGNRFTVFDNGQNPQRGYSTNVASLRQELAAVIYETNVLGFRGPRRMTVIIPGMSAENERVPIRPRNASDGLLVRWQNKTLESLIELHNKPPVWNDDSGSYTLNFQGRVTQASVKNFQIVHADDPDYIVLQFGRVAEDAFTLDYRYPLCALQAFAIALSSFDGKLACE

SEQ ID NO: 19515 - protein, 420 aa, Homo sapiens
QEADSLASVQLGATRPTAPASAKRTKAAATAGGQGGAARKEKKGKHKGTSGPAALAEDKSEAQGPVQILTVGQSDHAQDAGETAAGGGERPSGQDLRATMQRKGISSSMSFDEDEEDEEENSSSSSQLNSNTRPSSATSRKSVEAASAPSPTAPEQPVDVEVQDLEEFALRPAPQGITIKCRITRDKKGMDRGMYPTYFLHLDREDGKKVFLLAGRKRKKSKTSNYLISVDPTDLSRGGDSYIGKLRSNLMGTKFTVYDNGVNPQKASSSTLESGTLRQELAAVCYETNVLGFKGPRKMSVIVPGMNMVHERVSIRPRNEHETLLARWQNKNTESIIELQNKTPVWNDDTQSYVLNFHGRVTQASVKNFQIIHGNDPDYIVMQFGRVAEDVFTMDYNYPLCALQAFAIALSSFDSKLACE

SEQ ID NO: 19516 - protein, 561 aa, Homo sapiens
MGARTPLPSFWVSFFAETGILFPGGTPWPMGSQHSKQHRKPGPLKRGHRRDRRTTRRKYWKEGREIARVLDDEGRNLRQQKLDRQRALLEQKQKKKRQEPLMVQANADGRPRSRRARQSEEQAPLVESYLSSSGSTSYQVQEADSLASVQLGATRPTAPASAKRTKAAATAGGQGGAARKEKKGKHKGTSGPAALAEDKSEAQGPVQILTVGQSDHAQDAGETAAGGGERPSGQDLRATMQRKGISSSMSFDEDEEDEEENSSSSSQLNSNTRPSSATSRKSVREAASAPSPTAPEQPVDVEVQDLEEFALRPAPQGITIKCRITRDKKGMDRGMYPTYFLHLDREDGKKVFLLAGRKRKKSKTSNYLISVDPTDLSRGGDSYIGKLRSNLMGTKFTVYDNGVNPQKASSSTLESGTLRQELAAVCYETNVLGFKGPRKMSVIVPGMNMVHERVSIRPRNEHETLLARWQNKNTESIIELQNKTPVWNDDTQSYVLNFHGRVTQASVKNFQIIHGNDPDYIVMQFGRVAEDVFTMDYNYPLCALQAFAIALSSFDSKLACE

SEQ ID NO: 19517 - protein, 506 aa, Homo sapiens
MTSKPHSDWIPYSVLDDEGRNLRQQKLDRQRALLEQKQKKKRQEPLMVQANADGRPRSRRARQSEEQAPLVESYLSSSGSTSYQVQEADSLASVQLGATRPTAPASAKRTKAAATAGGQGGAARKEKKGKHKGTSGPAALAEDKSEAQGPVQILTVGQSDHAQDAGETAAGGGERPSGQDLRATMQRKGISSSMSFDEDEEDEEENSSSSSQLNSNTRPSSATSRKSVREAASAPSPTAPEQPVDVEVQDLEEFALRPAPQGITIKCRITRDKKGMDRGMYPTYFLHLDREDGKKVFLLAGRKRKKSKTSNYLISVDPTDLSRGGDSYIGKLRSNLMGTKFTVYDNGVNPQKASSSTLESGTLRQELAAVCYETNVLGFKGPRKMSVIVPGMNMVHERVSIRPRNEHETLLARWQNKNTESIIELQNKTPVWNDDTQSYVLNFHGRVTQASVKNFQIIHGNDPDYIVMQFGRVAEDVFTMDYNYPLCALQAFAIALSSFDSKLACE

SEQ ID NO: 19518 - protein, 442 aa, Homo sapiens [sequence omitted]

SEQ ID NO: 19519 - protein, 442 aa, Homo sapiens
MEASRCRLSPSGDSVFHEEMMKMRQAKLDYQRLLLEKRQRKKRLEPFMVQPNPEARLRRAKPRASDEQTPLVNCHTPHSNVILHGIDGPAAVLKPDEVHAPSVSSSVVEEDAENTVDTASKPGLQERLQKHDISESVNFDEETDGISQSACLERPNSASSQNSTDTGTSGSATAAQPADNLLGDIDDLEDFVYSPAPQGVTVRCRIIRDKRGMDRGLFPTYYMYLEKEENQKIFLLAARKRKKSKTANYLISIDPVDLSREGESYVGKLRSNLMGTKFTVYDRGICPMKGRGLVGAAHTRQELAAISYETNVLGFKGPRKMSVIIPGMTLNHKQIPYQPQNNHDSLLSRWQNRTMENLVELHNKAPVWNSDTQSYVLNFRGRVTQASVKNFQIVHKNDPDYIVMQFGRVADDVFTLDYNYPLCAVQAFGIGLSSFDSKLACE

SEQ ID NO: 19520 - protein, 442 aa, Homo sapiens
MEASRCRLSPSGDSVFHEEMMKMRQAKLDYQRLLLEKRQRKKRLEPFMVQPNPEARLRRAKPRASDEQTPLVNCHTPHSNVILHGIDGPAAVLKPDEVHAPSVSSSVVEEDAENTVDTASKPGLQERLQKHDISESVNFDEETDGISQSACLERPNSASSQNSTDTGTSGSATAAQPADNLLGDIDYLEDFVYSPAPQGVTVRCRIIRDKRGMDRGLFPTYYMYLEKEENQKIFLLAARKRKKSKTANYLISIDPVDLSREGESYVGKLRSNLMGTKFTVYDRGICPMKGRGLVGAAHTRQELAAISYETNVLGFKGPRKMSVIIPGMTLNHKQIPYQPQNNHDSLLSRWQNRTMENLVELHNKAPVWNSDTQSYVLNFRGRVTQASVKNFQIVHKNDPDYIVMQFGRVADDVFTLDYNYPLCAVQAFGIGLSSFDSKLACE

SEQ ID NO: 19521 - protein, 520 aa, Homo sapiens
MSQDNDTLMRDILGHELAAMRLQKLEQQRRLFEKKQRQKRQELLMVQANPDASPWLWRSCLREERLLGDRGLGNPFLRKKVSEAHLPSGIHSALGTVSCGGDGRGERGLPTPRTEAVFRNLGLQSPFLSWLPDNSDAELEEVSVENGSVSPPPFKQSPRIRRKGWQAHQRPGTRAEGESDSQDMGDAHKSPNMGPNPGMDGDCVYENLAFQKEEDLEKKREASESTGTNSSAAHNEELSKALKGEGGTDSDHMRHEASLAIRSPCPGLEEDMEAYVLRPALPGTMMQCYLTRDKHGVDKGLFPLYYLYLETSDSLQRFLLAGRKRRRSKTSNYLISLDPTHLSRDGDNFVGKVRSNVFSTKFTIFDNGVNPDREHLTRNTARIRQELGAVCYEPNVLGYLGPRKMTVILPGTNSQNQRINVQPLNEQESLLSRYQRGDKQGLLLLHNKTPSWDKENGVYTLNFHGRVTRASVKNFQIVDPKHQEHLVLQFGRVGPDTFTMDFCFPFSPLQAFSICLSSFN

SEQ ID NO: 19522 - protein, 520 aa, Homo sapiens
MSQDNDTLMRDILGHELAAMRLQKLEQQRRLFEKKQRQKRQELLMVQANPDASPWLWRSCLREERLLGDRGLGNPFLRKKVSEAHLPSGIHSALGTVSCGGDGRGERGLPTPRTEAVFRNLGLQSPFLSWLPDNSDAELEEVSVENGSVSPPPFKQSPRIRRKGWQAHQRPGTRAEGESDSQDMGDAHKSPNMGPNPGMDGDCVYENLAFQKEEDLEKKREASESTGTNSSAAHNEELSKALKGEGGTDSDHMRHEASLAIRSPCPGLEEDMEAYVLRPALPGTMMQCYLTRDKHGVDKGLFPLYYLYLETSDSLQRFLLAGRKRRRSKTSNYLISLDPTLLSRDGDNFVGKVRSNVFSTKFTIFDNGVNPDREHLTRNTARIRQELGAVCYEPNVLGYLGPRKMTVILPGTNSQNQRINVQPLNEQESLLSRYQRGDKQGLLLLHNKTPSWDKENGVYTLNFHGRVTRASVKNFQIVDPKHQEHLVLQFGRVGPDTFTMDFCFPFSPLQAFSICLSSFN

SEQ ID NO: 19523 - protein, 379 aa, Arabidopsis thaliana
MPLSRSLLSRRISNSFRFHQGETTTAPESESIPPPSNMAGSSSWSAMLPELLGEIIRRVEETEDRWPQRRDVVTCACVSKKWREITHDFARSSLNSGKITFPSCLKLPGPRDFSNQCLIKRNKKTSTFYLYLALTPSFTDKGKFLLAARRFRTGAYTEYIISLDADDFSQGSNAYVGKLRSDFLGTNFTVYDSQPPHNGAKPSNGKASRRFASKQISPQVPAGNFEVGHVSYKFNLLKSRGPRRMVSTLRCPSPSPSSSSAGLSSDQKPCDVTKIMKKPNKDGSSLTILKNKAPRWHEHLQCWCLNFHGRVTVASVKNFQLVATVDQSQPSGKGDEETVLLQFGKVGDDTFTMDYRQPLSAFQAFAICLTSFGTKLACE

SEQ ID NO: 19524 - protein, 579 aa, Arabidopsis thaliana
MDESSANSRVSMNGNLYWTAYNSKTVMEQCKRTREIEIWVTKNKIGNGDDGNDVVWIKFMTVSIPNFPMVLCHNSTSYFVDDSISGKSFVLCFSTKKPKQAWVYIVRGDLCKKIKIDEVVFLKAIEITIPISRFVFKSWVDEISLLVGGLSLVAVVSITNRNISLHKMPLSRSLLSRRISNSFRFHQGETTTAPESESIPPPSNMAGSSSWSAMLPELLGEIIRRVEETEDRWPQRRDVVTCACVSKKWREITHDFARSSLNSGKITFPSCLKLPGPRDFSNQCLIKRNKKTSTFYLYLALTPSFTDKGKFLLAARRFRTGAYTEYIISLDADDFSQGSNAYVGKLRSFKFVLRFVFFCLEDECGLKTKGSWFFFGNFNRSDFLGTNFTVYDSQPPHNGAKPSNGKASRRFASKQISPQVPAGNFEVGHVSYKFNLLKSRGPRRMVSTLRCPSPSPSSSSAGLSSDQKPCDVTKIMKKPNKDGSSLTILKNKAPRWHEHLQCWCLNFHGRVTVASVKNFQLVATVDQSQPSGKGDEETVLLQFGKVGDDTFTMDYRQPLSAFQAFAICLTSFGTKLACE

SEQ ID NO: 19525 - protein, 379 aa, Glycine max
  unsure (1)..(379): unsure at all Xaa locations
MSLRKVFRSRKFSKSFKXRCCRRRAPPSRAGSPAPSRRRRXGNNNGWSSMLPEILGEIVRRVDAAEEQWPNRQNVVACACVCKRWRDITREVVRVPSHTGKITFPSCLKQPGPRDVPHQCLIKRNQKTSTFYLYLALTPSFTDKGKFLLAARRYRCGTHTEYIISLDADDLSQGSNAYVGKLSSDFLGTNFTIYDSQPPHSGAKPSSGRASRRFASKQISPQVPAGNFEVGQVSYKFNLLKSRGPRRMVCSLKCPVTPVSPTSGSSDSTPVNGHKMHDKEQAASGYTILKNKAPRWHEHLQCWCLNFHGRVTVASVKNFQLVATVDQSQPGGKGDEETVLLQFGKVGDDTFTMDYRQPLSAFQAFAICLTSFGTKLACE

SEQ ID NO: 19526 - protein, 379 aa, Glycine max; identical to SEQ ID NO: 19525
  unsure (1)..(379): unsure at all Xaa locations

SEQ ID NO: 19527 - protein, 374 aa, Oryza sativa (japonica cultivar-group)
MPRETPPPPPPEGGEVHEVVEGEDGQAEDQEERWARLLPELMSEVVRRVEASGGERWPARKDVVSCACVCRRWRDAAVAVVRPPAESGKITFPSSLKQSSYPSIDGGFWPLIRSMVPGPREFPMQCFIKRNKKNSTFYLYLGLTNATVDKGKFLMAARRFRRGPHTEYIVSLDADDLSQGSNAYMGKLRSDFWGTNFKIYDSKPPYDGAKASSSRSSRRFGSRRISPQVSAGNYEVGQVSYKYNLLKSRGPRRMYCALECPSTQETWENCLKTKFRKPTGNTVLRNKAPRWHEHLQCWCLNFHGRVTVASVKNFQLVAAADPNDPASSKDEETVLLQFGKVDDNIFTMDYRQPLSAFQAFAISLSSFGTKLACE

SEQ ID NO: 19528 - protein, 338 aa, Oryza sativa
  unsure (1)..(338): unsure at all Xaa locations
XETPPPPPPEGGEERWARLLPELMSEVVRRVEASGGERWPARKDVVSCACVCRRWRDAAVAVVRPPAESGKITFPSSLKQPGPREFPMQCFIKRNKKNSTFYLYLGLTNATVDKGKFLMAARRFRRGPHTEYIVSLDADDLSQGSNAYMGKLRSDFWGTNFKIYDSKPPYDGAKASSSRSSRRFGSRRISPQVSAGNYEVGQVSYKYNLLKSRGPRRMYCALECPSTQETWENCLKTKFRKPTGNTVLRNKAPRWHEHLQCWCLNFHGRVTVASVKNFQLVAAADPNDPASSKDEETVLLQFGKVDDNIFTMDYRQPLSAFQAFAISLSSFGTKLACE

SEQ ID NO: 19529 - protein, 354 aa, Oryza sativa
  unsure (1)..(354): unsure at all Xaa locations
LLPELVEEVVRRVEASGGERWPARKDLVSCACVCRRWREAAAAVVRPLPESGRITFPSSLKQPGPKDFPIQCFVKRNKKKSMFYLYLGLLNGTMDKGKFLMAARRFRRGPHTEYVISLDADDLSQGSNAYVGKLRXLSRILXXXSFTFHCSCSLAPCVFFCFCCTIFRSDFWGTNFKIYDNQPPYDDAKTSSTRSSQRFGSTQICPQISAGNFNVGQISYKYNLLKSRGPRRMFCTMECPSTQETWENSLKTKSLRCTGTTXVLRNKAPRWHEHLQCWCLNFHGRVTVASVKNFQLVATADPSHPDSVGDEETVILQFGKVDSNIFTMDYRQPLSAFQAFAICLSSFGTKLACE

SEQ ID NO: 19530 - protein, 435 aa, Triticum aestivum
  unsure (1)..(435): unsure at all Xaa locations
LFFPGWSYCAALVVVVSLPPADPLYPPVVPPAPPRLSPRKLPRALGERDHSPGRPSPAWLCGGAARPGSXSLLARAGRHRRREXLAKGPPRVAPQDAAEQIHEEAEDEERWSRLLPELLTDIVRRVDAGAERWPPRRDVVACACVCRRWRDAAVAVVRPPLECGRITFPSSLKQPGPRDAPMHCFIRRNKSTSTFYLYLSLTQALTDKGKXLLAARRFRRPXGAHTEYIISYDSDDLYPGSNSGVGKLRSDFLGTKFVMYDNQKPYDGAKSLKSRSSRRFATKQISPHVSGDNLEVGQVSYRFNFLKSRGPRRMHCSIQCPVGQGTASDPSKXXKPPSTSSSLSLKNKAPRWHDHLQCWCLNFHGRVTVASVKNFQLVAPAGTSDPWGVGDEETVILQFGKIEDDAFTMDFRHPLSAYQAFAICLTSFGTKLACE

SEQ ID NO: 19531 - protein, 294 aa, Triticum aestivum
  unsure (1)..(294): unsure at all Xaa locations
TPSLASEASTSSRGERSQPRAVAVVRPPLECGRITFPSSLKQPGPRDAPMHCFIRRNKSTSTFYLYLSXTQALTDKGKFLLAARRFRHGAHTEYIISYDSDDLYPGSNSGVGKLRSDFLGTKFVMYDNQKPYDGAKSLKSRSSRRFATKQISPHVSGDNLEVGQVSYRFNFLKSRGPRRMHCSIQCPVGQGTASDPSKXXKPPSTSISRLVXXWHDPAQCWFXHPRVTVASPHNFQLVAPADTSDPWGVWDEETVIQFGKIEDDAFTMDFRHPLSAYQAFAICLTSFGTKLACE

SEQ ID NO: 19532 - protein, 211 aa, Triticum aestivum
  unsure (1)..(211): unsure at all Xaa locations
MPREEPPAXXEVSEVAETGEEKEDGQPEEQEERWARLLPELLSEVVRRVEASGGERWPARKDVVSCACVCRRWRDAAVAVVRPPAVSGKITFPSSLKQPGPREFPMQCFIKRNKKNSTFYLYLGLTTATVDKGKFLMAARRFRRRPHTEYIISLDADDLSQGSNAYMGXKLRSDFCGTNLQVYDTKPPHDGAKASRTRSSRRFGRRRISPX

SEQ ID NO: 19533 - protein, 373 aa, Homo sapiens
MTSKPHSDWIPYSVLDDEGRNLRQQKLDRQRALLEQKQKKKRQEPLMVQANADGRPRSRRARQSEEQAPLVESYLSSSGSTSYQVQEADSLASVQLGATRPTAPASAKRTKAAATAGGQGGAARKEKKGKHKGTSGPAALAEDKSEAQGPVQILTVGQSDHAQDAGETAAGGGERPSGQDLRATMQRKGISSSMSFDEDEEDEEENSSSSSQLNSNTRPSSATSRKSVREAASAPSPTAPEQPVDVEVQDLEEFALRPAPQGITIKCRITRDKKGMDRGMYPTYFLHLDREDGKKVFLLAGRKRKKSKTSNYLISVDPTDLSRGGDSYIGKLRSNLMGTKFTVYDNGVNPQKASSSTLESGTLRQELAAVCYV

SEQ ID NO: 19534 - protein, 520 aa, Cricetulus griseus
MPGSLPLNAEACWPKDVGIVALEIYFPSQYVDQAELEKYDGVDAGKYTIGLGQARMGFCTDREDINSLCLTVVQNLMERNSLSYDCIGRLEVGTETIIDKSKSVKSNLMQLFEESGNTDIEGIDTTNACYGGTAAVFNAVNWIESSSWDGRYALVVAGDIAIYATGNARPTGGVGAVALLIGPNAPLIFDRGLRGTHMQHAYDFYKPDMLSEYPIVDGKLSIQCYLSALDRCYSVYRKKIRAQWQKEGNDNDFTLNDFGFMISHSPYCKLVQKSLARMFLNDFLNDQNRDKNSIYSGLEAFGDVKLEDTYFDRDVEKAFMKASSELFNQKTKASLLVSNQNGNMYTSSVYGSLASVLAQYSPQQLAGKRIGVFSYGSGLAATLYSLKVTQDATPGSALDKVTASLCDLKSRLDSRTCVAPDVFAENMKLREDTHHLANYIPQCSIDSLFEGTWYLVRVDEKHRRTYARRPSTNDHNLGDGVGLVHSNTATEHIPSPAKKVPRLPATAAESESAVISNGEH

SEQ ID NO: 19535 - protein, 508 aa, Mus musculus
MQRLLAPARRVLQVKRAMQETSLTPAHLLSAAQQRFSTIPPAPLAKTDTWPKDVGILALEVYFPAQYVDQTDLEKFNNVEAGKYTVGLGQTRMGFCSVQEDINSLCLTVVQRLMERTKLPWDAVGRLEVGTETIIDKSKAVKTVLMELFQDSGNTDIEGIDTTNACYGGTASLFNAANWMESSYWDGRYALVVCGDIAVYPSGNARPTGGAGAVAMLIGPKAPLVLEQGLRGTHMENAYDFYKPNLASEYPLVDGKLSIQCYLRALDRCYAAYRKKIQNQWKQAGNNQPFTLDDVQYMIFHTPFCKMVQKSLARLMFNDFLSSSSDKQNNLYKGLEAFRGLKLEETYTNKDVDKALLKASLDMFNQKTKASLYLSTNNGNMYTSSLYGCLASLLSHHSAQELAGSRIGAFSYGSGLAASFFSFRVSKDASPGSPLEKLVSSVSDLPKRLDSRRRMSPEEFTEIMNQREQFYHKVNFSPPGDTSNLFPGTWYLERVDEMHRRKYARCPV

SEQ ID NO: 19536 - protein, 508 aa, Mus musculus
MQRLLAPARRVLQVKRAMQETSLTPAHLLSAAQQWFSTIPPAPLAKTDTWPKDVGILALEVYFPAQYVDQTDLEKFNNVEAGKYTVGLGQTRMGFCSVQEDINSLCLTVVQRLMERTKLPWDAVGRLEVGTETIIDKSKAVKTVLMELFQDSGNTDIEGIDTTNACYGGTASLFNAANWMESSYWDGRYALVVCGDIAVYPSGNARPTGGAGAVAMLIGPKAPLVLEQGLRGTHMENAYDFYKPNLASEYPLVDGKLSIQCYLRALDRCYAAYRKKIQNQWKQAGNNQPFTLDDVQYMIFHTPFCKMVQKSLARLMFNDFLSSSSDKQNNLYKGLEAFRGLKLEETYTNKDVDKALLKASLDMFNQKTKASLYLSTNNGNMYTSSLYGCLASLLSHHSAQELAGSRIGAFSYGSGLAASFFSFRVSKDASPGSTLEKLVSSVSDLPKRLDSRRRMSPEEFTEIMNQREQFYHKVNFSPPGDTSNLFPGTWYLERVDEMHRRKYARCPV

SEQ ID NO: 19537 - protein, 480 aa, Mus musculus
EFRAQQRFSTIPPAPLAKTDTWPKDVGILALEVYFPAQYVDQTDLEKFNNVEAGKYTVGLGQTRMGFCSVQEDINSLCLTVVQRLMERTKLPWDAVGRLEVGTETIIDKSKAVKTVLMELFQDSGNTDIEGIDTTNACYGGTASLFNAANWMESSYWDGRYALVVCGDIAVYPSGNARPTGGAGAVAMLIGPKAPLVLEQGLRGTHMENAYDFYKPNLASEYPLVDGKLSIQCYLRALDRCYAAYRKKIQNQWKQAGNNQPFTLDDVQYMIFHTPFCKMVQKSLARLMFNDFLSSSSDKQNNLYKGLEAFRGLKLEETYTNKDVDKALLKASLDMFNQKTKASLYLSTNNGNMYTSSLYGCLASLLSHHSAQELAGSRIGAFSYGSGLAASFFSFRVSKDASPGSPLEKLVSSVSDLPKRLDSRRRMSPEEFTEIMNQREQFYHKVNFSPPGDTSNLFPGTWYLERVDEMHRRKYARCPV

SEQ ID NO: 19538 - protein, 471 aa, Mus musculus
TIPPAPLAKTDTWPKDVGILALEVYFPAQYVDQTDLEKFNNVEAGKYTVGLGQTRMGFCSVQEDINSLCLTVVQRLMERTKLPWDAVGRLEVGTETIIDKSKAVKTVLMELFQDSGNTDIEGIDTTNACYGGTASLFNAANWMESSYWDGRYALVVCGDIAVYPSGNARPTGGAGAVAMLIGPKAPLVLEQGLRGTHMENAYDFYKPNLASEYPLVDGKLSIQCYLRALDRCYAAYRKKIQNQWKQAGNNQPFTLDDVQYMIFHTPFCKMVQKSLARLMFNDFLSSSSDKQNNLYKGLEAFRGLKLEETYTNKDVDKALLKASLDMFNQKTKASLYLSTNNGNMYTSSLYGCLASLLSHHSAQELAGSRIGAFSYGSGLAASFFSFRVSKDASPGSPLEKLVSSVSDLPKRLDSRRRMSPEEFTEIMNQREQFYHKVNFSPPGDTSNLFPGTWYLERVDEMHRRKYARCPV

SEQ ID NO: 19539 - protein, 520 aa, Mus musculus
MPGSLPLNAEACWPKDVGIVALEIYFPSQYVDQAELEKYDGVDAGKYTIGLGQARMGFCTDREDINSLCLTVVQKLMERHSLSYDCIGRLEVGTETIIDKSKSVKSNLMQLFEESGNTDIEGIDTTNACYGGTAAVFNAVNWVESSSWDGRYALVVAGDIAIYATGNARPTGGVGAVALLIGPNAPLIFDRGLRGTHMQHAYDFYKPDMLSEYPVVDGKLSIQCYLSALDRCYSVYRKKIRAQWQKEGKDKDFTLNDFGFMIFHSPYCKLVQKSLARMFLNDFLNDQNRDKNSIYSGLEAFGDVKLEDTYFDRDVEKAFMKASSELFNQKTKASLLVSNQNGNMYTSSVYGSLASVLAQYSPQQLAGKRVGVFSYGSGLAATLYSLKVTQDATPGSALDKITASLCDLKSRLDSRTCVAPDVFAENMKLREDTHHLANYIPQCSIDSLFEGTWYLVRVDEKHRRTYARRPFTNDHSLDEGMGLVHSNTATEHIPSPAKKVPRLPATSAESESAVISNGEH

SEQ ID NO: 19540 - protein, 508 aa, Mus musculus
MQRLLAPARRVLQVKRAMQETSLTPAHLLSAAQQRFSTIPPAPLAKTDTWPKDVGILALEVYFPAQYVDQTDLEKFNNVEAGKYTVGLGQTRMGFCSVQEDINSLCLTVVQRLMERTKLPWDAVGRLEVGTETIIDKSKAVKTVLMELFQDSGNTDIEGIDTTNACYGGTASLFNAANWMESSYWDGRYALVVCGDIAVYPSGNARPTGGAGAVAMLIGPKAPLVLEQGLRGTHMENAYDFYKPNLASEYPLVDGKLSIQCYLRALDRCYAAYRKKIQNQWKQAGNNQPFTLDDVQYMIFHTPFCKMVQKSLARLMFNDFLSSSSDKQNNLYKGLEAFRGLKLEETYTNKDVDKALLKASLDMFNQKTKASLYLSTNNGNMYTSSLYGCLASLISHHSAQELAGSRIGAFSYGSGLAASFFSFRVSKDASPGSPLEKLVSSVSDLPKRLDSRRRMSPEEFTEIMNQREQFYHKVNFSPPGDTSNLFPGTWYLERVDEMHRRKYARCPV

SEQ ID NO: 19541 - protein, 520 aa, Mus musculus
MPGSLPLNAEACWPKDVGIVALEIYFPSQYVDQAELEKYDGVDAGKYTIGLGQARMGFCTDREDINSLCPTVVQKLMERHSLSYDCIGRLEVGTETIIDKSKSVKSNLMQLFEESGNTDIEGIDTTNACYGGTAAVFNAVNWVESSSWDGRYALVVAGDIAIYATGNARPTGGVGAVALLIGPNAPLIFDRGLRGTHMQHAYDFYKPDMLSEYPVVDGKLSIQCYLSALDRCYSVYRKKIRAQWQKEGKDKDFTLNDFGFMIFHSPYCKLVQKSLARMFLNDFLNDQNRDKNSIYSGLEAFGDVKLEDTYFDRDVEKAFMKASSELFNQKTKASLLVSNQNGNMYTSSVYGSLASVLAQYSPQQLAGKRVGVFSYGSGLAATLYSLKVTQDATPGSALDKITASLCDLKSRLDSRTCVAPDVFAENMKLREDTHHLANYIPQCSIDSLFEGTWYLVRVDEKHRRTYARRPFTNDHSLDEGMGLVHSNTATEHIPSPAKKVPRLPATSAESESAVISNGEH

SEQ ID NO: 19542 - protein, 432 aa, Mus musculus
EFRAQQRFSTIPPAPLAKTDTWPKDVGILALEVYFPAQYVDQTDLEKFNNVEAGKYTVGLGQTRMGFCSVQEDINSLCLTVVQRLMERTKLPWDAVGRLEVGTETIIDKSKAVKTVLMELFQDSGNTDIEGIDTTNACYGGTASLFNAANWMESSYWDGRYALVVCGDIAVYPSGNARPTGGAGAVAMLIGPKAPLVLEQGLRGTHMENAYDFYKPNLASEYPLVDGKLSIQCYLRALDRCYAAYRKKIQNQWKQAGNNQPFTLDDVQYMIFHTPFCKMVQKSLARLMFNDFLSSSSDKQNNLYKGLEAFRGLKLEETYTNKDVDKALLKASLDMFNQKTKASLYLSTNNGNMYTSSLYGCLASLLSHHSAQELAGSRIGAFSYGSGLAASFFSFRVSKDASPGSPLEKLVSSVSDLPKRLDSRRRMSPEEF

SEQ ID NO: 19543 - protein, 268 aa, Mus musculus
MPGSLPLNAEACWPKDVGIVALEIYFPSQYVDQAELEKYDGVDAGKYTIGLGQARMGFCTDREDINSLCLTVVQKLMERHSLSYDCIGRLEVGTETIIDKSKSVKSNLMQLFEESGNTDIEGIDTTNACYGGTAAVFNAVNWVESSSWDGRYALVVAGDIAIYATGNARPTGGVGAVALLIGPNAPLIFDRGLRGTHMQHAYDFYKPDMLSEYPVVDGKLSIQCYLSALDRCYSVYRKKIRAQWQKGGFSFSQFSCTRCWCLEGSVIM

SEQ ID NO: 19544 - protein, 139 aa, Mus musculus
ASLYLSTNNGNMYTSSLYGCLASLLSHHSAQELAGSRIGAFSYGSGLAASFFSFRVSKDASPGSPLEKLVSSVSDLPKRLDSRRRMSPEEFTEIMNQREQFYHKVNFSPPGDTSNLFPGTWYLERVDEMHRRKYARCPV

SEQ ID NO: 19545 - protein, 520 aa, Rattus norvegicus
MPGSLPLNAEACWPKDVGIVALEIYFPSQYVDQAELEKYDGVDAGKYTIGLGQARMGFCTDREDINSLCLTVVQKLMERNSLSYDCIGRLEVGTETIIDKSKSVKSNLMQLFEESGNTDIEGIDTTNACYGGTAAVFNAVNWIESSSWDGRYALVVAGDIAIYASGNARPTGGVGAVALLIGPNAPVIFDRGLRGTHMQHAYDFYKPDMLSEYPVVDGKLSIQCYLSALDRCYSVYRKKIRAQWQKEGKDKDFTLNDFGFMIFHSPYCKLVQKSLARMFLNDFLNDQNRDKNSIYSGLEAFGDVKLEDTYFDRDVEKAFMKASAELFNQKTKASLLVSNQNGNMYTSSVYGSLASVLAQYSPQQLAGKRIGVFSYGSGLAATLYSLKVTQDATPGSALDKITASLCDLKSRLDSRTCVAPDVFAENMKLREDTHHLANYIPQCSIDSLFEGTWYLVRVDEKHRRTYARRPSTNDHSLDEGVGLVHSNTATEHIPSPAKKVPRLPATSGEPESAVISNGEH

SEQ ID NO: 19546 - protein, 508 aa, Rattus norvegicus
MQRLLAPARRVLQVKRVMQESSLSPAHLLPAAQQRFSTIPPAPLAKTDTWPKDVGILALEVYFPAQYVDQTDLEKFNNVEAGKYTVGLGQTRMGFCSVQEDINSLCLTVVQRLMERTKLPWDAVGRLEVGTETIIDKSKAVKTVLMELFQDSGNTDIEGIDTTNACYGGTASLFNAANWMESSYWDGRYALVVCGDIAVYPSGNPRPTGGAGAVAMLIGPKAPLVLEQGLRGTHMENAYDFYKPNLASEYPLVDGKLSIQCYLRALDRCYAAYRRKIQNQWKQAGNNQPFTLDDVQYMIFHTPFCKMVQKSLARLMFNDFLSSSSDKQNNLYKGLEAFKGLKLEETYTNKDVDKALLKASLDMFNKKTKASLYLSTNNGNMYTSSLYGCLASLLSHHSAQELAGSRIGAFSYGSGLAASFFSFRVSKDASPGSPLEKLVSSVSDLPKRLDSRRRMSPEEFTEIMNQREQFYHKVNFSPPGDTSNLFPGTWYLERVDEMHRRKYARRPV

SEQ ID NO: 19547 - protein, 416 aa, Rattus norvegicus
MGFCSVQEDINSLCLTVVQRLMERTKLPWDAVGRLEVGTETIIDKSKAVKTVLMELFQDSGNTDIEGIDTTNACYGGTASLFNAANWMESSYWDGRYALVVCGDIAVYPSGNARPTGGAGAVAMLIGPKAPLVLEQGLRGTHMENAYDFYKPNLASEYPLVDGKLSIQCYLRALDRCYAAYRRKIQNQWKQAGNNQPFTLDDVQYMIFHTPFCKMVQKSLARLMFNDFLSSSSDKQNNLYKGLEAFKGLKLEETYTNKDVDKALLKASLDMFNKKTKASLYLSTNNGNMYTSSLYGCLASLLSHHSAQELAGSRIGAFSYGSGLAASFFSFRVSKDASPGSPLEKLVSSVSDLPKRLDSRRRMSPEEFTEIMNQREQFYHKVNFSPPGDTSNLFPGTWYLERVDEMHRRKYARRPV

SEQ ID NO: 19548 - protein, 113 aa, Aerides japonica
TIGLGQDCMAFCTELEDVISMSLTVVTSLLEKYQIDPKQIGRLEVGSETVIDKSKSIKTWLMRIFEEYGNTDIEGVDSTNACYGGTAALFNCVNWVESSSWDGRYGLVVCTCP

SEQ ID NO: 19549 - protein, 388 aa, Staphylococcus aureus
MTIGIDKINFYVPKYYVDMAKLAEARQVDPNKFLIGIGQTEMAVSPVNQDIVSMGANAAKDIITDEDKKKIGMVIVATESAVDAAKAAAVQIHNLLGIQPFARCFEMKEACYAATPAIQLAKDYLATRPNEKVLVIATDTARYGLNSGGEPTQGAGAVAMVIAHNPSILALNEDAVAYTEDVYDFWRPTGHKYPLVDGALSKDAYIRSFQQSWNEYAKRQGKSLADFASLCFHVPFTKMGKKALESIIDNADETTQERLRSGYEDAVDYNRYVGNIYTGSLYLSLISLLENRDLQAGETIGLFSYGSGSVVEFYSATLVVGYKDHLDQAAHKALLNNRTEVSVDAYETFFKRFDDVEFDEEQDAVHEDRHIFYLSNIENNVREYHRPE

SEQ ID NO: 19550 - protein, 389 aa, Staphylococcus carnosus
MTIGIDQLNFYIPNFYVDMAELAEARGVDPNKFLIGIGQSQMAVSPVSQDIVSMGANAAQPILSEQDKKDITMVIVATESAIDSAKASAVQIHHLLGIQPFARCFEMKEACYAATPAIQLAKDYLVPRPKEKVLVIASDTARYGLNSGGEPTQGAGAVAMVISHNPSILELHDDSVAYTEDVYDFWRPSGEIYPLVAGKLSKDAYIKSFQESWNEYAKRHHKSLSDFAALCFHVPFTKMGQKALDSILTDSASEDTQARLNEGYKSATDYNRYVGNVYTGSLYLSLISLLENHKLNGGDNIGLFSYGSGSVGEFFSATLVDNYQDHLDVKAHKAMLDNRKALSVEEYEKFFNRFDNLEFDTETELEVEPKGNFYLKEISDNIRYYDTVK

SEQ ID NO: 19551 - protein, 388 aa, Staphylococcus epidermidis
MNIGIDKISFYVPKYYVDMAKLAEARQVDPNKFLIGIGQTEMTVSPVNQDIVSMGANAAKDIITEEDKKNIGMVIVATESAIDNAKAAAVQIHHLLGIQPFARCFEMKEACYAATPAIQLAKDYLAQRPNEKVLVIASDTARYGIHSGGEPTQGAGAVAMMISHDPSILKLNDDAVAYTEDVYDFWRPTGHQYPLVAGALSKDAYIKSFQESWNEYARRHNKTLADFASLCFHVPFTKMGQKALDSIINHADETTQDRLNSSYQDAVDYNRYVGNIYTGSLYLSLISLLETRDLKGGQTIGLFSYGSGSVGEFFSGTLVDGFKEQLDVERHKSLLNNRIEVSVDEYEHFFKRFDQLELNHELEKSNADRDIFYLKSIDNNIREYHIAE

SEQ ID NO: 19552 - protein, 388 aa, Staphylococcus haemolyticus
MSIGIDKINFYVPKYYVDMAKLAEARQVDPNKFLIGIGQTQMAVSPVSQDIVSMGANAAKDIITDDDKKHIGMVIVATESAIDNAKAAAVQIHNLLGVQPFARCFEMKEACYAATPAIQLAKDYIEKRPNEKVLVIASDTARYGIQSGGEPTQGAGAVAMLISNNPSILELNDDAVAYTEDVYDFWRPTGHKYPLVAGALSKDAYIKSFQESWNEYARREDKTLSDFESLCFHVPFTKMGKKALDSIINDADETTQERLTSGYEDAVYYNRYVGNIYTGSLYLSLISLLENRSLKGGQTIGLFSYGSGSVGEFFSATLVEGYEKQLDIEGHKALLNERQEVSVEDYESFFKRFDDLEFDHATEQTDDDKSIYYLENIQDDIRQYHIPK

SEQ ID NO: 19553 - protein, 398 aa, Streptococcus pneumoniae
MNDKTEVNMTIGIDKIGFATSQYVLKLQDLAEARGIDPEKLSKGLLLKELSIAPLTEDIVTLAASASDSILTEQERQEVDMVIVATESGIDQSKAAAVFVHGLLGIQPFARSFEIKEACYGATAALHYAKLHVENSPESKVLVIASDIAKYGIETPGEPTQGAGSVAMLITQNPRMMAFNNDNVAQTRDIMDFWRPNYSTTPYVNGVYSTQQYLDSLKTTWLEYQKRYQLTLDDFAAVCFHLPYPKLALKGLKKIMDKNLPQEKKDLLQKHFDQSILYSQKVGNIYTGSLFLGLLSLLENTDSLKAGDKIALYSYGSGAVAEFFSGELVEGYEAYLDKDRLNKLNQRTALSVADYEKVFFEEVNLDETNSAQFAGYENQDFALVEILDHQRRYSKVEK

SEQ ID NO: 19554 - protein, 383 aa, Enterococcus faecalis
MTIGIDKISFFVPPYYIDMTALAEARNVDPGKFHIGIGQDQMAVNPISQDIVTFAANAAEAILTKEDKEAIDMVIVGTESSIDESKAAAVVLHRLMGIQPFARSFEIKEACYGATAGLQLAKNHVALHPDKKVLVVAADIAKYGLNSGGEPTQGAGAVAMLVASEPRILALKEDNVMLTQDIYDFWRPTGHPYPMVDGPLSNETYIQSFAQVWDEHKKRTGLDFADYDALAFHIPYTKMGKKALLAKISDQTEAEQERILARYEESIIYSRRVGNLYTGSLYLGLISLLENATTLTAGNQIGLFSYGSGAVAEFFTGELVAGYQNHLQKETHLALLDNRTELSIAEYEAMFAETLDTDIDQTLEDELKYSISAINNTVRSYRN

SEQ ID NO: 19555 - protein, 384 aa, Enterococcus faecium
MKIGIDRLSFFIPNLYLDMTELAESRGDDPAKYHIGIGQDQMAVNRANEDIITLGANAASKIVTEKDRELIDMVIVGTESGIDHSKASAVIIHHLLKIQSFARSFEVKEACYGGTAALHMAKEYVKNHPERKVLVIASDIARYGLASGGEVTQGVGAVAMMITQNPRILSIEDDSVFLTEDIYDFWRPDYSEFPVVDGPLSNSTYIESFQKVWNRHKELSGRGLEDYQAIAFHIPYTKMGKKALQSVLDQTDEDNQERLMARYEESIRYSRRIGNLYTGSLYLGLTSLLENSKSLQPGDRIGLFSYGSGAVSEFFTGYLEENYQEYLFAQSHQEMLDSRTRITVDEYETIFSETLPEHGECAEYTSDVPFSITKIENDIRYYKI

SEQ ID NO: 19556 - protein, 384 aa, Enterococcus faecium
MKIGIDRLSFFIPNLYLDMTELAESRGDDPAKYHIGIGQDQMAVNRANEDIITLGANAASKIVTEKDRELIDMVIVGTESGIDHSKASAVIIHHLLKIQSFARSFEVKEACYGGTAALHMAKEYVKNHPERKVLVIASDIARYGLASGGEVTQGVGAVAMMITQNPRILSIEDDSVFLTEDIYDFWRPDYSEFPVVDGPLSNSTYIESFQKVWNRHKELSGRGLEDYQAIAFHIPYTKMGKKALQSVLDQTDEENQERLMARYEESIRYSRRIGNLYTGSLYLGLTSLLENSKSLQPGDRIGLFSYGSGAVSEFFTGYLEENYQEYLFAQSHQEMLDSRTRITVDEYETIFSETLPEHGECAEYTSDVPFSITKIENDIRYYKI

SEQ ID NO: 19557 - protein, 384 aa, Lactococcus lactis subsp. lactis
MKVGIDKLGFFVPNTFVDMRDLANARNVDPAKFQIGIGQDEMAVNPATQDIITFAANAAASILTEEDKKAIDMIIVGTESSLDESKASAVVVHDLLGIQPFARSIEMKEACYATTAGLTLARDHVLLNPDTKVLVIASDIAKYGLNTGGEPTQGAGSVAMLITADPKILALNNDNVALTQDIYDFWRPFGQAYPSVDGKFSNETYIDAFAKIWKEYSHRTNLKFEDFAAIAFHTPYTKMGKKALLPMLESEKPANAEELMEQFEHGIVYNRRVGNLYTGSLYLSLISLLENSDKLSAGQRIGLFSYGSGTVAEFFSGELVEGYENHLLKIEHQSMLDARTRLSIPEYENMFNQYLDLNHNISFNDETDYSVSEVVDNHRKYKKR

SEQ ID NO: 19558 - protein, 346 aa, Methanothermobacter thermautotrophicus
MAGIVGYGVYIPSYRIKVEEIARVWGDDPQAISRGLVVEEKSVPGPDEDTATISVEAARNALRRSQIDPSEIGAVYVGSESHPYAVKPTATIVAEAVEATPEMTAADLEFACKAGTAGIQACMGLVDSGIIKYGLAVGADTAQGAPGDALEYTASAGGAAYVIGGKNCLADIKETYSFTTDTPDFYRREGMPYPRHGGRFTGEPAYFKHVLGAARGMMEKTGLSADDFDYAVFHQPNGKFYLKAARKLGFESEQVKPGLLTPVIGNTYSGATPVGLAATLDVAEPGARILAVSYGSGAGSDAFIIEVNDLIEERRDLAPSVAEIIKNKRYVDYALYAKFKGKLRMA

SEQ ID NO: 19559 - protein, 388 aa, Staphylococcus aureus subsp. aureus Mu50
MTIGIDKINFYVPKYYVDMAKLAEARQVDPNKFLIGIGQTEMAVSPVNQDIVSMGANAAKDIITDEDKKKIGMVIVATESAVDAAKAAAVQIHNLLGIQPFARCFEMKEACYAATPAIQLAKDYLATRPNEKVLVIATDTARYGLNSGGEPTQGAGAVAMVIAHNPSILALNEDAVAYTEDVYDFWRPTGHKYPLVDGALSKDAYIRSFQQSWNEYAKRQGKSLADFASLCFHVPFTKMGKKALESIIDNADETTQERLRSGYEDAVDYNRYVGNIYTGSLYLSLISLLENRDLQAGETIGLFSYGSGSVGEFYSATLVEGYKDHLDQAAHKALLNNRTEVSVDAYETFFKRFDDVEFDEEQDAVHEDRHIFYLSNIENNVREYHRPE

SEQ ID NO: 19560 - protein, 387 aa, Lactobacillus gasseri
MKVGIDQIGYFTPNKYVDMVDLAHARNQDPNKFLIGIGQKKMSVADPTQDAVSMGINATLRYIDKIDQSKVGLLIFGTESSVDQSKSGSLFVKSALKLDPAVRAFEVKEACFGLTAGLMIAQDFVRLHPDQTAIVIGSDIARYGINTAGEVTQGAGSVSLLVSSNPRILELNEGHSAYSEDINDFWRPNYSKTAKVDGKYSTQVYLDFFKHTFSDYKRQKGLETKDFAAIAYHLPFTKMGLKANRLAIEGVDEETNARLMDSFTASKELNANVGNIYTGSLYLSLLSLLENGGLKAGDLIGLFSYGSGAMAEFYSANVVEGYENELDKAADEALLDKRRKLSVPEYEKIFSASLVDPQNNVELTSDEKKGRYYFAGICDDIRQYRVK

SEQ ID NO: 19561 - protein, 388 aa, Listeria innocua
MKIGIDKIGFYTPAFYVDMTELAEARNIDPNKFTIGIGQDKMAFAPITQDSVTMGANAALQILDEEDLEKIDLVILATESGIDESKAGAVYIHRLLGIQPFSRAIEIKEACYGATAGINLAKDYVAKHPDSKVLVIGSDIARYGLETGGEATQGAGAVAMVISANPRCITLLDDNVFYTEDIMDFWRPVYSEYACVEGKYSTEQYIHFFQTIWNKYSEKFGKKLDDFAAICFHLPYTKMGKKALDTIIETAPSDVQERLLENYRLSTLYSRNVGNIYTGSLYLSFISLLDNQANLQADDKIGFFSYGSGAVGEFFHGELQPDYKQYIRKEAHAELLANRTKLSIPDYETKFKEQLPKDGSTLEIDPASDPAPIILTGIQDHKRQYIKK

SEQ ID NO: 19562 - protein, 388 aa, Listeria monocytogenes EGD-e
MKIGIDKIGFYTPAFYVDMVELAEARNIDPNKFTIGIGQDKMAFAPITQDSVTMGANAALQILDEEDLKKIDLVILATESGIDESKAGAVYIHRLLGIQPFSRAIEIKEACYGATAGINLAKDYVAKHPDSKVLVIGSDIARYGLATGGEATQGAGAVAMVIAADPRCITLEDDNVFYTEDIMDFWRPVYSEYACVEGKYSTEQYIHFFQTIWEKYSAKFGKNLEDFAAICFHLPYTKMGKKALDTIIETAPSDVQEKLLENYRLSTLYSRNVGNIYTGSLYLSFISLLDNQPDLQAEDKIGFFSYGSGAVGEFFHGVLQPDYKKYIRKDEHAELLANRTKLAIPDYETKFKQQLPKDGSIFEVDPASDPAAIVLTGIQEHKRQYIKK

SEQ ID NO: 19563 - protein, 398 aa, Streptococcus pneumoniae TIGR4
MNDKTEVNMTIGIDKIGFATSQYVLKLQDLAEARGIDPEKLSKGLLLKELSIAPLTEDIVTLAASASDSILTEQERQEVDMVIVATESGIDQSKAAAVFVHGLLGIQPFARSFEIKEACYGATAALHYAKLHVENSPESKVLVIASDIAKYGIETPGEPTQGAGSVAMLITQNPRMMAFNNDNVAQTRDIMDFWRPNYSTTPYVNGVYSTQQYLDSLKTTWLEYQKRYQLTLDDFAAVCFHLPYPKLALKGLKKIMDKSLPQEKKDLLQKHFDQSILYSQKVGNIYTGSLFLGLLSLLENTDSLKAGDKIALYSYGSGAVAEFFSGELVEGYEAYLDKDRLNKLNQRTALSVADYEKVFFEEVNLDETNSAQFAGYENQDFALVEILDHQRRYSKVEK

SEQ ID NO: 19564 - protein, 398 aa, Streptococcus pneumoniae R6
MNDKTEVNMTIGIDKIGFATSQYVLKLQDLAEARGIDPEKLSKGLLLKELSIAPLTEDIVTLAASASDSILTEQERQEVDMVIVATESGIDQSKAAAVFVHGLLGIQPFARSFEIKEACYGATAALHYAKLHVENSPESKVLVIASDIAKYGIETPGEPTQGAGSVAMLITQNPRMMAFNNDNVAQTRDIMDFWRPNYSTTPYVNGVYSTQQYLDSLKTTWLEYQKRYQLTLDDFAAVCFHLPYPKLALKGLKKIMDKSLPQEKKDLLQKHFDQSILYSQKVGNIYTGSLFLGLLSLLENTDSLKAGDKIVLYSYGSGAVAEFFSGELVEGYEAYLDKDRLNKLNQRTALSVADYEKVFFEEVNLDETNSAQFAGYENQDFALVEILDHQRRYSKVEK

SEQ ID NO: 19565 - protein, 388 aa, Staphylococcus epidermidis ATCC 12228
MNIGIDKISFYVPKYYVDMAKLAEARQVDPNKFLIGIGQTEMTVSPVNQDIVSMGANAAKDIITEEDKKNIGMVIVATESAIDNAKAAAVQIHHLLGIQPFARCFEMKEACYAATPAIQLAKDYLAQRPNEKVLVIASDTARYGIHSGGEPTQGAGAVAMMISHNPSILKLNDDAVAYTEDVYDFWRPTGHQYPLVAGALSKDAYIKSFQESWNEYARRHNKTLADFASLCFHVPFTKMGQKALDSIINHADETTQDRLNSSYQDAVDYNRYVGNIYTGSLYLSLISLLETRDLKGGQTIGLFSYGSGSVGEFFSGTLVDGFKEQLDVERHKSLLNNRIEVSVDEYEHFFKRFDQLELNHELEKSNADRDIFYLKSIDNNIREYHIAE

SEQ ID NO: 19566 - protein, 350 aa, Pyrobaculum aerophilum str. IM2
MSKVGIVSWGAYIPKYRIRTEEVARIWGDDPLRIVDVYLVDEKSVESLDEDAVTIAVEAARRALKRAGINPKRIGAVYVGTESKPYAVKPISSILVDALGLSNNVFAVDMEFACKAGSEGLVAAIGLVESGRIEYGMTVGTDTSQGEPGEHLEYSASSGGASLIVGRDGVVAELEAVYSYVSDTPDFWRREGSPYPMHGEGFTGEPAYFRHIIGAARGLMERYGYKPSDFAYVVFHQPNGRFPVRAASMLNIPMEKVKPGIVVTHIGNTYNASALMGFAKVLDIAKPGDKILLVPFGSGAGSNAFVFTVTELITERQKSGVPTVEDMLRDKIYIDYAQYLKMRKMIKLFE

SEQ ID NO: 19567 - protein, 482 aa, Anopheles gambiae str. PEST
RKLPNRSVCGAKMSSSNSTTSGQWPEDVGILGLEIVFPSQYVDQTELEAFDGVSAGKYTIGLGQQRMGFCSDREDINSLCLTAARNLLERHSIPLDRIGRLEVGTETIVDKSKSVKSVLMQLFEPEGVTDLEGIDTTNACYGGTAALLNAINWIESSSWDGRLALVVCGDIAVYAQGSARPTGGAGAVAMLIGPNAPLRFERGLRATYMKHAYDFYKPDLSSEYPVVDGKLSIQCYLSALDACYQLYRKKFAQRHPDLVAPVTLDTFDAVIFHSPYCKLVQKSLARIGLNDFVLTPADQRPALFPGFEQFANVRLEDTYFDRDVEKAFMAQYAPVFAAKTKRSLHLASQVGNMYTPSVYSCLVSLLVGSDVDELLGKRVGVFSYGSGLASSMYSIAVTTDRERLAEFKRHLNYVQPLLDRRTKVEPAEFTRLMEVREKNNHAAPYEPSGSVEVLFPGTYYLKAVDSMHRRTYERVPPEQPSS

SEQ ID NO: 19568 - protein, 390 aa, Anopheles gambiae str. PEST
VGVEAASYYVPHLYLEIKELAENRGIDPLKLEKGLGLHKMAFPDVHEDAATFAAEALFRLINDYNINPKEISRVYLGTESALDAAKPTATLAVQMVEQALEEKHGSRSFKNCDALDMTFACIGGVDALQNAIDFVRVNPGKKAVVIASDYAKYELASGGEYTQGGGAVALLVSSQPNLLEIENHWGIGMESVFDFFKPRRHYNKADLNNAPENFPDKIEIFSDEPVFDGQYSNECFKDRIREAYQHFKEEKGVSGNAFADWRFLIFHLPYAFHGKRIFSEIFAIENNLPHTTNEDLKAVAGSDTYKALVNEKIETSQRASSEIGNMYTASVFMALLSALQVSANEGEDLSRKKIGFFAYGSGSKSKVFEATIGANWKSVVEKWNLFENAE

SEQ ID NO: 19569 - protein, 489 aa, Giardia lamblia ATCC 50803
MSRDTHVEHAPLQPPAEVRIAAIAVYIPPIVVSQEEVSSLCKIPLEKITKGLGQHQMAVTVDSEDSVSLALNSLQLLIDDKATQDILSKVTIGRLEVGTESSVDKAKSIKSVLADMLGAVRTTGADIINACLGGVLALENAALWLSAAKYDDETNKYPAAIVVTTDISIYNDIASIPTGGAGAVALLLVKDYPSGIVCDASFNSYWENTTDFYKPHIASPVPVVHGATSIECYLRANLLAAMSNEQQRRLFLDADFACFHTPYCTLPKKMHALLYHALHLESDKEDELFAAIQSRDSNVLSVLSKNCLADPSISEDCERRCVPSLKLSSQTGNIYTGSIFLALVSILEHIEAIAASQVATASPTHYRTPLKDEYLIYASGYGSGMGSLAFKFSVYPNQMPCVLKIKRVAAPPSEGMLRLSLQSNKRLLMHRLSQDPLVQEFLQDRFRQQVKPETDEYITGDREHFSCGEWYLDRVGCDGVRHYKRWLDK

SEQ ID NO: 19570 - protein, 391 aa, Streptococcus pyogenes MGAS8232
MTIGIDKIGFATSQYVLKLEDLALARQVDPAKFSQGLLIESFSVAPITEDIITLAASAADQILTDEDRAKIDMVILATESSTDQSKASAIYVHHLVGIQPFARSFEVKQACYSATAALDYAKLHVASKPDSRVLVIASDIARYGVGSPGESTQGSGSIALLVTANPRILALNKDNVAQTRDIMDFWRPNYSFTPYVDGIYSTKQYLNCLETTWQAYQKRENLQLSDFAAVCFHIPFPKLALKGLNNIMDNTVPPEHREKLIEAFQASITYSKQIGNIYTGSLYLGLLSLLENSKVLQSGDKIGFFSYGSGAVSEFYSGQLVAGYDKMLMTNRQALLDQRTRLSVSKYEDLFYEQVQLDDNGNANFDIYLTGKFALTAIKEHQRIYRTNDKN

SEQ ID NO: 19571 - protein, 388 aa, Paracoccus zeaxanthinifaciens
MKVPKMTVTGIEAISFYTPQNYVGLDILAAHHGIDPEKFSKGIGQEKIALPGHDEDIVTMAAEAALPIIERAGTQGIDTVLFATESGIDQSKAAAIYLRRLLDLSPNCRCVELKQACYSATAALQMACAHVARKPDRKVLVIASDVARYDRESSGEATQGAGAVAILVSADPKVAEIGTVSGLFTEDIMDFWRPNHRRTPLFDGKASTLRYLNALVEAWNDYRANGGHEFADFAHFCYHVPFSRMGEKANSHLAKANKTPVDMGQVQTGLIYNRQVGNCYTGSIYLAFASLLENAQEDLTGALVGLFSYGSGATGEFFDARIAPGYRDHLFAERHRELLQDRTPVTYDEYVALWDEIDLTQGAPDKARGRFRLAGIEDEKRIYVDRQA

SEQ ID NO: 19572 - protein, 349 aa, Methanothermobacter thermautotrophicus str. Delta H
MILMAGIVGYGVYIPSYRIKVEEIARVWGDDPQAISRGLVVEEKSVPGPDEDTATISVEAARNALRRSQIDPSEIGAVYVGSESHPYAVKPTATIVAEAVEATPEMTAADLEFACKAGTAGIQACMGLVDSGIIKYGLAVGADTAQGAPGDALEYTASAGGAAYVIGGKNCLADIKETYSFTTDTPDFYRREGMPYPRHGGRFTGEPAYFKHVLGAARGMMEKTGLSADDFDYAVFHQPNGKFYLKAARKLGFESEQVKPGLLTPVIGNTYSGATPVGLAATLDVAEPGARILAVSYGSGAGSDAFIIEVNDLIEERRDLAPSVAEIIKNKRYVDYALYAKFKGKLRMA

SEQ ID NO: 19573 - protein, 350 aa, Methanopyrus kandleri AV19
MIPSERVGIVGYGAYVPRYRIKAEEIAAVWGDDVDSIKSGLMIEEKSVPSETEDSATIAVEAAKNAVARAEIDPKDIGAIYVGSESPPYAVKPTATIVAAAIGATPDLTAADYEFACKAGTAAIQTCAGLVASGMIKYGLAIGADTAQGAPGDPLEYTAAAGGAAFVIGRKKLVAEMEGTYSYTTDTPDFWRREGQPYPRHGGRFTGAPAYFKHIIRAARGLMEELDLSPEDFDYAVFHQPNGKFPRKVARSLGFEPEQVEPTIVVDRVGNTYSGSSLLGFTAALDRAEPGDRILVVSYGSGAGSDAFSFVVTERIEEVREKAPLLEEYLEDRVYVTYGEYAKMKKKLKF

SEQ ID NO: 19574 - protein, 391 aa, Streptococcus pyogenes MGAS315
MTIGIDKIGFATSQYVLKLEDLALARQVDPAKFSQGLLIESFSVAPITEDIITLAASAADQILTDEDRAKIDMVILATESSTDQSKASAIYVHHLVGIQPFARSFEVKQACYSATAALDYAKLHVASKPDSRVLVIASDIARYGVGSPGESTQGSGSIALLVTADPRILALNEDNVAQTRDIMDFWRPNYSFTPYVDGIYSTKQYLNCLETTWQAYQKRENLQLSDFAAVCFHIPFPKLALKGLNNIMDNTVPPEHREKLIEAFQASITYSKQIGNIYTGSLYLGLLSLLENSKVLQSGDKIGFFSYGSGAVSEFYSGQLVAGYDKMLMTNRQALLDQRTRLSVSKYEDLFYEQVQLDDNGNANFDIYLTGKFALTAIKEHQRIYHTNDKN

SEQ ID NO: 19575 - protein, 385 aa, Leuconostoc mesenteroides subsp. mesenteroides ATCC 8293
MAIGIDKLSFYTSEYVLDLVELAQRRGVDPNKYTIGIGQDKQSVIPNYEDVVTMGANAAAKIIDNDDRQQIDLIIFATESGIDNSKSSALYVQKLLNLSEFSRTIEIKQACYAGTFGLMQARDYVASHSGKRVLVIASDIARYGLNTPGEVTQGGGAVAMIVSESPHIATINSDSVYMSRDVADFWRPIDRTEAIVDGHLSTDIYKEMFLTLWQRYKDQSGRTIADFAGFTFHLPYTKMGKKAFDQIIDEADERTQGRLLKNLKASQKFSREVGNLYTGSVYLSLLSLLSYAQDLVAGEQLAIFSYGSGAEAELYSITLQENFFKYVPANETKNELADRKKVSVDQYEQIFNSQLLDSHENVSSDHPDADHFQFLGWQNGERQYK

SEQ ID NO: 19576 - protein, 389 aa, Oenococcus oeni MCW
MEIGIDQISFFTPNLYLDLTELAEKRGVDPNKYLVGIGQEKQSIVPPTQDSVSMAANAASILLEQKSTEFLNSIDEILFASESGIDNSKSGAVYLQKLLNLKKNMRAIEIKQACYGGTFALMTAFDYVKLHPNKRILVVASDIARYGLKSAGEVTQGAGAVAMLVSTQPRLASYNWDSVFQSEDLMDFWRPLDQSEALVFGKMSQEIYEKFFYEIWQTYSQKNLKKVSDFAAFVFHLPFTKMGKKALDQINDQIDESKKDQLEKNRLAGQIYNRKVGNLYTGSLYLSLISLLKNNILKNNDRIAMFSYGSGAEGELYSLSLAADYRQAILGDPAQMIASRRKVSVDEYEGLFRAFPEDSEDHELTNSYDSSHFQLKRIKDHQRIYGDNF

SEQ ID NO: 19577 - protein, 346 aa, Kitasatospora griseola
MSVPAADEDIVTLAATAAAPIVARHGSDRIRTVVLATESSIDQAKSAGVYVHSLLGLPSATRVVELKQACYGATAGLQFAIGLVQRDPAQQVLVIASDVSKYDLDSPGEATQGAAAVAMLVGADPGLVRIEDPSGLFTVDVMDFWRPNYRTTALVDGQESIGAYLQAVEGAWKDYSERGGHSLEQFAAFCYHQPFTKMAHKAHRHLLNYCSHDIHHDDVTRAVGRTTAYNRVIGNSYTASVYLGLAALLDQADDLTGERIGFLSYGSGSVAEFFGGIVVAGYRDRLRTAANIEAVSRRRPIDYAGYRELHEWAFPARRGAHSTPQQTTGPFRLSGISGHKRLYRAC

SEQ ID NO: 19578 - protein, 390 aa, Streptococcus agalactiae 2603V/R
MKIGIDKIGFATSQYVLEMTDLAIARQVDPEKFSKGLLLDSLSITPVTEDIVTLAASAANDILSDEDKETIDMVIVATESSIDQSKAASVYVHQLLEIQPFARSFEMKEACYSATAALDYAKLHVEKHPDSKVLVIASDIAKYGIKSTGESTQGAGSIAMLISQNPSILELKEDHLAQTRDIMDFWRPNYSDVPYVNGMFSTKQYLDMLKTTWKVYQKRFNTSLSDYAAFCFHIPFPKLALKGFNKILDNNLDEQKKAELQENFEHSITYSKKIGNCYTGSLYLGLLSLLENSQNLKAGDQIAFFSYGSGAVAEIFTGQLVDGYQNKLQSDRMDQLNKRQKITVTEYEKLFFEKTILDENGNANFNTYRTGTFSLDSICEHQRIYKKINN

SEQ ID NO: 19579 - protein, 391 aa, Streptococcus mutans UA159
MRIGIDKIGFTSSQYVLNMKDLAEARGEDPQKFSKGLLLNALSIAPITDDVVTLAAGSANEILTAEDKEKIDMVILATESSVDQSKAGAVYVHSLLGIQPFARSFEMKEACYSATAALNYAKLHVEKHPDTRVLVLASDIAKYGIGTPGESTQGAGSIAMLVKKDPRILILHDETLAQTRDIMDFWRPNYTTTPYVNGMYSTKQYLDMLKTTWAEYQKRFDVSLTDFAAFCFHLPFPKLALKGFNKIMDKQVPSDLQEKLKVNFEASILYSKQIGNIYTGSLFLGLLSLLENSQNLVAGDKIALFSYGSGAVAEIFTGTLVKGFKEQLQTNRLDKLKRRTPLSVENYEKIFFEEAQLDDKGNASFKEYQTGPFALKEILEHQRIYGKVNES

SEQ ID NO: 19580 - protein, 390 aa, Streptococcus agalactiae NEM316
MKIGIDKIGFATSQYVLEMTDLAIARQVDPEKFSKGLLLDSLSITPVTEDIVTLAASAANDILSDEDKETIDMVIVATESSIDQSKAASVYVHQLLEIQPFARSFEMKEACYSATAALDYAKLHVEKHPDSKVLVIASDIAKYGIKSTGESTQGAGSIAMLISQNPSILELKEDRLAQTRDIMDFWRPNYSDVPYVNGMFSTKQYLDMLKTTWKEYQKRFNTSLSDYAAFCFHIPFPKLALKGFNKILDNNLDEQKKAELQENFEHSITYSKKIGNCYTGSLYLGLLSLLENSQNLKAGDQIAFFSYGSGAVAEIFTGQLVDGYQNKLQSDRMDQLNKRQKITVTEYEKLFFEKTILDENGNANFNTYRTGTFSLDSICEHQRIYKKINN

SEQ ID NO: 19581 - protein, 412 aa, Yersinia pestis CO92
MNSIGIEKISIYPSSLALKLSELAQARGGDNKYIQESLMVIKRSLVPQWEDAVTLAVNSAKDMLNDQDRSDIGLFIIATESGLDQEKAISTWAHRYLGLPATCRVFELKSACHAGAAALKMAESWISSGLNRGKKVLLINVDISNNMICHGKMEYSLGAGAIALLISDNPVFAVIETGKSGIHTHEVTDVIRPLPWKEVAFDVEASLFSYMDGLENAFEEYCHQTPEARESTYFNYNLYHVPFPGISKEAHKVLLELQGLFGKEALATSFKQKVMPSLYYAQKIGATYCGSIFLSLFSLMVKAPEIKSGDRIGVYSYGSGSCAEYFSMQVGDQAVEIAQQQGAALDILLTQRKILDVAAYEQLENARSAQMQGKDYRLDGDNLQDWYTHHYSGSGLLILERIDNHLRRYRYA

SEQ ID NO: 19582 - protein, 345 aa, Methanocaldococcus jannaschii
MAGIVGYGAYIPKYRIKVEEIARVWNKDPESIKKGLLVYEKAVPSLDEDTATIAVEAARNALKRAEIDPKDIGAVYVGSESHPYAVKPTATIVAEAIDATPDLTAADLEFACKAGTAGIQMCMGLVESGLIKYGLAIGADTAQGAPGDALEYTAAAGGAAYIIGKSNVIAEFNGTYSYTTDTPDFWRREGKPYPRHGGRFTGEPAYFRHVINAAKGLMEKMGTKPEDYDYCVFHQPNGKFYIRVAKILGFKEEQYKIGLLTPYIGNTYSGAVPLGLSNVLDNCEGGERILAVSYGSGAGSDAFDITVTDRINKVKDKAPKTAYYLERKEYIDYAIYAKFRKKIKM

SEQ ID NO: 19583 - protein, 389 aa, Lactobacillus plantarum WCFS1
MKVGIDKLHFATSHLYVDMAELATARQAEPDKYLIGIGQSKMAVIPPSQDAVTLAANAAAPMLTATDIAAIDLLVVGTESGIDNSKASAIYVAKLLGLSQRVRTIEMKEACYAATAGVQLAQDHVRVHPDKKALVIGSDVARYGLNTPGEPTQGGGAVAMLISADPKVLALGTESSLLSEDVMDFWRPLYHTEALVDGKYSSNIYIDYFQDVFKNYLQTTQTSPDTLTALVFHLPYTKMGLKALRSVLPLVDAEKQAQWLTHFEHARQLNRQVGNLYTGSLYLSLLSQLLTDPQLQPGNRLGLFSYGSGAEGEFYTGVIQPDYQAGLDHGLPQRLARRRRVSVAEYEALFSHQLQWRADDQSVSYADDPHRFVLTGQKDEQRQYLDQQV

SEQ ID NO: 19584 - protein, 388 aa, Oceanobacillus iheyensis HTE831
MKIGIDKIGFYAPHLYLDMNELAEERGVEPEKFTIGIGQEKMAVPPITQDTVTLAANAAAQILDETDKQDIDMVIFGTESGIDHSKSAAVNVHQLLGLQPHARAIELKQACYGATAGIQMARGHIALNPNRKVLVLGSDIARYGLRTPGESTQGAGAVALLISADPSIMAIEQESTYYTDDIMDFWRPVYSDIAFVDGKYSNEQYIAFFQKVWNAYKEQTNRGLEDFAAICFHLPYTKMGLKALRTVLDEVEENTQTHLKEQYRLSTQYNRNIGNIYTGSLYLSLLSLLENSNELTAGDKIGMYSYGSGAVGEFFSGVLQEGFEKQLHQTKHNAMFEKRQKISVSEYEKIFEQQIPTDGSVTEWSTKEDPAEICLTGIQNHQRIYQVK

SEQ ID NO: 19585 - protein, 343 aa, Archaeoglobus fulgidus
MIGIVSYGSYVPKFRIRVEEIARVWGEDAKKIKDGLGVHEKSVPGMDEDAATIAVEAAREAIRRAGINPEEIGAVFVGSESHPYAVKPTATIVGEALGVGNDYFAADLEFACKAGTAGMQICYSMVKAGMIKYGLAIGADTSQARPGDALEYAAAAGGAAFIIGENPIAEVEATYSFTSDTPDFWRRDLQPYPSHGGRFTGLPAYFRHVISAAKGLMEKYGYKVEDFDYAVFHMPNAKFPVRAAKMLGFSMEHISQGLVVKAIGNTYSGSSLLGLAATLDVAEPDERILLVSFGSGAGSDAFAIRVTDAIENYPREPKVWEKIERKAYVDYAIYLKHRRKIKA

SEQ ID NO: 19586 - protein, 303 aa, Archaeoglobus fulgidus DSM 4304
MIGIVSYGSYVPKFRIRVEEIARVWGEDAKKIKDGLGVHEKSVPGMDEDAATIAVEAAREAIRRAGINPEEIGAVFVGSESHPYAVKPTATIVGEALGVGNDYFAADLEFACKAGTAGMQICYSMVKAGMIKYGLAIGADTSQARPGDALEYAAAAGGAAFIIGENPIAEVEATYSFTSDTPDFWRRDLQPYPSHGGRFTGLPAYFRHVISAAKGLMEKYGYKVEDFDYAVFHMPNAKFPVRAAKMLGFSMEHISQGLVVKAIGNTYSGSSLLGLAATLDVAEPDERILLVSSAQELEVMPLP

SEQ ID NO: 19587 - protein, 407 aa, Borrelia burgdorferi B31
MRIGISDIRIFLPLNYLDFSVLLENPLYFSNEVFFKKINRAIDATLQKGFRFTSPNEDSVTMASSAVKLIFDNNNLDLSKIRILLGGTETGVDHSKAISSYVFGALKQSGICLGNNFLTFQVQHACAGAAMSLHTVASVLSHSNNSEYGIVFSSDIAHYSNLTTAEITQGAGATAILIEKNPKLLSINLSEFGVYTDDVDDFFRPFGSVEAKVRGQYSVECYNNANENALRDFAFKKQLSMKDLFSNYRFVLHVPFAKMPIDSMHYILKKYYSDDESVRNAYLESIDFYDGVEAAMEVGNLYTGSIFLSLAFYLKRVFSKKDITGEKILFCSYGSGNIMIIYELTIEKSAFDVIKLWDLEGLIKNRNNANFEEYKDFFQNKIIPGESRGFYLKELRNDGYRVYGYRA

SEQ ID NO: 19588 - protein, 383 aa, Enterococcus faecalis V583
MTIGIDKISFFVPPYYIDMTALAEARNVDPGKFHIGIGQDQMAVNPISQDIVTFAANAAEAILTKEDKEAIDMVIVGTESSIDESKAAAVVLHRLMGIQPFARSFEIKEACYGATAGLQLAKNHVALHPDKKVLVVAADIAKYGLNSGGEPTQGAGAVAMLVASEPRILALKEDNVMLTQDIYDFWRPTGHPYPMVDGPLSNETYIQSFAQVWDEHKKRTGLDFADYDALAFHIPYTKMGKKALLAKISDQTEAEQERILARYEESIVYSRRVGNLYTGSLYLGLISLLENATTLTAGNQIGLFSYGSGAVAEFFTGELVAGYQNHLQKETHLALLDNRTELSIAEYEAMFAETLDTDIDQTLEDELKYSISAINNTVRSYRN

SEQ ID NO: 19589 - protein, 351 aa, Thermoplasma acidophilum
MSGIVTYGSYIPRYRIKPDEIARVWGENPDHIKNGIYILSKSVPAPDEDVATISVEAARNALKRKKIDPKEIGAIYVGSESHPYAVKPTATIVGSAIGVDFSLFAADYEFACKAGTAGMQNVKAMVDSGMIKYGLAIGADTSQGAPGDALEYSASAGGTAFIIGKDDTIAEINSTLSVASDTPDFWRREGQPYPSHGERFTGEPAYFRHVITAAKMMMERMETQPKDYDYVVFHQPNGKFPTRAAKMLGFEEKQYKDGLLTPYIGNTYSGSMMTGLSSILDVSKPGDHILAVSFGSGAGSDAFDITVTDRIEEMDRNRAPTIKKMLENVKWVDYAIYAKYKKKIIVGDGIE

SEQ ID NO: 19590 - protein, 474 aa, Pinus sylvestris
MASRPENVGILAMEIYFPTTCVQQEDLETFDGVSKGKYTIGLGQDCMTFCTDLEDVISMSLTAVTSLLEKYEIDPKQIGRLEVGSETVIDKSKSIKTWLMHIFEKCGNTEIEGVDSTNACYGGTAALFNCINWIESSSWDGRYGLVVATDSAVYAEGAARPTGGAAAVAMLIGPNAPIATESKYRGTHMAHVYDFYKPNLASEYPVVDGKLSQTCYLMALDSCYKRFCNKFEKEEGRQFSLLDTDYIAFHSPYNKLVQKSFGRLLFNDFSRHARSVGKDAQEKLEPFAGLSEQDSYNSRDLEKVSQQLAKPLYDAKIQPSTLLPKQVGNMYTASLYAALASIIHNKHTTLDGQRVMMFSYGSGLASTLFSFKIREGQFPFTLSNITEVMDVQNKLDSRHEFLPEDFVENLKRMETLYGAKDFVSTSQLSLLRPGAFYLTKVDSMYRRFYSRKVISAGDNFEKSKLANGTTHDEL

SEQ ID NO: 19591 - protein, 420 aa, Myxococcus xanthus
MGPVGIEAMNAYCGIARLDVLQLATHRGLDTSRFANLLMEEKTVPLPYEDPVTYGVNAARPILDQLTAAERDSIELLVACTESSFDFGKAMSTYLHQHLGLSRNCRLIELKSACYSGVAGLQMAVNFILSGVSPGAKALVVASDLSRFSIAEGGDASTEDWSFAEPSSGAGAVAMLVSDTPRVFRVDVGANGYYGYEVMDTCRPVADSEAGDADLSLLSYLDCCENAFREYTRRVPAANYAESFGYLAFHTPFGGMVKGAHRTMMRKFSGKNRGDIEADFQRRVAPGLTYCQRVGNIMGATMALSLLGTIDHGDFATAKRIGCFSYGSGCSSEFFSGVVTEEGQQRQRALGLGEALGRRQQLSMPDYDALLKGNGLVRFGTRNAELDFGVVGSIRPGGWGRPLLFLSAIRDFHRDYQWIS

SEQ ID NO: 19592 - protein, 461 aa, Arabidopsis thaliana
MAKNVGILAMDIYFPPTCVQQEALEAHDGASKGKYTIGLGQDCLAFCTELEDVISMSFNAVTSLFEKYKIDPNQIGRLEVGSETVIDKSKSIKTFLMQLFEKCGNTDVEGVDSTNACYGGTAALLNCVNWVESNSWDGRYGLVICTDSAVYAEGPARPTGGAAAIAMLIGPDAPIVFESKLRASHMAHVYDFYKPNLASEYPVVDGKLSQTCYLMALDSCYKHLCNKFEKIEGKEFSINDADYIVFHSPYNKLVQKSFARLLYNDFLRNASSIDEAAKEKFTPYSSLTLDESYQSRDLEKVSQQISKPFYDAKVQPTTLIPKEVGNMYTASLYAAFASLIHNKHNDLAGKRVVMFSYGSGSTATMFSLRLNDNKPPFSISNIASVMDVGGKLKARHEYAPEKFVETMKLMEHRYGAKDFVTTKEGIIDLLAPGTYYLKEVDSLYRRFYGKKGEDGSVANGH

SEQ ID NO: 19593 - protein, 461 aa, Arabidopsis thaliana
MAKNVGILAMDIYFPPTCVQQEALEAHDGASKGKYTIGLGQDCLAFCTELEDVISMSFNAVTSLFEKYKIDPNQIGRLEVGSETVIDKSKSIKTFLMQLFEKCGNTDVEGVDSTNACYGGTAALLNCVNWVESNSWDGRYGLVICTDSAVYAEGPARPTGGAAAIAMLIGPDAPIVFESKLRASHMAHVYDFYKPNLASEYPVVDGKLSQTCYLMALDSCYKHLCNKFEKIEGKEFSINDADYIVFHSPYNKLVQKSFARLLYNDFLRNASSIDEAAKEKFTPYSSLTLDESYQSRDLEKVSQQIAKPFYDAKVQPTTLIPKEVGNMYTASLYAAFASLIHKKHNDLAGKRVVMFSYGSGSTATMFSLRLNDNKPPFSISNIASVMDVGGKLKARHEYAPEKFVETMKLMEHRYGAKDFVTTKEGIIDLLAPGTYYLKEVDSLYRRFYGKKGEDGSVANGH

SEQ ID NO: 19594 - protein, 406 aa, Arabidopsis thaliana
MSFNAVTSLFEKYKIDPNQIGRLEVGSETVIDKSKSIKTFLMQLFEKCGNTDVEGVDSTNACYGGTAALLNCVNWVESNSWDGRYGLVICTDSAVYAEGPARPTGGAAAIAMLIGPDAPIVFESKLRASHMAHVYDFYKPNLASEYPVVDGKLSQTCYLMALDSCYKHLCNKFEKIEGKEFSINDADYIVFHSPYNKLVQKSFARLLYNDFLRNASSIDEAAKEKFTPYSSLTLDESYQSRDLEKVSQQIAKPFYDAKVQPTTLIPKEVGNMYTASLYAAFASLIHKKHNDLAGKRVVMFSYGSGSTATMFSLRLNDNKPPFSISNIASVMDVGGKLKARHEYAPEKFVETMKLMEHRYGAKDFVTTKEGIIDLLAPGTYYLKEVDSLYRRFYGKKGEDGSVANGH

SEQ ID NO: 19595 - protein, 461 aa, Brassica juncea
MAKNVGILAMDIYFPPTCVQQEALEAHDGASKGKYTIGLGQDCLAFCTELEDVISMSFNAVTSLLEKYKIDPKQIGRLEVGSETVIDKSKSIKTFLMQLFEKCGNTDVEGVDSTNACYGGTAALLNCVNWVESNSWDGRYGLVICTDSAVYAEGPARPTGGAAAIAMLIGPDAPIVFESKLRGSHMAHVYDFYKPNLASEYPVVDGKLSQTCYLMALDSCYKHLCNKFEKLEGKEFSINDADYFVFHSPYNKLVQKSFARLLYNDFLRNASSIDEAAKEKFTPYSSLSLDESYQSRDLEKVSQQLAKTYYDAKVQPTTLVPKQVGNMYTASLYAAFASLVHNKHSDLAGKRVVMFSYGSGSTATMFSLRLCENQSPFSLSNIASVMDVGGKLKARHEYAPEKFVETMKLMEHRYGAKEFVTSKEGILDLLAPGTYYLKEVDSLYRRFYGKKGDDGSITNGH

SEQ ID NO: 19596 - protein, 461 aa, Brassica juncea
MAKNVGILAMDIYFPPTCVQQEALEAHDGASKGKYTIGLGQDCLAFCTELEDVISMSFNAVTSLLDKYKIDPKQIGRLEVGSETVIDKSKSIKTFLMQLLEKCGNTDVEGVDSTNACYGGTAALLNCVNWVESNSWDGRYGLVICTDSAVYAEGPARPTGGAAAIAMLIGPNAPIVFESKLRGSHMAHVYDFYKPNLASEYPVVDGKLSQTCYLMALDSCYKHMCNKFEKLEGKEFSINDADYFVFHSPYNKLVQKSFARLLYNDFLRNASSIDEAAKEKFTPYSSLSLDESYQSRDLEKVSQQVAKTFYDAKVQPTTLVPKEVGNMYTASLYAAFASLIHNEHSDLAGKRVVMFSYGSGSTATMFSLRLCENQSPFSLSNIASVMDIGGKLKARHEYAPEKFVETMKLMEHRYGAKEFVTSKEGILELLAPGTYYLKEVDSLYRRFYGKKGDDGSIANGH

SEQ ID NO: 19597 - protein, 461 aa, Brassica juncea
MAENVGILAMDIYFPPTCVQQEALEAHDGASKGKYTIGLGQDCLAFCTELEDVISMSFNAVTSLLDKYKIDPMQIGRLEVGSETVIDKSKSIKTFLMQLFEKCGNTDVEGVDSTNACYGGTAALLNCVNWVESNSWDGRYGLVICTDSAVYAEGPARPTGGAAAIAMLIGPNAPIVFESKLRGSHMAHVYDFYKPNLASEYPVVDGKLSQTCYLMALDSCYKHLCNKFEKLEGKEFSINDADYFVFHSPYNKLVQKSFARLLYNDFLRNASSIDEAAKEKFIPYSSLSLDESYQSRDLEKVSQQVAKTFYDGKVQPTTLVPKEVGNMYTASLYAAFASLIHNKHSDLAGKRVVMFSYGSGSTATMFSLRLCENKSPFSLSNIASVMDIGGKLKARHEYAPEKFVETMKLMEHRYGAKDFVTSKEGILELLAPGTYYLKEVDSLYRRFYGKKGDDGSIANGH

SEQ ID NO: 19598 - protein, 453 aa, Brassica juncea
MAKNVGILAMDIYFPPTCVQQEALEAHDGASKGKYTIGLGQDCLAFCTELEDVISMSFNAVTSLLEKYKIDPNQIGRLEVGSETVIDKSKSIKTFVMQLFEKCGNTDVEGVDSTNACYGGTAALLNCVNWVESNSWDGRYGLVICTDSAVYAEGPARPTGGAAAIAMLIGPDAPIVFESKLRGSHIPHVYDFYKPNLASEYPVVDGKLSQTCYLMALDSCYKHLCNKFEKLEGKEFSINDADYFVFHSPYNKLVQKSFARLLYNDFLRNASSIDEAAKEKFTPYSSLSLDESYQSRDLEKVSQQLAKTFYDAKVQPTTLVPKQVGNMYTASLYAAFASLIHNKHNDLVGKRVVMFSYGSGSTATMFSLRLCENQSPFSLSNIASVMDVGVSPEKFVETMKLMEHRYGAKEFVTSKEGILDLLAPGTYYLKEVDSLYRRFYGKKGDDGSVANGQ

SEQ ID NO: 19599 - protein, 463 aa, Oryza sativa (japonica cultivar-group)
MAAERKDVGILAMDIYFPPTCVLQDELENHDGVSKGKYTIGLGQDSMAFCTEVEDVISMSLTVVKSLLENYKIDPKCIGRLEVGSETVIDKSKSIKTWLMQIFEECGNTDIEGVDSSNACYGGTAALFNCVNWVESNSWDGRYGLVVCTDSAVYAEGPARPTGGAAAIAMLIGPNAPVSFESKYRGSHMAHVYDFYKPDLASEYPVVDGKLSQTCYLMALDSCYNVFCKKYEKLEGKQFSIHDADYFVFHSPYNKLVQKSFARLYYNDFLRKCSTVEDGSREKLEPYSGLSSEESYQSRELEKASQQVAKHLYDSKVQPITLIPKQVGNMYTASLYAALASVMHNKNETLAGQRIVMFSYGSGLTSTMFSFKINEGQHPFILSNIAGILDVSKKLESRHVVAPEKFVAALKLMEHRYGAKDFTTSQDTSLLAPGTYYLTHVDSMYRRFYAVKGQAVTEVSNGH

SEQ ID NO: 19600 - protein, 468 aa, Dictyostelium discoideum
MKKTKDIGICAIDIYFPQTYVNQSELKKYDKVSNGKYTIGLGQTNMSFVGDREDIVSMAMTSVKMMMSKYSIDYQSIGRLEVGTETIIDKSKSVKSSIMSLFQEYGNTSLEGVDTLNACYGGTNALFNSLQWIESSYWDGRYALVVTGDIAVYSKGAARPTGGAGVVTMLIGPNATLIFDQSLRGTHMENVNDFYKPDLSSEYPYVDGKLSIECYLRALDKCYLEYKKKFESINDDNKFSMDSFDYVCFHSPYNRLVQKSYARLIYNDFLQNPNNPKYQDLLPFKDLSTGKDSYINSKLDQITLKLSLDDFKTKVNPSTLLSKECGNSYCGSVYSGILSLLSNVNDLNNKKVLVFSYGSGLAASLFSFRINNNKNRNNNNNNNNCFFKTTNDIGKISNIKERLSNRVKVSPEEFTRILDIREKSHQMVGARTPIDTLDYISAGTFYLEKIDEKLIRHYKSKPIISSKL

SEQ ID NO: 19601 - protein, 163 aa, Dictyostelium discoideum
RHENDYATKVAPTTLLAKQLGNTYCGSTYSGLLSLLDEKSNDLVGKRVLTFSYGSGLAASAFSFKVEKPINHIVEKVDLKNRLAKRVRVEPEIFTEKLSLRETRHNLKNYVPSDETTNMFPGSFYLSSVDKAGIRKFDRTYSTSAVLGAFQRRQQISHQQSNL

SEQ ID NO: 19602 - protein, 2003 aa, Oryza sativa
  unsure (1)..(2003): unsure at all Xaa locations
MASSRRQQHKGSWSWTSRVAAAADAASWCLALSLVALLLVCSLGPGGAAGGEQRGGVAAVLRGAALSARACEEIYVVAEGETLHSISDKCGDPYILEQNPHVHDPDDVFPGLVIKITPSKPRDELVNVYETHKCSSESIAQAWNGSMHQNARSGFDRCISANVKPMEGRFQLLPLYRWREAPVTVETRPLQLPLARRGPRVLDPNVPVGVTGAQSSEQNHGYFMPLCSYQNIRKDWQEKCSKGPLLNADAAISEHNQGKIWWYIEKVVIIGATKEIGRTAIAAISGMEEALEIPVLNDLTMVLGSIAQTRATGVVVDFSEPSTVYDNVKQAAAFGLNSVVYVPKIELDTVTELSAFCEKASMGCLVTPTLSIGSVLLQQAAIQASFHYNNVEIVESRPNPSDLPSQDAIQIANNITDLGQIYNREDMDSDNPTPTGDGKHEGKLAAVEALIDADLKYFDHHCPYSSVSIFDICCTLIGIYSSSNRIATRHPHRFTRRYMRNHNFDNVVVPQKGYNFRFARHARDAPLVSYYNYIVVGGGTAGCPLAATLSERSRVLLLERGGLPYGNRNVSSEYHFADALADTSPRSPAQRFVSEDGVVNARARVLGGGSCLNAGFYTRASSGYVRAAGWDPRLVNASYRWVERELVFRPDVPRWQCALREGLLQAGVTPDNGYTLEHVQGTKIGGTIFDRAGRRHTAADFLRRAHPRRLTVFLRATVSQILFRRTGTSKTDTTKGTATPVAYGVVFTDPAGVRHHVYLRGGAKSEVIVTAGTLGSPQLLMLSGVGPRGELEKHGILPVLDQPRVGQGVADNPMNSVFVPSPVPVALSLVQIVGVSRFGTFIEGVSGSQFGIPLHGRAASRRARSFGMFSPMTGQLGTVPPKERTPEAMRRAAEAMRRLDRRAFRGGFILEKILGPMSTGHVALRSADPDANPAVTFNYFRDPRDVERCVRGIETIERVVRSRAFARFTYANVTAMEAAVLGRRAGHLPVNLLPRRATDTRPLQQYCRETVMTIWHYHGGCHVGAVVDQDYRVLGVRGLRVVDSSTFKYSPGTNPQATVMMLGSFLLVALAQADEHHLLPGTYPPRSLTLLVKNAATDREENSTTSTMHLPLFVVIDCGQSVLACMAAWSPRLIIQLRPVDAGEDGAIDPDSVHVLGSEGNQRIEGDTTEGCQLSPQYSYYSTSFSRLRLPPNLVVSAAAAAAAVREMAAERKDVGILAMDIYFPPTCVLQDELENHDGVSKGKYTIGLGQDSMAFCTEVEDVISMSLTVVKSLLENYKIDPKCIGRLEVGSETVIDKSKSIKTWLMQIFEECGNTDIEGVDSSNACYGGTAALFNCVNWVESNSWDGRYGLVVCTDSXAVYAEGPARPTGGAAAIAMLIGPNAPVSFESKYRGSHMAHVYDFYKPDLASEYPVVDGKLSQTCYLMALDSCYNVFCKKYEKLEGKQFSIHDADYFVFHSPYNKLVQRSFARLYYNDFLRKCSTVEDGSREKLEPYSGLSSEESYQSRELEKASQQVAKHLYDSKVQPTTLIPKQVGNMYTASLYAALASVMHNKNETLAGQRIVMFSYGSGLTSTMFSFKINEGQHPFILSNIAGILDVSKKLESRHVVAPEKFVAALKLMEHRYGAKDFTTSQDTSLLAPGTYYLTHVDSMYRRFYAVKATAVSFSLRRRRNRNGAEEKMWEAEEIEDEETLEALLEASRSAQGRAALSDALADTLHLLPASTHRLLLLRLRLLRNLLAGDDLNQGTFVLLSGPAAVVSSALSSPSDSPDVARAGLQALGNAALAGEHHRAAVWDALFPGSLLELARVREKGVLDPLCMVIDTCCSGEGGRGRLEELCHEELGLPILVEIVTTAWQDTQAPVDSLMQTGLVKHLLTYLRELEPPSMIRKSMARGQGDHQPALGTAKVCPYIGYRRDVVAVIANCLHRSKKVQDEQCVVDEENPYLREWGLFAVKNLLEGNEENQKEVSGLKMQEAVITPEIADIGLRVEIDKETGHPKLVNN

SEQ ID NO: 19603 - protein, 499 aa, Oryza sativa
  unsure (1)..(499): unsure at all Xaa locations
MEQPNDVGILAMDIYFPPACVHQEALEAHDGASKGKYTIGLGQDCMAYCSEVEDVISMSLTVVASLLKKYNIDPKQIGRLEVGSETVIDKSKSIKTWLMHIFEESGNTDIEGVDSSNACYGGTAALLNCVNWVESKSWDGRYGLVVCTDSAVYAEGPARPTGGAAAIAMLIGPNAPISFESKYRASHMAHVYDFYKPDLASEYPVVDGKLSQTCYLMALDSCYRQYCTKYEKIVGEQFSISDAEYCVFHSPYNKLVQKSFARLYFNDFMRNCSTVDNDAKEKLQPFANLTSEESYQSRDLEKASQQVAKHLYDIKVQPSTLLPKQIGNMYTASLYAALASVIYNKHDSLDDQRILMFSXGSGLTSTMFSLRLQNGQKPFRLINIASVLNATTKLESRHVTLPEKFVETLKLMEHRYGAKDLETCKDTSLLPPGTFYLTRVDSMYRRFYEKKADEGKAKATNGFANGHFRSGTHGSRMIGHLAAEFDKFIIRVFSLEFLK

SEQ ID NO: 19604 - protein, 437 aa, Oryza sativa
MAAERKDVGILAMDIYFPPTCVLQDELENHDGVSKGKYTIGLGQDSMAFCTEVEDVISMSETVIDKSKSIKTWLMQIFEECGNTDIEGVDSSNACYGGTAALFNCVNWVESNSWDGRYGLVVCTDSAVYAEGPARPTGGAAAIAMLIGPNAPVSFESKYRGSHMAHVYDFYKPDLASEYPVVDGKLSQTCYLMALDSCYNVFCKKYEKLEGKQFSIHDADYFVFHSPYNKLVQKSFARLYYNDFLRKCSTVEDGSREKLEPYSGLSSEESYQSRELEKASQQVAKHLYDSKVQPITLIPKQVGNMYTASLYAALASVMHNKNETLAGQRIVMFSYGSGLTSTMFSFKINEGQHPFILSNIAGILDVSKKLESRHVVAPEKFVAALKLMEHRYGAKDFTTSQDTSLLAPGTYYLTHVDSMYRRFYAVKGQAAEVSNGH

SEQ ID NO: 19605 - protein, 404 aa, Oryza sativa
  unsure (1)..(404): unsure at all Xaa locations
IDPMQIVRLEVGSETEIDKSKSIKTWLMHIFEESGNTDIEGVDSSNACYGGTAALLNXVNWVESKSWDGRYGLVVCTDSAVYAEGPARPTSGAAAIAMLIGPNAPISFESKYRAAHMAHVYEIYKRELAREYPVADGKLSQTCYLMALDSCYRQYCTKYEKIVGEQFSISDAEYCVFHSAYNKLVQKSFARLYFNDFMRNCSTVDNDAKEKLQPFANLTGEESYQSRDLEKASQQVAKPLYDIKVQPSTLLPKQIGNMYTASLYAALASVLYNKHASLDDQRIVMFSYGSGLTSTMFSLKLNNGQDPFSLSNIASVLNATEKLESRHMTLPEKFVETLKLMEHRYGAKDFETCKDTSLLPPGTFYLTRVDSMYRRFYERKADEETAAKAKYSNGHATNGYANGH

SEQ ID NO: 19606 - protein, 279 aa, Oryza sativa
  unsure (1)..(279): unsure at all Xaa locations
MDGRKDVGILAMDIYFPPTCVLQESLEAHDGASKGKYTIGLGQDCMAFCSEVEDVISMSMTVVTSLLKKYKVDPKLIGRLEVGSETVIDKSKSIKTWLMQIFEECGNTDIEGVDSSNACYGGTAALLNCVNWVESNSWDGRYGLVVCTDSAVYAEGPARPTGGAAAIAMLIGPNAPIAFESKYKASHMAHVYDFYKPDLASEYPXVVDGKLSQTCYLMALDSCYRQFCKKYEKLAGKQFSISDADYFVFHSPYNKLVQKSFARLYYNDFTRDCSFCDND

SEQ ID NO: 19607 - protein, 128 aa, Oryza sativa
  unsure (1)..(128): unsure at all Xaa locations
XVIYNKHDSLDGQRILMFSYGSGLTSTMFSLRLHDGQHPFSLMNIASVLDVTTKLESRHVTSPEKFIETLKLMEHRYGAKDFETSKDTSLLPPGTFYLTKVDSMYRRFYDKKAAEGKIKGCNGIANGH

SEQ ID NO: 19608 - protein, 151 aa, Oryza sativa
  unsure (1)..(151): unsure at all Xaa locations
XLFTDDCSNACWGGXTAALFNCVNRDESSSWDXGRYGLAVCTDSAVHSQSPVGPTGCAVAVPXMFAPKASDNLESKSXRCNLGQGDGSHLPDLGSENPVXTEDCLSQTSYLKTLXDSCYFVSKGSYEKTXGKPFPLHHAYYLGFHSPYNKX

SEQ ID NO: 19609 - protein, 289 aa, Triticum aestivum
  unsure (1)..(289): unsure at all Xaa locations
MAAERVKDVGILAMDIYFPPNCVLQEELETHDGVSKGXKYTIGLGQDSMAFCTEVEDVISMSLTVVKTLLKNYNIDPKCIGRLEVGSETVIDKSKSIKTWLMQIFEECGNTDIEGVDSSNACYGGTAALFNCVNWAESNSWDGRYGLVVCTDSAVYAEGPARPTGGAAAIAMLIGPNAPISLESKFRGSHMAHVYDFYKPDLASEYPVVDGKLSQTCYLMALDSCYKTFCKRHASLRRSTQLLPPTPQLNQHNQTQWLTEELLAVEALLPEVVTVAEVADEAKKKKAPX

SEQ ID NO: 19610 - protein, 202 aa, Triticum aestivum
  unsure (1)..(202): unsure at all Xaa locations
MECKDVGILAMDMYFPPTCVQQEALEVHDGASKGKYTIGLGQDCMAFCSEVEDVISMSLTVVKSLLEKYHIDPKLIGRLEVGSETVIDKSKSIKTWLMQIFEESGNTDIEGVDSSNACYGGTAALLNCVNWVESRCWDGRYGLVVCTDSAVYAEGPARPTGGAAAIAMLIGPNAPISFESKYRASHMAHVYDFYKPDLASEX

SEQ ID NO: 19611 - protein, 189 aa, Triticum aestivum
  unsure (1)..(189): unsure at all Xaa locations
MAAERVKDVGILAMDIYFPPNCVLQEELEAHDGVSKGKYTIGLGQDSMAFCTEVEDVISMSLTVVKTLLKNYNIDPKCIGRLEVGSETVIDKSKSIKTWLMQIFEECGNTDIEGVDSSNACYGGTAALFNCVNWVESNSWDGRYGLVVCTDSAVYAEGPARPTGGAAAIAMLIGPNAPIHGKKKKKGPX

SEQ ID NO: 19612 - protein, 182 aa, Triticum aestivum
LPSQVGYLCPASLQGSQQLAKHLYDIKVQPSTLLPKQIGNMYTASLYAALASVIYNKHASLTGQRIVMFSYGSGLTSTMFSFKLNEGQHPFNLANIASVLDVTAKLESRHVTSPEKFIDTLKLMEHRYGAKDFETSKDISLLPPGTFYLTKVDSMYRRFYEKKTDGIVDGKIKCSNGIANGH

SEQ ID NO: 19613 - protein, 171 aa, Triticum aestivum
  unsure (1)..(171): unsure at all Xaa locations
AGRAGLGDTIEGRPKPXLYDTKVQPTTLIPKQLGNMYTASLYAAFASVVHNKHDALVGQRIVMFSYGSGMTSTMFSFKINEGQHPFSLSNIASILDISNKLESRHVVPPKKFVEALKLMEHRYGAKDFVTSQDTRLLVPGTYYLTHVDSMYRRFYAVKGDAAATPXXTNGH

SEQ ID NO: 19614 - protein, 176 aa, Triticum aestivum
  unsure (1)..(176): unsure at all Xaa locations
SYKXKKKKMAATNYPQNVGILAMEMYFPQRCVNQPEMESFDGVSAGKYTIGLGQEKMAFIDDREDIQSICLTAVQNLMEKYNIAYTDIGRLEVGTETIIDKSKAVKTCLMTLFSEHGNNEIEGIDTTNACYGGFSAFSNAVNWIESSSWDGRYAIVVAGDLALYASGSARPTSGAX

SEQ ID NO: 19615 - protein, 95 aa, Triticum aestivum
  unsure (1)..(95): unsure at all Xaa locations
MAAERVKDAGVLAMDIYFPPNCVLQEELETHDGVSKGKYTIGLGQDSMAFCTEVEDVISMSLTVVKTLLKNYNIXDPKCIGRLEGGRETVIDKSX

SEQ ID NO: 19616 - protein, 104 aa, Triticum aestivum
  unsure (1)..(104): unsure at all Xaa locations
SGMTSTMXSLKINECQHPFSLSNIPIRRRVATKLESRHVVPPKKFVEALKLMEHRYGAKDFVTSQDTRLLVPGTYYLTLVDSMYRRFYAVKGDAAATPXXTNGH

SEQ ID NO: 19617 - protein, 126 aa, Triticum aestivum
  unsure (1)..(126): unsure at all Xaa locations
XKQIGNMYTAAVWAGLASLVSEVDSETLQNKRVLFYSYGSGLAASMISFRINSSTEKIKNTLNLRERLAARTHSKPEDFSEAMKMRELTHNARDFSPKGSLEHIASGVYYIEKIDDKWRRFYKRKD

SEQ ID NO: 19618 - protein, 465 aa, Zea mays
MDRKDVGILAMDIYFPPSCVQQEALEAHDGASKGKYTIGLGQDCMAFCSEVEDVISMSLTVVNSLLKKYKIDPKLIGRLEVGSETVIDKSKSIKTWLMQIFEESGNSDIEGVDSSNACYGGTAALLNCVNWVESNSWDGRYGLVVCTDSAVYAEGPARPTGGAAAIAMLIGPNAPISFESKYRASHMAHVYDFYKPDLASEYPVVDGKLSQTCYLMALDSCYRQFCNKYEKIAGKQFSICDAEYFVFHSPYNKLVQKSFARLYYNDFLRNCSSVDDDAKEKLQSFSNLTGEESYQSRDLEKASQQVAKHLHDIKVQPSTLLPKQIGNMYTASLYAALASVLYNKHDSLNGQRIVMFSYGSGLTSTMFSLRLNNGQHPFSLSNIASVLDVTEKLQSRHETLPEKFVETLKLMEHRYGAKDFETSRDTSLLQPGTFYLTKVDSMYRRFYSQKLCGKTKCCNGLANGH

SEQ ID NO: 19619 - protein, 470 aa, Zea mays
MDRKDVGILAMDIYFPPSCVQQEALEAHDGASKGKYTIGLGQDCMAFCSEVEDVISMSLTVVNSLLKKYKIDPKLIGRLEVGSETVIDKSKSIKTWLMQIFEESDNTDIEGVDSSNACYGGTAALLNCVNWVESNSWDGRYGLVVCTDSAVYAEGPARPTGGAAAIAMLIGPNAPISFESKYRASHMAHVYDFYKPDLASEYPVVDGKLSQTCYLMALDSCYRQFCNKYEKIAGKQFSISDAEYFVFHSPYNKLVQKSFARLYYNDFMRNCSYVDDDAKEKLQSFSNLTGEESYQSRDLEKASQQVAKHLYGIKVQPTTLLPKQIGNMYTASLYAALASVLYNKHDSLNGQRIVMFSYGSGLTSTMFSLRLNNGQHPFSLSNIGSVLGVTEKLQSRHETLPEKFVETLKLMEHRYGAKDFETSSDTSLLQPGTFYLTKVDSMYRRFYSQKPAEEIGGGKTKCCNGFANGH

SEQ ID NO: 19620 - protein, 466 aa, Zea mays
  unsure (1)..(466): unsure at all Xaa locations
MASEAKDVGILAMDIYFPPNCVLQEELETHDGVSKGKYTIGLGQESMAFCTEVEDVISMSLTVVKSLLKNYNIDPKCIGRLEVGSETVIDKSKSIKTWLMQIFEESGNTDIEGVDSSNACYGGTAALFNCVNWVESKSWDGRYGLVVCTDSAVYAEGPARPTGGAAAIAMLIGPNAPICFESKYRGSHMAHVYDFYKPDLASEYPVVDGKLSQTCYLMALDSCYNLFCKKYEKHEGKQFSISDADYVVFHSPYNKLVQKSFARLYYNDFLRNCSTVDGESREKLAPYAGLSSEESYQSRDLEKASQQFAKNLYESKVQPTTLIPKQVGNMYTASLYAALASVVHSRHETLAGQRIVMFSYGSGLTSTMFSFMINEGHHPFSLLNIANILDISKKLKARHVVPPEXKFVEALKLMEHRYGARDFVTSQDTSLLSAGTYYLTHVDSKYRRFYDVKGXTGVATAMSNGH

SEQ ID NO: 19621 - protein, 443 aa, Zea mays
  unsure (1)..(443): unsure at all Xaa locations
MDRKDVGILAMDIYFPPSCVQQEALEAHDGASKGKYTIGLGQDCMAFCSEVEDVISMSLTVVNSLLKKYKIDPKLIGRLEVGSETVIDKSKSIKTWLMQIFEESGNSDIEGVDSSNACYGGTAALLNCVNWVESNSWDGRYGLVVCPDSAVYAEGPARPTGGAAAIAMLIGPNAPISFESKYRASHMAHVYDFYQPDLASEYPVGDGXLSQTCYLMALDSCYRQFCNKYEKIAGKQFSICDAEYFVFHSPYNKLVQKSFARLYYNDFLRNCSSVDDDAKEKLQSFSNLTGEESYQSRDLEKASQQVAKHLHDIKVQPSTLLPKQXXNGQRIVMFSYGSGLTSTMFSLRLNNGQHPFSLSNIASVLDVTEKLQSRHETLPEKFVETLKLMEHRYGAKDFETSRDTSLLQPGTFYLTKVDSMYRRFYSQKLCGKTKCCNGLANGH

SEQ ID NO: 19622 - protein, 274 aa, Zea mays
  unsure (1)..(274): unsure at all Xaa locations
MASEAKDVGILAMDIYFPPSCVLQEELETHDGVSKGKYTIGLGQENMAFCTEVEDVISMSLTVVKSLLKNYNIDPKCIGRLEVGSETVIDKSKSIKTWLMQIFEESGNTDIEGVDSSNACYGGTAALFNCVNWVESNSWDGRYGLVVCTDSAVYAEGPARPTGGAAAIAMLIGPNAPISFESKYRGSHMAHVYDFYKPDLASEYPVVDGKLSQTCYLMALDSCYNVFCKKYEKHEGKQFSIFDADYVVFHSPYNKLVQKSFARLYYNDFLRNCX

SEQ ID NO: 19623 - protein, 236 aa, Zea mays
  unsure (1)..(236): unsure at all Xaa locations
MASEAKDVGILAMDIYFPPNCVLQEELETHDGVSKGKYTIGLGQESMAFCTEVEDVISMSLTVVKSLLKNYNIDPKCIGRLEVGSETVIDKSKSIKTWLMQIFEESGNTDIEGVDSSNACYGGTAALFNCVNWVESKSWDGRYGLVVCTDSAVYAEGPARPTGGAAAIAMLIGPNAPICFESKYRGSHMAHVYDFYKPDLASEYPXVVDGKLSQTCYLMALDSCYNVFCXKYEKHX

SEQ ID NO: 19624 - protein, 236 aa, Zea mays
  unsure (1)..(236): unsure at all Xaa locations
XYSRPAGGSFTILASLCATNNKLFGFTCQNXQLAQLKDFPPISSSTVDEESREKLAPYAGLSSEESYQSRDLEKASQQVAKNLYESKVQPTTLIPKQVGNMYTASLYAALASVIHNRHETLAGQRIVMFSYGSGLTSTMFSFKINEGHHPFSLLNIANIMDVSKKLKARHVVPPKKFIEVLKLMEHRYGAKDFVTSQDTSLLSVGTYYLTHVDSKYRRFYDVKGDGVTTTAMSNGH

SEQ ID NO: 19625 - protein, 160 aa, Zea mays
  unsure (1)..(160): unsure at all Xaa locations
MAAEAKDVGILAMDIYFPPNCVLQEELETHDGVSKGKYTIGLGQESMAFCTEVEDVISMSLTAVKSLLKNYNIDPKCIGRLEVGSETAIDKSKSIKTWLMQIFEESGNTDIEGVDSSNACYGGTAALXNCGNWAESKSWDGRYGLVXCTDSAVYAEGPAX

SEQ ID NO: 19626 - protein, 237 aa, Zea mays
  unsure (1)..(237): unsure at all Xaa locations
XQVCLSFTPTLASLLAMHQTINYLIXXFSKLTTGSTKRFPVRXSSSTVDGESREKLAPYAGLSSEESYQSRDLEKASQQVAKNLYESKVQPTTLIPKQVGNMYTASLYAALASVVHSRHETLAGQRIVMFSYGSGLTSTMFSFMINEGHHPFSLLNIANILDISKKLKARHVVPPEKFVEALKLMEHRYGARDFVTSQDTSLLSAGTYYLTHVDSKYRRFYDVKGDGVATAXXSNGH

SEQ ID NO: 19627 - protein, 169 aa, Zea mays
  unsure (1)..(169): unsure at all Xaa locations
XFPPISSSTVDEEAREKLAPYAGLSSEESYQSRDLEKASQQFSKNLYESKVQPTTLIPKQVGNMYTASLYAALASIXXEGHHPFSLLNIANIMDVSKKLKARHVVPPKKFIEVLKLMEHRYGAKDFVTSQDTSLLSVGTYYLTHVDSKYRRFYDVKGDGVTTTAMSNGH

SEQ ID NO: 19628 - protein, 157 aa, Zea mays
  unsure (1)..(157): unsure at all Xaa locations
XFPSVSSSTVDGESREKLAPYAGLSSEESYQSRDLEKASQQVAKNLYESKVQPTTLIPKQVGNMYTASLYAALASVVHSXXHPFSLLNIANILDISKKLKARHVVPPEKFVEALKLMEHRYGARDFVTSQDTSLLSAGTYYLTHVDSKYRRFYDVKX

SEQ ID NO: 19629 - protein, 154 aa, Zea mays
  unsure (1)..(154): unsure at all Xaa locations
XEIVIDKSKSIKTWVMHISEERGNSHIERVDSSNACYGGTAPLLNCVNXVERNSWDGRYGLADSTDRAFNAECAAGTAGGADDIEFLKTPNAPIYFESKYRAYHMAHVYDLYKPDLDREYAVVDGKLTHTCYLMGLDSCYRQFCNXHXKIAGKX

SEQ ID NO: 19630 - protein, 154 aa, Zea mays
  unsure (1)..(154): unsure at all Xaa locations
MPGSLPLNAEACWPKDVGIVALEIYFPSQYVDQAELEKYDGVDAGKYTIGLGQARMGFCTDREDINSLCLTVVQKLMERHSLSYDCIGRLEVGTETIIDKSKSVKSNLMQLFEESGNTDIEGIDTTNACYGGTAAVFNAXNWVESSSWDGRYAL

SEQ ID NO: 19631 - protein, 138 aa, Zea mays
  unsure (1)..(138): unsure at all Xaa locations
XTNACYGGTAAVFNAVNWIEWSSWDGRYALVVAGDIAVYATGNARPTGGVGAVAMLIGPNAPLIFERGLRGTHMQHAYDFYKPDMLSEYPIVDGKLSIQCYLSALDRCYSVYRKKIRARWQKEGNDRDXTLNGFGFMI

SEQ ID NO: 19632 - protein, 450 aa, Phycomyces blakesleeanus
MSRYDHYPENVGILALEMYFPSRCVEQTAMEVYDGVSTGKYTIGLGQDKMAFIDDREDIQSICLTAVHNLMEKYNIAYTDIGRLEVGTETIIDKSKSVKTTLMTLFAEHGNYEIEGIDTTNACYGGFSAFSNAVNWIESSSWDGRYAIVIAGDLALYASGAARPTSGAGVVAMLVGKDAPIVLGRGLRYTYMDHAYDFYKPDMHSEYPIVDGKFSNVCYIRAFDACYNNYMKRLSKTIKKDVTSMEDVDYVVCHSPYAKLVTKSFARSAYNDFMADKKNPKYAALAPFEELAYEASLENRDLEKATATLTKAGYAQKVGPAAYAPKQIGNMYAGAVWAGLASLVSEVEVDTLKDKRVLLYSYGSGLAASMVSFRVVGSTADIKAKLNLRQRLDARTHSKPEAFAEAMQIRENTHNACNYNPIGSLEHIAPGAYYVDKIDDKWRRFYKRKD

SEQ ID NO: 19633 - protein, 447 aa, Schizosaccharomyces pombe
MSFDRKDIGIKGLVLYTPNQYVEQAALEAHDGVSTGKYTIGLGLTKMAFVDDREDIYSFGLTALSQLIKRYQIDISKIGRLEVGTETIIDKSKSVKSVLMQLFGDNHNVEGIDCVNACYGGVNALFNTIDWIESSAWDGRDGIVVAGDIALYAKGNARPTGGAGCVALLVGPNAPIVFEPGLRGTYMQHAYDFYKPDLTSEYPYVDGHFSLECYVKALDGAYANYNVRDVAKNGKSQGLGLDRFDYCIFHAPTCKQVQKAYARLLYTDSAAEPSNPELEGVRELLSTLDAKKSLTDKALEKGLMAITKERFNKRVSPSVYAPTNCGNMYTASIFSCLTALLSRVPADELKGKRVGAYSYGSGLAASFFSFVVKGDVSEIAKKTNLVNDLDNRHCLTPTQYEEAIELRHQAHLKKNFTPKGSIERLRSGTYYLTGIDDMFRRSYSVKP

SEQ ID NO: 19634 - protein, 491 aa, Saccharomyces cerevisiae; identical to SEQ ID NO: 615

SEQ ID NO: 19635 - protein, 454 aa, Neurospora crassa
MATRPQNIGIKAIEIYFPSQYVEQSELEKFDGVSTGKYTIGLGQTKMAFCDDREDIYSLALTAVSRLLKNYEIDTNTIGRLEVGTETLLDKSKSVKSVLMQLFGENTNIEGVDTINACYGGTNAFFNSVNWIESSAWDGRDAIVVAGDIALYAKGNARPTGGAGCVAMLVGPNAPIAVEPGLRGSYMAHAYDFYKPDLTSEYPYVDGHYSVNCYTEALDGAYRAYNQREKLLTNGVNGHSEDSTKTPLDRFDYLAFHAPTCKLVQKSYARLLYHDYLANPESPVFADVPPEVRDMDYKKSLTDKVVEKTFMTLTKKRFQERVNPAIQVPTLCGNMYCGSVWGGLASIIGHVDSAQLEGKRIGLFSYGSGLAASFCSFRVTGSTEKLAKTLNLPARLAARRAVPPESYDAMCDLRKQAHLQKNYTPKGEVSTLEPGTYYLENVDDMFKRTYSIKA

SEQ ID NO: 19636 - protein, 382 aa, Encephalitozoon cuniculi
MPAKNMFGIIGVEYQLPSLYISQEEVANNIDFEVDKIKIGLGLEQMGVPSRREDAISLALNAVSRLMKRYNVDPMAIGRLEVGTESNPDGSKSIKSYLTDLFPGNTSICGCDNVHACYSGTNALLSAIAWMESSFWDGRLAIVVASDVAMYKDKSCQPTGGAGAVAILLGPNCIYRVVPSSVIHYFTNQFDFMKPRELHPFPVVKGKESIENYRTAFEICYGRFREKMAEESSFDYIVLHSPYTRLPEKICIANHIDRKKLLRSLEASRRNGNAYSASLYLSLISLLECHDGEVGEKILMFSYGSGASSSMFCLERISKGCMVTGFRERLLERKEISYQEFTKILEEPVPQDNYEAQERIYSPGYYLKRISSFARYYEYLTE

SEQ ID NO: 19637 - protein, 462 aa, Caenorhabditis elegans
MSLGQLSYTPVTDVGIGAIELYFPQNFVDQNDLEKFNNVSSGKYTIGLGQQQMGFCSDNEDIVSISLTVTRKLIETYKISTDSIGCLVVGTETMIDKSKSVKTALMDLFPGNSDIEGVDIKNACFGGAQALLHAIDWVTVNHPLDKKNAIVVVADIAIYEEGPARCTGGAGAIAFLICPDASIPIDRQFSACHMKNTWDFFKPITPIPSEYPVVDGSLSLSSYLEAVRMTYTYFISKVNRHTTGIDGLNSFDGVFLHSPFTKMVQKGLAVMNYTDSQLRHKQLNGNGVDHKLDENDRAGLAKMIELSAQVWKEKTDPYLVFNRRIGNMYTPSLFAQLLAYLAADDCVTGEKSILFFAYGSGLASAIFPGRVRQTSNLDKIRQVAIRAIKRLDDRIQFTPEEFTETLQKREVFLRSKEIPKSPSETSLFPNTYFLDNMDKLYRRSYTLHEEPNGVQNGNGIHH

SEQ ID NO: 19638 - protein, 458 aa, Caenorhabditis elegans
QLSYTPVTDVGIGAIELYFPQNFVDQNDLEKFNNVSSGKYTIGLGQQQMGFCSDNEDIVSISLTVTRKLIETYKISTDSIGCLVVGTETMIDKSKSVKTALMDLFPGNSDIEGVDIKNACFGGAQALLHAIDWVTVNHPLDKKNAIVVVADIAIYEEGPARCTGGAGAIAFLICPDASIPIDRQFSACHMKNTWDFFKPITPIPSEYPVVDGSLSLSSYLEAVRMTYTYFISKVNRHTTGIDGLNSFDGVFLHSPFTKMVQKGLAVMNYTDSQLRHKQLNGNGVDHKLDENDRAGLAKMIELSAQVWKEKTDPYLVFNRRIGNMYTPSLFAQLLAYLAADDCVTGEKSILFFAYGSGLASAIFPGRVRQTSNLDKIRQVAIRAIKRLDDRIQFTPEEFTETLQKREVFLRSKEIPKSPSETSLFPNTYFLDNMDKLYRRSYTLHEEPNGVQNGNGIHH

SEQ ID NO: 19639 - protein, 408 aa, Nostoc punctiforme
MQRVGIEKINLYAGRFCADALELANLQGKDLDYVSKQVKVKTRSVIPAYEDTVTLSVNAAKRLLSPEDARDIELLIVATESAVDFGKPVSTWVHRYCNLPPHCRSFELKHACYGLTAAVKTAAMWLQGGLTPGKKALVIGCDYSRPHLDDRDNFIGGGAAIAMLISTDPKVFEIDLHPAGFWTNEISDTFRPTARVEIGDNQTSLYSYLDALEASYTHYEKLVGGVDYDKDFQKHIYHTPFPGMPLQAHRTLLSLLEVNDSKIYEENYQKKVQEGIYFAQQVGSTYGSSTFLCLLSLLHYAQDLHAGDRISIFAYGSGCQGEFYRGTVSPGAIEYIRSLDIDRHLQERLPLSLMEYELLEYAREKYIDAPDYQPKRDSFQNAYDKLYAGQELLVLKQVKNYYRQYEWS

SEQ ID NO: 19640 - protein, 445 aa, Halobacterium sp. NRC-1
MTSVGIDAIEIHTGKLKLDLAETFAPEMGDDPEKYTKGLGLHASSFPDAYEDIVTMGANAAHRLLERKGLEPADVGRIDVATESAFDNSKPVSTYIAGCLEQVYDGDFHHANKGERKFACIAGTQSLDDAVNWILAGRNRGRGALVIATDTALYARDSSGEATQGAGAVAMWITEDPDIVELSTEQGYGSADETDFLKPNQQFPSVDGKRSMQVYLARMRESLQDFERATGASHPDDYAFIPFHTPFPGMVRKAAVLGYRHMIRGTDIEEELAADIGRQPRRERFDSDDAFEDAISEYVDGLTDTDAYREWYDAAIQPTLSISSQVGNWYTGSVHLARFSALKHAAENGIDLAGKRLLVASYGSGAQAEIHSETVQDGFTEAVAASTIDEQIEQRYDISFAEYEQVHDRHNHEKSVELEPFTQPDAEFVFDGWGPMNERKYTYVE

SEQ ID NO: 19641 - protein, 416 aa, Streptomyces atroolivaceus
MTATGAEQAYGIEALNVWCGLARLTAADLFAGRGLDPERLDNLMMSERSIGLPIEDPVTNAVNAARPLIEALSPEERARIELVVTSTESGVDYSKSLTSYVHKYLGLNRHCRLIEVKQACFGATAAVQTAVGYLASGISPGAKALVIATDVAVVDEKAEYSEPAAGHGAAAMLLSDRPRVLAMDLGAFGNYSYETLDSARPSPRFDIADVDRSLFAYLDCLKNAYADYAARVTDVDFTRDFDHLVMHTPFAGLVKAGHRKMMREQGVTGPRIDEDFARRVAPSLIYPGSVGNLCSGSVYLALASLLDSGVVTAPSRVGLFSYGSGCSSEFFSGIVDEQSAATVAEQGIGKRLEARARITFDEYLAVLEHNLECLVPVENRTVDPAEWEPLLDRVGDRPEILTFTGVKDYHRQYAWR

SEQ ID NO: 19642 - protein, 453 aa, Blattella germanica
MWPSDVGIVALELIFPSQYVDQVDLEVYDNVSAGKYTVGLGQARMGFCTDREDINSLCLTVVSRLMERWSIPYSQIGRLEVGTETLLDKSKSVKTVLMQLFKDNTDIEGVDTVNACYGGTSALFNAISWVESSSWDGRYALVVAGDIAVYAKGSARPTGGAGAVAMLVGANAPLVFDRGVRSSHMQHAYDFYKPDLSSLYPTVDGKLSIQCYLSALDHCYQLYCSKIQKQLGEKFDIERLDAVLFHAPYCKLVQKSLARLVLNDFVRASEEERTTKYSSLEALKGVKLEDTYFDREVEKAVMTYSKNMFEEKTKPSLLLANQVGNMYTPSLYGGLVSLLVSKSAQELAGKRVALFSYGSGLASSMFSLRISSDASAKSSLQRLVSNLSHIKPQLDLRHKVSPEEFAQTMETREHNHHKAPYTPEGSIDVLFPGTWYLESVDSLYRRSYKQVPG

SEQ ID NO: 19643 - protein, 455 aa, Blattella germanica
MAHWPEDVGIIGIEMIFPSLYVDQAELETYDEVSPGKYTMGLGQDKMGVCTDREDINSLCLTAVDKLMERNNIDYNDIGWLEVGTETILDKVKSVKTVLMQLFEESGNTDVEGIDTINACYRGTAALFNALIWIESSSWDGRYAIVVAADIAIYAKECSPTGGAGALLMLIGANAPIVIDRGVRASHMKHAYDFYKPDLMSEYPVVDGKLSVQCYLSALDHCYPRFCSKTEKYLKRCGKENTKIDLDYFDAFVFHSPYCKLVQKSVARLVLNDFIQYPEKYQDLQQLRNLKFEDTYFDRDIEKIFMDKSKQLFEKKTKPSLMLANQVGNMYTTSLYGGLVSLLISEDIGELAGKCICMFSYGSGFAASMFSLHISTDSSPGSTLSRLVTNLTHIKPQVQQRVKLSPGEFENIMEIREQNHHKAPYTPVASPNTLFPGTWYLESIDSMHRRKYKRV

SEQ ID NO: 19644 - protein, 465 aa, Drosophila melanogaster
MASHWPENVGIRAIEILFPSQYVDQTELETFDGASAGKYTIGLGQAKMGFCSDREDVNSLCLTVVSRLLERQHVKHSEIGRLEVGTETIVDKSKSVKSVLMQLFAESGNTDIEGIDTTNACYGGTAALFNAVNWVESSSWDGRLALAVCADIAVYAKGAARPTGGAGAVAMLVGPNAPLILDRGLRATHMEHAYDFYKPDLSSEYPTVDGKLSIQCYLSALDTCYRLYRKKFDQQQKDTSKQPASLSTFDAILFHTPFCKLVQKSVGRLSFNDFLLSSEEERTKQFPDLERFNTATLESTYFDRDVEKAFMTQSANIFASKTKKSLLLANQVGNMYTPSVYSGLVSLLISGPAQELVGKRIGLFSYGSGLAASMYSISVTQDAAAFEKFVSQLDYVQPLLNSREKVAPEQFSALMEVREKNNHAAPYTPTGSISALFPGTYYLKDVDALHRRTYERTPTISNGVH

SEQ ID NO: 19645 - protein, 457 aa, Dendroctonus jeffreyi
MSAWPEDVGIIALEIYFPAQYVDQTELEQYDGVSAGKYTVGLGQKKMGFCNDREDINSLCLTVVDNLLTRYQVKPQEIGRLEVGTETIIDKSKSVKTVLMQLFEPHGVTDIEGIDTTNACYGGLPPSSTPSIAVESSSWNGRYALVVAADIAVYAKGPARPTGGTGAVAMLVGPNAPLVVDRRLKSSFFKHAYDFYKPDLTSEYPVVDGKLSIQCYLEALDKCYQVYCQKTEKLLQKPVSIESFDGILFHTPYCKLVQKSVGRLALNDFVREGKPELHPDLEKFANIQLKDSYFDRDVEKAFLSASNAAFLQRTLPSLLIAANIGNMYTSSLYGGLVSYIVSRSLENLVDNRVAMFSYGSGLASSFYSITIKNNAALQTLKNNLSYVEPLLAKRSKIAPEKFEATLELRQQSAHKVPYEPVGDISHFFPGTFVLTKIDEQHRRVYDRISKTITNGHS

SEQ ID NO: 19646 - protein, 508 aa, Danio rerio
MWPKDVGIIAMEVYVPSQYVDQAELEEYDGVGAGKYTVGLGQARMGFCSDREDINSLCLTVVQRLMERNGLSYESVGRLEVGTETIIDKSKSTKTVLMQLFEESGNTDVEGVDTTNACYGGTAALFNAVNWVESSSWDGRYALVVAGDIAVYATGSARPTGGAGAVAMLVGPNAPLAFERGLRGTHMQHAYDFYKPDMVSEYPVVDGKLSIQCYLSALDQCYSVYKNKIHARWQREGTEGRCSLEDFGFMVFHSPYCKLVQKSLARLMLNDFLCHPSPNMESGPFSGLEAFRDVKIEDTYFDRDVEKAFMKASSELFDDKTKASLLISNQNGNMYTPSVYGCLASVLAQHTPQQLAGQRIGVFSYGSGFAATLYSIKVTQDATPGSALDKLVSSLCDLPARLDSRQKVSPGVFAETMKLREETHHLANYIPQGSVDELFPGTWYLTRVDEKHRRQYARRSMNDDRPLEAGLVSSSMAAEHIPSPLKKMPRIPTTTAGPEVVVMSNGDH

SEQ ID NO: 19647 - protein, 520 aa, Xenopus laevis
MPGSLPPNGESSWPKDVGIVALEIYFPSQYVDQEELEKFDGVSAGKYTIGLGQCKMGFCSDREDINSLCLTVVQRLMERNNLSYDCIGRLEVGTETIIDKSKSVKTVLMQLFEESGNTDVEGIDTTNACYGGTAALFNAVNWVESSSWDGRYALVVAGDIAVYATGSARPTGGAGAVAMLVGPNATLVCERGLRGTHMQHAYDFYKPDMESEYPVVDGKLSIQCYLSALDRCYSTYRKKIHAQWQKEGTDKPFTLNDFGFMTFHSPYCKLVQKSLARLLVNDFISDSNPNTESGVYVGLDSFRDLKLEETYFDRDVEKAFLKASTEIFNEKTKASLLVSKENGNMYTPSVYGCLASVLAQYSPQQLAGQRIGVFSYGSGFAATLYSLRVSQDAMPGSSLDKLTSSLSDLKARLDSRKNVSPSIFADNMKLREDTHHLANYIPQGSVDDLFPGTWYLVRVDEKHRRFYARSSLMSDGPLDAAPESVLASTANEHFPSPAKKVPRIPPAAEAEPISVTNGEH

SEQ ID NO: 19648 - protein, 522 aa, Gallus gallus
MPGSLPVNTESCWPKDVGIVALEIYFPSQYVDQTELEKYDGVDAGKYTIGLGQSKMGFCSDREDINSLCLTVVQKLMERNSLSYDCIGRLEVGTETIIDKSKSVKTVLMQLFEESGNTDVEGIDTTNACYGGTAALFNAINWIESSSWDGRYALVVAGDIAVYATGNARPTGGAGAVAMLVGSNAPLIFERGLRGTHMQHAYDFYKPDMVSEYPVVDGKLSIQCYLSALDRCYSVYRNKIHAQWQKEGTDRGFTLNDFGFMIFHSPYCKLVQKSVARLLINDFLSDQNAETANGVFSGLEAFRDVKLEDTYFDRDVEKAFMKASAELFNQKTKASLLVSNQNGNMYTPSVYGCLASLLAQYSPEHLAGQRISEFSYGSGFAATLYSIRVTQDATPGSALDKITASLSDLKARLDSRKCIAPDVFAENMKIRQETHHLANYIPQCSVEDLFEGTWYLVRVDEKHRRTYARRPVMGDGPLEAGVEVVHPGIVHEHIPSPAKKVPRIPATTESEGVTVAISNGVH

SEQ ID NO: 19649 - protein, 522 aa, Gallus gallus
MPGSLPVNTESCWPKDVGIVALEIYFPSQYVDQTELEKYDGVDAGKYTIGLGQSKMGFCSDREDINSLCLTVVQKLMERNSLSYDCIGRLEVGTETIIDKSKSVKTVLMQLFEESGNTDVEGIDTTNACYGGTAALFNAINWIESSSWDGRYALVVAGDIAVYATGNARPTGGAGAVAMLVGSNAPLIFERGLRGTHMQHAYDFYKPDMVSEYPVVDGKLSIQCYLSALDRCYSVYRNKIHAQWQKEGTDRGFTLNDFGFMIFHSPYCKLVQKSVARLLLNDFLSDQNAETANGVFSGLEAFRDVKLEDTYFDRDVEKAFMKASAELFNQKTKASLLVSNQNGNMYTPSVYGCLASLLAQYSPEHLAGQRISEFSYGSGFAATLYSIRVTQDATPGSALDKITASLSDLKARLDSRKCIAPDVFAENMKIRQETHHLANYIPQCSVEDLFEGTWYLVRVDEKHRRTYARRPVMGDGPLEAGVEVVHPGIVHEHIPSPAKKVPRIPATTESEGVTVAISNGVH

SEQ ID NO: 19650 - protein, 389 aa, Streptomyces sp. CL190
MSISIGIHDLSFATTEFVLPHTALAEYNGTEIGKYHVGIGQQSMSVPAADEDIVTMAATAARPIIERNGKSRIRTVVFATESSIDQAKAGGVYVHSLLGLESACRVVELKQACYGATAALQFAIGLVRRDPAQQVLVIASDVSKYELDSPGEATQGAAAVAMLVGADPALLRIEEPSGLFTADVMDFWRPNYLTTALVDGQESINAYLQAVEGAWKDYAEQDGRSLEEFAAFVYHQPFTKMAYKAHRHLLNFNGYDTDKDAIEGALGQTTAYNNVIGNSYTASVYLGLAALLDQADDLTGRSIGFLSYGSGSVAEFFSGTVVAGYRERLRTEANQEAIARRKSVDYATYRELHEYTLPSDGGDHATPVQTTGPFRLAGINDHKRIYEAR

SEQ ID NO: 19651 - protein, 520 aa, Homo sapiens
MPGSLPLNAEACWPKDVGIVALEIYFPSQYVDQAELEKYDGVDAGKYTIGLGQAKMGFCTDREDINSLCMTVVQNLMERNNLSYDCIGRLEVGTETIIDKSKSVKTNLMQLFEESGNTDIEGIDTTNACYGGTAAVFNAVNWIESSSWDGRYALVVAGDIAVYATGNARPTGGVGAVALLIGPNAPLIFERGLRGTHMQHAYDFYKPDMLSEYPIVDGKLSIQCYLSALDRCYSVYCKKIHAQWQKEGNDKDFTLNDFGFMIFHSPYCKLVQKSLARMLLNDFLNDQNRDKNSIYSGLEAFGDVKLEDTYFDRDVEKAFMKASSELFSQKTKASLLVSNQNGNMYTSSVYGSLASVLAQYSPQQLAGKRIGVFSYGSGLAATLYSLKVTQDATPGSALDKITASLCDLKSRLDSRTGVAPDVFAENMKLREDTHHLVNYIPQGSIDSLFEGTWYLVRVDEKHRRTYARRPTPNDDTLDEGVGLVHSNIATEHIPSPAKKVPRLPATAAEPEAAVISNGEH

SEQ ID NO: 19652 - protein, 508 aa, Homo sapiens
MQRLLTPVKRILQLTRAVQETSLTPARLLPVAHQRFSTASAVPLAKTDTWPKDVGILALEVYFPAQYVDQTDLEKYNNVEAGKYTVGLGQTRMGFCSVQEDINSLCLTVVQRLMERIQLPWDSVGRLEVGTETIIDKSKAVKTVLMELFQDSGNTDIEGIDTTNACYGGTASLFNAANWMESSSWDGRYAMVVCGDIAVYPSGNARPTGGAGAVAMLIGPKAPLALERGLRGTHMENVYDFYKPNLASEYPIVDGKLSIQCYLRALDRCYTSYRKKIQNQWKQAGSDRPFTLDDLQYMIFHTPFCKMVQKSLARLMFNDFLSASSDTQTSLYKGLEAFGGLKLEDTYTNKDLDKALLKASQDMFDKKTKASLYLSTHNGNMYTSSLYGCLASLLSHHSAQELAGSRIGAFSYGSGLAASFFSFRVSQDAAPGSPLDKLVSSTSDLPKRLASRKCVSPEEFTEIMNQREQFYHKVNFSPPGDTNSLFPGTWYLERVDEQHRRKYARRPV

SEQ ID NO: 19653 - protein, 520 aa, Homo sapiens
MPGSLPLNAEACWPKDVGIVALEIYFPSQYVDQAELEKYDGVDAGKYTIGLGQAKMGFCTDREDINSLCMTVVQNLMERNNLSYDCIGRLEVGTETIIDKSKSVKTNLMQLFEESGNTDIEGIDTTNACYGGTAAVFNAVNWIESSSWDGRYALVVAGDIAVYATGNARPTGGVGAVALLIGPNAPLIFERGLRGTHMQHAYDFYKPDMLSEYPIVDGKLSIQCYLSALDRCYSVYCKKIHAQWQKEANDNDFTLNDFGFMIFHSPYCKLVQKSLARMLLNDFLNDQNRDKNSIYSGLKAFGDVKLEDTYFDRDVEKAFMKASSELFSQKTKASLLVSNQNGNMYTSSVYGSLASVLAQYSPQHLAGKRIGVFSYGSGLAATLYSLKVTQDATPGSALDKITASLCDLKSRLDSRTGVAQDVFAENMKLREDTHHLVNYIPQGSIDSLFEGTWYLVRVDEKHRRTYARRPTPNDDTLDEGVGLVHSNIATEHIPSPAKKVPRLPATAAEPEAAVISNGVW

SEQ ID NO: 19654 - protein, 509 aa, Homo sapiens
MPGSLPLNAEACWPKDVGIVALEIYFPSQYVDQAELEKYDGVDAGKYTIGLGQAKMGFCTDREDINSLCMTVVQNLMERNNLSYDCIGRLEVGTETIIDKSKSVKTNLMQLFEESGNTDIEGIDTTNAVNWIESSSWDGRYALVVAGDIAVYATGNARPTGGVGAVALLIGPNAPLIFERGLRGTHMQHAYDFYKPDMLSEYPIVDGKLSIQCYLSALDRCYSVYCKKIHAQWQKEGNDKDFTLNDFGFMIFHSPYCKLVQKSLARMLLNDFLNDQNRDKNSIYSGLEAFGDVKLEDTYFDRDVEKAFMKASSELFSQKTKASLLVSNQNGNMYTSSVYGSLASVLAQYSPQQLAGKRIGVFSYGSGLAATLYSLKVTQDATPGSALDKITASLCDLKSRLDSRTGVAPDVFAENMKLREDTHHLVNYIPQGSIDSLFEGTWYLVRVDEKHRRTYARRPTPNDDTLDEGVGLVHSNIATEHIPSPAKKVPRLPATAAEPEAAVISNGEH

SEQ ID NO: 19655 - protein, 363 aa, Homo sapiens
MELFQDSGNTDIEGIDTTNACYGGTASLFNAANWMESSSWDGRYAMVVCGDIAVYPSGNARPTGGAGAVAMLIGPKAPLALERGLRGTHMENVYDFYKPNLASEYPIVDGKLSIQCYLRALDRCYTSYRKKIQNQWKQAGSDRPFTLDDLQYMIFHTPFCKMVQKSLARLMFNDFLSASSDTQTSLYKGLEAFGGLKLEDTYTNKDLDKALLKASQDMFDKKTKASLYLSTHNGNMYTSSLYGCLASLLSHHSAQELAGSRIGAFSYGSGLAASFFSFRVSQDAAPGSPLDKLVSSTSDLPKRLASRKCVSPEEFTEIMNQREQFYHKVNFSPPGDTNSLFPGTWYLERVDEQHRRKYARRPV

SEQ ID NO: 19656 - protein, 477 aa, Homo sapiens
MLGASSNWSWDNAAIQVKCRTRNKRMAGEPEKGDPMGSPEKGDPEKGDPREDWAHGLGLQGVQLSGAGRAAEVATEPPDPVPAPNRTRSQENLMERKNLSYDCTGRLEVGTETIKDKSKSVKTNLMQLFEESGDIDIEGTDTTHACYGAPAAVFSAVNWIESSSWDGQFALEFVGDIAVYPTGKVRLTGRVRAVALLIEPNATLIFERGLRGTHMQRAYGFYEPDMLSECPIVDGKPSTQCCFSALDHCYSVDCKTIRAQWQKDGNDKDFTLNNFGFLILHSPYCKLKTKASLLYPVKMEIRTHRQYMVPRNCPSAVLTSAMIREETGVFSYGSGSAATLYSLKVPPDATPWSAVDKITASLWDLKSRCSSRTCVVPDVFVENMKLREDTHHLVNSVPRGPRDSLFEETWYLAMVGEKHRRSYTPCPSPNNDTWDEGVRLVHSNTVTDHIPSPAKTVPRLPATAAETGAAVISNGEH

SEQ ID NO: 19657 - protein, 508 aa, Sus scrofa
MQRLLTPVRQVLRVKRAMQEASFMPPLLPPAAHQRFSTVPAVPVAKADTWPKDVGILALEVYFPAQYVDQTDLEKFDNVEAGRYTVGLGQTHMGFCSVQEDINSLCLTVVQRLMERTQLPWDSVGWLEVGTETIIDKSKSVKTVLMELFQDSGNTDIEGIDTTNACYGGTASLFNAANWVESSAWDGRYAVVVCGDIAVYPRGNSRPTGGAGAVAMLVGPEAPLALERGLRGTHMENAYDFYKPNATSEYPLVDGKLSIQCYLRALDRCYTLYRQKIEKQWKQAGIERHFTLDDLQFMIFHTPFCKLVQKSLARLMFSDFLLADSDTQSSLYKGLEAFRGQKLEDTYANKDIEKAFQKASLDLFNKKTKPSLYLSLHNGNMYTSSLYGCLASLLSQCSAQDLAGSRIGAFSYGSGLAASFYSLRVSQDASPGSPLEKLVSSVSDLPERLASRKRVSPEEFTEIMNQREQYYHKVNFTPPGDPNSLFPGTWYLERVDELYRRKYARHLV

SEQ ID NO: 19658 - protein, 391 aa, Streptococcus pyogenes M1 GAS
MTIGIDKIGFATSQYVLKLEDLALARQVDPAKFSQGLLIESFSVAPITEDIITLAASAADQILTDEDRAKIDMVILATESSTDQSKASAIYVHHLVGIQPFARSFEVKQACYSATAALDYAKLHVASKPDSRVLVIASDIARYGVGSPGESTQGSGSIALLVTANPRILALNEDNVAQTRDIMDFWRPNYSFTPYVDGIYSTKQYLNCLETTWQAYQKRENLQLSDLAAVCFHIPFPKLALKGLNNIMDNTVPPEHREKLIEAFQASISYSKQIGNIYTGSLYLGLLSLLENSKVLQSGDKIGFFSYGSGAVSEFYSGQLVAGYDKMLMTNRQALLDQRTRLSVSKYEDLFYEQVQLDDNGNANFDIYLTGKFALTAIKEHRRIYHTNDKN

SEQ ID NO: 19659 - protein, 345 aa, Bacillus subtilis subsp. subtilis str. 168
MLITCSESGIDFGKSLSTYIHEYLGLNRNCRLFEVKQACYSGTAGFQMAVNFILSQTSPGAKALVIASDISRFLIAEGGDALSEDWSYAEPSAGAGAVAVLVGENPEVFQIDPGANGYYGYEVMDTCRPIPDSEAGDSDLSLMSYLDCCEQTFLEYQKRVPGANYQDTFQYLAYHTPFGGMVKGAHRTMMRKVAKVKTSGIETDFLTRVKPGLNYCQRVGNIMGAALFLALASTIDQGRFDTPKRIGCFSYGSGCCSEFYSGITTPQGQERQRTFGIEKHLDRRYQLSMEEYELLFKGSGMVRFGTRNVKLDFEMIPGIMQSTQEKPRLFLEEISEFHRKYRWIS

SEQ ID NO: 19660 - protein, 421 aa, Pseudomonas fluorescens
MTRQVGIEAMNVFGGAASLDVTMLARHRKLDSQRFGNLLMHEKSVALHSEDPVTFAVNAAKPLIDALSPQERDQIELLITCTESGIDFGKSVSTYVHDYLGLKKNCRVFELKQACYSGTAGFHSAVQFVLSQTSPNAKALVVAVDLCRFLMIGEGGAAAQDWAFSEPSGGAGAVAMLISDKPHVFSLDIGASGYYSFEVMDTCRPEPDSEAGDADLSLMSYLDCCEQTFNEYRLRVDDVDYARTFDYLAFHTPFGGMVKGAHRLMMRKFAPADPPAIEADFAQRVAPGLAYCQRVGNIMGATMFLSLAGIISTARFDEPRRIGCFSYGSGCCSEFFSGTVTPQSRDHLSAQAIAQQLDSRYSLSLAEYESILLGNDAVRFGTRDHTVACPVTDSVIAAGGLSGKLLLSAINGYHREYSFQP

SEQ ID NO: 19661 - protein, 374 aa, Myxococcus xanthus
MMQERGVALPFEDPVTNAVNAARPILDAMSPEARERIELLVTSSESGVDFSKSISSYAHEHLGLSRHCRFLEVKQACYAATGALQLALGYIASGVSPGAKALVIATDVTLVDESGLYSEPAMGTGGVAVLLGDEPRVMKMDLGAFGNYSYDVFDTARPSPEIDIGDVDRSLFTYLDCLKHSFAAYGRRVDGVDFVSTFDYLAMHTPFAGLVKAGHRKMMRELTPCDVDEIEADFGRRVKPSLQYPSLVGNLCSGSVYLSLCSIIDTIKPERSARVGMFSYGSGCSSEFFSGVIGPESVSALAGLDIGGHLRGRRQLTFDQYVELLKENLRCLVPTKNRDVDVERYLPLVTRTASRPRMLALRRVVDYHRQYEWV

SEQ ID NO: 19662 - protein, 483 aa, Glycine max
  unsure (1)..(483): unsure at all Xaa locations
MASSRPANVGILAMDIYFPPTCVTQDALEGHDGVSKGKYTIGLGQDCMAFCSEVEDVISMSLTVVTSLLEKFNVDPKQIGHLAVGSETVIDKSKSIKTFLMQVFEASGNTDIEGVDSTNACYGGTAALFNCVNWVESSSWDGRYGLVVCTDTAVYAEGPARPTGGAAAIAMLVGPDAPIAFESKLRGSHMSHAYDFYKPNLASEYPIVDGKLSQTCYLMALDSCYRLYCEKFEKLEGRPFSMSDSDYFVFHSPYNKLVQKSFGRLYFNDFLRNASFVDEVARETLAPYASLSGDESYQSRDLEKANQQAAKHLYDAKVQPSTLIPKQVGNMYTASLYAAFASLLHNKNSSLVGKRVVMFSYGSGLTATMFSFQLQEGQHPFNLSNIVTVMNVSDKLKQRVEIPPEKFVETLKIMEHRYGGKDFVTSKDCSYLTPGTFYLTNVDSMYRRFYAKKDXVIGXLMIADIFKYGVKMYFLMVHLYLIP

SEQ ID NO: 19663 - protein, 474 aa, Glycine max
  unsure (1)..(474): unsure at all Xaa locations
MAKNVGILAIDIYFPPACVQQEALETHDGASKGKYTIGLGQDCMSFCTEVEDVISMSLTVVTSLLEKYEIDPKLVGRLEVGSETVIDKSKSIKTFLMQIFEKYGNTDIEGVDSTNACYGGTAALFNCVNWVESNSWDGRYGLVVCTDSAVYAEGPARPTGGAAAIAMLIGPDAPISFESKLRGSHMSHVYDFYKPNLASEYPVVDGKLSQTCYLMAVDSCYKNFCHKYEKFEGKQFSLSDAEYFVFHSPYNKLVQKSFARLVFNDFLMNSSSVDEVAKEKLGPFATLSGDESYQSRDLEKASQQVAKXPLYDQKVQPTTLIPKQVGNMYTASLYAAFASLIHNKNSTLAGKRVILFSYGSGLTAXTMFSLQLRDSQHPFSLSNIARVMDVDGKLKSRHEFPPEEFVENLKLMEHRYGGKEFVTSKDTSLLSPGTFYLTEVDSMYRRFYSKKTKESTAENGVIANGVANGIANGH

SEQ ID NO: 19664 - protein, 460 aa, Glycine max
MAKNVGILAIDIYFPPTCIQQELLEAHDGASKGKYTIGLGQDCMAFCTEVEDVISMSLTVVSSLLEKYAIDPKQIGRLEVGSETVIDKSKSIKTFIMQIFEKYGNTDIEGVDSTNACYGGTAALFNCVNWVESSSWDGRYGLVVCTDSAVYAEGPARPTGGAAAVAMLIGPDAPISFESKLRGSHMAHAYDFYKPNLASEYPVVDGKLSQTCYLMALDSCYNHLSHKYEKQEGKQFSISDAEYFVFHSPYNKLVQKSFARLVFNDFLKNASFVDEAAKEKLEPFATLSGDESYQSRDLEKASQQVAKPQYDAKVQPTTLIPKQVGNMYTASLYAAFISLIHNKHSTLDGKRVILFSYGSGLTSTMFSLLLREGQHPFSLSNIDKMMDVAGKLKSRHEFPPEKFVETMKLMEHRYGGKEFVTSKDTSLLSPGTFYLTEVDSMYRRFYAKKTSENGLVTNGH

SEQ ID NO: 19665 - protein, 474 aa, Glycine max
  unsure (1)..(474): unsure at all Xaa locations
MEKNVGILAIDIYFPPACVQQEALETHDGASKGKYTIGLGQDCMSFCTEVEDVISMSLTVVTSLLEKYGIDPKQIGRLEVGSETVIDKSKSIKTFLMQIFEKYGNTDIEGVDSTNACYGGTAALFNCVNWVESNSWDGRYGLVVCTDSAVYAEGPARPTGGAAAIAMLIGPDAPISFESKLRGSHMSHVYDFYKPNLASEYPVVDGXKLSQTCYLMAXVDSCYKNFCHKFEKFEGKQFSLFDAEYFVFHSPYNKLVQKSFARLFFNDFLMNSSSXADEVAKEKLGPFATLSGDESYQSRDLEKASQLLAKPLYDQKVQPTTLIPKQVGNMYTASLYAAFASLIHNKHSTLAGKRVILFSYGSGLTATMFSLQLRDSQHPFSLSNMARVMNVDGKLKSRHEFPPEEFVENLKLMEHRYGAKEFVTSKDSSLLSPGTFYLTEVDSMYRRFYSKKTKESSLTHAENGVIANGVANGH

SEQ ID NO: 19666 - protein, 211 aa, Glycine max
  unsure (1)..(211): unsure at all Xaa locations
MEKNVGILAIDIYFPPACVQQEALETHDGASKGKYTIGLGQDCMSFCTEVEDVISMSLTVVTSLLEKYGIDPKQIGRLEVGSETVIDKSKSIKTFLMQIFEKYGNTDIEGVDSTNACYGGTAALFNCVNWVESNSWDGRYGLVVCTDSAVYAEGPARPTGGAAAIAMLIGPDAPISFESKLRGSHMSHVYDFYKPNLASEYPVVDGKLSQX

SEQ ID NO: 19667 - protein, 125 aa, Glycine max
MSTRPENIGIKAIEIYFPNQCVEQSELEKFDGVSTGKYTIGLAQTKMALCDDREDIYSLALTVTHSLLEKYSIDPNSIGRIEVGTETILDKSKSVKSVLMQLFPENKSIEGGDNVNACYCGTNAL

SEQ ID NO: 19668 - protein, 202 aa, Glycine max
  unsure (1)..(202): unsure at all Xaa locations
CPGNVAILAIAIYLHTTCTTXHAXKGHDGVSKGKXTIGLGQDRMDFXSEDEDVISMNLTVVTSLLEKCNVDPKQRGHLWTGSETGIDKSILFKTLLKQVFDASGNTDIEGEDSTNASYGGTDALFNCETWLESNSWHGRYGLGACTNTGAYTERPAGPTGXCGGIAMLARPDAAIGNESILMSSHMLQAYEFYKPNLAIEYX

SEQ ID NO: 19669 - protein, 171 aa, Glycine max
  unsure (1)..(171): unsure at all Xaa locations
XVLTLRIKLSISVAFEYNIXXLLVXNTQKYGNTNIEGVDSTNACYGGTAALFNCVNWVESSSWDGRYXLLVCTDSAVYAEGPARHTGGAAAVAMLIGPNAPIAFESKLRGSXMAHAYDFYKPNLASEYPVVDGKLSQTCYLMALDSCYNHLSHKYDIQEGMQFSISDAEYX

SEQ ID NO: 19670 - protein, 70 aa, Glycine max
  unsure (1)..(70): unsure at all Xaa locations
XFRLEGTAALFNCVNWVESNSWDGRYGLVVCTDSAVYAEGPARPTGGAAAIAMLIGPDAPISFESKLRGX

SEQ ID NO: 19671 - protein, 112 aa, Glycine max
  unsure (1)..(112): unsure at all Xaa locations
HSIKHTMLNNVGILAIDVYFPAGCGQQEALDTHDGTIQGNYSIGLGQHCMXTFCTELKDVISMSLTVVTYVLEKNGIDPKQIGRLEDVSETVIDKSKSIKTFYIIRRSASGM

SEQ ID NO: 19672 - protein, 78 aa, Glycine max
  unsure (1)..(78): unsure at all Xaa locations
MMTSRLTCTNSQVYAKGPARPTGGAAAVAMLIGPDAPISFESKLRGSHMAHAYXXXKPNLASEYPIRCSASLHFLARM

SEQ ID NO: 19673 - protein, 141 aa, Glycine max
LYAAFASFIHNKNSTLAGKRVILFSYGSGLTATMFSLQFRDSQHPFSLSNIAKVMDVDGKLKSRHEFPPEEFVENLKLMEHRYGGKEFVTSKDTSLLSPGTFYLTEVDSMYRRFYSKKTKESTAENGVIANGVANGIANGH

SEQ ID NO: 19674 - protein, 464 aa, Hevea brasiliensis
MAKNVGILAVDIYFPPTFVQQEALEAHDGASKGKYTIGLGQDCMAFCTEVEDVISMSLTAVTSLLDKYNIDPKQIGRLEVGSETVIDKSKSIKTFLMQIFEKFGNTDIEGVDSTNACYGGTAALFNCVNWVESSSWDGRYGLVVCTDSAVYAEGPARPTGGAAAIAILVGPDAPIAFESKFRGSHMSHAYDFYKPNLASEYPVVDGKLSQTCYLMALDSCYKHFCAKYEKFEGKQFSISDAEYFVFHSPYNKLVQKSFARLVFNDFVRNARSIDETAKEKLAPFSNLSGDESYQNRDLEKVSQQVAKPLYDAKVKPTTLIPKQVGNMYTASLYAAFASLLHSKHTELAGKRVTLFSYGSGLTATMFSLRLHEGQHPFSLSNIASVMNVAGKLKARHELPPEKFVNIMKLMEHRYGAKDFVRSKDCSLLASGTYYLTEVDSLYRRFYAQKAVGNTVENGLLANGH

SEQ ID NO: 19675 - protein, 464 aa, Hevea brasiliensis
MAKNVGILAVDIYFPPTFVQQEALEAHDGASKGKYTIGLGQDCMAFCTEVEDVISMSLTAVTSLLDKYNIDPKQIGRLEVGSETVIDKSKSIKTFLMQIFEKFGNTDIEGVDSTNACYGGTAALFNCVNWVESSSWDGRYGLVVCTDSAVYAEGPARPTGGAAAIAILVGPDAPIAFESKFRGSHMSHAYDFYKPNLASEYPVVDGKLSQTCYLMALDSCYKHFCAKYEKFEGKQFSISDAEYFVFHSPYNKLVQKSFARLVFNDFVRNASSIDETAKEKLAPFSNLSGDESYQNRDLEKVSQQVAKPLYDAKVKPTTLIPKQVGNMYTASLYAAFASLLHSKHTELAGKRVTLFSYGSGLTATMFSLRLHEGQHPFSLSNIASVMNVAGKLKARHELPPEKFVDIMKLMEHRYGAKDFVTSKDCSLLASGTYYLTEVDSLYRRFYAQKAVGNTVENGLLANGH

SEQ ID NO: 19676 - protein, 146 aa, Zea mays
  unsure (1)..(146): unsure at all Xaa locations
VSPDLXTYLSIESFYHRSXKLIITCVFPYSGQRIVMFSYGSGLTSTMFSLRLNNGQHPFSLSNIASVLDVTEKLQSRHETLPEKFVETLKLMEHRYGAKDFETSRDTSLLQPGTFYLTKVDSMYRRFYSQKLCGKTKCCNGLANGH

SEQ ID NO: 19677 - protein, 150 aa, Zea mays
  unsure (1)..(150): unsure at all Xaa locations
VSPDLXTIYLWSLLPSFLKADNYLCVSLQNGQRIVMFSYGSGLTSTMFSLRLNNGQHPFSLSNIGSVLGVTEKPQSRHETLPEKFVETLKLMEHRYGAKDFETSSDTSLLQPGTFYLTKVDSMYRRFYSQKPAEETGENQVLQRLXANGH

SEQ ID NO: 19678 - protein, 126 aa, Homo sapiens
FSTASAVPLAKTDTWPKDVGILALEVYFPAQYVDQTDLEKYNNVEAGKYTVGLGQTRMGFCSVQEDINSLCLTVVQRLMERIQLPWDSVGRLEVGTETIIDKSKAVKTVLMELFQDSGNTDIEGID

SEQ ID NO: 19679 - protein, 487 aa, Streptomyces coelicolor A3(2)
MSQRVLTTESGAPVADNQNSASAGIGGPLLIQDQHLIEKLARFNRERIPERVVHARGSGAYGHFEVTDDVSGFTHADFLNTVGKRTEVFLRFSTVADSLGGADAVRDPRGFALKFYTEEGNYDLVGNNTPVFFIKDPIKFPDFIHSQKRDPFTGRQEPDNVFDFWAHSPEATHQITWLMGDRGIPASYRHMDGFGSHTYQWTNARGESFFVKYHFKTDQGIRCLTADEAAKLAGEDPTSHQTDLVQAIERGVYPSWTLHVQLMPVAEAANYRFNPFDVTKVWPHADYPLKRVGRLVLDRNPDNVFAEVEQAAFSPNNFVPGIGPSPDKMLQGRLFAYADAHRYRLGVNHTQLAVNAPKAVPGGAANYGRDGLMAANPQGRYAKNYEPNSYDGPAETGTPLAAPLAVSGHTGTHEAPLHTKDDHFVQAGALYRLMSEDEKQRLVANLAGGLSQVSRNDVVEKNLAHFHAADPEYGKRVEEAVRALRED

SEQ ID NO: 19680 - protein, 487 aa, Streptomyces coelicolor A3(2)
MPENNQKPLTTVAGAPVPDNQNSLTSGPRGPMLLQDVWFLEKLAHFDREVIPERRMHAKGSGAFGTFTVTHDITRYTSAKIFSEIGKKTPLFTRFSTVAGERGAADAERDIRGFAVKFYTDEGNWDLVGNNTPVFFFRDPLKFPDLNHAVKRDPRTNLRNAENNWDFWTNLPEALHQVTIVMSDRGIPASYRHMHGFGSHTYSLINAEGERFWVKFHHRTQQGIKNLTDAEAEALVGKDRESHQRDLFDAIEDGDFPKWKLFIQVMPEADAENYRFHPFDLTKVWSKKDYPLIEVGEWELNRNPDNYFADVEQAAFSPANVVPGISFSPDRMLQGRLFSYGDAQRYRLGVNHHQIPVNAPKNPVNSYHRDGAMRVDGNQGATPGVEPNSYGRWQEQPAYRDPAQAVGAVADRFNYREDDDNYFEQPGNLFRQMSPEQQQVLFENTARAIDGASAQTIERHIGNCTQADPAYGAGVRKAIEALAAGNL

SEQ ID NO: 19681 - protein, 506 aa, Streptomyces coelicolor A3(2)
MTDTPPATTTDSGAPAESDEHSLTAGPAGPVLLQDAYLIEQMAQFNRERIPERQPHAKGSGAFGHFEVTHDVSAYTKAAVFQPGTRTDLVARFSTVAGERGSPDTWRDPRGFAVKFYTSQGNYDMVGNNTPVFFVKDPMKFQHFIRSQKRRADSNLRDHDMQWDFWTLSPESAHQVTWLMGDRGIPRTWRHMNGYTSHTYMWINASGERFWVKYHFKTDQGIEYFTQHEADQMAAADTDYHMRDLFEHIRDGDFPSWTLHVQVMPYEEAAGYRFNPFDLTKVWPHGDYPLIPVGRMTLERNPTDNHAEIEQAAFQPNNLVPGIGPSPDRMLLARLFSYADAHRYRIGANYQQLPVNAPVVDVRTYSKDGAMAYRKTTDPVYAPNSKGGPAADTEHFGTPPSWETDGSITRTAYVSHAEDDDWGQPGTLVREVMDDAARDRLVDNVVDHLLNEVTEPVLQRAFAYWSNIDRTIGDRIAKGVRAKAGEKDFKAAEQRNPARQAMQDKA

SEQ ID NO: 19682 - protein, 527 aa, Mus musculus
MSDSRDPASDQMKQWKEQRASQRPDVLTTGGGNPIGDKLNIMTAGSRGPLLVQDVVFTDEMAHFDRERIPERVVHAKGAGAFGYFEVTHDITRYSKAKVFEHIGKRTPIAVRFSTVTGESGSADTVRDPRGFAVKFYTEDGNWDLVGNNTPIFFIRDAILFPSFIHSQKRNPQTHLKDHDMVWDFWSLRPESLHQVSFLFSDRGIPDGHRHMNGYGSHTFKLVNADGEAVYCKFHYKTDQGIKNLPVGEAGRLAQEDPDYGLRDLFNAIANGNYPSWTFYIQVMTFKEAETFPFNPFDLTKVWPHKDYPLIPVGKLVLNKNPVNYFAEVEQMAFDPSNMPPGIEPSPDKMLQGRLFAYPDTHRHRLGPNYLQIPVNCPYRARVANYQRDGPMCMHDNQGGAPNYYPNSFSAPEQQRSALEHSVQCAVDVKRFNSANEDNVTQVRTFYTKVLNEEERKRLCENIAGHLKDAQLFIQKKAVKNFTDVHPDYGARIQALLDKYNAEKPKNAIHTYTQAGSHMAAKGKANL

SEQ ID NO: 19683 - protein, 527 aa, Mus musculus
MSDSRDPASDQMKQWKEQRASQRPDVLTTGGGNPIGDKLNIMTAGSRGPLLVQDVVFTDEMAHFDRERIPERVVHAKGAGAFGYFEVTHDITRYSKAKVFEHIGKRTPIAVRFSTVAGESGSADTVRDPRGFAVKFYTEDGNWDLVGNNTPIFFIRDAILFPSFIHSQKRNPQTHLKDPDMVWDFWSLRPESLHQVSFLFSDRGIPDGHRHMNGYGSHTFKLVNADGEAVYCKFHYKTDQGIKNLPVGEAGRLAQEDPDYGLRDLFNAIANGNYPSWTFYIQVMTFKEAETFPFNPFDLTKVWPHKDYPLIPVGKLVLNKNPVNYFAEVEQMAFDPSNMPPGIEPSPDKMLQGRLFAYPDTHRHRLGPNYLQIPVNCPYRARVANYQRDGPMCMHDNQGGAPNYYPNSFSAPEQQRSALEHSVQCAVDVKRFNSANEDSVTQVRTFYTKVLNEEERKRLCENIAGHLKDAQLFIQKKAVKNFTDVHPDYGARIQALLDKYNAEKPKNAIHTYTQAGSHMAAKGKANL

SEQ ID NO: 19684 - protein, 527 aa, Mus musculus
MSDSRDPASDQMKQWKEQRASQRPDVLTTGGGNPIGDKLNIMTAGSRGPLLVQDVVFTDEMAHFDRERIPERVVHAKGAGAFGYFEVTHDITRYSKAKVFEHIGKRTPIAVRFSTVAGESGSADTVRDPRGFAVKFYTEDGNWDLVGNNTPIFFIRDAILFPSFIHSQKRNPQTHLKDPDMVWDFWSLRPESLHQVSFLFSDRGIPDGHRHMNGYGSHTFKLVNADGEAVYCKFHYKTDQGIKNLPVGEAGRLAQEDPDYGLRDLFNAIANGNYPSWTFYIQVMTFKEAETFPFNPFDLTKVWPHKDYPLIPVGKLVLNKNPVNYFAEVEQMAFDPSNMPPGIEPSPDKMLQGRLFAYPDTHRHRLGPNYLQIPVNCPYRARVANYQRDGPMCMHDNQGGAPNYYPNSFSAPEQQRSALEHSVQCAVDVKRFNSANEDNVTQVRTFYTKVLNEEERKRLCENIAGHLKDAQLFIQKKAVKNFTDVHPDYGARIQALLDKYNAEKPKNAIHTYTQAGSHMAAKGKANL

SEQ ID NO: 19685 - protein, 527 aa, Mus musculus
MSDSRDPASDQMKQWKEQRASQRPDVLTTGGGNPIGDKLNIMTAGSRGPLLVQDVVFTDEMAHFDRERIPERVVHAKGAGAFGYFEVTHDITRYSKGKVFEHIGKRTPIAVRFSTVAGESGSADTVRDPRGFAVKFYTEDGNWDLVGNNTPIFFIRDAILFPSFIHSQKRNPQTHLKDPDMVWDFWSLRPESLHQVSFLFSDRGIPDGHRHMNGYGSHTFKLVNADGEAVYCKFHYKTDQGIKNLPVGEAGRLAQEDPDYGLRDLFNAIANGNYPSWTFYIQVMTFKEAETFPFNPFDLTKVWPHKDYPLIPVGKVVLNKNPVNYFAEVEQMAFDPSNMPPGIEPSPDKKLQGRLFAYPDTHRHRLGPNYLQIPVNCPYRARVANYQRDGPMCMHDNQGGAPNYYPNSFSAPEQQRSALEHSVQCAVDVKRFNSANEDNVTQVRTFYTKVLNEEERKRLCENIAGHLKDAQLFIQKKAVKNFTDVHPDYGARIQALLDKYNAEKPKNAIHTYTQAGSHMAAKGKANL

SEQ ID NO: 19686 - protein, 527 aa, Rattus norvegicus
MADSRDPASDQMKQWKEQRAPQKPDVLTTGGGNPIGDKLNIMTAGPRGPLLVQDVVFTDEMAHFDRERIPERVVHAKGAGAFGYFEVTHDITRYSKAKVFEHIGKRTPIAVRFSTVAGESGSADTVRDPRGFAVKFYTEDGNWDLVGNNTPIFFIRDAMLFPSFIHSQKRNPQTHLKDPDMVWDFWSLCPESLHQVTFLFSDRGIPDGHRHMNGYGSHTFKLVNANGEAVYCKFHYKTDQGIKNLPVEEAGRLAQEDPDYGLRDLFNAIASGNYPSWTFYIQVMTFKEAETFPFNPFDLTKVWPHKDYPLIPVGKLVLNRNPANYFAEVEQMAFDPSNMPPGIEPSPDKMLQGRLFAYPDTHRHRLGPNYLQIPVNCPYRARVANYQRDGPMCMHDNQGGAPNYYPNSFSAPEQQGSALEHHSQCSADVKRFNSANEDNVTQVRTFYTKVLNEEERKRLCENIANHLKDAQLFIQRKAVKNFTDVHPDYGARVQALLDQYNSQKPKNAIHTYVQAGSHIAAKGKANL

SEQ ID NO: 19687 - protein, 527 aa, Cavia porcellus
MADSRDPASDQMKHWKEERAAQKPDVLTTAGGNPVGDKLNIMTVGPRGPLLVQDVVFTDEMAHFDRERIPERVVHAKGAGAFAYFEVTHDITKYCKAKVFEHIGKKTPIAVRFSTVAGESGSADTVRDPRGFAVKFYTEEGIWDLVGNNTPIFFIRDALLFPSFIHSQKRNPQTHLKDPDMMWDFWSLRPESLHQVSFLFSDRGIPDGHRHMNGYGSHTFKLVNGSGEAVYCKFHYKTDQGIKNLSVEDAARLSQEDPDYGLRDLFNAIATGNYPSWTLYIQVMTFQQAQSFPFNPFDLTKIWPHKDYPLIPVGKLVLNRNPVNYFAEVEQIAFDPSNMPPGIEPSPDKMLQGRLFAYPDTHRHRLGPNYLQIPVNCPYRTRVANYQRDGPMCVTDNQGGAPNYYPNSFSAPVEQRQALEHTSRCSGDVGRYNSTDDDNVTQVRAFYTQVLNEEQRRRLCENIAGHLKDAQLFIQKKAVKNFMDVHPDYGNRIQTLLDKYNVEKPKNAIHTFVQDGSHLSAKEKANL

SEQ ID NO: 19688 - protein, 137 aa, Cavia porcellus
MADSRDPADQMKHWKEERAAQKPDVLTTAGGNPVGDKLNIMTVGPRGPLLVQDVVFTDEMAHFDRERIPERVVHAKGAGAFGYFEVTHDITKYCKAKVFEHIGKKTPIAVRFSTVAGESGSADTVRDPRGFAVKFYT

SEQ ID NO: 19689 - protein, 121 aa, Cavia porcellus
DQMKHWKEERAAQKPDVLTTAGGNPVGDKLNIMTVGPRGPLLVQDVVFTDEMAHFDRERIPERVVHAKGAGAFGYFEVTHDITKYCKAKVFEHIGKKTPIAVRFSTVAGESGSADTVRDPR

SEQ ID NO: 19690 - protein, 488 aa, Rhodobacter sphaeroides
MTRMTTTAGAPIADNQNTLTAGPRGPVLLEDYQLIEKLAHQNRERIPERVVHAKGWGAFGTFTVTNDITRYSCAKVFSEVGKQTDLAVRFSTVAGELGAADHERDVRGFSVKMYTEEGNWDLAGNNTPVFFVRDPMKFPDFIHTQKRHPRTNLRSATAMWDFWSLSPESLHQVTILMSDRGLPVDPMHMNGYGSHTYSLWNAQGERFWVKFHWKTLQGHAHYTNAEAAEIVGRTREGYQEALFGAIEEGRFPKWRLMVQVMPEAEAETTPYNPFDLTKVWPHSDYPLIEVGVMELNRNADNYFAQIEQLAFSPSNKVPGIGYSPDKMLQARVFSYADAHRYRLGTHYEALPVNAPRCPVHHYHKDGQMNFFGHRTGAVDAYYEPNSVPGAAVEDPAVAEPPLRISGDAARYNHREGNDDYSQPRALHDKVMTDEQRARLYANIAEAMAGIPEEIANRAIAQFDRVSPAYGEGIRAARARLAGALQAAE

SEQ ID NO: 19691 - protein, 485 aa, Porphyromonas gulae
MEKNKLTTAAGAPVADNQNVATAGKRGPMLLQDVWFLEKLAHFDREVIPERRMHAKGSGAFGTFTVTHDITKYTKAAIFSEIGKQTELFVRFSTVAGERGAADAERDIRGFAIKFYTEEGNWDLVGNNTPVFFLRDPLKFPDLNHVVKRDPRTNMRSPQNNWDFWTLLPEALHQVTITMSDRGIPASYRHMHGYGSHAFSFINAEGVRHWVKFHLHTQQGIKNLTDAEAEALIGKDRESHQRDLFESIERGDYPRWTLKVQIMTEEEAKALPYNPFDLTKVWSQKDFPLIEVGVMELNRNPENYFADVEQSAFNPANVVPGISFSPDRMLQGRLFSYGDTQRYRLGVNHHQIPVNRSRCPFLNMYHRDGAMRVDGNFGSRLGYEPNSYGHWQDQNEYKEPPLELDGAAYQWDFREDDSDYYSQPRKLFHIMSPDQQQVLFDNTARAMGDIPKEIKLRHIANCYKADPDYGKGVAKALGLDVNEAL

SEQ ID NO: 19692 - protein, 398 aa, Hordeum vulgare subsp. vulgare
VQTPVIVRFSTVVHERGSPETLRDPRGFAVKFYTREGNFDLVGNNMPVFFIRDGMKFPDMVHAFKPSPKTNMQENWRVVDFFSHHPESLHMFTFLFDDVGIPLNYRHMDGFGVNTYTLISRDGKAHLVKFHWKPTCGVKCLLDDEAVTVGGTCHTHATKDLTDSIAAGNYPEWKLFIQTIDADHEDRFDFDPLDVTKTWPEDIIPLQPVGRMVLNKNIDNFFAENEQLAFCPAVTVPGIHYSDDKLLQTRIFSYADTQRHRLGPNYLMLPVNAPKCAHHNNHHDGLMNFIHRDEEVNYFPSRFDPTRHAEKYPMPPRVLSGCREKCIIDKENNFKQAGERYRSFDPARQDRFLQRWVDALTDARVTHEIQSIWVSYWSQCDASLGQKLASRLKIKPNM

SEQ ID NO: 19693 - protein, 339 aa, Synechococcus sp. PCC 7942
MIRIRNRWFRWLAIALASLVASIGIATVGFAATGVTPDQVLSAIEGTFGVNVGQRRNHIKGTCAVGNFVATTEAKTYSRSPLFSGQSIPVVARFSLAGGNPKAPDTAKNPRGLGLQFQLPNNRFLNMALLNTPVFGVASPEGFYENILAIRPDPTTGKPDPEKVKAFREKYPENKAQAAFLASNNPPTSYANTSYFGLHAFKFINQTNQTRLVRWQFVPQDGEKRLTDAELQAAPANFLEQKLIERTQDSPVKWDFWITLGQPGDAEDNPTIAWPSDRQQVKVGTLTLTAASPQPGAACEGINYDPLVLSDGIEPTNDPVLQFRSGVYALSYSKRTRGL

SEQ ID NO: 19694 - protein, 365 aa, Synechococcus sp. PCC 7942
MTVVIYYMTVLCKAFDCFNSSAVENTMIRIRNRWFRWLAIALASLVASIGIATVGFAATGVTPDQVLSAIEGTFGVNVGQRRNHIKGTCAVGNFVATTEAKTYSRSPLFSGQSIPVVARFSLAGGNPKAPDTAKNPRGLGLQFQLPNNRFLNMALLNTPVFGVASPEGFYENILAIRPDPTTGKPDPEKVKAFREKYPENKAQAAFLASNNPPTSYANTSYFGLHAFKFINQTNQTRLVRWQFVPQDGEKRLTDAELQAAPANFLEQKLIERTQDSPVKWDFWITLGQPGDAEDNPTIAWPSDRQQVKVGTLTLTAASPQPGAACEGINYDPLVLSDGIEPTNDPVLQFRSGVYALSYSKRTRGL

SEQ ID NO: 19695 - protein, 483 aa, Ralstonia metallidurans
MTMNKLTTAFGAPVVDNQNVQTAGPRGPALLQDVWFLEKLAHFDREVIPERRMHAKGAGAYGTFTVTHDITKYTRANLFSQVGKKTDLFLRFSSVAGERGAADAERDIRGFAIKFYTEEGNWDLVGNNTPVFFLRDPLKFPDLNHAVKRDPRTGMRSAESNWDFWTGLPEALHQVTIVMSDRGIPRTWRHMHGFGSHTYSFINANMERFWVKFHFVTQQGIQNLTDEEAAEITGQDREYHQRDLFESIERGDFPRWKLCVQIMPEAEASKVPYHPFDLTKIWPKKDYPLIEVGVLELNRNPDNFFAEVEQASFAPSTIVPGVGFSPDKMLQGRLFSYGDAARYRVGVNHHQIPVNSPKAAKYVNSYHRDGTMRVDGNRGAAIGYEPNTKGEWAEQPDFREPPLTLEGTADHWNHREDGDYFSQVGALFRLMSPTQQQALFDNTARSIKGVSKHIQQTHIKHCTAADPAYGAGVAAAIEMIEAK

SEQ ID NO: 19696 - protein, 504 aa, Neisseria meningitidis MC58
MTTSKCPVTHLTMNNGAPVADNQNSLTAGPRGPLLAQDLWLNEKLADFVREVIPERRMHAKGSGAFGTFTVTHDITKYTRAKIFSEVGKKTEMFARFTTVAGERGAADAERDIRGFALKFYTEEGNWDVVGNNTPVFFLRDPRKFPDLNKAVKRDPRTNMRSATNNWDFWTLLPEALHQVTIVMSDRGIPAGYRHMHGFGSHTYSFWNEAGERFWVKFHFRTQQGIKNLTNEEAAKIIADDRESHQRDLYEAIERGEFPKWTMYIQVMPEADAEKVPYHPFDLTKVWPKKDYPLIEVGEFELNRNPENFFADVEQSAFAPSNLVPGVGASPDKMLQARLFNYADAQRYRLGVNFRQIPVNRPRCPVHSNQRDGQGRADGNYGSLPHYEPNSFGQWQQQPDFAEPPLKINGDAAHWDYRQDDDDYFSQPRALFNLMNDAQKQALFGNTAAAMGDAPDFIKYRHIRNCYRCDPAYGEGVAKALGLTVEDAQAARATDPALGQAGLL

SEQ ID NO: 19697 - protein, 492 aa, Suaeda maritima subsp. salsa
MDPYKFRPSSANNSPYFTANSGAPVWNNNNSLTVGHRGPILLEDYHLVEKLANFDRERIPERVVHARGASAKGFFEVTHDVSHLTCADFLRSPGVQTPVIVRFSTVIHERGSPETIRDPRGFAVKFYTREGNFDLVGNNFPVFFIRDGMKFPDMVHSLKPNPKSHIQENWRIMDFFSHHPESLHMFTFLFDDIGIPANYRHMEGSGVNTYTLINKAGKTYYVKFHWKPTCGVKSLLEDEAIKVGGANHSHATQDLYDSIASGNYPEWKLFIQTIDPADEDKFDFDPLDVTKTWPEDILPLQPVGRLVLNKNIDNFFAENEQLAFCPSIVVPGVHYSDDKLLQTRIFSYSDTQRHRLGPNYLQLPVNAPKCSHHNNHYDGFMNFMHRDEEVDYFPSRYDPVRHAERYPIPSNVLNGCREKQCIPKENNFKQPGERYRSMDPARQERFICRVVDALSDPRVTHEIRSIWISYWSQADKSLGMKVASRLNVRPTM

SEQ ID NO: 19698 - protein, 503 aa, Micrococcus luteus
MEHQKTTPHATGSTRQNGAPAVSDRQSLTVGSEGPIVLHDTHLLETHQHFNRMNIPERRPHAKGSGAFGEFEVTEDVSKYTKALVFQPGTKTETLLRFSTVAGELGSPDTWRDVRGFALRFYTEEGNYDLVGNNTPIFFLRDPMKFTHFIRSQKRLPDSGLRDATMQWDFWTNNPESAHQVTYLMGPRGLPRTWREMNGYGSHTYLWVNAQGEKHWVKYHFISQQGVHNLSNDEATKIAGENADFHRQDLFESIAKGDHPKWDLYIQAIPYEEGKTYRFNPFDLTKTISQKDYPRIKVGTLTLNRNPENHFAQIESAAFSPSNTVPGIGLSPDRMLLGRAFAYHDAQLYRVGAHVNQLPVNRPKNAVHNYAFEGQMWYDHTGDRSTYVPNSNGDSWSDETGPVDDGWEADGTLTREAQALRADDDDFGQAGTLVREVFSDQERDDFVETVAGALKGVRQDVQARAFEYWKNVDATIGQRIEDEVKRHEGDGIPGVEAGGEARM

SEQ ID NO: 19699 - protein, 503 aa, Micrococcus luteus
MEHQKTTPHATGSTRQNGAPAVSDRQSLTVGSEGPIVLHDTHLLETHQHFNRMNIPERRPHAKGSGAFGEFEVTEDVSKYTKALVFQPGTKTETLLRFSTVAGELGSPDTWRDVRGFALRFYTEEGNYDLVGNNTPIFFLRDPMKFTHFIRSQKRLPDSGLRDATMQWDFWTNNPESAHQVTYLMGPRGLPRTWREMNGYGSHTYLWVNAQGEKHWVKYHFISQQGVHNLSNDEATKIAGENADFHRQDLFESIAKGDHPKWDLYIQAIPYEEGKTYRFNPFDLTKTISQKDYPRIKVGTLTLNRNPENHFAQIESAAFSPSNTVPGIGLSPDRMLLGRAFAYHDAQLYRVGAHVNQLPVNRPKNAVHNYAFEGQMWYDHTGDRSTYVPNSNGDSWSDETGPVDDGWEADGTLTREAQALRADDDDFGQAGTLVREVFSDQERDDFVETVAGALKGVRQDVQARAFEYWKNVDATIGQRIEDEVKRHEGDGIPGVEAGGEARI

SEQ ID NO: 19700 - protein, 498 aa, Micrococcus luteus
TTPHATGSTRQNGAPAVSDRQSLTVGSEGPIVLHDTHLLETHQHFNRMNIPERRPHAKGSGAFGEFEVTEDVSKYTKALVFQPGTKTETLLRFSTVAGELGSPDTWRDVRGFALRFYTEEGNYDLVGNNTPIFFLRDPMKFTHFIRSQKRLPDSGLRDATMQWDFWTNNPESAHQVTYLMGPRGLPRTWREMNGYGSHTYLWVNAQGEKHWVKYHFISQQGVHNLSNDEATKIAGENADFHRQDLFESIAKGDHPKWDLYIQAIPYEEGKTYRFNPFDLTKTISQKDYPRIKVGTLTLNRNPKNHFAQIESAAFSPSNTVPGIGLSPDRMLLGRAFAYHDAQLYRVGAHVNQLPVNRPKNAVHNYAFEGQMWYDHTGDRSTYVPNSNGDSWSDETGPVDDGWEADGTLTREAQALRADDDDFGQAGTLVREVFSDQERDDFVETVAGALKGVRQDVQARAFEYWKNVDATIGQRIEDEVKRHEGDGIPGVEAGGEARI

SEQ ID NO: 19701 - protein, 497 aa, Micrococcus luteus
VPHATGSTRENGAPAVSDRESLTVGSEGPIVLHDVHLLETHQHFDRMNIPERRPHAKGSGAFGVFEVTEDVSSYTKALVFEPGVETEVLLRFSTVAGENGSPDTWRDTRGFALRFYTSEGNYDLVGNNTPIFFLRDPMKFTHFIRSQKRLPNSGLRDATMEWDFWTNNPESAHQVTYLMGPRGLPRTWREMDGYGSHTYLWVNAEGAKHWVKYHFISQEGVHNLSNDEATQIAGENADFHRQDLFEVIAKGVFPKWNLYIQAIPYSQGKTYRFNPFDLTKTISQANYPRIKVGVNTLNRNPKNFFAEIESAAFSPSNTVPGIGLSPDRMLLGRAFAYHDAQLYRVGAHVNQLPVNSPDDATHNYAFEGEMWEDHTGNRSTYVPNSDGNSWSNEVGPTNNGWEAVGVLTREAEALRANDNNFGEAGTLTREVFSNEERNNFVQTVAGALKGVRSNVEAEAFVYWKLVNATNGERIQNTVKRKSGNGIPGVEAGGEARM

SEQ ID NO: 19702 - protein, 503 aa, Micrococcus luteus
  unsure (1)..(503): unsure at all Xaa locations
MEHQKTTPHATGSTRQNGAPAVSDRQSLTVGSEGPIVLHDTHLLETHQHFNRXNIPERRPHAKGSGAFGEFEVTEDVSKYTKALVFQPGTKTETLLRFSTVAGELGSPDTWRDVRGFALRFYTEEGNYDLVGNNTPIFFLRDPXKFTHFIRSQKRLPDSGLRDATXQWDFWTNNPESAHQVTYLXGPRGLPRTWREMNGYGSHTYLWVNAQGEKHWVKYHFISQQGVHNLSNDEATKIAGENADFHRQDLFESIAKGDHPKWDLYIQAIPYEEGKTYRFNPFDLTKTISQKDYPRIKVGTLTLNRNPENHFAQIESAAFSPSNTVPGIGLSPDRMLLGRAFAYHDAQLYRVGAHVNQLPVNRPKNAVHNYAFEGQXWYDHTGDRSTYVPNSNGDSWSDETGPVDDGWEADGTLTREAQALRADDDDFGQAGTLVREVFSDQERDDFVETVAGALKGVRQDVQARAFEYWKNVDATIGQRIEDEVKRHEGDGIPGVEAGGEARI

SEQ ID NO: 19703 - protein, 505 aa, Staphylococcus aureus
MSQQDKKLTGVFGHPVSDRENSMTAGPRGPLLMQDIYFLEQMSQFDREVIPERRMHAKGSGAFGTFTVTKDITKYTNAKIFSEIGKQTEMFARFSTVAGERGAADAERDIRGFALKFYTEEGNWDLVGNNTPVFFFRDPKLFVSLNRAVKRDPRTNMRDAQNNWDFWTGLPEALHQVTILMSDRGIPKDLRHMHGFGSHTYSMYNDSGERVWVKFHFRTQQGIENLTDEEAAEIIATDRDSSQRDLFEAIEKGDYPKWTMYIQVMTEEQAKNHKDNPFDLTKVWYHDEYPLIEVGEFELNRNPDNYFTDVEQAAFAPTNIIPGLDFSPDKMLQGRLFSYGDAQRYRLGVNHWQIPVNQPKGVGIENICPFSRDGQMRVVDNNQGGGTHHYPNNHGKFDSQPEYKKPPFPTDGYGYEYNQRQDDDNYFEQPGKLFRLQSEDAKERIFTNTANAMEGVTDDVKRRHIRHCYKADPEYGKGVAKALGIDINSIDLETENDETYENFEK

SEQ ID NO: 19704 - protein, 455 aa, Staphylococcus aureus
MSQQDKKLTGVFGHPVSDRENSMTAGPRGPLLMQDIYFLEQMSQFDREVIPERRMHAKGSGAFGTFTVTKDITKYTNAKIFSEIGKQTEMFARFSTVAGERGAADAESDIRGFALKFYTEEGNWDLVGNNTPVFFFRDPKLFVSLNRAVKRDPRTNMRDAQNNWDFWTGLPEALHQVTILMSDRGIPKDLRHMHGFGSHTYSMYNDSGERVWVKLHFRTQQGIENLTDEEAAEIIATGRDSSQRDLFEAIEKGDYPKWTMYIQVMTEEQAKNHKDNPFDLTKVWYHDEYPLIEVGEFELNRNPDNYFMDVEQVAFASTNIIPGLDFSPDKMLQGRLFSYGDAQRYRLGVNHWQIPVNQPKGVGIENICPFSRDGQMRVVDNNQGGGTHYYPNNHGKFDSQPEYKKPPFPTDGYGYEYNQRQDDDNYFEQPGKLFRLQSEGAKERILQIQQMQWKA

SEQ ID NO: 19705 - protein, 493 aa, Staphylococcus xylosus
MKRKLTGLFGAPVSDRENSMTAGPRGPLLMQDIYFLEQMAHFDREVIPERRMHAKGSGAFGTFTVTNDITKYTCASIFAEVGKQTEMFARFSTVAGERGAGDAERDIRGFALKFYTDEGNWDLVGNNTPVFFFRDPKLFPSLNHVVKRNPKTNMKDPQANWDFWTLLPEALHQITILMTDRGIPKGFRNMHGFGSHTYSMYNDKGERFWVKFHHRTQQGIENYSAEEAEQVMAKDRDSSQRDLFNNIEQGNFPKWKMYIQVMTEEQARNHKDNPFDLTKVWYKDEYPLIEVGEFELNRNPENYFQDVEQAAFAPTNIVPGLDFSPDKMLQGRLFSYGDTQRYRLGVNHWQIPVNQPKGVGMENICPFSRDGHMRILDNNQGASTHYYPNSNGAFEDQPQYKKPALDIQGQAYEYDFREDDDNYFEQPGKLFRLLSSEEQQILFNNTANEMSPVTDALKHRHIRHCYKADPAYGQGVAEAMGIDINEVDLDVAD

SEQ ID NO: 19706 - protein, 505 aa, Staphylococcus warneri
MSKQDGKLTGLFGAPVSDRENSMTAGPRGPLLMQDIYFLEQMSHFDREVIPERRMHAKGSGAFGTFTVTNDITQYTSAKMFSEVGKQTEMFARFSTVSGERGAADAERDIRGFALKFYTEDGNWDLVGNNTPVFFFRDPKLFVSLNRAVKRDPRTNMRSAQNNWDFWTGLPEALHQVTILMSDRGIPKDLRHMHGFGSHTYSMYNDKGERVWVKYHFRTQQGIENLTDEEAANVIATDRDSSQRDLFNAIENGDYPKWKMYIQVMTEEQARNHKDNPFDLTKVWYHGDYPLIEVGEFELNRNPNNYFQDVEQAAFAPTNIVPGLDYSPDKMLQGRLFPYGDAQRYRLGVNHWQIPVNQPKGVGIENLCPFSRDGQMRILDDNQGGGPHYYPNNQGVYDSQPEFKKPPFPADGDGYEYNQRQDDDNYFEQPGKLFRLQSDEAKERIFTNTANAMDGVTEDVKRRHIRHCYKADPDYGKGVAKALGIDINSIDLEGEQDETYENFKN

SEQ ID NO: 19707 - protein, 536 aa, Deinococcus radiodurans
MSDENNKGVGTAVQGVGGPRDGRTAPGEQGTTLTTRQGHPVHDNQNSRTVGSRGPMTLENYQFIEKLSHFDRERIPERVVHARGVGAHGVFRATGKVGDEPVSKYTRAKLFQEDGKETPVFVRFSTVGHGTHSPETLRDPRGFAVKFYTEDGNWDLVGNNLKIFFIRDALKFPDLIHSQKPSPTTNIQSQERIFDFFAGSPEATHMITLLYSPWGIPASYRFMQGSGVNTYKWVNDQGEGVLVKYHWEPVQGVRNLTQMQADEVQATNFNHATQDLHDAIERGDFPQWDLFVQIMEDGEHPELDFDPLDDTKIWPREQFPWRHVGQMTLNRNPENVFAETEQAAFGTGVLVDGLDFSDDKMLQGRTFSYSDTQRYRVGPNYLQLPINAPKKHVATNQRDGQMAYRVDTFEGQDQRVNYEPSLLSGPKEAPRRAPEHTPRVEGNLVRAAIERPNPFGQAGMQYRNFADWERDELVSNLSGALAGVDKRIQDKMLEYFTAADADYGQRVREGIQAKEAEMKGQKQEAPVYGTEASSLY

SEQ ID NO: 19708 - protein, 536 aa, Deinococcus radiodurans
MSDENNKGVGTAVQGVGGPRDGRTAPGEQGTTLTTRQGHPVHDNQNSRTVGSRGPMTLENYQFIEKLSHFDRERIPERVVHARGVGAHGVFRATGKVGDEPVSKYTRAKLFQEDGKETPVFVRFSTVGHGTHSPETLRDPRGFAVKFYTEDANWDFVVNNLKIFFIRDALKFPDLIHSQKPSPTTNIQSQERIFDFFAGSPEATHMITLLYSPWGIPASYRFMQGSGVNTYKWVNDQGEGVLVKYHWEPVQGVRNLTQMQADEVQATNFNHATQDLRDAIERGDFPQWDLFVKIMEDGEHPELDFDPLDDTKIWPREQFPWRHVGQMTLNRNPENVFAETEQAAFGTGVLVDGLDFSDDKMLQGRTFSYSDTQRYRVGPNYLQLPINAPKKHVATNQRDGQMAYRVDTFEGQDQRVNYEPSLLSGPKEAPRRAPEHTPRVEGNLVRAAIERPNPFGQAGMQYRNFADWERDELVSNLSGALAGVDKRIQDKMLEYFTAADADYGQRVREGIQAKEAEMKGQKQEAPVYGTEASSLY

SEQ ID NO: 19709 - protein, 528 aa, Melopsittacus undulatus
MADNRDDASDQLKQWRSQRGSQKPDVLTTGAGNPVGDKLNILTVGPRGPLLVQDVVFTDEMAHFDRERIPERVVHAKGAGAFGYFEVTHDITQYCKAKVFEHIGKRTPIAIRFSTVAGESGSADTVRDPRGFAMKFYTEEGNWDLVGNNTPIFFIRDAMLFPSFIHSQKRNPQTHLKDPDMVWDFWSLRPEFLHQVSFLFSDRGIPDGYRHMNGYGSHTFKLVNASGRAVYCKFHAKTDQGIKNLPVEEAGRLASTDPDYGIRDLYNAIAKGDYPSWSFFIQVMTFEEAEKFPFNPFDLTKIWPHGDYPLIPVGKLVLNRNPVNYFAEVEQMAFDPSNMPPGIEPSPDKMLQGRLFSYPDTHRHRLGPNYLQIPVNCPFRTRVANYQRDGPMCVSDNQGGAPNYYPNSFTGPEDQPVWKESRMSISGDVQRFNSANEDNVTQVRDFYTKVLKEDERQRLCKNIADHLKDAQLFIQKRAVKNFTDVHPDYGARIQALLDKYNADSGKKDVIRTYTQSTSRMSAKERSNL

SEQ ID NO: 19710 - protein, 182 aa, Cichorium intybus
  unsure (1)..(182): unsure at all Xaa locations
MDPYKQRPSSAYNSPFWTTNAGLPVYNNTASLTVGNRGPILLEDYHLIEKLANFTRERIPERIVHARGASAKGFFEVTHDITHLTCADFLRAPGVQTPTIVRFSTVIHERGSPETIRDPRGFATKFYTREGNFDIVGNNFPVFFTRDAMAFPDVIHAFKPNPKSHIQEXWRILDFLSHHPES

SEQ ID NO: 19711 - protein, 508 aa, Burkholderia fungorum
MSLWHQCTAPLPHSVSIKAIQESRMSEHKLTNAAGAPVADNQNSMTAGARGPVVLQDVWLLEKLAHFDREVIPERRVHAKGSGAFGTLKVTHDISRYTKAKVFAQAGKETPLFMRFSTVAGERGAADAERDVRGFSIKFYTEEGNWDVVGNNTPVFFIRDPLKFPDFIHTQKRDPYTNMRSNVAAWDFWSRHPESLHQVTILMSDRGIPQNFRQMHGFGSHTYSFINANNERFWVKFHFKSMQGVENFTDAEAAQVVAQDRESAQRDLLTNIDQGNFPKWRFAIQVMPEAEAATYRFNPFDITKVWSQKDYPLIDVGTIELNRNAANYFADVEQAAFTPANVVPGIGFSPDRLLQGRLFSYGDTQRYRLGVNHHQIPVNASRVASPHSFHRDGAMRTDGNLGGNVNYEPNRFGDFAQDANASEPPLAAGAVDRYDHRLDDDYYTQPGMLFALFDAAQRERLFGNIARHINGVPQEIVARQIEHFRRADPAYAEGVIAAIARLAEGETK

SEQ ID NO: 19712 - protein, 483 aa, Bacillus subtilis
MSSNKLTTSWGAPVGDNQNSMTAGSRGPTLIQDVHLLEKLAHFNRERVPERVVHAKGAGAHGYFEVTNDVTKYTKAAFLSEVGKRTPLFIRFSTVAGELGSADTVRDPRGFAVKFYTEEGNYDIVGNNTPVFFIRDAIKFPDFIHTQKRDPKTHLKNPTAVWDFWSLSPESLHQVTILMSDRGIPATLRHMHGFGSHTFKWTNAEGEGVWIKYHFKTEQGVKNLDVNTAAKIAGENPDYHTEDLFNAIENGDYPAWKLYVQIMPLEDAKTYRFDPFDVTKVWSQKDYPLIEVGRMVLDRNPENYFAEVEQATFSPGTLVPGIDVSPDKMLQGRLFAYHDAHRYRVGANHQALPINRARNKVNNYQRDGQMRFDDNGGGSVYYEPNSFGGPKESPEDKQAAYPVQGIADSVSYDHNDHYTQAGDLYRLMSEDERTRLVENIVNAMKPVEKEEIKLRQIEHFYKADPEYGKRVAEGLGLPIKKDS

SEQ ID NO: 19713 - protein, 483 aa, Bacillus subtilis
MSSNKLTTSWGAPVGDNQNSMTAGSRGPTLIQDVHLLEKLAHFNRERVPERVVHAKGAGAHGYFEVTNDVTKYTKAAFLSEVGKRTPLFIRFSTVAGELGSADTVRDPRGFAVKFYTEEGNYDIVGNNTPVFFIRDAIKFPDFIHTQKRDPKTHLKNPTAVWDFWSLSPESLHQVTILMSDRGIPATLRHMHGFGSHTFKWTNAEPEGVWIKYHFKTEQGVKNLDVNTAAKIAGENPDYHTEDLFNAIENGDYPAWKLYVQIMPLEDANTYRFDPFDVTKVWSQKDYPLIEVGRMVLDRNPENYFAEVEQATFSPGTLVPGIDVSPDKMLQGRLFAYHDAHRYRVGANHQALPINRARNKVNNYQRDGQMRFDDNGGGSVYYEPNSFGGPKESPEDKQAAYPVQGIADSVSYDHYDHYTQAGDLYRLMSEDERTRLVENIVNAMKPVEKEEIKLRQIEHFYKADPEYGKRVAEGLGLPIKKDS

SEQ ID NO: 19714 - protein, 507 aa, Staphylococcus aureus subsp. aureus Mu50
MTMSQQDKKLTGVFGHPVSDRENSMTAGPRGPLLMQDIYFLEQMSQFDREVIPERRMHAKGSGAFGTFTVTKDITKYTNAKIFSEIGKQTEMFARFSTVAGERGAADAERDIRGFALKFYTEEGNWDLVGNNTPVFFFRDPKLFVSLNRAVKRDPRTNMRDAQNNWDFWTGLPEALHQVTILMSDRGIPKDLRHMHGFGSHTYSMYNDSGERVWVKFHFRTQQGIENLTDEEAAEIIATDRDSSQRDLFEAIEKGDYPKWTMYIQVMTEEQAKNHKDNPFDLTKVWYHDEYPLIEVGEFELNRNPDNYFMDVEQAAFAPTNIIPGLDFSPDKMLQGRLFSYGDAQRYRLGVNHWQIPVNQPKGVGIENICPFSRDGQMRVVDNNQGGGTHYYPNNHGKFDSQPEYKKPPFPTDGYGYEYNQRQDDDNYFEQPGKLFRLQSEDAKERIFTNTANAMEGVTDDVKRRHIRHCYKADPEYGKGVAKALGIDINSIDLETENDETYENFEK

SEQ ID NO: 19715 - protein, 478 aa, Lactobacillus sakei
MTNQLTTNEGQPWADNQHSQTAGQRGPVLIQDYQLLEKLAHFNRERIPERVVHAKGAGAKGYFKVTKDMSAYTKAAVFSGVGKKTPLITRFSQVAGEAGYPDTYRDVRGFAVKFYTEEGNYDIVGNNTPVFFVNDPLKFPDFIHSQKRDPRTHARSQDMQWDFWSLSPESVHQVTILMSDRGIPASYRMMHGFGSHTFKWVNAQGEQFWVKYHFKTNQGIHNLSNELADELAGKDTDYLQNDLFDAIETGDYPSWTVAVQLVPYEDGLNYPQDIFDVTKVISQKDYPLIEIGQMVLDENPTNNFEDIQELAFSPANLVPGIEASPDKLLQGRLFGYKDAERYRLGANYEQLPVNRPKVPVHNYERDGAMAQNQATGVNYEPNSQDGPTEVPAAKIHGDQLSGTTGNFSADPDYYSAAGKLYRLLSADEQTRLIENIRMNLGQVTKPEIQIREVKQFYQADPEYGRRVATSVKLRFSSV

SEQ ID NO: 19716 - protein, 479 aa, Pseudomonas putida KT2440
MSKILTTASGAPVADNQNSRSAGPRGPLLLDDFHLIEKLAHFNRENIPERRVHAKGSGAYGTFTVTHDITGYTSAKLFEEVGKQTETFLRFSTVGGERGSADTERDPRGFAVKFYTEEGNWDIVGNNTPVFFIRDPLKFPDFIHTQKRHPQSNLKNAQMMWDFWSHSPEALHQVTILFSDRGIPDGYRHMHGFGSHTYSLINAKGERTWVKWHFKTQQGIKNLTPADAARLAGTDPDYAQRDLFEAIERGDYPRWTVCIQVMSEAEAASRDENPFDVTKTWSQKDYPLIEVGVLELNRNPLNYFAEVEQAAFGPSNMVPGVGLSPDRMLQGRVFAYADAHRYRVGTNHQQLPVNAPRCPVNSYQRDGSMATGSYGSAPNYEPNSYSDAPKQSPRHAEPALAMNGSADRYDHREDTDYFSHAGALFRLMNDEQKALLISNIAGTMAGVSEDVIQRQLQYFFKADPAYGEGIAKALGINLA

SEQ ID NO: 19717 - protein, 126 aa, Beta vulgaris
KFYTREGNFDLVGNNFPVFFIRDGMKFPDMVHSLKPNPKSHIQENWRVMDFFSHHPESLHMFTFLFDDIGVPANYRHMEGSGVNTYTLINKAGKVHCVKFHWKPTCGVKSLLEDEAIKVGGANHSH

SEQ ID NO: 19718 - protein, 744 aa, Aspergillus nidulans
MATSITAGLQKAQQAVQDTATKNKKIVDISHDTVNVHTDQEQRTDFGVAITDPDHWLRVTNETHSGPSLLEDHIARERIHRFDHERIPERVVHARGTGAYGNFTLKESIEDLTYAGVLTDTSRNTPVFVRFSTVQGSRGSADTVRDVRGFAVKFYTDEGNWDIVGNNIPVFFIQDAIKFPDFVHAVKPEPHNEVPQAQTAHNNFWDFVYLHPEATHMFMWAMSDRAIPRSYRMMQGFGVNTFSLVNKEGKRHFVKFHWIPHLGVHSLVWDEALKLAGQDPDFHRKDLMEAIDNKAYPKWDFAIQAIPEEDQDKFEFDIFDATKVWPEEQVPLRVVGELELNRNIDEFFPETEQVAFCTSHIVPGIDFSDDPLLQGRNFSYQDTQISRLGVNWEEIPINRPVCPFLNHNRDGAKRHRITKGTVNYWPNRFEANPPASDKGFKSHPAPITGRKRRDLTPKFKEYHNQAQLFYNSLSEVEKVHVKKAFSFELDHCDDPIVYERLAGQRLAEIDLPLAQAVAEMVGAPIPTKALRDNHGKTSVRLSQFDFTPKAPGIISRRIAIIIGDGYDKIAFNGMKAAILAAASAPLRHWHQTSAIYAQGEDKNSSKGVIPDHMYDGMRSTMFDATFIPGGSHIETLQKNGQIRYWIAETFGHLKALGAMGEAAQLVKEVLGNVMGVQIAGADSAEPVEWYGVVTARGPESAESLSEGFKVLKDAGDFTSKFFYQISQHRNWQRELDGLASTVAF

SEQ ID NO: 19719 - protein, 167 aa, Listeria monocytogenes
ARGAGAHGKFVTKKSMKKYTMAKFLQEEGTETEVFARFSTVIHGQHSPETLRDPRGFSVKFYTEEGNYDFVGNNLPVFFIRDAIKFPDVIHSLKPDPRTNIQDGNRYWDFFSLTPEATTMITYLFSDEGTPASYREIRGSSVHAFKWINEAGKTVYVKLRWVPKAGI

SEQ ID NO: 19720 - protein, 167 aa, Listeria monocytogenes
ARGAGAHGKFVTKKSMKKYTMAKFLQEEGTETEVFARFSTVIHGQHSPETLRDPRGFSVKFYTEEGNYDFVGNNLPVFFIRDAIKFPDVIHSLKPDPRTNIQDGNRYWDFFSLTPEATTMIMYLFSDEGTPASYREVRGSSVHAFKWINEEGKTVYVKLRWVPKAGI

SEQ ID NO: 19721 - protein, 167 aa, Listeria monocytogenes
ARGAGAHGKFVTKKSMKKYTMAKFLQEEGTETEVFARFSTVIHGQHSPETLRDPRGFSVKFYTEEGNYDFVGNNLPVFFIRDAIKFPDVIHSLKPDPRTNIQDGNRYWDFFSLTPEATTMIMYLFSDEGTPASYREIRGSSVHAFKWINEEGKTVYVKLRWVPKAGI

SEQ ID NO: 19722 - protein, 167 aa, Listeria monocytogenes
ARGAGAHGKFVTKKSMKKYTIAKFLQEEGTETEVFARFSTVIHGQHSPETLRDPRGFSVKFYTEEGNYDFVGNNLPVFFIRDAIKFPDVIHSLKPDPRTNIQDGNRYWDFFSLTPEATTMIMYLFSDEGTPASYREIRGSSVHAFKWINEEGKTVYVKLRWIPKAGI

SEQ ID NO: 19723 - protein, 167 aa, Listeria monocytogenes
ARGAGAHGKFVTKKSMKKYTMAKFLQEEGTETEVFARFSTVIHGQHSPETLRDPRGFSVKFYTEEGNYDFVGNNLPVFFIRDAIKFPDVIHSLKPDPRTNIQDGNRYWDFFSLTPEATTMIMYLFSDEGTPASYREIRGSSVHAFKWINEEGKTVYVKLRWIPKAGI

SEQ ID NO: 19724 - protein, 112 aa, Listeria monocytogenes
MTDRKNLTTNQGVPVGDNQNSMTAGRKGPTLIEDYVLIEKLAHFDRERVPERVVHARGAGAHGKFVTKKSMKKYTMAKFLQEEGTETEVFARFSTVIHGQHSPETLRDPRGF

SEQ ID NO: 19725 - protein, 488 aa, Listeria seeligeri
MTDRRNLTTNQGVPIGDNQNSMTAGLKGPTLLEDYVLIEKLAHFDRERVPERVVHARGAGAHGKFVTKKSMKKYTKAQFLQEEGTETEVFARFSTVIHGQHSPETLRDPRGFSVKFYTEEGNYDFVGNNLPVFFIRDAIKFPDVIHSLKPDPRTNIQDGNRYWDFFSLTPEATTMITYLFSDEGTPASYREIRGSSVHAFKWINEEGKTVYVKLRWVPKAGIVNLSTDQAAQIQAKEFNHASRDLYEAIENGDYPEWDLYVQVLDPKDLDNYDFNPLDATKDWFEDVFPYEHVGTMTLNRNPDNIFAETESVGFNPGVLVPGMLPSEDRLLQGRLFSYSDTQRHRVGPNYLQLPINSPKTPVDNNQRDGQMPFKQQTSSINYEPNSYDTEPKENPAYIEPEQEIRGDISGRLVAEKPNNFGHAKEVWKRYSDAERAALVKNIVDDWEGVREDIKIRNLRNFYQVEPEFAERVAAGTGINLAEHVIDLK

SEQ ID NO: 19726 - protein, 488 aa, Listeria seeligeri
MTDRRNLTTNQGVPIGDNQNSMTAGLKGPTLLEDYVLIEKLAHFDRERVPERVVHARGAGAHGKFVTKKSMKKYTKAQFLQEEGTETEVFARFSTVIHGQHSPETLRDPRGFSVKFYTEEGNYDFVGNNLPVFFIRDAIKFPDVIHSLKPDPRTNIQDGNRYWDFFSLTPEATTMITYLFSDEGTPASYREIRGSSVHAFKWINEEGKTVYVKLRWVPKAGIVNLSTDQAAQIQAKEFNHASRDLYEAIENGDYPEWDLYVQVLDPKDLDNYDFNPLDATKDWFEDVFPYEHVGTMTLNRNPDNIFAETESVGFNPGVLVPGMLPSEDRVLQGRLFSYSDTQRHRVGPNYLQLPINSPKTPVDNNQRDGQMPFKQQTSSINYEPNSYDTEPKENPAYIEPEQEIRGDISGRLVAEKPNNFGHAKEVWKRYSDAERAALVKNIVDDWEGVREDIKIRNLRNFYQVEPEFAERVAAGTGINLAEHVIDLK

SEQ ID NO: 19727 - protein, 488 aa, Listeria innocua
MTERKNLTTNQGTPVGDNQNSMTAGLKGPTLLEDYVLIEKLAHFDRERVPERVVHARGAGAHGKFVTKKSMKKYTIANFLQEEGTETEVFARFSTVIHGQHSPETLRDPRGFSVKFYTEEGNYDFVGNNLPVFFIRDAIKFPDVIHSLKPDPRTNIQDGNRYWDFFSLSPEATTMIMYLFSDEGTPASYREIRGSSVHAFKWINEEGKTVYVKLRWVPKAGIVNLSTEQAAQIQAKEFNHASRDLYEAIENGDYPEWDLYVQVLDPKDLDSFDFNPLDATKDWFEDVFPYEHVGTMTLNRNPDNIFAETESVGFNPGVLVRGMLPSEDRLLQGRLFSYSDTQRHRVGPNYLQLPINSPKAPVANNQRDGYMPFKQQTSSINYEPNSYETEPKENPAFIEQEQEIRGDISGRLIAEKPNNFGHAKEVWDRYSDAERAALVKNIVDDWSGVRDDIKIRNLRNFYQIEPEFANRVADGTGINLEEHVADLK

SEQ ID NO: 19728 - protein, 509 aa, Halomonas sp. SK1
MSDDTKKCPVTHMTTDFGAPVVTNRDSLTAGPRGPLLAQDVWLNEKLAGFVREVIPERRMHAKGSGAFGTFTVTHDITKYTRAKIFSEVGKKTEMFARFTTVAGERGAADAERDIRGFALKFYTEEGNWDMVGNNTPVFFIRDPRQFPDLNKAVKRDPRTNLRTATNNWDYWTLLPEALHQVTVVMSDRGIPASYRHMHGYSSHTYSLWNQAGERFWVKMHFRTQQGIKNLTDAEAGELVAQDRESHQRDLYEAIERGEYPKWTMFIQVMPEADAEKYALHPFDLTKVWYKGDYPLIEVGEFELNKNSENFFADVEQVAFSPSNLVPGIGVSPDRMLQRRLFNYADAQRYRLGVNYHQIPVNQARCPVHSNHRDGQGRVDGNYGALPHYEPNSFGQWQGQPQFSEPPLKLTGNAAHWSYDKDDHNYFEQPGKLFRLMNDGQKEALFGNTGRAMGDAPEFIKFRHIRNCHAADPAYGAGVAKALGINLEKALASKKDDPMYGNPLVALPA

SEQ ID NO: 19729 - protein, 488 aa, Listeria monocytogenes EGD-e
MTDRKNLTTNQGVPVGDNQNSMTAGRKGPTLIEDYVLIEKLAHFDRERVPERVVHARGAGAHGKFVTKKSMKKYTMAKFLQEEGTETEVFARFSTVIHGQHSPETLRDPRGFSVKFYTEEGNYDFVGNNLPVFFIRDAIKFPDVIHSLKPDPRTNIQDGNRYWDFFSLTPEATTMIMYLFSDEGTPASYREVRGSSVHAFKWINEEGKTVYVKLRWVPKAGIVNLSTEQASQIQAKEFNHASRDLYEAIENGDYPEWDLYVQVLDPKDLDSFDFNPLDATKDWFEDVFPYEHVGTMTLDRNPDNIFAETESVGFNPGVLVRGMLPSEDRLLQGRLFSYSDTQRHRVGPNYLQLPINSPKAPVANNQRDGHMPFKQQTSSINYEPNSYDTEPKENPAFIEPEQEIRGDISGRLIAEKPNNFGHAKEVWDRYSNAERAALVKNIVDDWSQVREDIKIRNLRNFYQVDPEFASRVAAGTGINLEEHVTDLK

SEQ ID NO: 19730 - protein, 504 aa, Staphylococcus epidermidis ATCC 12228
MSKQDGKLTGLFGAPVSDRENSMTAGQRGPLLMQDVYYLEQISHFDREVIPERRMHAKGSGAFGTFTVTNDITQYTNAKIFSEVGKQTEMFARFSTVSGERGAADLERDIRGFALKFYTEDGNWDLVGNNTPVFFFRDPKLFISLNRAVKRDPRTNMRSAQNNWDFWTGLPEALHQVTILMSDRGMPKGFRNMHGFGSHTYSMYNDKGERVWVKYHFRTQQGIENYTDEEAAKIVGMDRDSSQRDLYNAIENGDYPKWKMYIQVMTEEQAKNHPDNPFDLTKVWYKKDYPLIEVGEFELNRNPENYFLDVEQAAFTPTNIVPGLDYSPDKMLQGRLFSYGDAQRYRLGVNHWQIPVNQPKGVGVENLCPFSRDGQMRFLDNNQGGGPHYYPNNQGIYESQPEHKKPPFPTDGDGYEYNYRQDDDNYFEQPGKLFRLQSEDAKERIFTNTANAMDGVSKDVKVRHIRHCYKADPEYGKGVAKALGIDINQIDLETNQDETYENFK

SEQ ID NO: 19731 - protein, 512 aa, Anopheles gambiae str. PEST
NGKQIPSAMSRNPAENQLNAYRDAQKDKVTATMSHGAPVGTKTASETAGPRGPVLLQDVHLIDELAHFDRERIPERVVHAKGAGAFGYFEVTHDITQYCAAKLFEKVGKKTPLAVRFSTVGGESGSADTVRDPRGFAVKFYTDDGVWDMVGNNTPIFFIRDPVLFPSFIHTQKRNPATHLKDPDMFWDFISLRPETTHQTMFLFSDRGTPDGYRFMNGYGSHTYKLVNADGKPVYCKFHFKTDQGIKNLDPARANELTATDPDYSIRDLYNAIAKKDFPSWTLKVQVMTFEQAEKVPYNPFDLTKVWPQNEFPLIPVGRMVLDRNPSNYFAEVEQAAFAPSHLVPGIEPSPDKMLQARLFAYADTHRHRVGANYLMLPVNCPYRVATRNFQRDGPMNCTDNQGGAPNYFPNSFSGPQTCPRAHKLQNTPLKLSGDVNRYETGDEDNFSQATVFYRRVLDDAGRQRLINNIVGHLKDASPFLQERAVKNFAMVDADFGRHLSEGLKLRRTANL

SEQ ID NO: 19732 - protein, 484 aa, Anopheles gambiae str. PEST
SLQDKVTATMSHGAPVGTKTASETAGPRGPVLLQDVHLIDELAHFDRERIPERVVHAKGAGAFGYFEVTHDITQYCAAKLFEKVGKKTPLAVRFSTVGGESGSADTVRDPRGFAVKFYTDDGVWDMVGNNTPIFFIRDPVLFPSFIHTQKRNPATHLKDPDMFWDFISLRPETTHQTMFLFSDRGTPDGYRFMNGYGSHTYKLVNADGKPVYCKFHFKTDQGIKNLDPARANELTATDPDYSIRDLYNAIAKKDFPSWTLKVQVMTFEQAEKVPYNPFDLTKVWPQNEFPLIPVGRMVLDRNPSNYFAEVEQAAFAPSHLVPGIEPSPDKMLQARLFAYADTHRHRVGANYLMLPVNCPYRVATRNFQRDGPMNCTDNQGGAPNYFPNSFSGPQTCPRAHKLQNTPLKLSGDVNRYETGDEDNFSQATVFYRRVLDDAGRQRLINNIVGHLKDASPFLQERAVKNFAMVDADFGRHLSEGLKLR

SEQ ID NO: 19733 - protein, 298 aa, Anopheles gambiae str. PEST
TPQQMVDALHQTFGKYPNARAVHAKGIITEGFFTPSPEAKKICKAVHFSIAKSPVTVRFSDFTGIPNISDTDAHSNPRGLAIKFHLPDGKTTDIVSHSYNGFPVATTDEFRELLTAISESGSDSIKPTPLDTFLETHPVAKIFLTNQKPASVSFANLSYYGVNAFKFINSKGFAVYIRYQFIPEEGEKFLSQEALSQLGPNYLNEEIKSHLSSENIKFRLYAQIAQPGDTINNPSIVWPENRKRILLGTITLTKVTANIPAEDKKLSFIPNAVTDGIETVDVMLEDRSKAYPISVKER

SEQ ID NO: 19734 - protein, 651 aa, Agrobacterium tumefaciens str. C58 (Cereon)
MVDDFHFREKIFHFDHERIPERVVHARGYGAHGYFETYDSLATHTKADLFQRAGERTPAFVRFSTVAGNKGSADLARDVRGFAVKLYTKEGNWDLVGNNIPVFFIQDAIKFPDLVHAAKQEPDRAFPQAQTAHDTFWDFISLTPESMNMVMWIMSDRTIPRSFRFMEGFGVHTFRFINAKEQSTFVKFHWKPKLGLQSVAWNEAVKINGADPDFHRRDLWTAIQSGNFPEWELQVQLFDQDFADSFDFDVLDPTKIIPEEILAPKPVGRLVLDRMPDNFFAETEQVAFMTQNVPPGIDFSNDPLLQGRNFSYLDTQLKRLGGPNFTHLPINAPKCPFAHFQQDGHMAMRNPTGRANYQPNSFGEGQRESPTRGFQHFAAEEQGVKARLRPESFADHYSQARQFYISQTPPEQRHIASALTFELSKVETVEIRERMVSHLLNIDETLATTVAQKLGLQTMPEPANTAIPTRQDLEPSPALSIVERGPKRFEGRKLGILITDGVDAKLLKGLTQAVTAEKAVFEFIAPKVGGVTASNGTLIEAHHMIDGGPSVLFDAVALLTSEAAIAELTEEATARDFVADAFQHCKFIGYDRSALPLLEIAGIADAMDEGVLPLPGEEGLAAFVAELGKLRVWAREPSLKLGKASVPVNKE

SEQ ID NO: 19735 - protein, 247 aa, Magnetospirillum magnetotacticum
MTMHLPMGHAWVIPASQNGSRLGPSARDRAGRTGNVRTPRREYRMTDNRPILTTRQGHPVRDNQSTRTVGERGPATLENYQFIEKITHFDRERIPERVVHARGAGAHGWFEAYGKIGDEPASKYTRARVLNETGVKTPMFVRFSTVAGAKESPETERDPRGFAVKFKTVEGNWDLVGNNLKVFFIRDAIKFPDMIHAFKPDPVTNRQEAWRFFDFVAQHPESIHMVTWLKSPWGIPANYREMEGYGR

SEQ ID NO: 19736 - protein, 196 aa, Magnetospirillum magnetotacticum
  unsure (1)..(196): unsure at all Xaa locations
MAPTFASHVEPASVHRAQPAGAGGCADGVTLHRSRETQAMADQSPRLTTAFGNPVSDNQNSLTAGPRGPVLMQDYHLIEKMAHFNRERIPERVVHAKGYGAYGTFRLTKSLGEYTRAKVLTEVGKEVPMVARFSTVGGESGSADTARDPRGFALKFYTEEGNWDLVGNNTPIFFVRDAIKFSDFIRTQKRDPRTXI

SEQ ID NO: 19737 - protein, 260 aa, Magnetospirillum magnetotacticum
MPKQGVRNLTSAQAAEIQAKDVGHATRDLYDNIQAGNFPEWEFAVQIMPDGPNDHLSFDPLDDTKRWPEDQFPLLKCGRMVLDRVPDNFFAEVEQSAFGTGVLVDGIDFSDDKMLQGRTLSYSDTQRYRVGANYLQLPINAPQPGVKVYSNQRDGQMTYGVDGTGPNKHINYEPSTLGQGLAEAPKKKEYHQPVSGNLGRYQTSRTEDDYAQAGHRYRTFEDWEREDLIANLVADMKQCPEPIQLRMVWHFWHADEDYGR

SEQ ID NO: 19738 - protein, 495 aa, Leptospira interrogans serovar lai str. 56601
MDLIYRSIYKRRKIMSRKTLTTAGGHPVSQNQHSLTAGPRGPVLIQDTHLIEKLAHFNRERIPERVVHAKGAGAYGTLTITQDLTKYSRASIFSKKGKQTSLFLRFSTVAGEKGSADTERDPRGFAVKFYTDEGIWDLVGNNTPVFFARDPLKFPDFIHSQKRDPVTGYKNPIRMWDYWAGSPEAFHQITILFGDRGIPDGYRFMNGYGSHTFGLWNSKGERFWTKFHFKSMQGIRNLSMEKASALAGTDPDYATRDLFEAIERKEFPKWKFCVQIMPEKEATKYKFNPFDLTKVWSHKDYPLIEVGVLELNSNPKNYFEEVEQAAFSPSNMPPGIGASPDKMLQGRLFAYPDAHRYRLGIQYQQLPVNRPKNSVNVYHRDGRTRFQCDGNYDNYEPNGFEGPVQDSSYAEPPLSISGDMDRYNSHIGNDDYSQAGDLYRLMSVEERERLTSAIASTMHNLPKPLLEANLKHFHLCDPEYGEQLAAKVGLALSRV

SEQ ID NO: 19739 - protein, 488 aa, Streptomyces coelicolor
MPENNQKPLTTVAGPPVPDNQNSLTSGPRRPMLLQDVWFLEKLAHFDREVIPERRMHAKGSGLFGTFTVTHDITRYTSAKIFSEIGKKTPLFTRFSTVAGERGAADAERDIRGFAVKFYTDEGNWDLVGNNTPVFFFRDPLKFPDLNHAVKRDPRTNLRNAENNWDFWTNLPEALHQVTIVMSDRGIPASYRHMHGFGSHTYSLINAEGERFWVKFHHRTQQGIKNLTDAEAEALVGKDRESHQRDLFDAIEDGDFPKWKLFIQVMPEADAENYRFHPFDLTKVWSKKDYPLIEVGEWELNRNPDNYFADVEQAAFSPANVVPGIEASPDRMLQGRLFSYGDAQRYRLGVNHHHQIPVNAPKNPVNSYHRDPAMRVDGNQGATPGIEPNSYGRWQEQPAYRDPAQAVGAVADRFNYREDDDNYFEQPGNLFRQMSPEQQQVLFENTARAIDGASAQTIERHIGNCTQADPAYGAGVRKAIEALAAGNL

SEQ ID NO: 19740 - protein, 507 aa, Xanthomonas campestris pv. campestris str. ATCC 33913
MRPGSLMVLALLAPTLIAPPVFAQSVLTRDNGAKVGDNQNSQTAGATGPTLLQDVQLIQKLQRFDRERIPERVVHARGTGVKGEFTATADLSNLTKAKVFSAGEKTPVFVRFSSVVHGNHSPETLRDPHGFATKFYTSEGNWDLVGNNFPTFFIRDAIKFPDMVHAFKPDPRTNLDDDSRRFDFFSHVPESTRTLTLLYSNEGTPAGYRFMDGNGVHAYKLVNAQGEVHYVKFHWKTLQGIKNLDPKQVAAVQAKDYSHLTNDLVGAIKKGDYPKWDLYVQVLKPDDLAKFDFDPLDATKIWPDVPEQKVGQMVLNKNVDNFFQETEQVAMAPANLVPGIEPSEDRLLQGRIFSYADTQLYRIGTNGLSLPVNRPRVAVNNGNQDGEANTGHTTSGVNYEPSRLEPRPQDTAARYSELPLSGTTQQAKITLEQNFKQAGELYRSYSKKDRADLVQSFGESLATTDTESKHLVLSFLYKADPEYGAGVTRVAKGDLARVKQLASTLQD

SEQ ID NO: 19741 - protein, 488 aa, Bacillus anthracis str. A2012
  unsure (1)..(488): unsure at all Xaa locations
MNPNNRLTTNQGAPVGDNQNSRTAGRRGPVLLEDYHLVEKLAHFDRERIPERVVHARGAGAHGVFVTKNSMKKYTKAAFLQNEGTETPVFVRFSTVIHGQGSPETARDPRGFAVKFYTEEGNYDIVGNHLPVFFIRDAIKFPDMVHSLXPAPDTNIQTPDRYWDFMTLSPESTHMMTWVFSDYGTPASYREMEXFGVHSFKWINAEGKIVYIKYHWKPQQGVRNLSAKEVQEVQGKDFNHATRDLFDAIEKGNYPKWDLHVQVMQLEETDSLDFDPLDPTKVWPEDRFPLMEVGTMTLNRNPKNFFAEVEQVAFSPSATVNGIEPSEDKLLQGRLFSYPDTQRYRLGANYLQIPVNCPYAAVHNQQRDGAMQINQNPSTINYEPSRHAENPVEDPAYRDSTMKVEGYVSREKIDKPNDFKQAGERYRSFSKEEQDNLIANLTSDLKDVNERTKLLAVCNFFRADQEYGMRLAQALNVDITQYVGNAPK

SEQ ID NO: 19742 - protein, 474 aa, Campylobacter jejuni subsp. jejuni NCTC 11168
MKKLTNDFGNIIADNQNSLSAGAKGPLLMQDYLLLEKLAHQNRERIPERTVHAKGSGAYGEIKITADLSAYTKAKIFQKGEVTPLFLRFSTVAGEAGAADAERDVRGFAIKFYTKEGNWDLVGNNTPTFFIRDAYKFPDFIHTQKRDPRTHLRSNNAAWDFWSLCPESLHQVTILMSDRGIPASYRHMHGFGSHTYSFINDKNERFWVKFHFKTQQGIKNLTNQEAAELIAKDRESHQRDLYNAIENKDFPKWKVQVQILAEKDIEKLGFNPFDLTKIWPHSFVPLMDIGEMILNKNPQNYFNEVEQAAFSPSNIVPGIGFSPDKMLQARIFSYPDAQRYRIGTNYHLLPVNRAKSEVNTYNVAGAMNFDSYKNDAAYYEPNSYDNSPKEDKSYLEPDLVLEGVAQRYAPLDNDFYTQPRALFNLMNDDQKTQLFHNIAASMEGVDEKIITRALKHFEKISPDYAKGIKKALEK

SEQ ID NO: 19743 - protein, 483 aa, Streptomyces violaceus
MTQGPLTTEAGAPVADNQNSETAGVGGPVLVQDQLLLEKLAHFNRERIPERVVHARGAGAYGTFTLTRDVSRWTRAAFLSEVGKRTETFLRFSTVAGSLGAADAVRDPRGWALKFYTEEGNYDLVGNNTPVFFIKDAIKFPDFIHTQKRDPYTGSQEADNVWDFWGLSPESTHQVTWLFGDRGIPASYRHMNGYGSHTYQWNNEAGEVFWVKYHFKTDQGIKNLTQDEANRLAGEDPDSHQRDLREAIERGDFPTWTVQVQIMPAADAAGYRFNPFDLTKVWPHEDYPPVEIGTLELNRNPENIFAEVEQSIFSPAHFVPGIGPSPDKMLQGRLFAYGDAHRYRVGINADHLPVNRPHATEARTHSRDGFLYDGRHKGAKNYEPNSFGGPVQTDRPLWQPTPVTGVTGDHAAPSHAEDDDFTQAGDLYRLMSEDEKGRLIDNLSGFIAKVSRDDIAERAIGNFRRADEDFGKRLEAAVQALRG

SEQ ID NO: 19744 - protein, 533 aa, Corynebacterium efficiens YS-314
MTENSAADQIIDRGMRPKVAGNTTRHNGAPVASENISVTAGPQGPNILNDIHLIEKLAHFNRENVPERIPHAKGHGAFGELHITEDVSQYTKADLFQPGKVTPMGVRFSTVAGEQGSPDTWRDVHGFALRFYTQEGNYDIVGNNTPTFFVRDGMKFPDFIHSQKRLNKNGLRDADMQWDFWTRAPESAHQVTYLMGDRGTPKTTRHMNGYGSHTFQWVNKDGEAFWVKYHFISRQGVENFTDAEAAEMAGINADYHREDLYNAIERGDYPIWDVKVQIMPFAEAENYRWNPFDLTKVWSKKDYPRIDVGYFILNRNPRNFFAQIEQIALDPGNIVPGVGLSPDRMLQARAFAYADQQRYRIGPNYRDLPINRPINEVNTYSREGHMQYVFDAEGEPSYSPNRYTKGAGYLDDGETSSSNHTSYGQASDIYVNPDPHGTDLVRAAYVKHQDDDDFMQAGILYREVYNDEEKARLADNISNAMQGISEETEPRVYEYWTNVDENLGARVKELYLQKKAAGAAEHTSSTGDDIDKK

SEQ ID NO: 19745 - protein, 710 aa, Corynebacterium efficiens YS-314
MSANPGIPSSGTPEVNEPTTPVPPLPRKPDQATAEPYSPTGCPMHISPDVNAQQGEYLTTAQGGRLRDTDHSLKAGERGPLLMQDHHFREKITHFDHERIPERVVHARGAAAHGVFKANGAASSICRAGVFAEGKETPVFTRFSTVLGNRGSADTVRDTRGFAVKFYTDEGTWDLVGNNIPVFFIQDGIKFPDVIHAAKPHPDRDIPQAQSAHDTFWDFVTLHTEATHHTIWNMSDRGIPRSYRMMEGFGVNTFRMINDKGETSLVKFHWKPKLGVHSQVWEEAQITGGVDPDFHRRDLADAIESGAFPEWDLGLQVFPDNKEQMFEGIDLLDPTKIVPEELAPVQIVGTMTLNKNVSNFHEETEQVAFHPGHLPPGIDVTADPLLQGRLFSYLDTQISRLGGPNFAQLPINRPHAPVNDMFREGMHQQGQHIGVAPYQPNSLDGGNPFPAEPSNGALIDVPVPVEGEITRSAPASFDDHYSQARLFYVSLSPIEQKHVADAYTFELGKCYEKAIKERAVHVLSNVDHDLASTVAKGLGVPAPEKKDLPEPTPSPALSQVGKTWPIDGRQIGILVTDDLPEDQVADVASLSKAIEDAGMVPLVTSTSGGTIGEPEEATGVAVSRTYVTVRSIEFDAAVVVETPEQPEVSILLSEMIRHGKAVALVGDATAQVPDRMGDAPGVVTVNAAADALDVLTPMLKGHRTWAANPA

SEQ ID NO: 19746 - protein, 505 aa, Staphylococcus aureus subsp. aureus MW2
MSQQDKKLTGVFGHPVSDRENSMTAGPRGPLLMQDIYFLEQMSQFDREVIPERRMHAKGSGAFGTFTVTKDITKYTNAKIFSEIGKQTEMFARFSTVAGERGAADAERDIRGFALKFYTEEGNWDLVGNNTPVFFFRDPKLFVSLNRAVKRDPRTNMRDAQNNWDFWTGLPEALHQVTILMSDRGIPKDLRHMHGFGSHTYSMYNDSGERVWVKFHFRTQQGIENLTDEEAAEIIATDRDSSQRDLFEAIEKGDYPKWTMYIQVMTEEQAKNHKDNPFDLTKVWYHDEYPLIEVGEFELNRNPDNYFMDVEQAAFAPTNIIPGLDFSPDKMLQGRLFSYGDAQRYRLGVNHWQIPVNQPKGVGIENICPFSRDGQMRVVDNNQGGGTHYYPNNHGKFDSQPEYKKPPFPTDGYGYEYNQRQDDDNYFEQPGKLFRLQSEDAKERIFTNTANAMEGVTDDVKRRHIRHCYKADPEYGKGVAKALGIDINSIDLETENDETYENFEK

SEQ ID NO: 19747 - protein, 516 aa, Corynebacterium glutamicum ATCC 13032
MSEKSAADQIVDRGMRPKLSGNTTRHNGAPVPSENISATAGPQGPNVLNDIHLIEKLAHFNRENVPERIPHAKGHGAFGELHITEDVSEYTKADLFQPGKVTPLAVRFSTVAGEQGSPDTWRDVHGFALRFYTEEGNYDIVGNNTPTFFLRDGMKFPDFIHSQKRLNKNGLRDADMQWDFWTRAPESAHQVTYLMGDRGTPKTSRHQDGFGSHTFQWINAEGKPVWVKYHFKTRQGWDCFTDAEAAKVAGENADYQREDLYNAIENGDFPIWDVKVQIMPFEDAENYRWNPFDLTKTWSQKDYPLIPVGYFILNRNPRNFFAQIEQLALDPGNIVPGVGLSPDRMLQARIFAYADQQRYRIGANYRDLPVNRPINEVNTYSREGSMQYIFDAEGEPSYSPNRYDKGAGYLDNGTDSSSNHTSYGQADDIYVNPDPHGTDLVRAAYVKHQDDDDFIQPGILYREVLDEGEKERLADNISNAMQGISEATEPRVYDYWNNVDENLGARVKELYLQKKA

SEQ ID NO: 19748 - protein, 502 aa, Corynebacterium glutamicum ATCC 13032
MRPKLSGNTTRHNGAPVPSENISATAGPQGPNVLNDIHLIEKLAHFNRENVPERIPHAKGHGAFGELHITEDVSEYTKADLFQPGKVTPLAVRFSTVAGEQGSPDTWRDVHGFALRFYTEEGNYDIVGNNTPTFFLRDGMKFPDFIHSQKRLNKNGLRDADMQWDFWTRAPESAHQVTYLMGDRGTPKTSRHQDGFGSHTFQWINAEGKPVWVKYHFKTRQGWDCFTDAEAAKVAGENADYQREDLYNAIENGDFPIWDVKVQIMPFEDAENYRWNPFDLTKTWSQKDYPLIPVGYFILNRNPRNFFAQIEQLALDPGNIVPGVGLSPDRMLQARIFAYADQQRYRIGANYRDLPVNRPINEVNTYSREGSMQYIFDAEGEPSYSPNRYDKGAGYLDNGTDSSSNHTSYGQADDIYVNPDPHGTDLVRAAYVKHQDDDDFIQPGILYREVLDEGEKERLADNISNAMQGISEATEPRVYDYWNNVDENLGARVKELYLQKKA

SEQ ID NO: 19749 - protein, 507 aa, Campylobacter jejuni
MKKLTNDFGNIIADNQNSLSAGTKGPLLMQDYLLLEKLAHQNRERIPERTVHAKGSGAYGEIKITADLSAYTKAKIFQKGEITPLFLRFSTVAGEAGAADAERDVRGFAIKFYTKEGNWDLVGNNTPTFFIRDAYKFPDFIHTQKRDPRTHLRSNNAAWDFWSLCPESLHQVTILMRDRGIPASYRHMHGFGSHTYSFINDKNERFWVKFHFKTQQGIKNLTNQEAAELIAKDRESHQRDLYNAIENKDFPKWKVQVQILAEKDIEKLGFNPFDLTKIWPHSLVPLMDIGEMILNKNPQNYFNEVEQAAFSPSNIVPGIGFSPDKMLQARIFSYPDAQRYRIGTNYHLLPVNRAKSEVNTYNVAGAMNFDSYKNDAAYYEPNSYDNSPKEDKSYLEPDLVLEGVAQRYAPLDNDFYTQPRALFNLMNDDQKTQLFHNIATSMEGVDEKIITRALEHFEKISPDYAKGIKKAFPIVSRIRAWRNHGHRCFLCEIVIRSQFHTTYEPEA

SEQ ID NO: 19750 - protein, 668 aa, Shigella flexneri 2a str. 301
MRIADDQNSLRAGNRGPTLLEDFILREKITHFDHERIPERIVHARGSAAHGYFQPYKSLSDITKADFLSDPNKITPVFVRFSTVQGGAGSADTVRDIRGFATKFYTEEGIFDLVGNNTPIFFIQDAHKFPDFVHAVKPEPHWAIPQGQSAHDTFWDYVSLQPETLHNVMWAMSDRGIPRSYRTMEGFGIHTFRLINAEGKATFVRFHWKPLAGKASLVWDEAQKLTGRDPDFHRRELWEAIEAGDFPEYELGFQLIPEEDEFKFDFDLLDPTKLIPEELVPVQRVGKMVLNRNPDNFFAENEQAAFHPGHIVPGLDFTNDPLLQGRLFSYTDTQISRLGGPNFHEIPINRPTCPYHNFQRDGMHRMGIDTNPANYEPNSINDNWPRETPPGPKRGGFESYQERVEGNKVRERSPSFGEYYSHPRLFWLSQTPFEQRHIVDGFSFELSKVVRPYIRERVVDQLAHIDLTLAQAVAKNLGIELTDDQLNITPPPDVNGLKKDPSLSLYAIPDGDVKGRVVAILLNDEVRSADLLAILKAMKAKGVHAKLLYSRMGEVTADDGTVLPIAATFAGAPSLTVDAVIVPCGNIADIADNGDANYYLMEAYKHLKPIALAGDARKFKATIKVADQGEEGIVEADSTDGSFMDELLTLMAEHRVWSRIPKIDKIPA

SEQ ID NO: 19751 - protein, 128 aa, Coccidioides posadasii
MGADDKANHSTYRYNEVPVYTTSQGCPVMDPESSQRIGENGPLLLQDFHLIDLLAHFDRERIPERVVHAKGAGAHGEFEVTDDISDITTIDMLKGVGKKTKLVTRFSTVGGEKGSADSARDPRGFAVK

SEQ ID NO: 19752 - protein, 555 aa, Thermobifida fusca
MLGRGGRLPPGKCRVGPAHWPSRLSSAEVSPTTRALSRHTGTSGPAPSRSLPAISTIKETDLTETNEALSTASNATGSTLDSGAPAASDRNSLSVGSNGPLLLHDVRLVETLAHFNRERVPERNPHAKGAGAFGVFETTEDVSQYTKAALFQKGARTEMLARFSTVAGEQGSPDTWRDVRGFALKFYTSEGNYDLVGNNTPIFFVRDPMKFPHFIRSQKRMPDTGLRDNNMQWDFWTLNPETAHQVTYLMGDRGLPRTWRHMNGYGSHTYMWINAKGEKFWVKYHFKTDQGIENMTNEEAERLAGVDADFHRRDLVEAIERGDYPSWTLYVQVMPYEDAKTYRFNPFDLTKVWPHSDYPLIKVGKMTLNRNPENFFAEIEQAAFAPSNLVPGIGVSPDKMLLGRVFAYADAHRARIGTNYFQLPVNKPRVKVNSYTFDGHMTYEHSGKAPVYAPNSYGRPWSDQTGPVEDSWEADGELVRSAYELHAEDDDFSQAGTLVREVFDDAQRDRLVETVADHLSKGVVEPVLSRAFQYWKNIDETIGERIEKRYHEIAR

SEQ ID NO: 19753 - protein, 480 aa, Microbulbifer degradans 2-40
MSKCPYQTTSAGSPVADNQNSQTAGPRGPVLMQDYQLLEKLAHQNRERIPERVVHAKGWGAFGTFTVTKDISKYTRAKIFDTVGKQTPLLTRFSTVAGELGAADAERDVRGFAVKFYTEEGNWDLVGNNTPVFFIRDPLKFPDFIHTQKRHPKTNLRSPTAMWDFWSQSPESLHQITILMSDRGLPTDVRHINGYGSHTFSFWNNDGERFWVKFHFKTQQGHRHWTNEEAEKVVGKTRESTQEDLFSAIENGNYPKWTVNVQIMPEADAEKTSYNPFDLTKVWPHSEYPLIEVGEMELNRNAENYFAEIEQAAFSPSNVVPGIGFSPDKVLQARIFSYADAHRYRIGTHYEALPVNAPKCPVHHYHKDGSMNFFGNKSGSTDAYYEPNSFGGAVQNPDVAEPPLKISGDADRYNHREGNDDFSQPAALFNLFDDGQKQRLFNNIAGAMQGVPQNIIDKQLALFDKVDPAYGAGIRAALKA

SEQ ID NO: 19754 - protein, 499 aa, Brucella suis 1330
MTDRPIMTTSAGAPIPDNQNSLTAGERGPILMQDYQLIEKLSHQNRERIPERAVHAKGWGAYGTLTITGDISRYTKAKVLQPGAQTPMLARFSTVAGELGAADAERDVRGFALKFYTQEGNWDLVGNNTPVFFVRDPLKFPDFIHTQKRHPRTHLRSATAMWDFWSLSPESLHQVTILMSDRGLPTDVRHINGYGSHTYSFWNDAGERYWVKFHFKTMQGHKHWTNAEAEQVIGRTRESTQEDLFSAIENGEFPKWKVQVQIMPELDADKTPYNPFDLTKVWPHADYPPIDIGVMELNRNPENYFTEVENAAFSPSNIVPGIGFSPDKMLQARIFSYADAHRHRLGTHYESIPVNQPKCLVHHYHRDGQMNVYGGIKTGNPDAYYEPNSFNGPVEQPSAKEPPLCISGNADRYNHRIGNDDYSQPRALFNLFDAAQKQRLFSNIAAAMKGVPGFIVERQLGHFKLIHPEYEAGVRKALKDAHGYDANTIALNEKITAAE

SEQ ID NO: 19755 - protein, 510 aa, Pseudomonas syringae pv. syringae B728a
MPLLNWSRHMVCLTAAGLITVPTVYAADTLTRDNGAVVGDNQNSQTAGAQGPVLLQDVQLLQKLQRFDRERIPERVVHARGTGVKGEFTASADISDLSKATVFKSGEKTPVFVRFSSVVHGNHSPETLRDPHGFATKFYTADGNWDLVGNNFPTFFIRDAIKFPDMVHAFKPDPRTNLDNDSRRFDFFSHVPEATRTLTLLYSNEGTPAGYRFMDGNGVHAYKLVNAKGEVHYVKFHWKSLQGLKNLDPKEVAQVQSKDYSHLTNDLVGAIKKGDFPKWDLYVQVLKPEELAKFDFDPLDATKIWPDVPEKKIGQMVLNKNVDNFFQETEQVAMAPANLVPGIEPSEDRLLQGRVFSYADTQMYRLGANGLSLPVNQPKVAVNNGNQDGALNTGHTTSGVNYEPSRLEPRPADDKARYSQLPLSGTTQQAKITREQNFKQAGDLYRSYSAKEKTDLVQSFGESLADTDTESKNIMLSYLYKADPDYGTRVAEVAKGDLSKVKSLAASLKD

SEQ ID NO: 19756 - protein, 481 aa, Pseudomonas syringae pv. syringae B728a
MSQKTLTTASGAPVADNQNSRSAGPRGPLLLDDFHLIEKLAHFNRENIPERRVHAKGSGAHGTFTVTRDISQYTSARLFDTVGKQTPIFLRFSTVGGERGSADTERDPRGFAIKFYTEEGNWDIVGNNTPVFFIRDPLKFPDFIHTQKRLPQTNLKSPQMMWDFWSHSPEALHQVTILFSDRGIPDGYRHMHGFGSHTYSLISAAGERHWVKWHYKTRQGIKNLTPAEAARIAGTDPDYAQRDLFTAIEKGDFPKWQVCIQLMTEAQAANHHENPFDVTKTWSQKEYPLIEVGELELNRNPLNYFAEVEQAAFGPSNMVPGVGLSPDRMLQGRVFAYADAHRYRVGTNHQQLPINAPKSPVHSYQRDGAMAFGTNGGATPNYEPNSYSDAPKENPRYAEPALSLNGAADRHDHRVDGDYYSQAGKLFNLMSADQQALLIGNIAGAMAGVSSDVVQRQLQHFYKADPAYGEGIARALDVKLG

SEQ ID NO: 19757 - protein, 522 aa, Pseudomonas fluorescens PfO-1
MRLKKTEEPEMNSTLGSGIIPRRTIGVLAASLLTLSVNAAPLTRDNGAAVGDNQNSQTAGANGPVLLQDVQLIQKLQRFDRERIPERVVHARGTGAHGTFTTTNDLSDLSKAKVFTAGQVTPVFVRFSAVVHGNHSPETLRDPRGFATKFYTADGNWDLVGNNFPTFFIRDAIKFPDMVHAFKPDPRTNLDDDSRRFDFFSHVPEATRTLTELYSNSGTPASYREMDGNSVHAYKLVNAKGDVHYVKFHWKSLQGIKNLDPKQVEKVQGRDYSHMTHDLVENIQKGNFPKWDLYIQVLNPQDLSKFEFDPLDATKIWPGVPERKVGQMVLNRNPANVFQETEQVAMAPSNVVPGIEPSEDRLLQGRIFAYADTQMYRLGANALQLPINAAKTAVNNGNQDGAMNAGASTSGVNYEPSRLQPREETAGARYSQTALQGSTQQAKIQREQNFKQAGDLYRSFSKKERQDLIESFGGSLASADDESKHIMLSFLYKADPEYGAGVTKVAKGDLSRVKALAAKLAD

SEQ ID NO: 19758 - protein, 513 aa, Pseudomonas aeruginosa PAO1
MNPSLNAFRPGRLLVAASLTASLLSLSVQAATLTRDNGAPVGDNQNSQTAGPNGSVLLQDVQLLQKLQRFDRERIPERVVHARGTGAHGEFVASADISDLSMAKVFRKGEKTPVFVRFSAVVHGNHSPETLRDPRGFATKFYTADGNWDLVGNNFPTFFIRDAIKFPDMVHAFKPDPRSNLDDDSRRFDFFSHVPEATRTLTLLYSNEGTPASYREMDGNSVHAYKLVNARGEVHYVKFHWKSLQGQKNLDPKQVAEVQGRDYSHMTNDLVSAIRKGDFPKWDLYIQVLKPEDLAKFDFDPLDATKIWPGIPERKIGQMVLNRNVDNFFQETEQVAMAPSNLVPGIEPSEDRLLQGRLFAYADTQMYRVGANGLGLPVNRPRSEVNTVNQDGALNAGHSTSGVNYQPSRLDPREEQASARYVRTPLSGTTQQAKIQREQNFKQTGELFRSYGKKDQADLIASLGGALAITDDESKYIMLSYFYKADSDYGTGLAKVAGADLQRVRQLAAKLQD

SEQ ID NO: 19759 - protein, 505 aa, Helicobacter pylori
MVNKDVKQTTAFGAPVWDDNNVITAGPRGPVLLQSTWFLEKLAAFDRERIPERVVHAKGSGAYGTFTVTKDITKYTKAKIFSKVGKKTECFFRFSTVAGERGSADAVRDPRGFAMKYYTEEGNWDLVGNNTPVFFIRDAIKFPDFIHTQKRDPQTNLPNHDMVWDFWSNVPESLYQVTWVMSDRGIPKSFRHMDGFGSHTFSLINAKGERFWVKFHFHTMQGVKHLTNEEAAEIRKHDPDSNQRDLFDAIARGDYPKWKLSIQVMPEEDAKKYRFHPFDVTKIWYTQDYPLMEVGIVELNKNPENYFAEVEQAAFTPANVVPGIGYSPDRMLQGRLFSYGDTHRYRLGVNYPQIPVNKPRCPFHSSSRDGYMQNGYYGSLQNYTPSSLPGYKEDKSARDPKFNLAHIEKEFEVWNWDYRADDSDYYTQPGDYYRSLPADEKERLHDTIGESLAHVTHKEIVDKQLEHFKKADPKYAEGVKKALEKHQKMMKDMHGKDMHHTKKKK

SEQ ID NO: 19760 - protein, 505 aa, Helicobacter pylori
MVNKDVKQTTAFGAPVWDDNNVITAGPRGPVLLQSTWFLEKLAAFDRERIPERVVHAKGSGAYGTFTVTKDITKYTKAKIFFKVGKKTECFFRFFTVAGERGSADAVRDPRGFAMKYYTEEGNWDLVGNNTPVFFIRDAIKFPDFIHTQKRDPQTNLPNHDMVWDFWSNVPESLYQVTWVMSDRGIPKSFRHMDGFGSHTFSLINAKGERFWVKFHFHTMQGVKHLTNEEAAEVRKYDPDSNQRDLFNAIARGDFPKWKLSIQVMPEEDAKKYRFHPFDVTKIWYLQDYPLMEVGIVELNKNPENYFAEVEQVAFTPANVVPGIGYSPDRMLQGRLFSYGDTHRYRLGVNYPQIPVNKPRCPFHSSSRDGYMQNGYYGSLQNYTPSSLPGYKEDKSARDPKFNLAHIEKEFEVWNWDYRADDSDYYTQPGDYYRSLPADEKERLHDTIGESLAHVTHKEIVDKQLEHFKKADPKYAEGVKKALEKHQKMMKDMHGKDMHHTKKKK

SEQ ID NO: 19761 - protein, 486 aa, Shewanella oneidensis MR-1
MSQQYLTSQSGSPIADDQNSLSAGERGPLLLQDWHLIEKLAHFNRERIPERVVHAKGTGVYGTFTLTKDLSDYTIADHFNGVGKQTETFVRFSTVGGEMGSADAERDPRGFGLRFYTARGNHDIVGNNTPTFFLRDGIKFPDFIHTQKRNPLTNLKDPQAMWDFWSLNPEAMHQVTILMSDRGIPANYRQMHGYGSHTFSFWNAKGERFWVKFHFKSQQGVVNLSNEQADKLKGIDPDSSQRDMVVAITDGNFPRWTVNVQIMPEADANTYHINPFDLTKVWPHGDYPLIEIGVLELNRLPQNYFAEVEQVALAPSNLVPGVGASPDKMLQARLFAYADAQRYRIGANYNQLPVNCPHAAKANHHQRAGAMAGTQCPYHGSQTGGDASANYGPNSTIGALVEPANFAEPPLRLDGETARYSRYNQDDYTQAGNLYRIFSEEEKARLVATISGSLRQASMDVQQRMLAHFQKADADYGQRIKMALGL

SEQ ID NO: 19762 - protein, 480 aa, Yersinia pestis CO92
MMSKKKGLTTAAGAPVVDNNNVITAGRRGPMLLQDVWFLEKLAHFDREVIPERRMHAKGSGAYGTFTVTHDITQYTRAKIFSEIGKKTDMFVRFSTVAGERGAADAERDIRGFAMKFYTEEGNWDLVGNDTPVFYLRDPLKFPDLNHVVKRDPRTNLRNPVYKWDFFSQLPEALHQLTIDFSDRGLPKSYRHMHGFGSHTFSLINANNERFWVKFHFRCQQGIENLMDDEAEKLIGSDRESSQRDLYEAIERGDFPRWKLQIQVMPEHEASQTPYNPFDLTKVWPHGDYPLIDVGYFELNRNPENYFAEVEQSSFNPANVVPGISFSPDRMLQGRLFSYGDAARYRLGVNHHQIPVNSAKCPFHNYHRDGAMRVDGNSGNGATYEPNSFGLFQEQPDFSEPPLTLEGAADHWNHREDTDYFSQPRALFNLLSEEEHQRMFTRIAGELSQVPEAIQRRQIALFTQVDPAYGAGVKKALGLN

SEQ ID NO: 19763 - protein, 497 aa, Vibrio vulnificus CMCP6
MGLASISVHAQTLTRDNGAPVGDNQNSITAGENGSVLLQDVHLIQKLQRFARERIPERVVHARGTGAHGEFVVSGDFSDLTLSSPFAQSGKVTPVFVRFSTVIHSKGSPETLRDPRGFATKFYTDQGNWDLVGNNLPVFFIRDSIKFPDMVHSLKPSPVTNLQDPNRFFDFFSSQPSATNMLTWVYTNLGTPASYRTMDGFGVHAYKWINRKGEVNYVKFHWKSQQGVKSLRPAEVTKVQGEDFNHLTNDLYTQINAGNFPKWDLYVKVLSPKALSKLDYNGLDATKVWLDVPEKKVGTMTLNRVPDNFFLETEQSAFAPSNIIPGIEPSEDRLLQGRLFAYADTQLYRLGANLFQLPVNSPKSPVANHNQDGPSNNSTGLGNVDSLDVNYEPSRLVNLTVDKQARAVETPLSGHVQQQAIRNPRDFFQAGVLYRSLSEQDKADLIHNLSGDLNKVNDAEVKAIMVSYFYRADKEYGTRLAKATDVNLKQVTKLASM

SEQ ID NO: 19764 - protein, 484 aa, Lactobacillus plantarum WCFS1
MTEKLTTETGQPWANNEHSQTAGARGPVLMQDYNLLEKLAHFDRERIPERVVHAKGAGAKGFFELENDMGEYTKADLFNGVGKKTPVILRFSQVAGEKGYPDTVRDVRGFALKFYTQQGNYDLVGNNTPVFFVNDPLKFPDFIHSQKRDPKTNRRTQNMQWDFWAHSPESLHQVTYLMGDRGLPASYRTMNGYGSHTFKWVNQNGEQFWVKYHFISDQGVKNMTAQAAEKAMSQDLDYLQDDLYDAIQEKNYPSWTMYVQILPYEEGLNYKWDIFDVTKVISHKDYPLIKVGKLTLNENPTNNFTDIEEAAMSPANFVPGIEPSPDKLLQGRLFSYKDAQRYRLGANFEDLPVNKPVVPVHNYERDGYMKINNQGAEVNYEPNALHGPEEVPDAAFSPDSVRGETRAQPYRYQVDYTTQAGDLYRLMSEPEQERLINTIKDALGQVTLPGVKELEIKQFYEADKNYGTRVANALGMNIADIISD

SEQ ID NO: 19765 - protein, 505 aa, Methanosarcina barkeri
MGEKNSSKVLTTGFGIPVGDDQNSLTAGNRGPVLMQDVHLLDKLSHFDHERIPERVVHAKGAGAGGYFEVTADVTKYTKAKFLSEIGKRTEVFVRFSTVGGEKGSADSARDPRGFAVKFYTEDGNYDLVGNNTPVFFIRDPLKFPDFIHTQKRNPATNCKDPDMFWDFLSLTPESIHQVTILFSDRGTPATYRNMNGYSSHTYKWYNEKGEYFWVQYHFKTDQGIKNLTLEEAEKIGGSDPDHATRDLYEAIKKGDYPSWTLEMQIMTPEQAEDYRFDIRDITKVWPHGDFPTMKIGKLVLNRNPTNYFAEVEQAAFSPANLVPGIGISPDKMLQGRVFSYHDTHIHRLGPNYNLIPVNAPKYSPENSYQRDGFMRVDANGGSGPNYWPNSFGGPSPDSVYLEPPFGVSGLAARTLYTHPNDDFVQAGNLYRDVMTDYDRENLVGNIVSHLSAAQKRIQLRQTALFFKADRDYGSRVAKGLELDIKEVERLANMTNEERARATER

SEQ ID NO: 19766 - protein, 532 aa, Oceanobacillus iheyensis HTE831
MAKKDESMNKSNLENDMSLTNRQGHPVTNNQNIRTVSNRGPATLENYDFIEKISHFDREKVPERIVHARGAGAHGYFETYGTVGNDPVSKYTRAKVFQDKGKQTPVFVRFSTVVHGNHSPETVRDPRGFAVKFYTEDGNWDLVGNNLKIFFIRDAMKFPDMIHAFRPDPVTNIQDSERFFDFCANSPESFHMVTFVYSPWGIPANYRMMQGSGVNTYKWVNKDGEAVLVKYHWEPKQGIKNLTTKEAEEIQATNFNHATQDLYDAIENGDYPEWELFVQIMSDDEHPELDFDPLDDTKLWPEDQFPWHPVGKMVLNKNPENYFTEVEQAAFGTGVLVDGLDFSDDKMLQGRTFSYSDTQRYRVGANYLQVPVNESKKRVATNHEGGQMRQKNDKAPSQNPHINYEPSVLGGLEENEQTGKEYTPHIEGNLVRESIDRNDNTKQAGHTFREFEEWEKAELISNLVGDLSVSDQRIQDKMIALAEEADDEYGRRLREGLEQAKKMGTPHNPLGAKDAEQAPKKAIDKGHDADPY

SEQ ID NO: 19767 - protein, 487 aa, Oceanobacillus iheyensis HTE831
MSNKRNTLTTASGAPVGDNQNSITAGHNGPTLLQDFHLLEKLAHFNRERIPERVVHAKGAGAHGYFEVTNDEISKYTKADFLSEKGKRTDMFIRFSTVAGEQGSADTVRDPRGFAVKFYTEEGNYDLVGNNTPIFFIRDAIKFPDFIHTQKRNPQTHLKDKDMVWDFWSLSPESLHQVTYLHSDRGLPATLRHMNGYGSHTFKWVNAEGEAFWVKYHFISEQGIKNLDPALADKIAGENPDYHTEDLFNAIEEGDHPAWKLYVQIMPYEDAKTYKWDPFDVTKIWSKKDYPRIEVGRMVLDRNPENYFAEVEQAAFSPGQFVPGIEASPDKMLQGRLFGYSDAHRYRLGANHHSIPVNRPKNEVNNYQRDGFMSVDGNGGNKPNYEPNSVNGPTEDSEAKINPFEIYGQADSVTYDSDDHYTQAGDLYRLMSADEKDRLVEAFVGHMTPVTKDEIKLRQIEHIYKADAEWGERVAQGLGLQVPESVK

SEQ ID NO: 19768 - protein, 510 aa, Pseudomonas syringae pv. tomato str. DC3000
MPLLNWSRHMVHLTAIGLISIPAAYAADTLTRDNGAAVGDNQNSQTAGAQGPVLLQDVQLLQKLQRFDRERIPERVVHARGTGVKGEFTASADISDLSKATVFKSGEKTPVFVRFSSVVHGNHSPETLRDPHGFATKFYTADGNWDLVGNNFPTFFIRDAIKFPDMVHAFKPDPRTNLDNDSRRFDFFSHVPEATRTLTLLYSNEGTPTGYRFMDGNGVHAYKLVNAKGEVHYVKFHWKTLQGIKNLDPKEVAQVQSKDYSHLTNDLVGAIKKGDFPKWDLYIQVLKPEDLAKFDFDPLDATKIWPDVPEKKIGQMVLNKNVDNFFQETEQVAMAPANLVPGIEPSEDRLLQGRVFSYADTQMYRLGANGLSLPVNQPKVAVNNGNQDGAMNSGKTTSGVNYEPSRLEPRPADEKARYSELPISGTTQQAKITREQNFKQAGDLYRSYNAKEQTDLVQSFGESLADTDTESKNIMLSFLYKADPTYGTRVTEAAKGDLAKVKSLAASLKD

SEQ ID NO: 19769 - protein, 513 aa, Vibrio parahaemolyticus RIMD 2210633
MVSTHWRATMQMSKSFLLITVGLASTSLQAQTLTRDNGAPVGDNQNSITAGENGSVLLQDVHLIQKLQRFARERIPERVVHARGTGAHGEFVASGDFSDLTVSAPFTEKGKVTPVFVRFSTVIHSKGSPETLRDPRGFATKFYTEQGNWDLVGNNLPVFFIRDSIKFPDMVHSLKPSPVTNVQDPNRFFDFFSHEPSATHMLTWVYSNLGTPASYRTMDGFGVHAYKWINQQGDVNYVKFQWKSQQGIKSLRPNKVTEMQGKDFNHLTNDLYAAIGRGNYPKWDLYVKVLSPEALSKLDYNGLDATKVWLNVPDRKVGTMTLNRLPENFFLETEQSAFAPSNLIPGIEPSEDRLLQGRLFAYADTQLYRLGANLFQLPVNRPLTSVNNHNQNGLSNNAQLSNGDVNYEPSRKLNLAEDNQFKAVETKLVGTVQQKAISKPRDFYQAGVLYRSMNEQDRSDLIANLAGDLNKVIDKDIKATMVSYFYRADKEYGSRLAEATDTNLSQVKNKAMM

SEQ ID NO: 19770 - protein, 479 aa, Vibrio parahaemolyticus RIMD 2210633
MTNKKLTTAAGCPVAHNQNVMTAGPRGPQLLQDVWFLEKLAHFDREVIPERRMHAKGSGAYGTFTVTHDITKYTRAKIFSEVGKKTELFARFTTVAGERGAADAERDIRGFALKFYTEEGNWDLVGNNTPVFFLRDPLKFPDLNHAVKRDPRTNMRSSTNNWDFWTSLPEAFHQVTIVMSDRGIPASYRHMHGFGSHTFSFINAENERYWVKFHFKTQQGIKNIGDEEAQLLAGKDRESHHRDLYESIERQDFPKWKMYVQIMPELEADEVNFNPFDLTRVWSQKDYPLIPVGEFELNRNPENFYAEVEQSAFNPAAIVPGIGFSPDKMLQGRLFAYGDAQRYRLGVNHHQIPVNAPRCPVHSYHRDGAMRVDGNFGSTLGYEPNYKQEWAEQPDYSEPPLRISGHADHYDHRVDEDYFSQAGDLFRLMNEEQRQALFDNTARAMDGVPDFIKERHVTHAYQADEAYGKGLELALGLAK

SEQ ID NO: 19771 - protein, 547 aa, Bacillus subtilis subsp. subtilis str. 168
MKDDHQNKQHQSNAQGSEEAFSHKTSGKNESEDTLTNRQGHPVTDNQNVRTVGNRGPTTLENYDFLEKISHFDRERIPERVVHARGAGAHGYFEAYGSFGDEPISTYTRAKLFQEKGKKTPAFVRFSTVNHGKHSPETLRDPRGFAVKLYTEDGNWDLVGNNLKIFFIRDPLKFPDLVHAFQPDPVTNIQDGERIFDFISQSPEATHMITFLFSPWGIPANYRQMQGSGVHAYKWVNEEGKAVLVKYHFEPKQGIRNLTQKEAEEIQGKNFNHATQDLYDAIENGDYPEWEVYAQIMSDDEHPELDFDPLDPTKLWYKDDFPWKPIGKLVLNKNPENYHAEVEQASFGTGVLVDGLDFSDDKLLQGRTFAYSDTQRYRVGANYLQLPINSPKKHVATNQEGGQMQYRVDRAEGQNPHVNYEPSIMGGLKEAKQDGKDHTPHVEGDVKREAIDRTNNFGQAGETYRRFTEFERNELITNLVNTLSTCRKEIQDQMIENFTKADPDYGKRVAEGLKKVSENNSNGPIGTTETEQAAKQAEQESHPSDPY

SEQ ID NO: 19772 - protein, 483 aa, Bacillus subtilis subsp. subtilis str. 168
MSSNKLTTSWGAPVGDNQNSMTAGSRGPTLIQDVHLLEKLAHFNRERVPERVVHAKGAGAHGYFEVTNDVTKYTKAAFLSEVGKRTPLFIRFSTVAGELGSADTVRDPRGFAVKFYTEEGNYDIVGNNTPVFFIRDAIKFPDFIHTQKRDPKTHLKNPTAVWDFWSLSPESLHQVTILMSDRGIPATLRHMHGFGSHTFKWTNAEGEGVWIKYHFKTEQGVKNLDVNTAAKIAGENPDYHTEDLFNAIENGDYPAWKLYVQIMPLEDANTYRFDPFDVTKVWSQKDYPLIEVGRMVLDRNPENYFAEVEQATFSPGTLVPGIDVSPDKMLQGRLFAYHDAHRYRVGANHQALPINRARNKVNNYQRDGQMRFGDNGGGSVYYEPNSFGGPKESPEDKQAAYPVQGIADSVSYDHYDHYTQAGDLYRLMSEDERTRLVENIVNAMKPVEKEEIKLRQIEHFYKADPEYGKRVAEGLGLPIKKDS

SEQ ID NO: 19773 - protein, 507 aa, Brucella melitensis 16M
MKLQEDYSMTDRPIMTTSAGAPIPDNQNSLTAGERGPILMQDYQLIEKLSHQNRERIPERAVHAKGWGAYGTLTITGDISRYTKAKVLQPGAQTPMLARFSTVAGELGAADAERDVRGFALKFYTQEGNWDLVGNNTPVFFVRDPLKFPDFIHTQKRHPRTHLRSATAMWDFWSLSPESLHQVTILMSDRGLPTDVRHINGYGSHTYSFWNDAGERYWVKFHFKTMQGHKHWTNAEAEQVIGRTRESTQEDLFSAIENGEFPKWKVQVQIMPELDADKTPYNPFDLTKVWPHADYPPIDIGVMELNRNPENYFTEVENAAFSPSNIVPGIGFSPDKMLQARIFSYADAHRHRLGTHYESIPVNQPKCPVHHYHRDGQMNVYGGIKTGNPDAYYEPNSFNGPVEQPSAKEPPLCISGNADRYNHRIGNDDYSQPRALFNLFDAAQKQRLFSNIAAAMKGVPGFIVERQLGHFKLIHPEYEAGVRKALKDAHGYDANTIALNEKITAAE

SEQ ID NO: 19774 - protein, 478 aa, Enterococcus faecalis V583
MKNQHLTTSQGSPVGDNQNSLTAGEFGPVLIQDVHLLEKLAHFNRERVPERVVHAKGAGAHGIFKVSQSMAQYTKADFLSEVGKETPLFARFSTVAGELGSSDTLRDPRGFALKFYTDEGNYDLVGNNTPIFFIRDAIKFPDFIHSQKRNPRTHLKSPEAVWDFWSHSPESLHQVTILMSDRGIPLSFRHMHGFGSHTFKWVNAAGEVFFVKYHFKTNQGIKNLESQLAEEIAGKNPDFHIEDLHNAIENQEFPSWTLSVQIIPYADALTMKETLFDVTKTVSQKEYPLIEVGTMTLNRNPENYFAEVEQVTFSPGNFVPGIEASPDKLLQGRLFAYGDAHRHRVGANSHQLPINQAKAPVNNYQKDGNMRFNNGNSEINYEPNSYTETPKEDPTAKISSFEVEGNVGNYSYNQDHFTQANALYNLLPSEEKENLINNIAASLGQVKNQEIIARQIDLFTRVNPEYGARVAQAIKQQA

SEQ ID NO: 19775 - protein, 488 aa, Bacteroides thetaiotaomicron VPI-5482
MEEKKLTAANGRPIADNQNSQTAGQRGPVMLQDPWLIEKLAHFDREVIPERRMHAKGSGAFGTFTVTHDITKYTRAAIFSEVGKQTECFVRFSTVAGERGAADAERDIRGFAMKFYTEEGNWDLVGNNTPVFFLRDPLKFPDLNHAIKRDPKTNMRSPNSNWDFWTLLPEALHQVTITMSPRGIPYSYRHMHGFGSHTYSFINADNQRIWVKFHLRTLQGIKNLTDQEAEAIIAKDRESHQRDLFESIEKGDYPKWLFQIQLMTEEEADHYRINPFDLTKVWPHKDFPLQDVGILELNRNPENYFAEVEQAAFNPINTVDGIGFSPDKMLQGRLFSYGDAQRYRLGVNSEQIPVNKPRCPFHAYHRDGAMRVDGNYGATKGYEPNSYGEWKDSPHMKEPPLKASGNGEIYNYNEREYDDDYYSQPGDLFRLMPADEQQLLFENTARAMGDSELFIKQRHTRNCYKADPAYGAGVAKALGIDLQEALKE

SEQ ID NO: 19776 - protein, 488 aa, Bacillus cereus ATCC 14579
MNPNNRLTTNQGAPVGDNQNSRTAGRRGPVLLEDYHLVEKLAHFDRERIPERVVHARGAGAHGVFVTKNSMKQYTKAAFLQNEGTETPVFVRFSTVIHGQGSPETARDPRGFAVKFYTEEGNYDIVGNHLPVFFIRDAIKFPDMVHSLKPAPDTNIQTPDRYWDFMTLSPESTHMMTWVFSDYGTPASYREMEGFGVHSFKWINEEGKIVYIKYHWKPQQGVRNLNAKEVQEVQGKDFNHATRDLFDAIEKGNHPKWDLHVQVMQLDEMDSLDFDPLDPTKVWPEDRFPLIEVGTMTLNRNPKNFFAEVEQVAFSPSATVNGIEPSEDKLLQGRLFSYPDTQRYRLGANYLQIPVNCPYAAVHNQQRDGAMQVNQNPSTINYEPSRHAENPVEDPAYRDSTMKVEGYVSREKIEKPNDFKQAGERYRSFSKEEQDNLIANLTNDLKDVNERTKLLAVCNFFRADQEYGMRLAQALNVDITQYVGNAPK

SEQ ID NO: 19777 - protein, 181 aa, Coxiella burnetii RSA 493
MTKKQKPSQNEDLNLTTAQGTPISDDQNSLKIGDRGPLLLEDFPFREKLFHFDHERIPERVVHARGFGVHGYFETDVSLSEITMAHLFQKKGEKTPVFVRFSTVVGSQGSPDLARDVRGFAVKFYTKEGNWDLVGNNIPVFFIQDPIKFPDLIHAAKAEPDRGFPQAQTANDNFWENFRYQ

SEQ ID NO: 19778 - protein, 485 aa, Streptomyces avermitilis MA-4680
MSKRVLTTESGAPVADNQNSATAGVGGPLLLQDQHLLEKLARFNRERIPERVVHARGSGAYGHFEVTDDVTGFTYADFLNTVGKRTEVFLRFSTVADSLGGADAVRDPRGFAVKFYTEEGNYDLVGNNTPVFFIKDPLKFPDFIHSQKRDPFTGKQEPDNVWDFWAHSPEATHQVTWLMGDRGIPASYRHMNGYGSHTYQWTNAEGEAFFVKYHFKTNQGIRSLSAEQAQEIAGTDPNSHQTDLLQAIERGVRPSWTLYVQIMPAAEAAEYRFNPFDLTKVWPHTDYPLQRVGRLVLDRNPDNVFAEVEQAAFSPNNFVPGIGPSPDKMLQGRLFAYADAHRYRLGVNHTQLAVNAPRATVVSNYGRDGLMASPAQGRAAKNYEPNSYDGPAETGRPLSAPLAVTGHTGTHEAPPHTKDDHFFQAGELYRLMSAEERSRLVANIAGGLSQVSRDDVIEKNLTHFHAADPEYGTRVEEAVRALRED

SEQ ID NO: 19779 - protein, 487 aa, Streptomyces avermitilis MA-4680
MTQAPQKAPYTTNNVGIPVESDEHSLTVGPDGPILLQDHYLIEKMAQFNRERVPERVVHAKGSGAYGFFEVTNDVSQFTKADLFQPGKRTEMLARFSTVAGEQGSPDTWRDPRGFALKFYTEHGNYDMVGNNTPVFFVRDTIKFQDFIRSQKRHPVTGLRSNDMQWDFWTLSPESAHQVTWLMGDRGIPKTYRHMNGYSSHTYMWINGAGERFWVKYHFKTDQGIDFLTQAEADELAGSDADKHRRDLFESIESGNAPTWTLKVQIMPFEDAADYRFNPFDLTKVWPHGDYPLIDVGRMVLNKNPEDYFIHIEQAAFEPSNLVPGIGPSPDKMLLGRLFSYPDTHRYRIGPNYAQLPPNRPHAPVNSYAKDGPMRYVPSNAARPYAPNSYGGPAADYGQFGDPASWETAGELVREATKPHREDDDWGQPGTMVRQVLDDAARDRLVSNVSGHLKADVSRPVLDRAVQYWRNIDKEIGDRIASNVNGG

SEQ ID NO: 19780 - protein, 483 aa, Streptomyces avermitilis MA-4680
MTQGPLTTEAGAPVADNQNSETAGVGGPVLVQDQLLLEKLAHFNRERIPERVVHARGAAAYGTFTLTRDVSQWTRAAFLSEVGKQTETFLRFSTVAGNLGSADAVRDPRGWALKFYTEEGNYDLVGNNTPVFFIKDAIKFPDFIHTQKRDPYTGSQEADNVWDFWGLSPESTHQVTWLFGDRGIPASYRHMNGYGSHTYQWNNEAGEVFWVKYHFKTDQGIKNLTTEEAVNVSGLDPDSHQRDLRESIERGDFPTWTVQVQIMPAAEAAGYRFNPFDLTKVWPHEDYPPIEIGKLELNRNPENIFAEVEQSIFSPAHFVPGIGPSPDKMLQGRLFAYGDAHRYRVGINADHLPVNRPHATEARTNSRDGFLYDGRHKGTKNYEPNSFGGPFQTDRPLWQPISVTGVTGDTEAPVHTEDNDFVQAGNLYRLMSEDEKTRLVDNLAGFISKVSRDDIAERAINNFRQADGDFGKRLEAAVQALRG

SEQ ID NO: 19781 - protein, 499 aa, Brucella melitensis biovar Abortus
MTDRPIMTTSAGAPIPDNQNSLTAGERGPILMQDYQLIEKLSHQNRERIPERAVHAKGWGAYGTLTITGDISRYTKAKVLQPGAQTPMLARFSTVAGELGAADAERDVRGFALKFYTQEGNWDLVGNNTPVFFVRDPLKFPDFIHTQKRHPRTHLRSATAMWDFWSLSPESLHQVTILMSDRGLPTDVRHINGYGSHTYSFWNDAGERYWVKFHFKTMQGHKHWTNAEAEQVIGRTRESTQEDLFSAIENGEFPKWKVQVQIMPELDADKTPYNPFDLTKVWPHADYPPIDIGVMELNRNPENYFTEVENAAFSPSNIVPGIGFSPDKMLQARIFSYADAHRHRLGTHYESIPVNQPKCPVHHYHRDGQMNVYGGIKTGNPDAYYEPNSFNGPVEQPSAKEPPLCISGNADRYNHRIGNDDYSQPRALFNLFDAAQKQRLFSNIAAAMKGVPGFIVERQLGHFKLIHPEYEAGVRKALKDAHGYDANTIALNEKITAAE

SEQ ID NO: 19782 - protein, 442 aa, Pseudomonas fluorescens
RERIHERVVHARGTGAHGTFTVTDNLSDLTKAKVFAAGETTPVFVRFSAVVHGNHSPETLRDPRGFATKFYTAEGNWDLVGNNFPTFFIRDAIKFPDMVHAFKPDPRTNLDDDSRRFDFFSHVPESTRTLTELYSDSGTPASYREMDGNGVHAYKLINAKGEVHYVKFHWKSLQGIKNLDPKQVTEVQGRDYSHMTNDLVAHINKGDFPKWDLYVQVLKPEDLAKFDFEPLDATKIWPDFTERKVGQMVLNRNLDNVFQETEQVPWPPANLVPGIEPSEIRLLQARLCSYAETQIYRLGAKRLQLRIQRPTVTVNNGNQDGAMNFGKDTTGVNYQPKSSDAREEPATARYSESALAGNTQQAKIQREQNFKQAGDLYRSYSKKERQDLIDNFGGSLATTDDESKHIILSFLYKADPEYGTGVAKVAKGDLARVKALAEKLTD

SEQ ID NO: 19783 - protein, 506 aa, Pseudomonas fluorescens
MSQDPKKCPVTHLTTEAGAPVVDNQNSMTAGARGPLLAQDLWLNEKLANFVREVIPERRMHAKGSGAFGTFTVTNDITQYTRAKIFSEVGKKTEMFARFSTVAGERGAADAERDIRGFALKFYTEEGNWDLVGNNTPVFFLRDARKFPDLNKAVKRDPFSNKRSATNNWDFWTLLPEAFDQVTIVMSDRGIPAGYRHIDGFGSHTFSFINTQNERFWVKFHMRTQQGIQNLTDAEAADLIAKDRESSQTDLFDAIERGEYPKWKMYVQIMPELEAETVPYHPFDLTKVWPKGDYPLIEVGEFELNRNPENYFQDVEQAAFAPSNLVPGISYSPDRMLQARLVNYADAARYRVGVNHSQVPVNAARCPVNSNRRDGQGRMDGNYGSLPHYEPNSFNQWQEQPQFKEPALKITGDADFWDFREDDNDYFSQPRALFNLMNDEQKQALFNNTAAAMGDALDFIKYRHIRNCYACDPAYGQGVAKALGMTVADAQAARETDPAKGLPSFL

SEQ ID NO: 19784 - protein, 507 aa, Xanthomonas campestris pv. phaseoli
MRPGHLMVLALLAPTLIAPPVFAQSVLTRDNGAKVGDNQNSQTAGATGPTLLQDVQLIQKLQRFDRERIPERVVHARGTGVKGEFTATADLSSLTKAKVFSAGEKTPVFVRFSSVVHGNHSPETLRDPHGFATKFYTSEGNWDLVGNNFPTFFIRDAIKFPDMVHAFKPDPRTNLDDDSRRFDFFSHVPEATRTLTLLYSNEGTPAGYRFMDGNGVHAYKLVNAQGEVHYVKFHWKTLQGIKNLDPKQVAAVQAKDYSHLTNDLVGAIKKGDYPKWDLYVQVLKPEDLAKFDFDPLDATKIWPDVPEQKVGQMVLNKNVDNFFQETEQVAMAPANLVPGIEPSEDRLLQGRIFSYADTQLYRIGANGLSLPVNRPRVAVNNGNQDGQGNIGQTTSGVNYEPSRLEPRPQDTAARYSELPLSGTTQQAKITREQNFKQAGELYRSYSKKDRADLVQSFGESLATTDTESKHLMLSFLYKADPEYGTGVTRVAKGDLARVKQLASSLQD

SEQ ID NO: 19785 - protein, 492 aa, Vitis vinifera
MDPYKYRPSSAYNSPYFTTNAGAPVYNNDSSLTVGSRGPVLLEDYHLVEKLANFQRERIPERVVHARGASAKGFFEVTHDVSDLTCADFLRAPGVQTPVIVRFSTVIHERGSPETIRDPRGFAVKFYTREGNFDMVGNNFPVFFIRDAMKFPDVIHAFKPNPKSHIQEYWRVVDFLSYHPESLSTFAFLFDDVGIPQDYRHMEGFGVHTFTLLNKAGKANYVKFHWKPTCGVKCLLEDEAIRVGGTNHSHATQDLYDSIKAGNYPEWKLFIQTMDPEHEDKFDFDPLDVTKTWPEDILPLQPVGRLVLNKNIDNFFAENEMLAFNPALVVPGIYYTNDKMLQGRIFAYSDTQRHRLGPNYLQLPVNAPKCAFHNNHHDGSMNFMHRDEEVDYFPSRFDPVRHAETFPIPSTICHGKREKVVIEKENNFKQPGERYRSFAPDRQERFINRWVETLSDPRVTYEIRSIWISYWSQADRSLGQKLASRLNVKPKY

SEQ ID NO: 19786 - protein, 509 aa, Ralstonia solanacearum
MSFPSRSLRVSLLALAALTAFHAGAVTLTRDNGAPVGDNQNSQTAGPNGPVLLQDVQLIQKLQRFDRERIPERVVHARGTGAHGVFVASKDISDLTRAKVFTPGEETPVFVRFSSVIHSGHSPETLRDPRGFATKFYTREGNWDLVGNNLPVFFIRDAMKFPDMVHSLKPSPDSNVQDPNRFFDFFSHQPESTHMLTRVYTDYGTPTSYREMDGNSVHAYKFVNAKGEVHYVKFHWKSLQGQKGLSAKEVEAIQGKDFNHMTRDLIANIDKGNYPKWDLYIQVLKPEQLAKFDFDPLDATKVWPDVPEVKVGTMTLNKNPENVFQETEQAALAPSNLVPGIEPSEDRLLQGRIFSYADTQLYRVGTNGLQLPVNRPRTSAANYNQDGDLNAGARKGSVNYQPSAHADLSDAATVKYSQLPVSGTTQQQRIARTQNFKQAGDYYRSLTAKEQANLVSNLAGDLGQVKDDGVKYTMLSYFQKADAGYGRALAQAVKADPARVESLAAKLQD

SEQ ID NO: 19787 - protein, 493 aa, Chlamydomonas reinhardtii
MDPAKIRPSSAYNTPYWTTNSGAPVWNNNNSMTVGTRGPILLEDYHLVEKLAQFDRERIPERVVHARGAAAKGFFEVTHDISALTAADFLRAPGVQTPVIVRFSTVVHERGSPETLRDPRGFAVKFYTREGNFDMVGNNMPVFFIRDGMKFPDMVHAFKPNPKSHIQEAWRIMDFLSHHPESCHMLTFLLDDAGIPLNYRHMPGFGVHTMKLINKAGRETYVKFHWVPKCGEKYLLDDEAVMVGGANHSHATKDLFDAIAAGDYPEWALMVQTMDPADEDKFDFDPLDVTKTWPESLFPMQPVGRMVLNRNVDNFFNENEQVAFCPAIIVPGIGYSDDKLLQTRIFSYADTQRHRLGPNYLLLPVNAPRAPHHNNHHEGFMNFMHRDEEINYFPSRFDPVRNAERVAAVSSAPLSGRREKMVIAKENNFMQAGAAGRAFDAARQERFVVRVADMLADPRCTQEIRRIWVGYWSQADPQLGARIAAKLQGRGCL

SEQ ID NO: 19788 - protein, 492 aa, Chlamydomonas reinhardtii
MDPAKIRPSSAYNTPYWTTNSGAPVWNNNNSMTVGTRGPILLEDYHLVEKLAQFDRERIPERVVHARGAAAKGFFEVTHDISALTAADFLPAPGVQTPVIVRFSTVVHERGSPETLRDPRGFAVKFYTREGNFDMVGNNMPVFFIRDGMKFPDMVHAFKPNPKSHIQEAWRIMDFLSHHPESCHMLTFLLDDAGIPLNYRHMPGFGVHTMKLINKAGRETYVKFHWVPKCGEKYLLDDEAVMVGRSNHSHATKDLFDAIAAGDYPEWALMVQTMDPADEDKFDFDPLDVTKTWPESLFPMQPVGRMVLNRNVDNFFNENEQVAFCPAIIVPGIGYSDDKLLQTRIFSYADTQRHRLVPNYLLLPVNAPRAPHHNNHHEGFMNFMHRDEEINYFPSRFDPVRNAEGWLPCRVPLSGRREKMVIAKENNFMQAGARWRAFDAARQERFVVRVADMLADPRCTQEIRRIWVGYWSQADPQLGAGIAAKLQGRGCL

SEQ ID NO: 19789 - protein, 484 aa, Pseudomonas syringae
TDTLTRDNGAVVGDNQNSQTAGAQGPVLLQDVQLLQKLQRFDRERIPERVVHARGTGVKGEFTASADISDLSKATVFKSGEKTPVFVRFSSVVHGNHSPETLRDPHGFATKFYTADGNWDLVGNNFPTFFIRDAIKFPDMVHAFKPDPRTNLDNDSRRFDFFSHVPEATRTLTLLYSNEGTPAGYRFMDGNGVHAYKLVNAKGEVHYVKFHWKSLQGIKNLDPKEVAQVQSKDYSHLTNDLVGAIKKGDFPKWDLYVQVLKPEELAKFDFDPLDATKIWPDVPEKKIGQMVLNKNVDNFFQETEQVAMAPANLVPGIEPSEDRLLQGRVFSYADTQMYRLGANGLSLPVNQPKVAVNNGNQDGALNTGHTTSGVNYEPSRLEPRPADDKARYSELPLSGTTQQAKITREQNFKQAGDLYRSYSAKEKTDLVQKFGESLADTLTESKNIMLSYLYKEDPNYGTRVAEVAKGDLSKVKSLAASLKD

SEQ ID NO: 19790 - protein, 510 aa, Pseudomonas syringae pv. syringae
MPLLNWSRHMVCLTAAGLITVPTVYATDTLTRDNGAVVGDNQNSQTAGAQGPVLLQDVQLLQKLQRFDRERIPERVVHARGTGVKGEFTASADISDLSKATVFKSGEKTPVFVRFSSVVHGNHSPETLRDPHGFATKFYTADGNWDLVGNNFPTFFIRDAIKFPDMVHAFKPDPRTNLDNDSRRFDFFSHVPEATRTLTLLYSNEGTPAGYRFMDGNGVHAYKLVNAKGEVHYVKFHWKSLQGIKNLDPKEVAQVQSKDYSHLTNDLVGAIKKGDFPKWDLYVQVLKPEELAKFDFDPLDATKIWPDVPEKKIGQMVLNKNVDNFFQETEQVAMAPANLVPGIEPSEDRLLQGRVFSYADTQMYRLGAIGLSLPVNQPKVAVNNGNQDGALNTGHTTSGVNYEPSRLEPRPADDKARYSELPLSGTTQQAKITREQNFKQAGDLFRSYSAKEKTDLVQRFGESLADTHTESKNIMLSVLYKEDRHYGTRVAEVAKGDLSKVKSLAASLKD

SEQ ID NO: 19791 - protein, 352 aa, Pseudomonas syringae pv. syringae
IKFPDMVRAFKPDPRTNLDNDSRRFDFFSRVPEATRTLTLLYSNEGTPAGYRFMDGNGVHAYKLVNAKGEVHYVKFHWKSLQGLKNLDPKEVAQVQSKDYSHLTNDLVGAIKKGDFPKWDLYVQVLKPEELAKFDFDPLDATKIWPDVPEKKIGQMVLNKNVDNFFQETEQVAMAPANLVPGIEPSETACCRPCVSYADTQMYRLGANGLSLPVNQPKVAVNNGNQDGALNTGHTTSGVNYEPSRLEPRPADDKARYSQLPLSGTTQQAKITREQNFKQAGDLYRSYSAKEKTDLVQSFGESLADTDTESKNIMLSYLYKADPDYGTRVAEVAKGDLSRFSSLAASLKELMI

SEQ ID NO: 19792 - protein, 296 aa, Pinus pinea
SAKGFFEVTHDISHLTCADFLRAAGVQTPLIVRFSTVIHERGSPETLRDPRGFAVKFYTREGNFDLVGNNFPVFFVRDGMKFPDMVHALKPNPKSHIQEDWRILDFFSHHPESLHMFTFLFDDLGIPLNYRHMDGSGVHTFTLVNKAGRQTYVKFHWRPTCGVKCLLDDEAVVVGGTNHSHATKDLYDSIAAGNYPEWKLFIQTMDPRDEDKYDFDPLDVTKTWPEDIFPLQPVGRMVLNKNIDNFFAENEQLAFCPALVVPGVYYTEDKLLQTRVFSFADTQRHRLGPNYLMLPA

SEQ ID NO: 19793 - protein, 718 aa, Blumeria graminis
MRLSLWNLLGLSGLVVASCPYMSGEDQEYHISHIQARGTDSEFLDQFKVEDSNSYLTTDAGGPIQDDASLKAGERGPTLLEDFIFRQKIQHFDHERVPERAVHARGAGAYGTFTSYADWTNITAASFLNSKGKETPVFVRFSTVAGSRGSADTVRDVHGFATRFYTDEGNFDIVGNNIPVFFIQDAILFPDLVHAVKPSPDSEIPQAATGHDSAWDFFSQQPSTLHTLFWAMSGHGIPRSYRHMDGFGVHTMRLVTDDGKSKLVKWHWKTKQGKASLVWEEAQILAGKNPDFHRQDLWDDINAGNGPEWELGVQIVDEEDVQAFGFDLLDPTKFLPEELVPVTILGKMKLTDNPTNYFAETEQVMFQPGHIVRGVDFSDDPLLQGRIYSYLDTQLNRNGGPNFEQLPVNRPRTKVHNNNRDGAGQMFIHTNKAPYSPNSLSGGNPKQANQTKGRGFFTAPSRKVVGSLHRGTASSFADVWSQPRMFYNSLIPSEQQFLVNAIRFEISQLKSDLIKKNTLMQLNRVSNDLATRVAAVIGYKPLDPSPEFYTNATTDYVTIFGKPLPSVVGFTVGILASTSSSTSISQAAQLATSFSSRGIRAVIVGESLLSGTDQTYSSADATAFDAVVVTMGAETLFGPVAKPNTLFPSGRPSQILHDAYRWGKPVGAVSKASVVLEPLPGTKNQGGVYRVESVNELATSIAKGLETFRFVDRFPLDS

SEQ ID NO: 19794 - protein, 195 aa, Morus alba
GFFEVTHDISNLTCADFLRAPGVQTPVIVRFSTVIHERGSPETLRDPRGFAVKFYTREGNFDLVGNNFPVFFIRDGIKFPDMVHALKPNPKSHIQEFWRILDFFSHHPESLHMFTFLFDDIGVPQDYRHMDGSGVNTYTLIDKAGKAHYVKFHWKPTCGVKSLLEDEAIRVGGANHSHATQDLYDSIAAGNYPEW

SEQ ID NO: 19795 - protein, 150 aa, Betula pendula
GVKCLLDDEAIRVGGANHSHATKDLYDSIGAGNYPEWKLYIQIIDPDHEDKFDFDPLDVTKIWPEDILPLQPVGRLVLNKNIDNFFAENEQLAFCPSIVVPGVYYSDDKLLQTRIFSYSDTQRHRLGPNYLQLPANAPKCAHHNNHHEGF

SEQ ID NO: 19796 - protein, 150 aa, Betula pendula
GVKCLLDDEAIRVGGANHGHATKDLYVSIGAGNYPEWKLYIQIIDPDHEDKFDFDPLDVTKIWPEDILPLQPVGRLVLNKNIDNFFAENEQLVFCPSIVVPGVYYSDDKLLQTRIFSYSDTQRHRLGPNYLQLPANAPKCAHHNNHHEGF

SEQ ID NO: 19797 - protein, 335 aa, Azotobacter vinelandii
MKTQNKDLPGWLLAAGLGLAAPFGMAVQDEVTPAQVVAALEDTFGVTPGERRNHIKGTCASGEFVGLPAVAAWSRSALFSGQPVPVVARFSLPGGNPKVPDTARSVRGMALEFRLPGGALQHMTMLDTPVFGAAQPKTFLDQILALKPDPATGKPDPAKLAAFRASHPDSRAQARFLAEHNPPPSFANSSYFGIHTFKFVDATGKATLVRWRFVPEDGEKSLSDEELETLPADFLEERLIQRTAQGPVRWDMLVSIGQPGDPENDPTVAWPENREQVKAGTLVLTAAMPQKGAACEKVNFDPLVMAEGIAPTDDPILRFRSPAYAVSFAKRQAGQ

SEQ ID NO: 19798 - protein, 492 aa, Mesembryanthemum crystallinum
MDPYKYRPSSAFNSPYFTTNSGAPVYNNNSSLTVGTRGPILLEDYHLVEKLANFDRERIPERVVHARGASAKGFFEVTHDVSHLTCADFLRAPGVQTPVIVRFSTVIHERGSPETIRDPRGFAVKFYTREGNFDMVGNNFPVFFIRDGMKFPDMVHALKPNPKSHIQENWRVLDFFSHHPESLHMFTFLFDDVGVPTDYRHMEGSGVNTYTLISKSGKVHYVKFHWKPTCGVKCLLEEEAVKIGGANHSHATQDLYDSIAAGNYPEWKLYIQTIDPADEDKFDFDPLDVTKTWPEDILPLQPVGRLVLNKNIDNFFAENEQLAFCPGIVVPGVYYSDDKLLQTRIFSYADTQRHRLGPNYLQLPVNAPKCAHHNNHYDGQMNFMHRDDEVDYFPSRYDPVRHAERYPIPPNVLNGNRDRQIIQKENNFKQPGERYRSWDPARQERFICRWVDALSDPRITHEIRNIWISYWSQADKSVGMKLASRLNVRPTM

SEQ ID NO: 19799 - protein, 493 aa, Mesembryanthemum crystallinum
MDPYKYRPSSSYNTSFMTTKTGQPVWNDDSSLTVGARGPILLEDYHLLEKIASWDRERIPERVVHARGASAKGFFEVTNDITHLTCADFLRAPGVQTPVIVRFSTVIHERGSPETMRDPRGFALKFYTREGNFDLVGNNFPVFFNRDAMKFPDVVRAFKPNPKSHIQEMWRILDFCSHLPESLHTFAWFFDDVGIPINYRHMEGFGVHTFTMLNRAGKETYVKFHWKPTCGVKSIVTEEEAIQVGGANHSHATQDLYDSIAAGNYPEWRLFIQTMDPADEDKFDFDPLDITKTWPEDILPLQPVGRLVLNKNIDNFFTENEMLAFNPASIVPGIHFSHDKMLQARTFAYADTQRHRLGVNFLLLPVNAPKCAHHNDHHDGFMNFMHRDEEVNYFPSRSNVCHHAERFPIPSHTLTGRRERRIIPKENNFKQPGDRYRSWDPARQERYLARWVKALSDPKVTPEIRGVWVSWLSQSDRSLGMKLANKLNVRPTM

SEQ ID NO: 19800 - protein, 492 aa, Gossypium hirsutum
MDPYKHRPSSAFNSPFWTTNSGAPVWNNNSSLTVGPRGQYLLEDYHLVEKLANFDRERIPERVVHARGASAKGFFEVTHDISHLTCADFLRAPGVQTPVIVRFSTVIHERGSPETLRDPRGFAVKFYTREGNFDLVGNNFPVFFIRDGMKFPDMVHALKPNPKSHIQENWRILDFFSHHPESLHMFTFLFDDLGVPQDYRHMEGSGVNTYTLINKAGKAHYVKFHWKPTCGVKCLLEDEAIKVGGANHSHATQDLYDSIAAGNYPEWKLFIQTIDPDHEDKFDFDPLDVTKTWPEDILPLQPVGRLVLNKNIDNFFAENEQLAFCPAIVVPGIYYSDDKLLQTRIFSYSDTQRHRLGPNYLQLPANAPKCAHHNNHHEGFMNFMHRDEEINYFPSRYDPVRHAEMFPIPPAVCTGRREKCIIEKENNFKQPGERYRSWAADRQERFICRWVDALSDPRVTHEIRSIWISYWSQADKSVGQKLASLLNVRPSI

SEQ ID NO: 19801 - protein, 492 aa, Gossypium hirsutum
MDPYKHRPSSAFNSPFWTTNSGAPVWNNNSSLTVGPRGQYLLEDYHLVEKLANFDRERIPERVVHARGASAKGFFDVTHDISHLTCADFLRAPGVQTPVIVRFSTVIHERGSPETLRDPRGFAVKFYTREGNFDLVGNNFPVFFIRDGMKFPDMVHALKPNPKSHIQENWRILDFFSHHPESLHMFTFLFDDLGVPQDYRHMEGSGVNTYTLINKAGKAHYVKFHWKPTCGVKCLLEDEAIKVGGANHSHATQDLYDSIAAGNYPEWKLFIQTIDPDHEDKFDFDPLDVTKTWPEDILPLQPVGRLVLNKNIDNFFAENEQLAFCPAIVVPGIYYSDDKLLQTRIFSYSDTQRHRLGQTYLQLPANAPKCAHHNNHHEGFMNFMHRDEEINYFPSRYDPVRHAEMFPIPPAVCTGRREKCIIEKENNFKQPGERYRSWAADRQERFICRWVDALSDPRVTHEIRSIWISYWSQADKSVGQKLASLLNVRPSI

SEQ ID NO: 19802 - protein, 492 aa, Gossypium hirsutum
MDPYKFRPSSSFDSPFWTTNSGAPVWNNNSSLTVGARGPILLEDYHLVEKLANFDRERIPERVVHARGASAKGFFEVTHDISQLTCADFLRAPGVQTPLIVRFSTVIHERGSPETLRDPRGFAVKFYTREGNFDLVGNNFPVFFIRDGMKFPDMVHALKPNPKSHIQENWRILDFFSHHPESLHMFTFLFDDIGVPQDYRHMDGSGVHTYTLINKAGKSHYVKFHWKPTCGVKSLLEDEAIRVGGANHSHATQDLYDSIAAGNYPEWKLFIQIMDPLHEDRFDFDPLDVTKTWPEDIFPLQPMGRMVLNKNIDNFFAENEQLAFCPSLIVPGIYYSDDKLLQTRIFSYSDTQRHRLGPNYLQLPANAPKCAHHNNHHEGFMNFMHRDEEVNYFPSRYDPVRHAEKHPIPSTVLSGKREKCIIGKENNFKQPGERYRSFSADRQERFINRWIDALSDPRVTHEIRSIWISYWSQADKSLGQKIASRLNVRPSI

SEQ ID NO: 19803 - protein, 101 aa, Cucumis sativus
HIQENWRILDFFSHHPESMNMFTFLFDDIGIPQDYRHMDGSGVNTYTLINKAGKAHYVKFHWRPTCGVKSLLEEDAIRVGGSNHSHATQDLYDSIAVETYP

SEQ ID NO: 19804 - protein, 83 aa, Cucumis sativus
ERVVHARGASAKGFLRVTHDITNLSCADFLRAPGVQTPVIVRFSTVIHERGSPETLRDPRGFAVKFYTREVRILVVYAFIGCT

SEQ ID NO: 19805 - protein, 190 aa, Prunus armeniaca
GFFEVTQDVPQLTCADFLRAPGVQTPVIVRFSTVIHERGSPETLRDPRGSAVKFYTREGNFDLVGNNFPVFFVRDAMKFPDAIRAFKPNPKSHIQETWRILDFFSHLPESLHTFAFFYDDLGIPQDYRHMEGSSVHAYTLVSKAGKVHYVKFHWKPTCGVKCLLEDEAIKVGGANHSHATKDLYDSIAAG

SEQ ID NO: 19806 - protein, 492 aa, Cucurbita pepo
MDPYRHRPSSAFNAPFWTTNSGAPVWNNNSSMTVGPRGPILLEDYHLVEKLANFDRERIPERVVHARGASAKGFFEVTHDITNLSCADFLRAPGVQTPVIVRFSTVIHERGSPETLRDPRGFAVKFYTREGNFDLVGNNFPVFFIRDGMKFTRHVHPLKPNPKSHIQENWRILDFFSHHPESLNMFSFLFDDIGIPQDYRHMDGSGVNTYTLINKAGKAHYVKFHWRPTCGVKSLLEEDAIRVGGSNHSHATQDLYDSIAAGNYPEWKLFIQTIDPDHEDKYDFDPLDVTKTWPEDILPLQPVGRMVLNKNIDNFFAENEQLAFCPAIIVPGVYYSDDKLLQTRIFSYADTQRHRLGPNYLQLPANAPKCAHHNNHHEGFMNFMHRDEEVNYFPSRFDPSRHAERYPHPPAVCSGKRERCIIEKENNFKEPGERYRSWTPDRQERFVRRWVDALSDTRVTHEIRSIWISYWSQADRSLGQKLASHLNVRPSI

SEQ ID NO: 19807 - protein, 492 aa, Cucurbita pepo
MDPYKYRPSSAYNTPFCTTNSGAPIWNNTAVMSVGERGPILLEDYQLIEKIATFTRERIPERVVHRRGASAKGFFEVTHDISNLTCADFLRAPGVQTPVIVRFSTVIHERGSPETLRDPRGFAVKFYTREGNFDLVGNNFPVFFVRDAMQFPDVIRAFKPNPKSHLQEPWRYLDFCSYHPESLLSFAWFYDDVGIPINYRHMEGFGVQAYSLINKSGKARLVKFHWKPTCGVKSMMEEEAIRIGGTNHSHATQDLYESIAAGNFPEWRLYIQTIDYEDQNKYDFEPLDTTITWPEDVVPLQPVGRLVLNKNIDNFFAENEMLAFSMSLVPGIHYSDDKMLQARSFAYADTQRHRLGPNYLQLPVNAPKCPHHNNHHEGFMNFMHRDEEVNYFPSRYDPCRHAEKFPMPPNVLTGKRERCVIPKENNNFKQAGDRYRSWAPDRQDRFVKRFVEALSDPRVTDEVRNIWISYWSQADRSLGQKIASRLNVRPNI

SEQ ID NO: 19808 - protein, 492 aa, Cucurbita pepo
MDPYKYRPSSAYNTPFCTTNSGAPIWNNTAVMSVGERGPILLEDYQLIEKIATFTRERIPERVVHARGASAKGFFEVTHDVSDLSCADFLRAPGVQTPVIVRFSTVIHERVSPETVRDPRGFAVKFYTREGNFDLVGNNFPVFFVRDAMQFPDVIRAFKPNPKSHLQESWRFLDFCSYHPESLLSFAWFYDDVGIPINYRHMEGFGVQAYSLINKAGKARLVKFHWKPTCGVKSMLEEEAIRVGGSNHSHATQDLYESIAAGNFPEWRLYIQTIDYEDQNNYDFEPLDTTIAWPEDVVPLRPVGRLVLNKNIDNFFAENEMLAFSMSLVPGIHYSDDKMLQARSFAYADTQRHRLGPNYLQLPVNAPKCPHHNNHHEGFMNFMHRDEEVNYFPSRYDACRHAEKYPMPPNVLSGKRERCVIPKENHNFKQAGDRYRSWAPDRQERFVNRFVEALSDSKVTHEVRNIWISYWTQADRSLGQKIASRMNARPNM

SEQ ID NO: 19809 - protein, 163 aa, Cucurbita pepo
HWKPTCGVKSMMEEEAIRIGGTNHSHATQDLYESIAAGNFPEWRLYIQTIDYEDQNKYDFEPLDTTITWPEDVVPLQPVGRLVLNKNIDNFFAENEMLAFSMSLVPGIHYSDDKMLQARSFAYADTQRHRLGPNYLQLPVNAPKCPHHNNHHEGFMNFMHRDE

SEQ ID NO: 19810 - protein, 492 aa, Arabidopsis thaliana
MDPYKYRPASSYNSPFFTTNSGAPVWNNNSSMTVGPRGPILLEDYHLVEKLANFDRERIPERVVHARGASAKGFFEVTHDISNLTCADFLRAPGVQTPVIVRFSTVIHERGSPETLRDPRGFAVKFYTREGNFDLVGNNFPVFFIRDGMKFPDMVHALKPNPKSHIQENWRILDFFSHHPESLNMFTFLFDDIGIPQDYRHMDGSGVNTYMLINKAGKAHYVKFHWKPTCGVKSLLEEDAIRVGGTNHSHATQDLYDSIAAGNYPEWKLFIQIIDPADEDKFDFDPLDVTKTWPEDILPLQPVGRMVLNKNIDNFFAENEQLAFCPAIIVPGIHYSDDKLLQTRVFSYADTQRHRLGPNYLQLPVNAPKCAHHNNHHEGFMNFMHRDEEVNYFPSRYDQVRHAEKYPTPPAVCSGKRERCIIEKENNFKEPGERYRTFTPERQERFIQRWIDALSDPRITHEIRSIWISYWSQADKSLGQKLASRLNVRPSI

SEQ ID NO: 19811 - protein, 492 aa, Arabidopsis thaliana
MDPYKYRPASSYNSPFFTTNSGAPVWNNNSSMTVGPRGPILLEDYHLVEKLANFDRERIPERVVHARGASAKGFFEVTHDISNLTCADFLRAPGVQTPVIVRFSTVIHERGSPETLRDPRGFAVKFYTREGNFDLVGNNFPVFFIRDGMKFPDMVHALKPNPKSHIQENWRILDFFSHHPESLNMFTFLFDDIGIPQDYRHMDGSGVNTYMLINKAGKAHYVKFHWKPTCGVKSLLEEDAILVGGTNHSHATQDLYDSIAAGNYPEWKLFIQIIDPADEDKFDFDPLDVTKTWPEDILPLQPVGRMVLNKNIDNFFAENEQLAFCPAIIVPGIHYSDDKLLQTRVFSYADTQRHRLGPNYLQLPVNAPKCAHHNNHHEGFMNFMHRDEEVNYFPSRYDQVRHAEKYPTPPAVCSGKRERCIIEKENNFKEPGERYRTFTPERQERFIQRWIDALSDPRITHEIRSIWISYWSQADKSLGQKLASRLNVRPSI

SEQ ID NO: 19812 - protein, 492 aa, Arabidopsis thaliana
MDPYKYRPASSYNSPFFTTNSGAPVWNNNSSMTVGPRGPILLEDYHLVEKLANFDRERIPERVVHARGASAKGFFEVTHDISNLTCADFLRAPGVQTPVIVRFSTVIHERGSPETLRDPRGFAVKFYTREGNFDLVGNNFPVFFIRDGMKFPDMVHALKPNPKSHIQENWRILDFFSHHPESLNMFTFLFDDIGIPQDYRHMDGSGVNTYMLINKAGKAHYVKFHWKPTCGVKSLLEEDAIRVGGTNHSHATQDLYDSIAAGNYPEWKLFIQIIDPADEDKFDFDPLDVTKTWPEDILPLQPVGRMVLNKNIDNFFAENEQLAFCPAIIVPGIHYSDDKLLQTRVFSYADTQRHRLGPNYLQLPVNAPKCAHHNNHHEGFMNFMHRDEEVNYFPSRYDQVRHAEKYPTPPAVCSGKRERCVIEKENNFKEPGERYRTFTPERQERFIQRWIDALSDPRITHEIRSIWISYWSQADKSLGQKLASRLNVRPSI

SEQ ID NO: 19813 - protein, 492 aa, Arabidopsis thaliana
MDPYKYRPASSYNSPFFTTNSGAPVWNNNSSMTVGPRGLILLEDYHLVEKLANFDRERIPERVVHARGASAKGFFEVTHDISNLTCADFLRAPGVQTPVIVRFSTVIHERGSPETLRDPRGFAVKFYTREGNFDLVGNNFPVFFIRDGMKFPDIVHALKPNPKSHIQENWRILDFFSHHPESLNMFTFLFDDIGIPQDYRHMDGSGVNTYMLINKAGKAHYVKFHWKPTCGVKSLLEEDAIRLGGTNHSHATQDLYDSIAAGNYPEWKLFIQIIDPADEDKFDFDPLDVTKTWPEDILPLQPVGRMVLNKNIDNFFAENEQLAFCPAIIVPGIHYSDDKLLQTRVFSYADTQRHRLGPNYLQLPVNAPKCAHHNNHHEGFMNFMHRDEEVNYFPSRYDQVRHAEKYPTPPAVCSGKRERCIIEKENNFKEPGERYRTFTPERQERFIQRWIDALSDPRITHEIRSIWISYWSQADKSLGQKLASRLNVRPSI

SEQ ID NO: 19814 - protein, 492 aa, Arabidopsis thaliana
MDPYKYRPASSYNSPFFTTNSGAPVWNNNSSMTVGPRGLILLEDYHLVEKLANFDRERIPERVVHARGASAKGFFEVTHDISNLTCADFLRAPGVQTPVIVRFSTVIHARGSPETLRDPRGFAVKFYTREGNFDLVGNNFPVFFIRDGMKFPDIVHALKPNPKSHIQENWRILDFFSHHPESLNMFTFLFDDIGIPQDYRHMDGSGVNTYMLINKAGKAHYVKFHWKPTCGVKSLLEEDAIRLGGTNHSHATQDLYDSIAAGNYPEWKLFIQIIDPADEDKFDFDPLDVTKTWPEDILPLQPVGRMVLNKNIDNFFAENEQLAFCPAIIVPGIHYSDDKLLQTRVFSYADTQRHRLGPNYLQLPVNAPKCAHHNNHHEGFMNFMHRDEEVNYFPSRYDQVRHAEKYPTPPAVCSGKRERCIIEKENNFKEPGERYRTFTPERQERFIQRWIDALSDPRITHEIRSIWISYWSQADKSLGQKLASRLNVRPSI

SEQ ID NO: 19815 - protein, 492 aa, Arabidopsis thaliana
MDPYRVRPSSAHDSPFFTTNSGAPVWNNNSSLTVGTRGPILLEDYHLLEKLANFDRERIPERVVHARGASAKGFFEVTHDITQLTSADFLRGPGVQTPVIVRFSTVIHERGSPETLRDPRGFAVKFYTREGNFDLVGNNFPVFFVRDGMKFPDMVHALKPNPKSHIQENWRILDFFSHHPESLHMFSFLFDDLGIPQDYRHMEGAGVNTYMLINKAGKAHYVKFHWKPTCGIKCLSDEEAIRVGGANHSHATKDLYDSIAAGNYPQWNLFVQVMDPAHEDKFDFDPLDVTKIWPEDILPLQPVGRLVLNKNIDNFFNENEQIAFCPALVVPGIHYSDDKLLQTRIFSYADSQRHRLGPNYLQLPVNAPKCAHHNNHHDGFMNFMHRDEEVNYFPSRLDPVRHAEKYPTTPIVCSGNREKCFIRKENNFKQPGERYRSWDSDRQERFVKRFVEALSEPRVTHEIRSIWISYWSQADKSLGQKLATRLNVRPNF

SEQ ID NO: 19816 - protein, 492 aa, Arabidopsis thaliana
MDPYRVRPSSAHDSPFFTTNSGAPVWNNNSSLTVGTRGPILLEDYHLLEKLANFDRERIPERVVHARGASAKGFFEVTHDITQLTSADFLRGPGVQTPVIVRFSTVIHERGSPETLRDPRGFAVKFYTREGNFDLVGNNFPVFFVRDGMKFPDMVHALKPNPKSHIQENWRILDFFSHHPESLHMFSFLFDDLGIPQDYRHMEGAGVNTYMLINKAGKAHYVKFHWKPTCGIKCLSDEEAIRVGGANHSHATKDLYDSIAAGNYPQWNLFVQVMDPAHEDKFDFDPLDVTKIWPEDILPLQPVGRLVLNKNIDNFFNENEQIAFCPALVVPGIHYSDDKLLQTRIFSYADSQRHRLGPNYLQLPVNAPKCAHHNNHHDGFMNFMHRDEEVNYFPSRLDPVRHAEKYPTTPIVCSGNREKCFIGKENNFKQPGERYRSWDSDRQERFVKRFVEALSEPRVTHEIRSIWISYWSQADKSLGQKLATRLNVRPNF

SEQ ID NO: 19817 - protein, 492 aa, Arabidopsis thaliana
MDPYRVRPSSAHDSPFFTTNSGAPVWNNNSSLTVGTRGPILLEDYHLLEKLANFDRERIPERVVHARGASAKGFFEVTHDITQLTSADFLRGPGVQTPVIVRLSTVIHERGSPETLRDPRGFAVKFYTREGNFDLVGNNFPVFFVRDGMKFPDMVHALKPNPKSHIQENWRILDFFSHHPESLHMFSFLFDDLGIPQDYRHMEGAGVNTYMLINKAGKAHYVKFHWKPTCGIKCLSDEEAIRVGGANHSHATKDLYDSIAAGNYPQWNLFVQVMDPAHEDKFDFDPLDVTKIWPEDILPLQPVGRLVLNKNIDNFFNENEQIAFCPALVVPFIHYSDDNVLQTRIFSYADSQRHRLGPNYLQLPVNAPKCAHHNNHHDGFMNFMHRDEEVNYFPSRLDPVRHAEKYPTTPIVCSGNREKCFIRKENNFKQPGERYRSWDSDRQERFVKRFVEALWEPRVTHEIRSIWISYWSQADKSLGQKLATRLNVRPNF

SEQ ID NO: 19818 - protein, 1013 aa, Arabidopsis thaliana
MKFIYNPTLRHVTVCVIKSKAFLANNGRKTTRVGMDHPDPIRKRYRPSSAYNAPFYTTNGGAPVSNNISSLTIGERGPVLLEDYHLIEKVANFTRERIPERVVHARGISAKGFFEVTHDISNLTCADFLRAPGVQTPVIVRFSTVVHERASPETMRDIRGFAVKFYTREGNFDLVGNNTPVFFIRDGIQFPDVVHALKPNPKTNIQEYWRILDYMSHLPESLLTWCWMFDDVGIPQDYRHMEGFGVHTYTLIAKSGKVLFVKFHWKPTCGIKNLTDEEAKVVGGANHSHATKDLHDAIASGNYPEWKLFIQTMDPADEDKFDFDPLDVTKIWPEDILPLQPVGRLVLNRTIDNFFNETEQLAFNPGLVVPGIYYSDDKLLQCRIFAYGDTQRHRLGPNYLQLPVNAPKCAHHNNHHEGFMNFMHRDEEINYYPSKFDPVRCAEKVPTPTNSYTGIRTKCVIKKENNFKQAGDRYRSWAPDRQDRFVKRWVEILSEPRLTHEIRGIWISYWSQADRSLGQKLASRLNVRPSSAHDSPFFTTNSGAPVWNNNSSLTVGTRGPILLEDYHLLEKLANFDRERIPERVVHARGASAKGFFEVTHDITQLTSADFLRGPGVQTPVIVRFSTVIHERGSPETLRDPRGFAVKFYTREGNFDLVGNNFPVFFVRDGMKFPDMVHALKPNPKSHIQENWRILDFFSHHPESLHMFSFLFDDLGIPQDYRHMEGAGVNTYMLINKAGKAHYVKFHWKPTCGIKCLSDEEAIRVGGANHSHATKDLYDSIAAGNYPQWNLFVQVMDPAHEDKFDFDPLDVTKIWPEDILPLQPVGRLVLNKNIDNFFNENEQIAFCPALVVPGIHYSDDKLLQTRIFSYADSQRHRLGPNYLQLPVNAPKCAHHNNHHDGFMNFMHRDEEVNYFPSRLDPVRHAEKYPTTPIVCSGNREKCFIGKENNFKQPGERYRSWDSDRQERFVKRFVEALSEPRVTHEIRSIWISYWSQADKSLGQKLATRLNVRPNF

SEQ ID NO: 19819 - protein, 492 aa, Arabidopsis thaliana
MDPYKYRPSSAYNAPFYTTNGGAPVSNNISSLTIGERGPVLLEDYHLIEKVANFTRERIPERVVHARGISAKGFFEVTHDISNLTCADFLRAPGVQTPVIVRFSTVVHERASPETMRDIRGFAVKFYTREGNFDLVGNNTPVFFIRDGIQFPDVVHALKPNPKTNIQEYWRILDYMSHLPESLLTWCWMFDDVGIPQDYRHMEGFGVHTYTLIAKSGKVLFVKFHWKPTCGIKNLTDEEAKVVGGANHSHATKDLHDAIASGNYPEWKLFIQTMDPADEDKFDFDPLDVTKIWPEDILPLQPVGRLVLNRTIDNFFNETEQLAFNPGLVVPGIYYSDDKLLQCRIFAYGDTQRHRLGPNYLQLPVNAPKCAHHNNHHEGFMNFMHRDEEINYYPSKFDPVRCAEKVPTPTNSYTGIRTKCVIKKENNFKQAGDRYRSWAPDRQDRFVKRWVEILSEPRLTHEIRGIWISYWSQADRSLGQKLASRLNVRPSI

SEQ ID NO: 19820 - protein, 492 aa, Arabidopsis thaliana
MDPYKYRPSSAYNAPFYTTNGGAPVSNNISSLTIGERGPVLLEDYHLIEKVANFTRERIPERVVHARGISAKGFFEVTHDISNLTCADFLRAPGVQTPVIVRFSTVVHERASPETMRDIRGFAVKFYTREGNFDLVGNNTPVFFIRDGIQFPDVVHALKPNPKTNIQEYWRILDYMSHLPESLLTWCWMFDDVGIPQDYRHMEGFGVHTYTLIAKSGKVLFVKFHWKPTCGIKNLTDEEAKVVGGANHSHATKDLHDAIVSGNYPEWKLFIQTMDPADEDKFDFDPLDVTKIWPEDILPLQPVGRLVLNRTIDNFFNETEQLAFNPGLVVPGIYYSDDKLLQCRIFAYGDTQRHRLGPNYLQLPVNAPKCAHHNNHHEGFMNFMHRDEEINYYPSKFDPVRCAEKVPTPTNSYTGIRTKCVIKKENNFKQAGDRYRSWAPDRQDRFVKRWVEILSEPRLTHEIRGIWISYWSQADRSLGQKLASRLNVRPSI

SEQ ID NO: 19821 - protein, 492 aa, Arabidopsis thaliana
MDPYKYRPSSAYNAPFYTTNGGAPVSNNISSLTIGERGPVLLEDYHLIEKVANFTRERIPERVVHARGISAKGFFEVTHDISNLTCADFLRAPGVQTPVIVRFSTVVHGRASPETMRDIRGFAVKFYTREGNFDLVGNNTPVFFIRDGIQFPDVVHALKPNRKTNIQEYWRILDYMSHLPESLLTWCWMFDDVGIPQDYRHMEGFGVHTYTLIAKSGKVLFVKFHWKPTCGIKNLTDEEAKVVGGANHSHATKDLHDAIASGNYPEWKLFIQTMDPADEDKFDFDPLDVTKIWPEDILPLQPVGRLVLNRTIDNFFNETEQLAFNPGLVVPGIYYSDDKLLQCRIFAYGDTQRHRLGPNYLQLPVNAPKCAHHNNHHEGFMNFMHRDEEINYYPSKFDPVRCAEKVPTPTNSYTGIRTKCVIKKENNFKQAGDRYRSWAPDRQDRFVKRWVEILSEPRLTHEIRGIWTSYWLKADRSLGQKLASRLNVRPSI

SEQ ID NO: 19822 - protein, 492 aa, Arabidopsis thaliana
MDPYKYRPSSAYNAPFYTTNGGAPVSNNISSLTIGERGPVLLEDYHLIEKVANFTRERIPERVVHARGISAKGFFEVTHDISNLTCADFLRAPGVQTPVIVRFSTVVHGRASPETMRDIRGFAVKFYTREGNFDLVGNNTPVFFIRDGIQFPDVVHALKPNRKTNIQEYWRILDYMSHLPESLLTWCWMFDDVGIPQDYRHMEGFGVHTYTLIAKSGKVLFVKFHWKPTCGIKNLTDEEAKVVGGANHSHATKDLHDAIASGNYPEWKLFIQTMDPADEDKFDFDPLDVTKIWPEDILPLQPVGRLVLNRTIDNFFNETEQLAFNPGLVVPGIYYSDDKLLQCRIFAYGDTQRHRLGPNYLQLPVNAPKCAHHNNHHEGFMNFMHRDEEINYYPSKFDPVRCAEKVPTPTNSYTGIRTKCVIKKENNFKQAGDRYRSWAPDRQDRFVKRWVEILSEARLTHEIRGIWTSYWLKADRSLGQKLASRLNVRPSM

SEQ ID NO: 19823 - protein, 115 aa, Arabidopsis thaliana
MDPYKYRPSSAYNAPFYTTNGGAPVSNNISSLTIGERGPVLLEDYHLIEKVANFTRERIPERVVHARGISAKGFFEVTHDISNLTCADFVRAPGVQTPVIVRFSTVVHERASPET

SEQ ID NO: 19824 - protein, 492 aa, Brassica juncea
MDPYKYRPASSYNSPFFTTNSGAPVWNNNSSMTVGPRGPILLEDYHLVEKLANFDRERIPERVVHARGASAKGFFEVTHDISNLTCADFLRAPGVQTPVIVRFSTVIHERGSPETLRDPRGFAVKFYTREGNFDLVGNNFPVFFIRDGMKFPDMVHALKPNPKSHIQENWRVLDFFSHHPESLNMFTFLFDDIGIPQDYRHMEGSGVNTYMLINKAGKAHYVKFHWKPTCGVKSLLEEDAIRVGGTNHSHATQDLYDSIAAGNYPEWKLFVQIIDPADEDKFDFDPLDVTKTWPEDILPLQPVGRMVLNKNIDNFFAENEQLAFCPAIIVPGIHYSDDKLLQTRVFSYADTQRHRLGPNYLQLPVNAPKCAHHNNHHEGFMNFMHRDEEVNYFPSRYDPVRHAEKYPTPPAVCSGKRERCIIEKENNFKEPGERYRSFTPERQERFIGRWIDALSDPRITHEIRSIWISYWSQADKSLGQKLASRLNVRPNI

SEQ ID NO: 19825 - protein, 492 aa, Brassica juncea
MDPYKYRPASSYNSPFFTTNSGAPVWNNNSSMTVGPRGPILLEDYHLVEKLANFDRERIPERVVHARGASAKGFFEVTHDISNLTCADFLRAPGVQTPVIVRFSTVIHERGSPETLRDPRGFAVKFYTREGNFDLVGNNFPVFFIRDGMKFPDMVHALKPNPKSHIQENWRVLDFFSHHPESLNMFTFLFDDIGIPQDYRHMEGSGVNTYMLINKSGKAHYVKFHWKPTCGVKSLLEEDAVRVGGTNHSHATQDLYDSIAAGNYPEWKLFIQVIDPADEDKFDFDPLDVTKTWPENLLPLQPVGRMVLNKNIDNFFAENEQLAFCPAIIVPGIHYSDDKLLQTRVFSYADTQRHRLGPNYLQLPVNAPKCAHHNNHHEGFMNFMHRDEEVNYFPSRYDPVRHAEKYPTPPAVCSGKRERCVIEKENNFKEPGERYRSFTPERQERFIRRWIEALSDPRITHEIRSIWISYWSQADKTLGQKLASRLNVRPSI

SEQ ID NO: 19826 - protein, 492 aa, Brassica juncea
MDPYKYRPASSYNSPFFTTNFGAPVWNNNSSMTVGPRGPILLEDYHLVEKLANFDRERIPERVVHARGASAKGFFEVTHDISNLTCADFLRAPGVQTPVIVRFSTVIHERGSPETLRDPRGFAVKFYTREGNFDLVGNNFPVFFIRDGMKFPDMVHALKPNPKSHIQENWRVLDFFSHHPESLNMFTFLFDDIGIPQDYRHMEGSGVNTYMLINKSGKAHYVKFHWKPTCGVKSLLEEDAIRVGGTNHSHATQDLYDSIAAGNYPEWKLFVQIIDPADEDRFDFDPLDVTKTWPEDILPLQPVGRMVLNKNIDNFFAENEQLAFCPAIIVPGIHYSDDKLLQTRVFSYADTQRHRLGPNYLQLPVNAPKCAHHNNHHEGFMNFMHRDEEVNYFPSRYDPVRHAEKYPTPPAICSGKRERCIIEKENNFKEPGERYRSFTPERQERFIGRWIDALSDPRITHEIRSIWISYWSQADKSLGQKLANRLNVRPSI

SEQ ID NO: 19827 - protein, 496 aa, Brassica juncea
MDPYKYRPASSYNSPFFTTNSGAPVWNNNSSMTVGPRGPILLEDYHLVEKLANFDRERIPERVVHARGASAKGFFEVTHDISNLTCADFLRAPGVQTPVIVRFSTVIHERGSPETLRDPRGFAVKFYTREGNFDLVGNNFPVFFIRDGMKFPDMVHALKPNPKSHIQENWRVLDFFSHHPESLNMFTFLFDDIGIPQDYRHMEGSGVNTYMLINKSGKAHYVKFHWKPTCGVKSLLEEDAVRVGGTNHSHATQDLYDSIAAGNYPEWKLFIQVIDPADEDKFDFDPLDVTKTWPENLLPLQPVGRMVLNKNIDNFFAENEQLAFCPAIIVPGIHYSDDKLLQTRVFSYADTQRHRLGPNYLQLPVNAPKCAHHNNHHEGFMNFMHRDEEVNYFPSRYDPVRHAEKYPTPPAVCSGKRERCVIEKENNFKEPGERYRSFTPESFDFRQERFIRRWIEALSDPRITHEIRSIWISYWSQADKTLGQKLASRLNVRPSI

SEQ ID NO: 19828 - protein, 492 aa, Brassica napus
MDPYKYRPSSAYNAPFYTTNGGAPVSNNISSLTIGERGPVLLEDYHLIEKVANFTRERIPERVVHARGISAKGFFEVTHDISNLTCADFLRAPGVQTPVIVRFSTVVHERASPETMRDIRGFAVKFYTREGNFDLVGNNTPVFFIRDGIQFPDVVHALKPNPKTNIQEYWRILDYMSHLPESLLTWCWMFDDVGIPQDYRHMEGFGVHTYTLVSKSGKVLFVKFHWKPTCGIKNLTDEEAKVVGGANHSHATKDLHDAIASGNYPEWKLFIQTMDPADEDKFDFDPLDVTKIWPEDILPLQPVGRLVLNRTIDNFFNETEQLAFNPGLVVPGIYYSDDKLLQCRIFAYGDTQRHRLGPNYLQLPVNAPKCAHHNNHHEGFMNFMHRDEEINYYPSKFDPVRCAEKVPIPNKSYTGIRTKCIIKKENNFKQPGDRYRSWAPDRQDRFVKRWVEILSEPRLTHEIRSIWISYWSQADRSLGQKLASRLNVRPSI

SEQ ID NO: 19829 - protein, 492 aa, Raphanus sativus
MDPYKYRPASSYNSPFFTTNSGAPVWNNNSSMTVGPRGPILLEDYHLVEKLANFDRERIPERVVHARGASAKGFFEVTHDISNLTCADFLRAPGVQTPVIVRFSTVIHERGSPETLRDPRGFAVKFYTREGNFDLVGNNFPVFFIRDGMKFPDMVHALKPNPKSHIQENWRVLDFFSHHPESLNMFTFLFDDIGIPQDYRHMEGSGVNTYMLINKSGKAHYVKFHWKPTCGVKSLLEEDAIRVGGTNHSHATQDLYDSIAAGNYPEWKLFVQIIDPADEDKFDFDPLDVTKTWPEDLLPLQPVGRMVLNKNIDNFFAENEQLAFCPAIIVPGIHYSDDKLLQTRVFSYADTQRHRLGPNYLQLPVNAPKCAHHNNHHEGFMNFMHRDEEVNYFPSRYDPVRHAEKYPTPPAVCSGKRERCIIEKENNFKEPGERYRSFTPERQERFIGRWIDALSDPRITHEIRSIWISYWSQADKSLGQKLASRLNVRPSI

SEQ ID NO: 19830 - protein, 491 aa, Raphanus sativus
MDPYKYRPASSYNSPFFTNSGAPVWNNNSSMTVGPRGPILLEDYHLVEKLANFDRERIPERVVHARGASAKGFFEVTHDISNLTCADFLRAPGVQTPVIVRFSTVIHERGSPETLRDPRGFAVKFYTREGNFDLVGNNFPVFFIRDGMKFPDMVHALKPNPKSHIQENWRVLDFFSHHPESLNMFTFLFDDIGIPQDYRHMEGSGVNTYMLINKSGKAHYVKFHWKPTCGVKSLLEEDAIRVGGTNHSHATQDLYDSIAAGNYPEWKLFVQIIDPADEDKFDFDPLDVTKTWPEDLLPLQPVGRMVLNKNIDNFFAENEQLAFCPAIIVPGIHYSDDKLLQTRVFSYADTQRHRLGPNYLQLPVNAPKCAHHNNHHEGFMNFMHRDEEVNYFPSRYDPVRHAEKYPTPPAVCSGKRERCIIEKENNFKEPGERYRSFTPERQERFIGRWIDALSDPRITHEIRSIWISYWSQADKSLGQKLASRLNVRPSI

SEQ ID NO: 19831 - protein, 492 aa, Raphanus sativus
MDPYKYRPSSAYNAPFYTTNGGAPVSNNISSLTIGERGPVLLEDYHLIEKVANFTRERIPERVVHARGISAKGFFEVTHDISNLTCADFLRAPGVQTPVIVRFSTVVHERASPETMRDIRGFAVKFYTREGNFDLVGNNTPVFFIRDGIQFPDVVHALKPNPKTNIQEYWRILDYMSHLPESLLTWCWMFDDVGIPQDYRHMEGFGVHTYTLVSKSGKVLFVKFHWKPTCGIKNLTDEEAKVVGGANHSHATKDLHDAISSGNYPEWKLFIQTMDPADEDKFDFDPLDVTKIWPEDILPLQPVGRLVLNRTIDNFFNETEQLAFNPGLVVPGIYYSDDKLLQCRIFAYGDTQRHRLGPNYLQLPVNAPKCAHHNNHHEGFMNFMHRDEEINYYPSKFDPVRCAEKVPIPNKSYTGIRTKCIIKKENNFKQAGDRYRSWAPDRQDRFVKRWVEILSEPRLTHEIRSIWISYWSQADASLGQKLASRLNVRPSI

SEQ ID NO: 19832 - protein, 492 aa, Raphanus sativus
MDPYKYRPSSAYNAPFYTTNGGAPVSNNISSLTIGERGPVLLEDYHLIEKVANFTRERIPERVVHARGISAKGFFEVTHDISNLTCADFLRAPGVQTPVIVRFSTVVHERASPETMRDIRGFAVKFYTREGNFDLVGNNTPVFFIRDGIQFPDVVHALKPNPKTNIQEYWRILDYMSHLPESLLTWCWMFDDVGIPQDYRHMEGFGVHTYTLVSKSGKVLFVKFHWKPTCGIKNLTDEEAKVVGGANHSHATKDLHDAISSGNYPEWKLFIQTMDPADEDKFDFDPLDVTKIWPEDILPLQPVGRLVLNRTIDNFFNETEQLAFNPGLVVPGIYYSDDKLLQCRIFAYGDTQRHRLGPNYLQLPVNAPKCAHHNNHHEGFMNFMHRDEEINYYPSKFDPVRCAEKVPIPSKSYTGIRTKCVIKKENNFKQAGDRYRSWAPDRQDRFVKRWVEILSELRLTHEIRSIWISYWSQADRSLGQKLASRLNVRPSI

SEQ ID NO: 19833 - protein, 423 aa, Prunus persica
SAKGFFEVTHDISQLTCADFLRAPGVQTPVIVRFSTVIHERGSPETLRDPRGFAVKFYTREGNFDLVGNNFPVFFVRDAMKFPDAIRAFKPNPKSHIQETWRILDFFSHLPESLHTFAFFYDDLGVPQDYRHMEGSSVHAYTLISKAGKVHYVKFHWKPTCGVKCLLEDEAIKVGGANHSHATKDLYDSIAAGNYPEWKLYIQTMDPDHEDRFDFDPLDLTKTWPEDILPLQPVGRLVLNKNIDNFFAENEQLAFNPAHVVPGIYYSDDKMLQTRIFAYSDTQRHRLGPNYLQLPVNAPKCPHHNNHHEGFMNFMHRDEEVNYFPSRHDPVRHAERYPIPSNILSGKREKCVIEKENNFKQPGERYRSWAPDRQERFIHRWVDALSDPRVTHEIRSVWISYWSQADKSLGQKLASRLNVRPSI

SEQ ID NO: 19834 - protein, 125 aa, Cicer arietinum
PKCAHHNNHHEGFMNFIHRDEEVNYFPSRHDPVRHAERFPTPPAALSGKRERCIRPKENNFKQPGERYRTWAPDRQDRFARRWIEALSDPRVTHEVRSIWISYWSQADRSLGQKIASHLNMRPSI

SEQ ID NO: 19835 - protein, 492 aa, Glycine max
MDPYKNRPSSAFNSPFWTTNSGAPIWNNNSSLTVGSRGPILLEDYHLVEKLANFDRERIPERVVHARGASAKGFFEVTHDISHLTCADFLRAPGVQTPLIVRFSTVIHERGSPETLRDPRGFAVKFYTREGNFDLVGNNFPVFFVRDGLKFPDMVHALKPNPKSHIQENWRILDFFSHHPESLHMFSFLFDDVGIPQDYRHMDGFGVNTYTLINKAGKAVYVKFHWKTTCGEKCLLDDEAIRVGGSNHSHATQDLYDSIAAGNYPEWKLYIQTLDPENEDRLDFDPLDVTKTWPEDVLPLQPVGRMVLNKNIDNFFAENEQLAFCPAIIVPGVYYSDDKLLQTRIFSYADTQRHRLGPNYLQLPANSPKCAHHNNHHDGFMNFMHRDEEVNYFPSRYDPVRHAERVPVPPRTLGGKREKCMIEKENNFKQPGERYRSWPSDRQERFVRRWVDALSDPRVTHEIRSIWISYWSQADRSLGQKIASHLNLKPSI

SEQ ID NO: 19836 - protein, 492 aa, Glycine max; identical to SEQ ID NO: 19835

SEQ ID NO: 19837 - protein, 492 aa, Glycine max
MDPYKNRPSSAFNSPFWTTNSGAPIWNNNSSLTVGSRGPILLEDYHLVEKLANFDRERIPERVVHARGASAKGFFEVTHDISHLTCADFLRAPGVQTPLIVRFSTVIHERGSPETLRDPRGFAVKFYTREGNFDLVGNNFPVFFVRDGLKFPDMVHALKPNPKSHIQENWRILDFFSHHPESLHMFSFLFDDVGIPQDYRHMDGFGVNTYTLINKAGKALYVKFHWKTTSGEKSLLDDEAIRVGGSNHSHATQDLYDSIAAGNYPEWKLYIQTLDPENEDRLDFDPLDVTKTWPEDVLPLQPVGRMVLNKNIDNFFAENEQLAFCPAIIVPGVYYSDDKLLQTRVFSYADTQRHRLGPNYLQLPANAPKCAHHNNHHDGFMNFMHRDEEVNYFPSRYDPVRHAEKVPVPPRILGGKREKCMIEKENNFKQPGERYRSWPSDRQERFVRRWVDALSDPRVTHEIRSIWISYWSQADRSLGQKIASHLNLKPSI

SEQ ID NO: 19838 - protein, 493 aa, Glycine max
  unsure (1)..(493): unsure at all Xaa locations
MDPYKNRPSSAFNSPFWTTNSGAPIWNNNSSLTVGSRGPILLEDYHLVEKLANFDRERIPERVVHARGASAKGFFEVTHDISHLTCADFLRAPGVQTPLIVRFSTVIHERGSPETLRDPRGFAVKFYTREGNFDLVGNNFPVFFVRDGLKFPDMVHALKPNPKSHIQENWRILDFFSHHPESLHMFSFLFDDVGIPQDYRHMDGFGVNTYTLINKAGKALYVKFHWKTTSGEKSLLDDEAIRVGGSNHSHATQDLYDSIAAGNYPEWKLYIQTLDPENEDRLDFDPLDVTKTWPEDVLPLQPVGRMVLNKNIDNFFAENEQLAFCPAIIVPGVYYSDDKLLQTRVFSYADTQRHRLGPNYLQLPANAPKCAHHNNHHDGFMNFMHRDEEVNYFPSRYDPVRHAEKXVPVPPRILGGKREKCMIEKENNFKQPGERYRSWPSDRQERFVRRWVDALSDPRVTHEIRSIWISYWSQADRSLGQKIASHLNLKPSI

SEQ ID NO: 19839 - protein, 492 aa, Glycine max
MDPYKHRPSSAFNSPFWTTNSGAPIWNNNSSLTVGARGPILLEDYHLVEKLANFDRERIPERVVHARGASAKGFFEVTHDISHLTCADFLRAPGVQTPVIVRFSTVIHERGSPETLRDPRGFAVKFYTREGNFDLVGNNLPVFFVRDGMKFPDMVHALKPNPKNHIQENWRILDFFSHFPESLHMFTFLFDDLGVPQDYRHMDGFGVNTYTLINKAGKAVYVKFHWKTTSGIKCLLEEEAIKVGGANHSHATQDLHDSIAAGNYPEWKLFVQTIDPEHEDKFDFDPLDVTKTWPEDIIPLQPVGRLVLNKNIDNFFAENEQLAFCPAIVVPGVYYSDDKMLQTRIFSYADSQRHRLGPNYLQLPANAPKCAHHNNHHEGFMNFIHRDEEVNYFPSRYDPVRHAERFPIPPAICSGRREKCGIEKENNFKQPGERYRSWAPDRQDRFARRWVDALSDPRVTHEIRSVWISYWSQADRSLGQKIASHLSTRPNI

SEQ ID NO: 19840 - protein, 492 aa, Glycine max
MDPYKLRPSSAFNSPFWTTNSGAPVWNNNSSLTVGARGPILLEDYHLVEKLANFDRERIPERVVHARGASAKGFFEVTHDISHLTCADFLRAPGVQTPVIVRFSTVIHERGSPETLRDPRGFAVKFYTREGNFDLVGNNLPVFFVRDGMKFPDMVHALKPNPKNHIQENWRILDFFSHFPESLHMFTFLFDDLGVPQDYRHMDGFGVNTYTLINKAGKAVYVKFHWKTTSGIKCLLEEEAIKVGGANHSHATQDLHDSIAAGNYPEWKLFVQTIDPEHEDKFDFDPLDVTKTWPEDIIPLQPVGRLVLNKNIDNFFAENEQLAFCPAIVVPGVYYSDDKMLQTRIFSYADSQRHRLGPNYLQLPANAPKCAHHNNHHEGFMNFIHRDEEVNYFPSRYDPVRHAETFPIPPAICSGRREKCGIEKENNFKQPGERYRSWAPDRQDRFNRRWVDALSDPRVTHEIRSVWISYWSQADRSLGQKIASRLSMRPNI

SEQ ID NO: 19841 - protein, 495 aa, Glycine max
  unsure (1)..(495): unsure at all Xaa locations
MDPYKLRPSSAFNSPFWTTNSGAPVWNNNSSLTVGARGPILLEDYHLVEKLANFDRERIPERVVHARGASAKGFXFEVTHDISHLTCADFLRAPGVQTPVIVRFSTVIHERGSPETLRDPRGFAVKFYTREGNFDLVGNNLPVFFVRDGMKFPDMVHALKPNPKNHIQENWRILDFFSHFPESLHMFTFLFDDLGVPQDYRHMDGFGVNTYTLINKAGKAVYVKFHWKTTSGIKCLLEEEAIKVGGANHSHATQDLHDSIAAGNYPEWKLFVQTIDPEHEDKFDFDPLDVTKTWPEDIIPLQPVGRLVLNKNIDNFFAENEQLAFCPAIVVPGVYYSDDKMLQTRIFSYADSQRHRLGPNYLQLPANAPKCAHHNNHHEGFMNFIHRDEEVNYFPSRYDPVRHAETFPIPPXAICSGRREKCGIEKENNFKQPGERYRSWAPXDRQDRFNRRWVDALSDPRVTHEIRSVWISYWSQADRSLGQKIASRLSMRPNI

SEQ ID NO: 19842 - protein, 498 aa, Glycine max
  unsure (1)..(498): unsure at all Xaa locations
MDPYKHRPSSAFNSPFWTTNSGAPIWNNNSSLTVGARGPILLEDYHLVEKLANFDRERIPERVVHAXRGASAKGFFEXVTHDISHLTCADFLRAPGVQTPVIVRFSTVIHERGSPETLRDPRGFAVKFYTREGNFDLVGNNLPVFFVRDGMKFPDMVHALKPNPKNHIQENWRILDFFSHFPESLHMFTFLFDDLGXVPQDYRHMDGFGVNTYTLINKAGKAVYVKFHWKTTSGIKCLLEEEAIKVGGANHSXHATQDLHDSIAAGNYPEWKLFVQTIDPEHEDKFDFDPLDVTKTWPEDIIPLQPVGRLVLNKNIDNFFAENEQLAFCPAIVVPGVYYSDDKMLQTRIFSYADSQRHRLGPNYLQLPANAPKCAHHNNHHEGFMNFIHRDEEVNYFPSRYDPVRHAERFPIPPAICSGRREKCGIEKENNFKQPGERYRSWAPDRQDRFARRWVDALSDPRXVTHEIRSVWISYWSQADRSLGQKIASXHLSTRPNI

SEQ ID NO: 19843 - protein, 398 aa, Glycine max
  unsure (1)..(398): unsure at all Xaa locations
TSFFFFFSSKQFKSLHXKQTQENTGLWTYNQLADGPFFDLVGNNLPVFFVRDGMKFPDMVHALKPNPKNHIQENWRILDFFSHXPESLHMFTFLFDDLGVPQDYRHMDGFGVNTYTLINKAGKAVYVKFHWKTTSGIKCLLEEEAIKVGGANHSHATQDLHDSIAAGNYPEWKLFVQTIXDPEHEXKFDFDPLDVTKTWPEDIIXLQPVGRLVLNKNIDNFFAENEQLAFCPAIVVPGVYYSDDKMLQTRIFSYADSQRHRLGPNYLQLPANAPKCAHHNNHHEGFMNFIHRDEEVNYFPSRYDPVRHAERFPIPPAICSGRREKCGIEKENNFKQPGERYRSWAPDRQDRFARRWVDALSDPRVTHEIRSVWISYWSQADRSLGQKIASHLSTRPNI

SEQ ID NO: 19844 - protein, 308 aa, Glycine max
MFTFLFDDLGVPQDYRHMDGFGVNTYTLINKAGKAVYVKFHWKTTSGIKCLLEEEAIKVGGANHSHATQDLHDSIAAGNYPEWKLFVQTIDPEHEDKFDFDPLDVTKTWPEDIIPLQPVGRLVLNKNIDNFFAENEQLAFCPAIVVPGVYYSDDKMLQTRIFSYADSQRHRLGPNYLQLPANAPKCAHHNNHHEGFMNFIHRDEEVNYFPSRYDPVRHAETFPIPPAICSGRREKCGIEKENNFKQPGERYRSWAPDRQDRFNRRWVDALSDPRVTHEIRSVWISYWSQADRSLGQKIASRLSMRPNI

SEQ ID NO: 19845 - protein, 295 aa, Glycine max
  unsure (1)..(295): unsure at all Xaa locations
XFGSRDGFGVNTYTLINKAGKALYVKFHWKTTSGEKSLLDDEAIRVGGSNHSHATQDLYDSIAAGNYPEWKLYIQTLDPENEDRLDFDPLDVTKTWPEDVLPLQPVGRMVLNKNIDNFFAENEQLAFCPAIIVPGVYYSDDKLLQTRVFSYADTQRHRLGPNYLQLPANAPKCAHHNNHHDGFMNFMHRDEEVNYFPSRYDPVRHAEKVPVPPRILGGKREKCMIEKENNFKQPGERYRSWPSDRQERFVRRWVDALSDPRVTHEIRSIWISYWSQADRSLGQKIASHLNLKPSI

SEQ ID NO: 19846 - protein, 428 aa, Phaseolus vulgaris
PERVVHARGASAKGFFEVTHDISHLTCADFLRAPGVQTPLIVRFSTVIHERGSPETLRDPRGFAVKFYTREGNFDLVGNNFPVFFVRDGLKFPDMVHALKPNPKSHIQENWRILDFFSHHPESLHMFSFLFDDVGIPQDYRHMDGFGVNTYTLISKAGKPHYVKFHWKATCGEKCLLDEEAVRVGGFNHSHATQDLHDSIAAGNYPEWKLYIQTLDPEQEDKFDFDPLDVTRICPEDVLPLQPVGRMVLNKNIDNFFAENEQLAFCPAIIVPGVYYSDDKLLQTRIFSYADSQRHRLGPNYLQIPANAPKCAHHNNHHEGFMNFMHRDEEVNYFPSRYDPVRHAERIPVPPRILDGKREKCMIEKENNFKQPGERYRSWASDRQERFLRRWVDALSEPRVTHEIRSIWISYWSQADRSLGQKIASHLN

SEQ ID NO: 19847 - protein, 119 aa, Phaseolus vulgaris
NIDNFFTEDEQLAFCPAIVVPGVYYSDDKMLQTRIFSYADSQRHRLGPNYLQLPANAPKCAHHNNHHEGFMNFMHRDEEVNYFPSRYDSVRHAESFPIPPAICSGRREKCGIEKENNIK

SEQ ID NO: 19848 - protein, 494 aa, Pisum sativum
MDPYKHRPSSAFNSPFWTTNSGAPVWNNNSSLTVGSRGPILLEDYHLVEKLAQFDRERIPERVVHARGASAKGFFEVTHDISHLTCADFLRAPGVQTPVIVRFSTVIHERGSPETLRDPRGFAVKFYTREGNYDLVGNNFPVFFVHDGMNFPDMVHALKPNPQTHIQENWRILDFFYNFPESLHMFSFLFDDVGVPQDYRHMDGFGVNTYTLINKAGKSVYVKFHWKPTCGVKCLLEEEAIQVGGSNHSHATKDLYDSIAAGNYPEWKLYIQTIDPAHEDRFEFDPLDVTKTWPEDIIPLQPVGRMVLNKNIDNFFAENEQLAFCPAIMLPGIYYSDDKMLQTRVFSYADSQRHRLGPNYLQLPVNAPKWSHHNNHHEGFMNAIHRDEEVNYFPSRHDTVRHAERVPIPTTHLSARREKCNIPKQNHFKQAGERYRTWAPDRQERFLRRWVEALSDTDPRITHEIRSIWVSYWSQADRSLGQKLASHLNMRPSI

SEQ ID NO: 19849 - protein, 484 aa, Rhizobium sp.
MKKLTNATGAPVADNFNIQTAGPRGPALLQDIWLLEKLAHFDRELIPERRMHAKGAGAYGTFTVTHDITRYTKASIFSSVGKETPLFVRFSSVAGERGSADAERDIRGFAVKFYTDEGNWDIVGNNTPVFFFRDPLRFSDLNHVVKRDPSPALRNATSNWDFWTLLPEALHQVTSVMSDRGLPTSFRHMHGFGSHTFSLIDRDNKRVWVKFHFVCQQGIENLSDAEAEAVVGKDRESNLRDLYEVIEQGNFPRWKLCIQVMEEEQALNYRHNPFDLTKVWPHAARVIEVGIMELNRNSRKANFAEIEQAAFSPANVVPGVSFSPDRISRARLFSYGDAQRYRLWLNFNHIPVNAPRCPASSYHRSYHRDGAMHADGNLGGTASYFPNSVGEWQDSPERAEPPLPLEGFDQHYDHRLEEDHYEQPGNLFRLLDPARNELLFDNTARAMNGVPQRIRQRHMTIAPKPSPAYGFGVAEALERLVPLG

SEQ ID NO: 19850 - protein, 492 aa, Vigna radiata var. radiata
MDPYKYRPSSAFNSPFWTTNSGAPVWNNNNSLTVGTRGPILLEDYHLVEKLANFDRERIPERVVHARGASAKGFFEVTHDVSHLTCADFLRAPGVQTPVIVRFSTVIHERGSPETLRDPRGFAVKFYTREGNFDLVGNNLPVFFVRDGMKFPDMVHALKPNPKNHIQENWRILDFFSHFPESLHMFSFLFDDLGVPQDYRHMDGFGVNTYTLINKAGKAVYVKFHWKTTSGVKCLLEEEAIKVGGANHSHATQDLHDSIAAGNYPEWKLFIQTIDPEHEDKFDFDPLDVTKTWPEDIIPLQPVGRLVLNKNIDNFFAENEQLAFCPAIIVPGVYYSDDKMLQTRIFSYADSQRHRLGPNYLLLPANAPKSAHHNNHHEGFMNFIHRDEEVNYFPSRYDPVRHAEKFPIPPAVFSGRREKIAIEKENNFKQAGERFRSWAPDRQDRFIRRWVDALSDPRVTHEIRSVWISYWSQADRSLGQKIASHLNMRPNI

SEQ ID NO: 19851 - protein, 503 aa, Methanobrevibacter arboriphilus
MSNKKKFTTNKGIPVPNDQASITTGKGSNYTMLGDSHLTEKLAHFGRERIPERVVHAKGTGAYGYFEVTNDLSKYTRAKFLSEVGKKTEVFIRFSTVGGERGSADAKRDPRGTAMKYYTEEGNYDLVGNNTPIFFIRDAIKFPDFIHTQKRNPKNNLSDADMFWDFMSLTPESIHQATFLFTDRGTPQNYRHMDLFGSHSFMWYNEKNEYVWVKYHFKTAQGIQNLTNDEAIKMCGENPDHATEDLFNAIEEGNYPEWNVYVQIMTPEEAEKYEFDPFDVTKVWFHGDYPLIPLGKLVLNKNPENFFAEVEQVAFAPSNFVPGIGPSPDRLLQGRLFSYEDTQRHRLGPNHHQIPINRAKNAEVNTYQRDGPMTVTDNGGSGPNYYPNSFDGPEVDETVTPPTIELKAEINRHPRPVEDVDFFQTGELWRRVLSDEDKDHLVYNIVAHLGNAQERIQYRQCALFYKAEPEYGTRVAEGIGLDISKVKNLSEMTQEERVEATKK

SEQ ID NO: 19852 - protein, 492 aa, Hevea brasiliensis
MDPYKNLPSNAYNCSFWTTNSGAPVWNNNSSLTVGARGPILLEDYHLLEKLANFDRERIPERVVHARGASAKGFFEVTHNVSQLTCADFLRAPGVQTPVIVRFSTVIHERGSPETIRDPRGFAVKFYTREGNFDLVGNNFPVFFIRDGMKFPDVVHAFKPNPKSHIQESWRIFDFLSHVPESLHMLTFLFDDLGIPQDYRHMEGSGVNTYTLINNAGKVHCVKFHWKPTCGVKCLLEEEAIKVGGSNHSHATQDLYDSIAAGNYPEWKLYIQTMDPDHEDKFDFDPLDVTKTWPEDILPLQPVGRLVLNKNIDNFFAENEQLAFCPGIVVPGISYSEDKLLQTRIFSYSDTQRHRLGSNYLQLPVNAPKCAHHNNHHDGFMNFMHRDEEVNYFPSRCDPVRHSERFPIPSTICSGRRDKCVIEKENNFEQPGERYRSWAPDRQERFLNRMVGCLSDPRITHELRSIWISYWTQCDRSLGQKLAFRLNVRPSI

SEQ ID NO: 19853 - protein, 492 aa, Manihot esculenta
MDPCKFRPSSSNNTPFWTTDAGAPVWNNNSSMTVGTRGPILLEDYHMIEKLANFTRERIPERVVHARGMSAKGFFEVTHDVSHLTCADFLRAPGVQTPVIVRFSTVIHERGSPETLRDPRGFATKFYTREGNFDIVGNNFPVFFIRDGIKFPDVIHAFKPNPKSHIQEYWRIFDFLSHHPESLSTFAWFFDDVGIPQDYRHMEGFGVHTFTFINKAGKVTYVKFHWKPTCGVKCLMDDEALKIGGANHSHATQDLYDSIAAGNYPEWRLFIQTMDPADEDKFDFDPLDMTKIWPEDIFPLQQIGRLVLNRNIDNWFAENEMLAFDPGHIVPGIHYSNDKLFQLRTFAYADTQRHRLGPNYKMLPVNAPKCAYHNNHYDGFMNFMHRDEEVDYFPSRYDPVRHAERSPIPNAICSGRREKCVIEKENNFKQPGERYRSWAPDRQERFLCRLVNALSEPRITFEIRSIWVSYWSKCDASLGQKLASRLNVRPNI

SEQ ID NO: 19854 - protein, 492 aa, Ricinus communis
MDPYRNRPSSGFNTPFWTTNSGAPVWNNNSSLTVGSRGPILLEDYHLIEKLANFDRERIPERVVHARGASAKGFFEVTHDVSHLTCADFLRAPGVQTPVIVRFSTVIHERGSPETLRDPRGFAVKFYTREGNFDLVGNNFPVFFIRDGMKFPDVVHAFKPNPKSHLQENWRIFDFLSHVPESLHMLTFLLDDLGIPQDYRHMEGSGVNTYTLINKAGKVHYVKFHWKPTCGVKCLLENEAIKVGGSNHSHATQDLYDSISAGNYPEWKLYIQIMDPAHEDKFDFDPLDVTKTWPEDILPLQPVGRLVLNKNIDNFFAENEQLAFCPGIVVPGVSYSEDKLLQTRIFSYSDTQRHRLGPNYLQLPVNAPKCAHHNNHHEGFMNFMHRDEEVNYFPSRCDPARNAESFPVPSAICSGKREKCVIEKENNFKQPGERYRSWAPDRQERFLNRLVGGLSDPRITHELRTIWISYWIQCDKSLGQKLATRLNVKPSI

SEQ ID NO: 19855 - protein, 492 aa, Ricinus communis
MDPYKFRPSSSNDTPFWTTNAGDPVSNNNSSMTVGPRGPILLEDYHMIEKLANFTRERIPERVVHARGMSAKGFFEVTHDVTDLTCADFLRAPGVQTPVIVRFSTVIHERGSPETLRDPRGFATKFYTREGNFDIVGNNFPVFFIRDGIKFPDVVHAFKPNPKSHIQEYWRIFDFCSHHPESLSTFAWFFDDVGIPQDYRHMEGFGVHTYCLINKAGKVTYVKFHWKPTCGVKCLMDDEAIKVGGANHSHATQDLYDSIAAGNFPEWKLMIQTMDPADEDKFSFDPLDMTKIWPEDMFPLHPVGRLVLNRNIDNWFAENEMLAFNPAHVVPGVYYSNDKLFQLRLFAYSDTQRHRLGTNYLQLPVNAPKCPYHNNHYDGFMNFMHRDEEVDYFQSRYDPVRHAEKVPIPNAICSGRREKCVIEKEDNFRQPGDRYRSWAPDRQERFLCRLVNALSEPRITHEIRSIWVSWWTQCDKSLGQKLASRLNVRPNI

SEQ ID NO: 19856 - protein, 90 aa, Ricinus communis
RESFPVPSAICSGKREKCVIEKENNFKQPGERYRSWPPDRQERSLNRLVGGFSEPRITQELRTIWISYWIQCDKSLGQKLATRLNVKPSI

SEQ ID NO: 19857 - protein, 492 aa, Oryza sativa (japonica cultivar-group)
MDPYKHRPSSGSNSTFWTTNSGAPVWNNNSALTVGERGPILLEDYHLIEKLAQFDRERIPERVVHARGASAKGFFEVTHDISHLTCADFLRAPGVQTPVIVRFSTVVHERGSPETLREPRGFAVKFYTREGNFDLVGNNMPVFFIRDGMKFPDMVHAFKPSPKTNMQENWRIVDFFSHHPESLHMFSFLFDDVGIPLNHRHMEGFGVNTYTLINKDGKPHLVKFHWKPTCGVKCLLDDEAVTVGGTCHSHATKDLTDSIAAGNYPEWKLYIQTIDPDHEDRFDFDPLDVTKTWPEDIIPLQPVGRMVLNKNIDNFFAENEQLAFCPAIIVPGIHYSDDKLLQTRIFSYADTQRHRLGPNYLMLPVNAPKCAYHNNHHDGSMNFMHRDEEVNYFPSRFDAARHAEKVPIPPRVLTGCREKCVIDKENNFQQAGERYRSFDPARQDRFLQRWVDALSDPRITHELRGIWISYWSQCDASLGQKLASRLNLKPNM

SEQ ID NO: 19858 - protein, 714 aa, Botryotinia fuckeliana
MYLATVLSLVGLVTAQCPYGMDKQPQKREPKDSQTSSSNFLDQFTLNDTNTYFTTDAGGPIQEDTSLKAGARGPTLLEDFIFRQKIQHFDHERVPERAVHARGAGAHGIFTSYGNYSNITAASFLNQEGKETPVFVRFSTVAESRGSADTARDVHGFATRFYTDEGNFDIVGNNIPVFFIQDAILFPDLIHAVKPSPDNEIPQAATAHDSAWDFFSQQPSSLHTLFWAMAGNGIPRSFRHMDGFGIHTFRLVTDSGTSKLVKWHWKSKQGKASLVWEEAQVLAGKNADFHRKDLWDAIESGNGPEWELGIQIVEEEDVLKFGFDLLDPTKILPEELVPVQKIGVMRLNANPRNYFAETEQVMFQPGHIVRGIDFTDDPLLQGRIFSYLDTQLNRHGGPNFEQLPINRPIVPVHNNNRDGAAHNYIPLNTAAYSPNTLNDAAPKQANQTVGRGFFTAPGRTVSGHLVREVSSTFSDVWSQPRLFYNSLIPVEQQFLINAIRFETSQLTSSVVKSNVLIQLNRVSHDLAARVASVLNLPVPEADNTYYNDNKTSSITIFGNELPTIATLNVGVLVSVKNNATLTQAANLATSFSTSGVNVKVIGEILTNGVDATYSASDATLFDGIIVTDGAENLFTNGSKSTYFPADRPRQILLDAYNWGKPVGTLGNARTSLNVASISTTPGVYSNSTSVSGLVKEFEAGLKTFRFVDRFALDD

SEQ ID NO: 19859 - protein, 479 aa, Botryotinia fuckeliana
MAQTNGVLQEPAITTMNGAPVLKPASTQRIGNQLRATLLLQDINLLELIQHITHERIPERVVHARGTSAHGYFEVTDDISDVTSAAFLNRVGKQTDIFCRFSTVAGRAESAETVRDTRGFAFKMFTEEGNLDWLFLSTPVFPIRDGAKFPSFTHATKKNPRSGLPDHKAFWDYFTHNQEGIHFLMFLFSDRATPVDFQHADIFSINTYKFTKSDGSFTYVKIHLKTNQGVKNFTQDEANQKAGVDPDFQTRSLYEDIENQKYPTWDVFAQIIDPVKAENYHINIFDATKTFPFSEFPLRKFGKITLNRNVDNFFAEQEQSAFSPTNLVPGWALTPDPIIQTRALAYADTQRYRLGANFVQLPVNAPYKKPFTPLIRDGAATVNGNLGGTPNYFPSSFYNVGAATQYAQPDEEQFQGTVVNFESEVVDADYVQPRIFWEKTLAEEPGQQDNLISNVAGHLSAVTGDKGLGSSTSGLCNVR

SEQ ID NO: 19860 - protein, 492 aa, Capsicum annuum
MDPYKHRPSSAANSPYWTTNSGAPVYNNNSSLTVGARGPILLEDYHLLEKLANFDRERIPERVVHARGASAKGFFEVTHDITRLTCADFLRAPGVQTPVIVRFSTVIHERGSPETLRDPRGFAVKFYTREGNFDLVGNNFPVFFVRDGMKFPDMVHALKPNPKSHIQENWRILDFFSHHPESLHMFSFLFDDLGIPQDYRHMEGSGVNTYTLINKAGKAHYVKFHWKPTCGVKCLLDDEAVKVGGTNHSHATQDLYDSIAAGNYPKWKLFIQTIDPDHEDKFDFDPLDVTKIWPEDILPLQPVGRLVLNKNIDNFFVENEQLAFCPAIIVPGIHYSDDKLLQTRVFSYADTQRHRLGPNYLQLPPNAPKCAHHNNHHEGFMNFMHRDEEVNYFPSRFDPCRHAEQYPIPPRVLNGKRDRCIIQKENNFKQPGERYRSWAPDRQERFICRWVDALSEPRVTHEIRTIWLSYWSQADKSLGQKLASRLNVKPTM

SEQ ID NO: 19861 - protein, 470 aa, Methylobacterium extorquens
NSLTAGSRGPVLMQDYHLIEKMAHFNRERIPERVVHAKGYGAYGTFRLTRSLSEFTRAKVLTEVGKDVPMVARFSTVGGESGSADTARDPRGFALKFYTEEGNWDLVGNNTPIFFVRDAIKFSDFIRTQKRDPRTHLKPHWRRWDFWSLSPEAIHQVMFLYSDRGTPKSARFMNGYGSHTFSLWNDRGERHWVKFHFHTKQGIQNFSADEADEVAGKDPDYSSADLSTAIEQGDFPKWKVSVQLMPELDADTYRINPFDLTKVWPHGDYPLIEIGEMELNRNPENYFAEIEQSAFEPSNVVPGIGFSPHKMLQNRVLSYADAHRYRLGVNYQQIPVNQAKNADVQTYHRDGAMRTDGNHGAQVDYEPNSFGGPKQDPSFSEPPLRIQGDAGRYGWPGDDEDLYGQPKLFWTKVLDEGGRKRLVENIVTSMGDSPRHIQERMIAHWFKVHEDFGRGVAQGLGIDTAQAAAE

SEQ ID NO: 19862 - protein, 492 aa, Nicotiana plumbaginifolia
MDPYKYRPSSANNSPFWTTNSGAPVWNNNSSMTVGTRGPILLEDYHLVEKLANFDRERIPERVVHARGASAKGFFEVTHDITHLTCADFLRAPGVQTPVIVRFSTVIHERGSPETLRDPRGFAVKFYTREGNFDLVGNNFPVFFVRDGMKFPDMVHALKPNPKSHIQENWRILDFFSHHPESLHMFSFLFDDLGVPQDYRHMEGSGVNTYMLINKAGKAHYVKFHWKPTCGVKCLLEEEAIKVGGANHSHATKDLYDSIAAGNYPEWKLFIQIIDPDHEDRFDFDPLDVTKTWPEDILPLQPVGRLVLNKNIDNFFAENEQLAFWPAIVVPGVYCSDDKLLQTRIFSYSDAQRHRLGPNYLQLPVNAPKCAHHNNHHEGFMNFMHRDEEVNYFPSRFDPCRHAEQYPIPPCVLTGKRDKCIIEKENNFKQPGERYRSWAPDRQERFICRWVDALSDPRVTHEIRSIWFSYWSQADKTLGQKIASRLNVRPTM

SEQ ID NO: 19863 - protein, 383 aa, Nicotiana sylvestris
RGSPESLRDIRGFAVKFYTREGNFDLVGNNVPVFFNRDAKSFPDTIRALKPNPKSHIQEYWRILDFFSFLPESLHTFAWFFDDVCLPTDYRHMEGYGVHAYQLINKAGKAHYVKFHWKPTCGVKCMSEEEAIRVGGTNHSHATKDLYDSIAAGNYPEWKLFIQIMDTEDVDKFDFDPLDVTKTWPEDILPLMPVGRLVLNRNIDNFFAENEQLAFNPGHIVPGLYYSEDKLLQTRIFAYADTQRHRIGPNYMQLPVNAPKCAHHNNHRDGAMNFMHRDEEVDYLPSRFDPCRHAEQYPIPSRVLTGRREMCVIEKENNFKQAGERYRSWEPDRQDRYVSKWVEHLSDPRVTYEIRSIWISYLSQADKSCGQKVASRLTLKPTM

SEQ ID NO: 19864 - protein, 492 aa, Solanum melongena
MDLSKYRPSSAYDTPFLTTNAGGPVYNNVSSLTVGPRGPVLLEDYHLIEKLATFDRERIPERVVHARGASAKGFFEVTHDVSHLTCADFLRAPGVQTPVICRFSTVVHERGSPESIRDIRGFAVKFYTREGNFDLVGNNVPVFFNRDAKSFPDTIRALKPNPKSHIQENWRILDFFSFLPESLHTFAFFYDDVCLPINYRHMEGFGVHAYQLINKAGKAHYVKFHWKPTCGVKSMTEEEAIRVGGTNHSHATKDLYDSIAAGNYPEWKLFIQIMDPEDVDKFDFDPLDVTKTWPEDILPLMPVGRLVLNRNIDNFFAENEQLAFNPGHIVPGVYYSEDKLLQTRIFAYADTQRHRIGPNYMQLPVNAPKCAHHNNHRDGAMNFMHRDEEVDYLPSRFDPCRPAEQYPIPSCVLTGRREKCVIPKENNFKQAGERYRTWEPDRQDRYINKWVESLSDPRVTHEIRSIWISYLSQADKSCGQKVASRLLVKPTM

SEQ ID NO: 19865 - protein, 502 aa, Solanum melongena
MDLSKYRPSSAYDTPFLTTNAGGPVYNNVSSLTVGPRGPVLLEDYHLIEKLATFDRERIPERVVHARGASAKGFFEVTHDVSHLTCADFLRAPGVQTPVICRFSTVVHERGSPESIRDIRGFAVKFYTREGNFDLVGNNVPVFFNRDAKSFPDTIRALKPNPKSHIQENWRILDFFSFLPESLHTFAFFYDDVCLPINYRHMEGFGVHAYQLINKAGKAHYVKFHWKPTCGVKSMTEEEAIRVGGTNHSHATKDLYDSIAAGNYPEWKLFIQIMDPEDVDKFDFDPLDVTKTWPEDILPLMPVGRLVLNRNIDNFFAENEQLAFNPGHIVPGVYYSEDKLLQTRIFAYADTQRHRIGPNYMQLPVNAPKCAHHNNHRDGAMNFMHRDEEVDYLPSRFDPCRPAEQYPIPSCVLTGRREKCVIPKENNFKQAGERYRTWEPDRQDRYINKWVESLSDPRVTHEIRSIWISYLSQADKSCGQKVASRLLSSLQCEEDEENSWKC

SEQ ID NO: 19866 - protein, 492 aa, Solanum tuberosum
MDPSKYRPSSAYDTPFLTTNAGGPVYNNVSSLTVGPRGPVLLEDYYLIEKLATFDREKIPERVVHARGASAKGFFEVTHDISHLTCADFLRAPGAQTPVICRFSTVVHERGSPESIRDIRGFAVKFYTREGNFDLVGNNVPVFFNRDAKSFPDTIRALKPNPKSHIQENWRILDFFSFLPESLHTFAFFYDDVCLPTDYRHMEGFGVHAYQLINKEGKAHYVKFHWKPTCGVKSMSEEEAIRVGGTNHSHATKDLYDSIAAGNYPEWKLFIQTMDPEDVDKFDFDPLDVTKTWPEDLLPLIPVGRLVLNRNIDNFFAENEQLAFNPGHIVPGIYYSEDKLLQTRIFAYADTQRHRIGPNYMQLPVNAPKCGHHNNHRDGAMNMTHRDEEVDYLPSRFDPCRPAEQYPIPACVLNGRRTNCVIPKENNFKQAGERYRSWESDRQDRYITKWVESLSDPRVTHEIRSIWISYLSQADKSCGQKVASRLTVKPTM

SEQ ID NO: 19867 - protein, 491 aa, Solanum tuberosum
DPSKYRPSSAYDTPFLTTNAGGPVYNNVSSLTVGPRGPVLLEDYYLIEKLATFDREKIPERVVHARGASAKGFFEVTHDISHLTCADFLRAPGAQTPVICRFSTVVHERGSPESIRDIRGFAVKFYTREGNFDLVGNNVPVFFNRDAKSFPDTIRALKPNPKSHIQENWRILDFFSFLPESLHTFAFFYDDVCLPTDYRHMEGFGVHAYQLINKEGKAHYVKFHWKPTCGVKSMSEEEAIRVGGTNHSHATKDLYDSIAAGNYPEWKLFIQTMDPEDVDKFDFDPLDVTKTWPEDLLPLIPVGRLVLNRNIDNFFAENEQLAFNPGHIVPGIYYSEDKLLQTRIFAYADTQRHRIGPNYMQLPVNAPKCGHHNNHRDGAMNMTHRDEEVDYLPSRFDPCRPAEQYPIPACVLNGRRTNCVIPKENNFKQAGERYRSWESDRQDRYITKWVESLSDPRVTHEIRSIWISYLSQADKSCGQKVASRLTVKPTM

SEQ ID NO: 19868 - protein, 492 aa, Solanum tuberosum
MDPSKYRPSSAYDTPFLTTNAGGPVYNNVSSLTVGPRGPVLLEDYYLIEKLATFDREKIPERVVHARGASAKGFFEVTHDISHLTCADFLRAPGAQTPVICRFSTVVHERGSPESIRDIRGFGVKFYNRGGNFDLVGNNVPVFFNRDAKSFPDTIRALKPNPKSHIQEDWRTLDFFSFLPESLHTFAFFYDDVCLPTDYRHMEGFGVHAYQLINKEGKAHYVKFHWKPTCGVKCMSEEEAIRVGGTNHSHATKDLYDSIAAGNYPEWKLFIQTMDPEDVDKFDFDPLDVTKTWPEDLLPLIPVGRLVLNRNIDNFFAENEQLAFNPGHIVPGIYYSEDKLLQTRIFAYADTQRHRIGPNYMQLPVNAPKCGHHNNHRDGAMNMTHRDEEVDYFPSRFDPCRPAEQYPIPACVLNGRRTNCVIPKENNSKQAGERYRSWESDRQDRYINKWVESLSDPRVTHEIRSIWISYLSQADKSCGQKVASRLTVKPTM

SEQ ID NO: 19869 - protein, 492 aa, Ipomoea batatas
MDPSKYRPSSSFNTPFCTTNSGAPVWNNTCALTVGSRGPILLEDYHLVEKIQNFTRERIPERVVHARGASAKGFFEVTHDITHLTCADFLRAPGVQTPLIVRFSTVIHERGSPETIRDPRGFAVKMYTRGGNWDLVGNNFPVFFIRDGTQFPDVIHAFKPNPKSHIQENWRILDYLSHLPESLNTFAWFYDDVGIPTDYRHMEGFGVHTFTMINKEGKANYVKFHWKPTCGVKCLLEEEAIRIGGENHSHATQDLYESIAAGNYPEWKLYIQVMDPDHEDRFDFDPLDTTKIWPEELIPLQPVGRMVLNKNIDNFFAENEMLAMDPAHIVPGIYFSDDKMLQARVFAYADTHRHRLGPNYMLLPVNAPKCAHHNNSYDGYMNFVHRDEEVDYFPSKFDNTRNAERFPTPLRIVTGQRDKCVIEKENNFKQPGDRYRSWAPDRQDRFINRWVKALSEPRVTHEIRSTWISYLTQADRSLGQKVASRLNIRPTM

SEQ ID NO: 19870 - protein, 492 aa, Helianthus annuus
MDPYKYRPSSAYNAPFWTTNYGAPVYNNDSSLTVGTRGPILLEDYHFVEKLANFDRERIPERVVHARGASAKGFFEVTHDISALTCADFLRAPGVQTPVIVRFSTVIHERGSPETLRDPRGFAVKFYTREGNFDLVGNNFPVFFVRDGMKFPDMVHSLKPNPKSHIQEDWRILDFFSHHPESLHMFTFLQDDVGVPQDYRHMDGSGVNTYTLINKTGKTHYVKFHWRPTCGVKCLLEDEAIKVGGMNHSHATKDLYDSIADGNYPEWKLFIQTMDPDHEDRFDFDPLDVTKTWPEDILPLQPVGRMVLNKNIDNFFAENEQLAFCPAIIVPGIYYSDDKLLQTRIFSYADTQRHRLGPNYLQLPANAPKCAHHNNHHDGFMNFMHRDEEVIYFPSRYDPVRHAEQSPIPPVMLSGKRNKCVIEKENNFKQPGERFRSWDPDRQERFIRRIVGALSDPRVTHEVCTIWVSYWSQADKSLGQKIASRLNVKPSY

SEQ ID NO: 19871 - protein, 492 aa, Helianthus annuus
MDPYKYRSSSAYNAPFWTTNSGAPVYNNNNSLTVGSRGPILLEDYHLVEKLANFDRERIPERVVHARGASAKGFFEVTHDITALTCADFLRAPGVQTPVIVRFSTVIHERGSPETLRDPRGFAVKFYTREGNFDLVGNNFPVFFIRDGMKFPDMVHSLKPNPKSHIQEDWRIMDFFSHHPESLHMFTFLLDDIGVPQDYRHMDGSGVNTYTLINKAGKAYYVKFHWKPTCGVKSLLEEEAIKIGGANHSHATQDLYDSIAAGNYPEWKLFIQTIDPDHEDRLDFDPLDVTKTWPEDIFPLQPVGRLVLNKNIDNFFAENEQLAFCPAIIVPGIYYSDDKLLQTRIFSYSDTQRHRLGPNYLQLPANAPKCAHHNNHYDGFMNFMHRDEEIDYFPSRYDPARHAEQYPIPPVRLSGKRDKCVIEKENNFKQPGERYRSFSPDRQERFINRVVGGLSDPRVTHEVRSIWVSYWSQADKSLGQKIASRLNVKPNY

SEQ ID NO: 19872 - protein, 492 aa, Helianthus annuus
MDPYKYRSSSAYNAPFWTTNSGAPVYNNNNSLTVGSRGPILLEDYHLVEKLANFDRERIPERVVHARGASAKGFFEVTHDITALTCADFLRAPGVQTPVIVRLSTVIHERGSPETLRDPRGFAVKFYTREGNFDLVGNNFPVFFIRDGMKFPDMVHSLKPNPKSHIQEDWRIMDFFSHHPESLHMFTFLLDDIGVPQDYRHMDGSGVNTYTLINKAGKAYYVKFHWKPTCGVKSLLEEEAIKIGGANHSHATQDLYDSIAAGNYPEWKLFIQTIDPDHEDRLDFDPLDVTKTWPEDIFPLQPVGRLVLNKNIDNFFAENEQLAFCPAIIVPGIYYSDDKLLQTRIFSYSDTQRHRLGPNYLQLPANAPKCAHHNNHYDGFMNFMHRDEEIDYFPSRYDPARHAEQYPIPPVRLSGKRDKCVIEKENNFKQPGERYRSFSPDRQERFINRVVGGLSDPRVTHEVRSIWVSYWSQADKSLGQKIASRLNVKPNY

SEQ ID NO: 19873 - protein, 492 aa, Helianthus annuus
MDPYKQRPSSAYDTPFWTTNAGAPVYNNTASLTVGNRGPILLEDYHLIEKLANFTRERIPERIVHARGASAKGFFEVTHDITHLTCADFLRAPGVQTPVIVRFSTVIHERGSPETIRDPRGFATKFYTREGNFDIVGNNFPVFFTRDAMAFPDVIHAFKPNPKSHIQEDWRILDFLSHHPESLNTMTFWLDDVGIPTDYRHMEGSSVNTLTLVNKEGKIHYVKFTWKPTCGVKCLMDDEAIKIGGANHSHATQDLYDSIQAGNFPEWKLFLQVIDPDHEDRLDFDPLDGTMTWPEDVIPLQPVGRMVLNKNIDNFFAENEQLAFNPGLVVPGIYYSDDKMLQGRIFAYSDTQRHRLGPNYLQLPVNAPKCAHHNNHYDGHMNFMHRDEEVDYFPSRYDRVQHAQKYPINPARVTGTRDRTVIPKYNDFKQPGERYRSWDPARQERFIVRMCKMLSDPRVTHELRSIWISYWTQADKSLGQKIASRLNVRPNY

SEQ ID NO: 19874 - protein, 492 aa, Helianthus annuus
MDPYKQRPSSAYNAPFWTTNAGLPVYNNTASLTVGNRGPILLEDYHLIEKLANFTRERIPERIVHARGASAKGFFEVTHDITHLTCADFLRAPGVQTPTIVRFSTVIHERGSPETIRDPRGFATKFYTREGNFDIVGNNFPVFFTRDAMAFPDVIHAFKPNPKSHIQEDWRILDFLSHHPESLNTMTFWLDDVGIPTDYRHMEGSSVNTLTLVNKEGKIHYVKFTWKPTCGVKCLMDDEAIKIGGANHSHATQDLYDSIQAGNFPEWKLYLQVIDPDHEDRLDFDPLDGTMTWPEDIIPLQPVGRMVLNKNIDNFFAENEQLAFNPGLVVPGIYYSDDKMLQGRIFAYSDTQRHRLGPNYLQLPVNAPKCAHHNNHYDGNMNFMHRDEEVDYFPSRYDRVQHAKQYPINSRQVTGTRDRTVIPKYNDFKQPGDRYRSWDPARQERFIVRMCKMLSDPRVTHELRSIWISYWTQADQSLGQKIASRLNVRPNY

SEQ ID NO: 19875 - protein, 355 aa, Rhodococcus equi
  unsure (1)..(355): unsure at all Xaa locations
MTTNQGVKVSEDEHSLKAGSRGPTLMEDFHFREKMTHFDHERIPERVVHARGFGAHGYFQVYEPMAEYTRAKFLQDPSVKTPVFVRFSTVAGSRGSADSVRDARGFATKFYTEEGNYDLVGNNIPVFFIQDAIKFPDLVHSFKPEPHNEMPXASTAHDTFWDFVANILKQAHMIMWTMSDRAIPRSFRMMEGFGVHTFRFVNEQGKARFVKFHWKPVLGTHSLVFDEAQKLAGKDPDFHRRDLWEAIEMGNYPEFELGVQMIEEEDEFSFDFDILDATKLWPEEMVPVKIIGKMTLNRNQDNVFAETEQAAFHPGHVVPGIDFSNDPLLQGRLFSYTDTQLIRLGGPNFHEIPIK

SEQ ID NO: 19876 - protein, 496 aa, Dictyostelium discoideum
MSAPVLTTSSGSPIDNNLNSMTAGVNGPILIQDFTLIDKLAHFDRERIPERVVHAKGAGAHGYFEVTSSDVPKWCKAKFLNKVGKRTPIFTRFSTVGGEKGSSDSERDPRGFAVKFYTEEGNFDMVGNNTPVFFIRDPSKFPDFIHTQKRNPQTNCKDPNMFWDFLGQTPESTHQVSILFSDRGTPKSYRHMHGFSSHTLKFVNAQGKPYWVKLHFTSETGIQNYTAEEAAKMSMNDPDSATRDLFETIAKGGEPAWKVSIQLMEFEDALKYRFNPFDVTKIWSHKDYPLIQIGRMVLNRNPENYFAEVEQAAFSPSHMVPGIEPSPDKMLQGRLFSYPDTHRHRLGVNYQQIPVNCPFAVKGGVKNYQRDGFMAVNGNGGKGPNYQPNSFGGPEPHPEFAQHKFDVSGFAARQPYNHPNDDFVQPGDLYRLMSEDAKSRFVSNLVGHMSGVTIKEIQVRAVSNFYKADKDLGARLCKGLGIDVNDVIKFAARSNL

SEQ ID NO: 19877 - protein, 496 aa, Dictyostelium discoideum
MSAPVLTTSSGSPIDNNLNSMTAGVNGPILIQDFTLIDKLAHFDRERIPERVVHAKGAGAHGYFEVPSSDVPKWCKAKFLNKVGKRTPIFTRFSTVGGEKGSSDSERDPRGFAVKFYTEEGNFDMVGNNTPVFFIRDPSKFPDFIHTQKRNPQTNCKDPNMFWDFLGQTPESTHQVSILFSDRGTPKSYRHMHGFSSHTLKFVNAQGKPYWVKLHFTSETGIQNYTAEEAAKMSMNDPDSATRDLFETIAKGGEPAWKVSIQLMEFEDALKYRFNPFDVTKIWSHKDYPLIQIGRMVLNRNPENYFAEVEQAAFSPSHMVPGIEPSPDKMLQGRLFSYPDTHRHRLGVNYQQIPVNCPFAVKGGVKNYQRDGFMAVNGNGGKGPNYQPNSFGGPEPHPEFAQHKFDVSGFAARQPYNHPNDDFVQPGDLYRLMSEDAKSRFVSNLVGHMSGVTIKEIQVRAVSNFYKADKDLGARLCKGLGIDVNDVIKFAARSNL

SEQ ID NO: 19878 - protein, 492 aa, Hordeum vulgare
MDPYKHRPTSGANSAYWTTNSGAPVWNNNNALTVGHRGPILLEDYHLIEKLAQFDRERIPERVVHARGASAKGFFEVTHDVSQLTCADFLRAPGVQTPVIVRFSTVVHERGSPETLRDPRGFAVKFYTREGNFDLVGNNMPVFFIRDGMKFPDMVHAFKPSPKTNMQENWRVVDFFSHHPESLHMFTFLFDDVGIPLNYRHMDGFGVNTYTLISRDGKAHLVKFHWKPTCGVKCLLDDEAVTVGGTCHTHATKDLTDSIAAGNYPEWKLFIQTIDADHEDRFDFDPLDVTKTWPEDIIPLQPVGRMVLNKNIDNFFAENEQLAFCPAVTVPGIHYSDDKLLQTRIFSYADTQRHRLGPNYLMLPVNAPKCAHHNNHHDGLMNFIHRDEEVNYFPSRFDPTRHAEKYPMPPRVLSGCREKCIIDKENNFKQAGERYRSFDPARQDRFLQRWVDALTDARVTHEIQSIWVSYWSQCDASLGQKLASRLKIKPNM

SEQ ID NO: 19879 - protein, 91 aa, Oryza longistaminata
RDAKARYVKFHWKPTCGVSCLMDDEATLVGGKNHSHATQDLYDSIAAGNFPEWKLFVQVIDPEEEERFDFDPLDDTKTWPEEEVPLRPVGR

SEQ ID NO: 19880 - protein, 90 aa, Oryza longistaminata
RDAKARYVKFHWKPTCGVSCLMDDEATLVGGKNHSHATQDLYDSIAAGNFPEWKLFVQVIDPEEEERFDFDPLDDTKTWPEEEVPLRPVG

SEQ ID NO: 19881 - protein, 90 aa, Oryza longistaminata
DAKARYVKFHWKPTCGVSCLMDDEATLVGGKNHSHATQDLYDSIAAGNFPEWKLFVQVIDPEEEERFDFDPLDDTKTWPEEEVPLRPVGR

SEQ ID NO: 19882 - protein, 89 aa, Oryza longistaminata
DAKARYVKFHWKPTCGVSCLMDDEATLVGGKNHSHATQDLYDSIAAGNFPEWKLFVQVIDPEEEERFDFDPLDDTKTWPEDEVPLRPVG

SEQ ID NO: 19883 - protein, 89 aa, Oryza longistaminata
DAKARYVKFHWKPTCGVSCLMDDEATLVGGKNHSHATQDLYDSIAAGNFPEWKLFVQVIDPEEEERFDFDPLDDTKTWPEEEVPLRPVG

SEQ ID NO: 19884 - protein, 81 aa, Oryza longistaminata
YVKFHWKPTCGVSCLMDDEATLVGGKNHSHATQDLYDSIAAGNFPEWKLFVQVIDPEEEERFDFDPLDDTKTWPEEEVPLR

SEQ ID NO: 19885 - protein, 84 aa, Oryza rufipogon
ARYVKFHWKPTCGVSCLMDDEATLVGGKNHSHATQDLYDSIAAGNFPEWKLFVQVIDPEEEERFDFDPLDDTKTWPEDEVPLRP

SEQ ID NO: 19886 - protein, 492 aa, Oryza sativa
MDPYKHRPSSGSNSTFWTTNSGAPVWNNNSALTVGERGPILLEDYHLIEKLAQFDRERIPERVVHARGASAKGFFEVTHDISHLTCADFLRAPGVQTPVIVRFSTVVHERGSPETLRDPRGFAVKFYTREGNFDLVGNNMPVFFIRDGMKFPDMVHAFKPSPKTNMQENWRIVDFFSHHPESLHMFSFLFDDVGIPLNYRHMEGFGVNTYTLINKDGKPHLVKFHWKPTCGVKCLLDDEAVTVGGTCHSHATKDLTDSIAAGNYPEWKLYIQTIDPDHEDRFDFDPLDVTKTWPEDIIPLQPVGRMVLNKNIDNFFAENEQLAFCPAIIVPGIHYSDDKLLQTRIFSYADTQRHRLGPNYLMLPVNAPKCAYHNNHHDGSMNFMHRDEEVNYFPSRFDAARHAEKVPIPPRVLTGCREKCVIDKENNFQQAGERYRSFDPARQDRFLQRWVDALSDPRITHELRGIWISYWSQCDASLGQKLASRLNLKPNM

SEQ ID NO: 19887 - protein, 492 aa, Oryza sativa
MDPYKHRASSGSNSTFWTTNSGAPVWNNNSALTVGERGPILLEDYHLIEKLAQFDRERIPERVVHARGASAKGFFEVTHDISHLTCADFLRAPGVQTPVIVRFSTVVHERGSPETLRDPRGFAVKFYTREGNFDLVGNNMPGFFIRDGMKFPDMVHAFKPSPKTNMQENWRIVDFFSHHPESLHMFSFLFDDVGIPLNYRHMEGFGVNTYTLINKDGKPHLVKFHWKPTCGVKCLLDDEAVTVGGTCHSHATKDLTDSIAAGNYPEWKLYIQTIDPDHEDRFDFDPLDVTKTWPEDIIPLQPVGRMVLNKNIDNFFAENEQLAFCPAIIVPGIHYSDDKLLQTRIFSYADTQRHRLGPNYLMLPVNAPKCAYHNNHHDGSMNFMHRDEEVNYFPSRFDAARHAEKVPIPPRVLTGCREKCVIDKENNFQQAGERYRSFDPARQDRFLQRWVDALSDPRITHELRGIWISYWSQCDASLGQKLASRLNLKPNM

SEQ ID NO: 19888 - protein, 482 aa, Oryza sativa
  unsure (1)..(482): unsure at all Xaa locations
MDPYKHRPSSGSNSTFWTTNSGAPVWNNNSALTVGERGPILLEDYHLIEKLAQFDRERIPERVVHARGASAKGFFEVTHDISHLTCADFLRAPGVQTPVIVRFSTVVHERGSPETLRDPRGFAVKFYTREGNFDLVGNNMPVFFIRLGMKFPDMVAAFXWRIVDFFSHHPESLHMFSFLFDDVGIPLNYRHMEGFGVNTYTLINKDGKPHLVKFHWKPTCGVKCLLDDEAVTVGGTCHSHATKDLTDSIAAGNYPEWKLYIQTIDPDHEDRFDFDPLDVTKTWPEDIIPLQPVGRMVLNKNIDNFFAENEQLAFCPAIIVPGIHYSDDKLLQTRIFSYADTQRHRLGPNYLMLPVNAPKCAYHNNHHDGSMNFMHRDEEVNYFPSRFDAARHAEKVPIPPRVLTGCREKCVIDKENNFQQAGERYRSFDPARQDRFLQRWVDALSDPRITHELRGIWISYWSQCDASLGQKLASRLNLKPNM

SEQ ID NO: 19889 - protein, 86 aa, Oryza glaberrima
GKARYVKFHWKPTCGVSCLMDDEATIVGGKNHSHATQDLYDSIAAGNFPEWKLFVQVIDPEEEERFDFDPLDDTKTWPEDEVPLRP

SEQ ID NO: 19890 - protein, 84 aa, Oryza glaberrima
ARYVKFHWKPTCGVSCLMDDEATIVGGKNHSHATQDLYDSIAAGNFPEWKLFVQVIDPEEEERFDFDPLDDTKTWPEDEVPLRP

SEQ ID NO: 19891 - protein, 492 aa, Secale cereale
MDPCKFRPSSSFDTKTTTTNPGQPVWNDNEALTVGPRGPILLEDYHLLEKIAHFARDIPEPFVHAGRASAKGFFECTHDVTGLTCADFLPSPGAGTPVIVRFSTVIHERGSPETIRDPRGFAVKFYTREGNWDLLGNNFPVFFIRDGIKFPDVIHAFKPNPKSHVQEYWRVFDFLPHHPESLHTFFFLFDDVGIPTDYRHMDGFGVNTYTFVTRAGKSHYIKFHWRPTCGVSCLMDDEATLVGGKNHSHATQDLYDSIDAGNFPEWKLFVQVIDPEQQDRFDFDPLDDTKTWPEDLVPLQPVGRLVLDRNVDNFFNENEQLAFGPGLVVPGIYYSDDKMLQCRVFAYADTQRYRLGPNYLMLPVNAPKCGFKKNHYDGAMNFMHRDEEVDYYPSRHAPLRHAEPASFPVPTRPVVGKREKTRIKKENDFVQPGERYRSWAPDRQDRFVALRRRLAHPKVSHELRVIWIDFLSKCDKSCGMKVANRLNVKPSM

SEQ ID NO: 19892 - protein, 270 aa, Secale cereale
ERIPERVVHARGASAKGFFEVPHDVSQLTCADFLGAPGVQTPVIVRFSTVVHDRGSPETLRDPRGFAVKFYTREGNFDLVGNNMPVFFIRDGMKFPDMVHAFKPSPKTNMQENWRIVDFSSHHPESLHMFTFLFDDVRIPLNYRHMDGFGVNTYTFISSDGKAHLVKFHWKPTCGVKCLLDDDAVTVGGTCHTHATKDLTDSIAAGNYPVWKVFIQTVDADHEDKFDFDPLDVTKTWPEDIIQLQPVGRMVLNKNIDNFFAENEQLAFCS

SEQ ID NO: 19893 - protein, 492 aa, Triticum aestivum
MDPYKHRPTSGANSGYWTTNSGAPVWNNNNALTVGQRGPILLEDYHLIEKLAQFDRERIPERVVHARGASAKGFFEVTHDVSQLTCADFLRAPGVQTPVIVRFSTVVHERGSPETLRDPRGFAVKFYTREGNFDLVGNNMPVFFIRDGMKFPDMVHAFKPSPKTNMQENWRIVDFFSHHPESLHMFTFLFDDVGIPLNYRHMDGFGVNTYTLISRDGKAHLVKFHWKPTCGVKCLLDDEAVTVGGTCHTHATKDLTDAIAAGNYPEWKLFIQTIDADHEDKFDFDPLDVTKTWPEDIIPLQPVGRMVLNKNIDNFFAENEQIAFCPAIIVPGIHYSDDKLLQTRIFSYADTQRHRLGPNYLMLPVNAPKCAHHNNHHEGFMNFMHRDEEVNYFPSRFDPTRHAEKVPIPPRVLTGCREKCIIEKENNFKQAGERFRSFDPARQDRFIQRWVDALSDPRVTHEHHTIWINYWSQCDASLGQKLASRLNLKPNM

SEQ ID NO: 19894 - protein, 544 aa, Triticum aestivum
MDPYKVCTPPILPQPTRSRQLAGPDRRFGCPCRPAIRSSDALGFPGFLCCSQMDPYKHRPTSGANSGYWTTNSGAPVWNNNNALTVGQRGPILLEDYHLIEKLAQFDRERIPERVVHARGASAKGFFEVTHDVSQLTCADFLRAPGVQTPVIVRFSTVVHERGSPETLRDPRGFAVKFYTREGNFDLVGNNMPVFFIRDGMKFPDMVHAFKPSPKTNMQENWRIVDFFSHHPESLHMFTFLFDDVGIPLNYRHMDGFGVNTYTLISRDGKAHLVKFHWKPTCGVKCLLDDEAVTVGGTCHTHATKDLTDSIAAGNYPEWKLFIQTIDADHEDKFDFDPLDVTKTWPEDIIPLQPVGRMVLNKNIDNFFAENEQLAFCPAITVPGIHYSDDKLLQTRIFSYADTQRHRLGPNYLMLPVNAPKCAHHNNHHDGLMNFMHRDEEVNYFPSRFDPTRHAEQYPIPPRVLSGCREKCIIEKENNFKQAGERYRSFDPARQDRFLQRWVDALTDARVTHEIQGIWVSYWSQCDTSLGQKLASRLKIKPSM

SEQ ID NO: 19895 - protein, 492 aa, Triticum aestivum
MDPYKHRPTSGANSGYWTTNSGAPVWNNNNALTVGQRGPILLEDYHLIEKLAQFDRERIPERVVHARGASAKGFFEVTHDVSQLTCADFLRAPGVQTPVIVRFSTVVHERGSPETLRDPRGFAVKFYTREGNFDLVGNNMPVFFIRDGMKFPDMVHAFKPSPKTNMQENWRIVDFFSHHPESLHMFTFLFDDVGIPLNYRHMDGFGVNTYTLISRDGKAHLVKFHWKPTCGVKCLLDDEAVTVGGTCHTHATKDLTDSIAAGNYPEWKLFIQTIDADHEDKFDFDPLDVTKTWPEDIIPLQPVGRMVLNKNIDNFFAENEQLAFCPAITVPGIHYSDDKLLQTRIFSYADTQRHRLGPNYLMLPVNAPKCAHHNNHHDGLMNFMHRDEEVNYFPSRFDPTRHAEQYPIPPRVLSGCREKCIIKKENNFKQAGERYRSFDPARQDRFLQRWVDALTDARVTHEIQGIWVSYWSQCDASLGQKLASRLKMKPNM

SEQ ID NO: 19896 - protein, 492 aa, Triticum aestivum
MDPYKHRPTSGANSGYWTTNSGAPVWNNNNALTVGQRGPILLEDYHLIEKLAQFDRERIPERVVHARGASAKGFFEVTHDVSQLTCADFLRAPGVQTPVIVRFSTVVHERGSPETLRDPRGFAVKFYTREGNFDLVGNNMPVFFIRDGMKFPDMVHAFKPSPKTNMQENWRIVDFFSHHPESLHMFTFLFDDVGIPLNYRHMDGFGVNTYTLISRDGKAHLVKFHWKPTCGVKCLLDDEAVTVGGTCHTHATKDLTDAIAAGNYPEWKLFIQTIDADHEDKFDFDPLDVTKTWPEDIIPLQPVGRMVLNKNIDNFFAENEQLAFCPAVTVPGIHYSDDKLLQTRIFSYADTQRHRLGPNYLMLPVNAPKCAHHNNHHDGLMNFMHRDEEVNYFPSRFDPTRHAEQYPIPPRVLSGCREKCIINKENNFKQAGERYRSFDPARQDRFLQRWVDALTDARVTHEIQGIWVSYWSQCDASLRQKLASRLKMKPNM

SEQ ID NO: 19897 - protein, 492 aa, Triticum aestivum
MDPYKHRPTSGANSAYWTTNSGAPVWNNNNALTVGHRGPILLEDYHLIEKLAQFDRERIPERVVHARGASAKGFFEVTHDVSQLTCADFLRAPGVQTPVIVRFSTVVHERGSPETLRDPRGFAVKFYTREGNFDLVGNNMPVFFIRDGMKFPDMVHAFKPSSKTNMQENWRVVDFFSHHPESLHMFTFLFDDVGIPLNYRHMDGFGVNTYTLISRDGKAHLVKFHWKPTCGVKCLLDDEAVTVGGTCHTHATKDLTDSIAAGNYPEWKLFIQTIDADHEDRFDFDPLDVTKTWPEDIIPLQPVGRMVLNKNIDNFFAENEQLAFCPAVTVPGIHYSDDKLLQTRIFSYADTQRHRLGPNYLMLPVNAPKCAHHNNHHDGLMNFIHRDEEVNYFPSRVDPTRHAEKDPMPPRVLSGCREKCIIDKENNFKQAGERYRSFDPARQDRFLQRWVDALTDARVTHEIQSIWVSYWSQCDASLGQKLASRLKIKPNM

SEQ ID NO: 19898 - protein, 492 aa, Triticum aestivum; identical to SEQ ID NO: 19897

SEQ ID NO: 19899 - protein, 506 aa, Acinetobacter calcoaceticus
MNDDTKKCPFSQLTTDFGAPVVDNQNSMTAGARGPLLAQDLWLNEKLANFVREVIPERRMHAKGSGAFGTFTVTHDITQYTRAKIFSEIGKKTEMFARFTTVAGERGAADAERDIRGFALKFYTEEGNWDMVGNNTPVFFLRDPRKFPDLNKAVKRDPKTNLRSATNNWDFWTLLPEALHQVTIVMSDRGIPASYRHMHGFSSHTYSFINSVNERFWVKFHFRTQQGIKNLTDAEAGELVGHDRESHQRDLFDAIERKDFPKWTLYVQVMPEQDAEKVPYHPFDLTKVWPHGDYPLIEVGEFELNRNPENFFLDVEQSAFAPSNLVPGISASPDRMLQARLFNYADAQRYRLGVNYQQIPVNAARCPVHSNHRDGQGRIDANYGGLPHYEPNSFGQWQEQPQYKEPPLKINGDADFWNYREDDNDYFSQPRALFELMTPEQQQALFDNTERAMGDALDFIKYRHIRNCYACHPAYGEGVAKALGLTVENAQAARETDPARGLPSFI

SEQ ID NO: 19900 - protein, 500 aa, Neisseria gonorrhoeae
MTTSKCPVTHLTMNNGAPVADNQNSLTAGTRGPLLTQDLWLNEKLADFVREVIPERRMHAKGSGAFGTFTVTRDITKYTRAKIFSEVGKKTEMFGRLATVAGERGADAYTRVRGFALKFYTEEGNWDVVGNNTPVFYPDLRKFPDLNKAVKRSAHQYSSATNNWDFWALLPEALHQVTIVMSDRGIPASYRHMHGFGSHTYSLWNEAGERFWVKFHFRSQQGIKNLTNEEAAKIIADDRESHQRDLYEAIERGEFPKWTMYIQVMPEADAAKVPYHPFDLTKVWPKKDYPLIEVAEFELNRNPENFFADVEQSAFAPSNLVPGIGASPDKMLQARLFNYADAQRYRLGVNFRQIPVNRPRCPVHSNQRDGQGRATELRQPAHYEPNSFGQWSQQPDFAEPPLKINGDAAHWDYRQDDDDYFSQPRALFNLMNDAQKQALFDNTAAAMGDAPDFIKYRHIRNCYRCDPAYGEGGSKALGLTVEEPQAARATDPALGQGGLL

SEQ ID NO: 19901 - protein, 265 aa, Digitalis lanata
PTCGVKCLLEEEAIKVGGANHSHATQDLYDSIAAGNYPEWKLFIQTIDPDHEDRFDFDPLDVTKTWPEDILPLQPVGRMVLNKNIDNFFAENEQLAFCPAIVVPGVYYSDDKLLQTRIFSYSDTQRHRLGPNYLQLPANAPKCAHHNNHHEGFMNFMHRDEEVNYFPSRYDPCRHAERFPHPPVALNGKRDRICIEKENNFKQPGEKYRSFPPDRQERFIKRWVDALSDPRLTHEIRSIWVSYWTQADKSLGQKLASRLNIRPTM

SEQ ID NO: 19902 - protein, 730 aa, Aspergillus niger
MRHFWLLPAVAGIAGAQCPYLSGEMSFTQEQDNAGDTIEVTEQPIDNTLYVNDTGSYMTTDFGTPISDQTSLKAGPRGPTLLEDFIFRQKLQRFDHERVPERVVHARGAGAYGTFKSYADWSNVTAADFLSANDKETPMFCRFSTVVGFRGSVDTARDVHGHACRFYTDEGNYDIVGINFAPFFIQDAIQFPDLVHAIKPMPNNEIPQAATAHTSAWDFFSQQSTALHSALWLMSGNGIPRSFRHMNGYGVHSFRFVAANGTSKVVRTPWKSQQGVASLVWDEAQAAAGKNSDYHRQDLYNAMPNGHYPKYELQAQIMDEADMLRFGFDLLDPTKLVPEEVVPYTPLGMMELNANPTNYFAEVEQAGFQPGHVVPGIDFTDDPLLQGRLFSYLDTQLTRHGGPNFEQIPVNRPRKPVHNNNRDGFGQQQIPTNNWAYTPNSMSNGYPMQANQTQGHGFFTAPYRYASGHLVRQTSPTFNDHWSQPAMFWNSLIPAEQQMVVNAIVFENSKVNSPHVRKNVVNQLNMVNNNLAVRVARGLGLDEPSPNPTYYTSNKTSNVGTFGKPLLSIEGLQVGFLASNSHPESIKQGQAMAAQFSAAGVDLNIVTEAYADGVNTTYALSDAIDFDALIIADGVQSLFASPALANQMNSTATSTLYPPARPFQILVDSFRYGKPVAAVGSGSVALKNAGIDSSRSGVYTGSSETTEKIAKEVLEGLYTFRFVDRFALDE

SEQ ID NO: 19903 - protein, 747 aa, Aspergillus oryzae
MANIVAGGLHKVQEAVQGAASKDKKLVDLAPDTHNVQSSKEPLTTDHGVRISDTDHWLKEVNDNHTGPMMLEDQIAREKIHRFDHERIPERVVHARGTAAFGNFKLHESAEDVSYAGILTDTSRNTPVFLRFSTVQGSKGSADTVRDVRGFAVKFYTDEGNWDLVGNNIPVFFIQDAIKFPDFVHAVKPEPHNEVPQAQTAHNNFWDFVYLHPEATHMFMWAMSDRAIPRSYRMMQGFGVNTFSLINKEGKRHFVKFHFIPHLGVHSLVWDEALKLAGQDPDFHRKDLMEAIDNGAYPKWDFAIQVIPEEKQDDFEFDIFDATKIWPEELVPLRVIGELELNRNVDEFFPQTEQVAFCTSHIVPGIDFSDDPLLQGRNFSYFDTQISRLGINWEEIPINRPVCPVLNHNRDGAKRHRIAQGTVTTWSNRSEAGPPAPVEHGGFASYPAKLNGIKKRGLSPKFREHHNQAQLFYNSLSEHEKVHVKKAFGFELDHCDDPIVYERLAGHRLAEIDLTLAQEVAELVGAPIPDKALRPNHGKRSKHLSQTEFPGKQPTIASRRIAIIIGDGYDPVAFNGLKGAITAVGALPFVIGTKRSPIYADGEDKSSSKGVIADHQYDGQRSTMFDATFIPGGPHVESLKANGQIRYWIIETFGHLKALGATGEAAAFIKEALGSALDVKVATSDNPQPVEWYGVVTAGKIHKPESFKEGIQIVKDAKDFISTFFYQISQHRNYKRELDGLASTVAF

SEQ ID NO: 19904 - protein, 725 aa, Aspergillus oryzae
MRALSLASLIGIASAACPYMTGELERRDTGTDDATAATEEFLSQYYMADNDTFLTSDVGGPIEDQNSLQVGDRGPTLLEDFIFRQKIQRFDHERVPERAVHARGVGAHGVFTSYGDYSNITAASFLGAEGKETPVFVRFSTVAGSRGSSDLARDVHGFATRFYTDEGNFDIVGNNIPVFFIQDAILFPDLIHAVKPRGDNEIPQAATAHDSAWDFFSQQPSSLHTLLWAMSGHGIPRSLRHVDGFGIHTFRFVTDNGDSKLVKFHWKSLQGKASMVWEEAQQVSGKNPDFMRQDLFEAIEAGRYPEWELGVQIMDEEDQLKFGFDLFDPTKIVPEEYVPITKLGKMTLNRNPRNYFAETEQVMFQPGHIVRGVDFTEDPLLQGRLFSYLDTQLNRHGGPNFEQLPINQPRVPVHNNNRDGAGQMFIPLNPNAYSPNTLNKGSPKQANQTVGKGFFTAPGRESTGRFTRAVSPSFEDVWSQPRLFYNSLTPAEQQFVVDAIRFENSNVKSSVVRNNVIIQLNRVSNDLARRVARAIGVEEPEADPTYYHNNKTTDVGTFGQKLKKLDGLKVGFLASVETPASIEAASELSKQLSEDGVDVVVVAERLSDGVDQTYSGSDAIQFDAVIVAPGAEGLFSTFSFTAPSNATSSSTLFPAGRPLQIVIDGFRFGKPVGAVGSAATALKNAGIQTSRDGVYVDKSVTSGFVDGIKDGLRTFKFLDRFKLDH

SEQ ID NO: 19905 - protein, 696 aa, Penicillium janthinellum
TASGKLQRKFLDRFAISMGRGVALGKTYGTLGAASRGATLLQDLLFTEIIFAFDRERVPERAVHARGTGAHGTFLSYEDWSNLTAASFLSAEGKFTPEMTRFSTVSGARGSADTARDVHGFATRFYVDEGNFDIVGNNIPVFFIWDVIIEPTLMALHAQKPNPRFHLPRGQQDPNRISDNLTARGDSLAQGSQISSERGSPKAYSNTEPNKHRSFRLVTDNGKQFQCSNHWQPLQGFIDLGVEEAWRFPEEGEGYVAENLFESIELLTVGDEELEIQSMSFNNDLRERFNSSEVTKSSVVRLVPLITQGKLVFNKNIQMLFNEVIGAMFQPGHIVRGVDFTEDPLLQGRLFSYLDTQLNRHGPNIQQLGFNRPPRAPIHNNNRDGAGEMIDLPPFASFVETQEWGAKDIKQTAVGQNKFDQEHRFSHWKFGVNGFVHTRNDDNVTHARGFFTAPERGQQKKRVAAFDRMFTVVGLSVDGQQANSDQYADFDAAAGKKVAKAIGVEAPKPNSNYFHPTDVFGEHIAASGTKYGVPEGNTKGVLLASVNKPASIAQGAKLQVVASSGDFAEFFISAKQLNMREVTQGIIPLVPVLKLAKLDLGKTFRFQLMQVGNIEELERFGFDLPDLTDKQVDLSAMGMFETTFRPTSRAAQFEQGKTKLVKGLQGKNAFMDRALKQPSNNREKIQRFADRFAVQD

SEQ ID NO: 19906 - protein, 670 aa, Penicillium janthinellum
AAAQRRQNDSSVFLAIMVAAAVESESSLTDGDAGALLLQDISEWDEVFRFDRLEAVERAAHAAAAAAFGAFVARGDWTASAAAAFQAAGKQIAFMAAFSTVAGAKGSATVRDADAFAAKFASAAALQELVGNNSPISFFIFDLLFAAILFASKAKAANQAAFAAAAELAAESLFVRLPSLHQVSFFALAGFAAVAAHRHMNGYGSHTFKLVAKDGSVYCSKFWYKADQGQAAEVWKDAEEVAAEDVDYFRDLNFQAEAAGRYPLWELASQVMTFSDFEIDPFNENIPTKVVPRESVPLIVDAELLLNRNPLNMFAEVEQVFMDVAAASKGADEVEDPLIQRQFAYIDTHLSELTASYGIPVCRPYATVLNDQEDGARYDDVQDVLVIAPNAFSASAVEVQIPAAAAFNLAAARVAAAGDVRVNAVVEADQRKQSRQFWASDVNAQKKRLVDAFRMEVASAVSASIQVDVTVEFSFVAAAAAARIAAAVGSAAAGALANRRQIKVIASLAVLAKADAKVRQKNALESSSQAVAVDAKAAAQDIVDSSDAANVVTVAREFAVLPQTAAADAAEFVAAASAKAFSSFPAMEVISVAAAAGAVAEPARASLDLNMAMFFSRIVASRGAAANAIAALVKASRDGVFVAAVLAKAAANNRAAEAIFKFEVRQAVDA

SEQ ID NO: 19907 - protein, 716 aa, Claviceps purpurea
MVRTSLAAFSLAVAGLASAQCPFADPGRLAARAQGLDESSRGHLAGFEVDDSEGYLTSDVGGPIEDQNSLKAGDRGPTLLEDFIFRQKITHFDHERVPERAVHARGTGAHGTFTSYGDYSNITAASFLGQKDKKTPVFVRFSTVAGSRGSADTARDVHGFAVRLYTDEGNFDIVGNNVPVFFIQDAIQFPDLIHSVKPRQDNEIPQAATAHDSAWDFFSQQTSTLHTLFWAMAGYGIPRSLRHMDGFGVHTYRLVTDDGTSKLVKWHWKSKQGKASLVWDEAQRAAGKNADYHRQDLFDAIQSGNYPEWELNLQIINEDQALAFGFDVLDPTKIIPEEYAPLMPVGVMRLDANPSNYFAETEQVMFQPGHIVRGVDFTEDPLLQGRIFSYLDTQINRHGGPNFEQLPINRPVVPIHNNNRDGAGQNFIHKNNAPYTPNTLNKGFPKQANQKEGKGFFTAPGRKVSGSLQRRLSNTFLDHWTQPRLFFNSITPIEQQFLINAIRFETSHLSQVVQKNVLAQLNKISHDVAVRVGKALGLDAPPADDKYYHNNQTKGLSIFGEELPTIATLIVGVLASTASKNSLAQAQALKDAFKTREVNVIVVAESLATGVDQTYDAADAVSFDGIVVADGVEALFDNTKKSSLFQPGRPSQIVNDGYNWGKPMGFLGSAKRAVKATSVVEGAGVYMRNSTATLVGDFQKGLAKFKFTDRFPMDTK

SEQ ID NO: 19908 - protein, 736 aa, Podospora anserina
MASYLPSMEKVQHAVLGPRGGDKVADLQKETKEMSDKARLTTDYGVKQTSADDWLKIVNNDKTGPMLLEDPFARERIHRFDHERIPERVVHARGSGAFGKFKLFESAEDVTFAPILTDTSRETPIFIRFSTVLGSRGSADTVRDVRGFAIKFYTQEGNWDIVANNIPVFFIQDAIKFPDVIHAGKPEPHNEVPQAQTAHNNFWDFQYNHTEATHMFMWAMSDRGIPRSYRMMQGFGVNTFTLINAKGERHFVKFIFTPELGVHSLIWDEALKLAGQDPDFHRKDLWEAIENGVFPKWKFGIQVIPEADEHKFDFDILDATKIWPEDLVPVRYIGEFELNRNPDEFFPQTEQVAFCTSHIVPGIGFSDDPLLQGRNFSYFDTQLSRLGINWQELPINRPVCPVMNFNRDGAMRHTITKGTVNYWPNRFEKVKPATHEEGGYVEYAEKVAGIKARARSAKFKEHFAQAQLFWNSMSAVEKNHIINALGFELDHCEDPVVYERMVTRLADIDLGLAQTVAEMVGGEPPKEASRPNHGRKAPGLSQTEFPGSKPTIASRRIAILVADGYDQVAYSAAYAAISAGLAIPLVIGTKRSKIVAAGGAGSTTPHHHLEGFRSTMVDAIFIPGGVDSIRALSKNGRALHWIREAFGHLKAIGATGEAVDLVNKAIGLPAVSVSESAEVQDSYGVVTMRETKPGSLSEAVDIVKAGAGFMEKFFHNIAQHRCWARELDGLHSQVAY

SEQ ID NO: 19909 - protein, 726 aa, Podospora anserina
MKRLLTWATLVGSMSAVTKAACPFADPNYHLAKRDEGASQQTENILEEYEVDDSNAYMSSDVGGPMEDQNSLKAGYRGSTLMEDWIFRQKIQHFDHERIPERAVHARGAGAHGTFTSYADWSNITAASFLGGAGKKTPVFVRFSTVAGSRGSADTARDVHGFATRFYTDEGNFDIVGNNIPVFFIQDAIRFPDLIHSVKPSPDNEVPQAATAHDSAWDFFSQQPSTMHTLFWAMSGNGIPRSYRHMDGFGVHTFRFVTDDGNSKLIKWHFKTKQGKASLVWEEAQVLAGKNADFHRQDLWDAIESGNGPEWELSVQIVDEEKALAFGFDLLDPTKIIPEELAPLVPLGIMKLDRNPTNYFAETEQVMYQPGHIVRGVDFTEDPLLQGRLFSYLDTQLNRNQGGPNFEQIPINRPVSPVHNNNRDGAGQMLIHKNVYPYTPNTLNGGYPLQANQTHGKGFFTAPNRIVDGKLVRALSPTFDDHWSQPRLFYNSLTRVEQQFLINAIRFEASHLKNEQVKKNVLEQINRVSNDVAKRVAVALGLEAPAPDPAFYHNNVTAGLSIFNGTLPTIATLRVGVLASSFNDGSLAQARELKEQLSKEGVVVTVVGEVLKEGVDQTYSAADATGYDAVVVTDGAEGLLTGGKNSPLFPAGRPGQILVDSYRWGKPVAAVGENSGQALEQTVGVSRGQDEGVVVGEGVEQVVKGVEEGLRVFRYLGRFPVDEGAE

SEQ ID NO: 19910 - protein, 482 aa, Bordetella pertussis
MNAMTNKTLTTAAGAPVADNNNTMTAGPRGPALLQDVWFLEKLAHFDRERIPERVVHAKGSGAYGTFTVTHDISRYTRARIFAEVGKQTPLFLRFSTVAGERGAADAERDVRGFAIKFYTDEGNWDLVGNNTPVFFIRDPLKFPDFIHTQKRDPKTNLRNATAAWDFWSLNPESLHQVTILMSDRGLPQNYRQQHGFGSHTYSFVNDAGERFYVKFHFKSQQGIACYTDGEAAELVGRDRESAQRDLFQNIEQGQFPRWTLKVQVMPEAEAATYHINPFDLTKVWPHADYPLIEVGVLELNKNPENYFAEVEQAAFTPANVVPGIGFSPDKMLQGRLFSYGDTHRYRLGINHHQIPVNAPRCPFHSFHRDGMGRVDGNGGATLNYEPNSFGEWREAKHAAEPPLALDGQAADRWNHRVDEDYYSQPGALFRLMNDDQKQQLFGNIGRHMAGVPEEIQRRQLEHFRRADPAYAAGVAKALGLK

SEQ ID NO: 19911 - protein, 745 aa, Cladosporium fulvum
MATEKISSGLGKLQDQLNGAAEGQKVAHVKNDPLYKDYHEPSNRITTDYGVKQHNTDDWLKIASEDKTGPMLLEDHAAREKINRFDHERIPERVVHARGSAAFGTFKLHKSLEQYTTAGVLTDTSRTTPTFLRFSTVLGSRGSADTVRDVRGFAIKHYTPEGNWDVVGNNIPVFFIQDAIKFPDVIHAGKPEPDNEVPQAQTAHNNFWDFQFMHTEATHMFMWTQSDRAIPRSYRMMQGFGVNTFTLTNAKGERFFVKFHWTPHLGVHSFVWDEALKLAGQDPDFHRKDLWEAIEAKAYPKWDFGVQVISEGEEDNFEFDILDATKVWPEELVPIQYVGELELNRNPDEFFPQTEQVAFCTGHVVPGIGFSDDPLLQGRNFSYQDTQISRLGVNFQELPINRPVCPVMNNNRDGALRHTVTKGKVNYWPNRFEATPPAAAEEKPYLDYPQKVAGMKTRLRSKKFSEHFNQAQLFYNSMSEPEKEHIKFALAFELDHCEDPVVYDRVSQRLADIDLSLAQSVADLVGGQIPQQQGRPNHGKKSKGLSQTEFPGKTPTIETRRIAIIIADGYDLVAYNGIVAAAKACQALPFTIAPRRSPIYAAGESKENSKGVKPDHHLEGMRSTMFDSVFVPGGADSVATLRKNGRALHWVREAFAHLKAIGAVGEAVDFVRNACQLPGMTFSASEEVTDSYGVVTAAKVKPESLSEAVKIGKDAADFVSKYFYEISQHKNFERELKGFPLMVAY

SEQ ID NO: 19912 - protein, 223 aa, Malassezia furfur
RFSTVGGGAGSVDTPRDVRGFSVKFYTGEGNWDLVGNDIPVFFIQDAIKFPDLIHSVKMEADRGYPQAASAHDTFWDWVTLMPEATHVLMWAMSDRGIPRSLRMMEGFGIHTFQLVNENGDAHFVKFHWKPKLGVQSTIWDETTKLQGADNDYHRKDLFEAIENGMFPEWELGIQVFDKKFAEKQPYDVLDSTKLIPEEDIPVQVIGRMVLNRNPDNCFAEIE

SEQ ID NO: 19913 - protein, 502 aa, Toxoplasma gondii
MTQVPPVTFQQYGPVITTSAGNPVDDNQNSVTAGPYGPAILSNFHLIDKLAHFDRERIPERVVHAKGGGAFGYFEVTHDITRFCKAKLFEKIGKRTPVFARFSTVAGESGSADTRRDPRGFALKFYTEEGNWDMVGNNTPIFFVRDAIKFPDFIHTQKRHPQTHLHDPNMVWDFFSLVPESVHQVTFLYTDRGTPDGFRHMNGYGSHTFKFINKDNEAFYVKWHFKTNQGIKNLNRQRAKELESEDPDYAVRDLFNAIAKREFPSWTFCIQVMPLKDAETYKWNVFDVTKVWPHGDYPLIPVGKLVLDRNPENYFQDVEQAAFAPAHMVPGIEPSEDRMLQGRMFSYIDTHRHRLGANYHQIPVNRPWNARGGDYSVRDGPMCVDGNKGSQLNYEPNSVDGFPKEDRNAAVSGTTTVSGTVACHPQEHPNSDFEQPGNFYRTVLSEPEREALIGNIAEHLRQARRDIQERQVKIFYKCDPEYGERVARAIGLPTAACYPAKM

SEQ ID NO: 19914 - protein, 484 aa, Proteus mirabilis
MEKKKLTTAAGAPVVDNNNVITAGPRGPMLLQDVWFLEKLAHFDREVIPERRMHAKGSGAFGTFTVTHDITKYTRAKIFSEVGKKTEMFARFSTVAGERGAADAERDIRGFALKFYTEEGNWDMVGNNTPVFYLRDPLKFPDLNHIVKRDPRTNMRNMAYKWDFFSHLPESLHQLTIDMSDRGLPLSYRFVHGFGSHTYSFINKDNERFWVKFHFRCQQGIKNLMDDEAEALVGKDRESSQRDLFEAIERGDYPRWKLQIQIMPEKEASTVPYNPFDLTKVWPHADYPLMDVGYFELNRNPDNYFSDVEQAAFSPANIVPGISFSPDKMLQGRLFSYGDAHRYRLGVNHHQIPVNAPKCPFHNYHRDGAMRVDGNSGNGITYEPNSGGVFQEQPDFKEPPLSIEGAADHWNHREDEDYFSQPRALYELLSDDEHQRMFARIAGELSQASKETQQRQIDLFTKVHPEYGAGVEKAIKVLEGKDAK

SEQ ID NO: 19915 - protein, 484 aa, Proteus mirabilis
  unsure (1)..(484): unsure at all Xaa locations
MEKKKLTTAAGAPVVDNNNVITAGPRGPMLLQDVWFLEKLAHFDREVIPERRXHAKGSGAFGTFTVTHDITKYTRAKIFSEVGKKTEMFARFSTVAGERGAADAERDIRGFALKFYTEEGNWDMVGNNTPVFYLRDPLKFPDLNHIVKRDPRTNMRNMAYKWDFFSHLPESLHQLTIDMSDRGLPLSYRFVHGFGSHTYSFINKDNERFWVKFHFRCQQGIKNLMDDEAEALVGKDRESSQRDLFEAIERGDYPRWKLQIQIMPEKEASTVPYNPFDLTKVWPHADYPLMDVGYFELNRNPDNYFSDVEQAAFSPANIVPGISFSPDKMLQGRLFSYGDAHRYRLGVNHHQIPVNAPKCPFHNYHRDGAMRVDGNSGNGITYEPNSGGVFQEQPDFKEPPLSIEGAADHWNHREDEDYFSQPRALYELLSDDEHQRMFARIAGELSQASKETQQRQIDLFTKVHPEYGAGVEKAIKVLEGKDAK

SEQ ID NO: 19916 - protein, 484 aa, Proteus mirabilis
  unsure (1)..(484): unsure at all Xaa locations
MEKKKLTTAAGAPVVDNNNVITAGPRGPMLLQDVWFLEKLAHFDREVIPERRXHAKGSGAFGTFTVTHDITKYTRAKIFSEVGKKTEMFARFSTVAGERGAADAERDIRGFALKFYTEEGNWDMVGNNTPVFYLRDPLKFPDLNHIVKRDPRTNMRNMAYKWDFFSHLPESLHQLTIDMSDRGLPLSYRFVHGFGSHTYSFINKDNERFWVKFHFRCQQGIKNLMDDEAEALVGKDRESSQRDLFEAIKRGDYPRWKLQIQIMPEKEASTVPYNPFDLTKVWPHADYPLMDVGYFELNRNPDNYFSDVEQAAFSPANIVPGISFSPDKMLQGRLFSYGDAHRYRLGVNHHQIPVNAPKCPFHNYHRDGAMRVDGNSGNGITYEPNSGGVFQEQPDFKEPPLSIEGAADHWNHREDEDYFSQPRALYELLSDDEHQRMFARIAGELSQASKETQQRQIDLFTKVHPEYGAGVEKAIKVLEGKDAK

SEQ ID NO: 19917 - protein, 484 aa, Proteus mirabilis
MEKKKLTTAAGAPVVDNNNVITAGPRGPMLLQDVWFLEKLAHFDREVIPERRZHAKGSGAFGTFTVTHDITKYTRAKIFSEVGKKTEMFARFSTVAGERGAADAERDIRGFALKFYTEEGNWDMVGNNTPVFYLRDPLKFPDLNHIVKRDPRTNMRNMAYKWDFFSHLPESLHQLTIDMSDRGLPLSYRFVHGFGSHTYSFINKDNERFWVKFHFRCQQGIKNLMDDEAEALVGKDRESSQRDLFEAIERGDYPRWKLQIQIMPEKEASTVPYNPFDLTKVWPHADYPLMDVGYFELNRNPDNYFSDVEQAAFSPANIVPGISFSPDKMLQGRLFSYGDAHRYRLGVNHHQIPVNAPKCPFHNYHRDGAMRVDGNSGNGITYEPNSGGVFQEQPDFKEPPLSIEGAADHWNHREDEDYFSQPRALYELLSDDEHQRMFARIAGELSQASKETQQRQIDLFTKVHPEYGAGVEKAIKVLEGKDAK

SEQ ID NO: 19918 - protein, 524 aa, Caenorhabditis elegans
MPNDPSDNQLKTYKETYPVSLEFKGTDAFSTTTTTIYSNLFQKPQVITTSNGAPIYSKTAVLTAGRRGPMLMQDVVYMDEMAHFDRERIPERVVHAKGAGAHGYFEVTHDISKYCKADIFNKVGKQTPLLIRFSTVGGESGSADTARDPRGFAIKFYTEEGNWDLVGNNTPIFFIRDPIHFPNFIHTQKRNPQTHLKDPNMIFDFWLHRPEALHQVMFLFSDRGLPDGYRHMNGYGSHTFKMVNKDGKAIYVKFHFKPTQGVKNLTVEKAGQLASSDPDYSIRDLFNAIEKGDFPVWKMFIQVMTFEQAEKWEFNPFDVTKVWPHGDYPLIEVGKMVLNRNPRNYFAEVEQSAFCPAHIVPGIEFSPDKMLQGRIFSYTDTHFHRLGPNYIQLPVNCPYRSRAHNTQRDGAMAYDNQQHAPNFFPNSFNYGKTRPDVKDTTFPATGDVDRYESGDDNNYDQPRQFWEKVLDTGARERMCQNFAGPLGECHDFIIKGMIDHFSKVHPDFGARVKALIQKQARSHI

SEQ ID NO: 19919 - protein, 500 aa, Caenorhabditis elegans [sequence omitted]

SEQ ID NO: 19920 - protein, 497 aa, Caenorhabditis elegans
MPNDPSDNQLKTYKETYPKPQVITTSNGAPIYSKTAVLTAGRRGPMLMQDVVYMDEMAHFDRERIPERVVHAKGAGAHGYFEVTHDISKYCKADIFNKVGKQTPLLIRFSTVGGESGSADTARDPRGFAIKFYTEEGNWDLVGNNTPIFFIRDPIHFPNFIHTQKRNPQTHLKDPNMIFDFWLHRPEALHQVMFLFSDRGLPDGYRHMNGYGSHTFKMVNKDGKAIYVKFHFKPTQGVKNLTVEKAGQLASSDPDYSIRDLFNAIEKGDFPVWKMFIQVMTFEQAEKWEFNPFDVTKVWPHGDYPLIEVGKMVLNRNPRNYFAESAFCPAHIVPGIEFSPDKMLQGRIFSYTDTHFHRLGPNYIQLPVNCPYRSRAHNTQRDGAMAYDNQQHAPNFFPNSFNYGKTRPDVKDTTFPATGDVDRYESGDDNNYDQPRQFWEKVLDTGARERMCQNFAGPLGECHDFIIKGMIDHFSKVHPDFGARVKALIQKQARSHI

SEQ ID NO: 19921 - protein, 497 aa, Caenorhabditis elegans
MPNDPSDNQLKTYKETYPKPQVITTSNGAPIYSKTAVLTAGRRGPMLMQDVVYMDEMAHFDRERIPERVVHAKGAGAHGYFEVTHDITKYCKADMFNKVGKQTPLLVRFSTVAGESGSADTVRDPRGFSLKFYTEEGNWDLVGNNTPIFFIRDAIHFPNFIHALKRNPQTHMRDPNALFDFWMNRPESIHQVMFLYSDRGIPDGFRFMNGYGAHTFKMVNKEGNPIYCKFHFKPAQGSKNLDPTDAGKLASSDPDYAIRDLFNAIESRNFPEWKMFIQVMTFEQAEKWEFNPFDVTKVWPHGDYPLIEVGKMVLNRNVKNYFAEVEQAAFCPAHIVPGIEFSPDKMLQGRIFSYTDTHYHRLGPNYIQLPVNCPYRSRAHTTQRDGAMAYESQGDAPNYFPNSFRGYRTRDDVKESTFQTTGDVDRYETGDDHNYEQPRQFWEKVLKEEERDRLVGNLASDLGGCLEEIQNGMVKEFTKVHPDFGNALRHQLCQKKH

SEQ ID NO: 19922 - protein, 512 aa, Caenorhabditis elegans
MPMLPHMVNLTVNDTKPGPMAEDQLKAYRDRNQEPHLLTTSNGAPIYSKTAVLTAGRRGPMLMQDIVYMDEMAHFDRERIPERVVHAKGGGAHGYFEVTHDITKYCKADMFNKVGKQTPLLVRFSTVAGESGSADTVRDPRGFSLKFYTEEGNWDLVGNNTPIFFIRDAIHFPNFIHALKRNPQTHMRDPNALFDFWMNRPESIHQVMFLYSDRGIPDGFRFMNGYGAHTFKMVNKEGNPIYCKFHFKPAQGSKNLDPTDAGKLASSDPDYAIRDLFNAIESRNFPEWKMFIQVMTFEQAEKWEFNPFDVTKVWPHGDYPLIEVGKMVLNRNVKNYFAEVEQAAFCPAHIVPGIEFSPDKMLQGRIFSYTDTHYHRLGPNYIQLPVNCPYRSRAHTTQRDGAMAYESQGDAPNYFPNSFRGYRTRDDVKESTFQTTGDVDRYETGDDHNYEQPRQFWEKVLKEEERDRLVGNLASDLGGCLEEIQNGMVKEFTKVHPDFGNALRHQLCQKKH

SEQ ID NO: 19923 - protein, 497 aa, Caenorhabditis elegans
MPNDPSDNQLKTYKETYPKPQVITTSNGAPIYSKTAVLTAGRRGPMLMQDVVYMDEMAHFDRERIPERVVHAKGAGAHGYFEVTHDITKYCKADMFNKVGKQTPLLVRFSTVAGESGSADTVRDPRGFSLKFYTEEGNWDLVGNNTPIFFIRDAIHFPNFIHALKRNPQTHMRDPNALFDFWMNRPESIHQVMFLYSDRGIPDGFRFMNGYGAHTFKMVNKEGNPIYCKFHFKPAQGSKNLDPTDAGKLASSDPDYAIRDLFNAIESRNFPEWKMFIQVMTFEQAEKWEFNPFDVTKVWPHGDYPLIEVGKMVLNRNVKNYFAEVEQAAFCPAHIVPGIEFSPDKMLQGRIFSYTDTHYHRLGPNYIQLPVNCPYRSRAHTTQREVAMAYESQENAPNSFPNSFRGYRTRDDVKESTFQTTGDVDRYETGDDHNYEQPRQFWEKVLKEEERDRLVGNLASDLGGCLEEIQNGMVKEFTKVHPDFGNALRHQLCQKKH

SEQ ID NO: 19924 - protein, 496 aa, Caenorhabditis elegans
MPNDPSDNQLKTYKETYPKPQVITTSNGAPIYSKTAVLTAGRRGPMLMQDVVYMDEMAHFDRERIPERVVHAKGAGAHGYFEVTHDITKYGKADMFHKVGKQTPLLVRFSTVAGESGSADTVRDPRGFSLKFYTEEGNWDLVGNNTPIFFIRDAIHFPNFIHALKRNPQTHMRDPNALFDFWMNRPESIQVMFLYSDRGIPDGFRFMNGYGAHTFKMVNKEGNPIYCKFHFKPAQPSKNLDPTDAGKLASSDPDYAIRDLFNAIESRNLPEWKMFIQVMTIEQAEKWEFNPFDVTKVWPHGDYPLIEVAKMLLNRNVKNYFAEVEQAAFCPAHIVPGIEFSPDKMLQGRIFSYTDTHYHRLGPNYIQLPVNCPYRSRAHTTQRDGAMAYESQGDAPNYFPNSFRGYRTRDDVKESTFQTTGDVGSLWTGDDHNYEQPRQFWEKVLKEEERDRLVGNLASDLGGCLEEIQNGMVKEFTKVHPDFGNALRHQLCQKKH

SEQ ID NO: 19925 - protein, 541 aa, Ascaris suum
MPQTKGKPHEEQLEQYKNSQTKPFVLTTSNGAPIFNKKASLTVGPRGPLLLQDVVFLDEMAHFDRERIPERVVHAKGGGAHGFFEVTDDITKYCKADVFSTIGKRTPIFIRFSTVGGELGSADTQRDPRGFAIKFYTEEGNWDLVGNNTPIFFIRDPIFFPNFIHTQKRNPVTHLKDPNMMWDFFSLRPETTHQVMILFGDRGIPDGFRHMDGFGSHTFKLVNKDGNAVYCKFHIKTAQGIRNLPPDVAIKLAGEDPDYSIRDLYDSIENGNYPVWRLMIQVMTFEEAANYRFNPFDITKVWSHKEFPLILVGKIVLNKNPTNYFAEVEQIAFAPSHVVPGIEFSPDKMLQGRLFAYPDTQFHRLGPNYVQLPINCPYRSRAHNTQRDGCFALDYNQGGMPTYHPNSFNGAIERTDVKESAWSVSGDVDRFNGDDEDNFSQPRDLWLKVMDETERARLVDNIADSLKYCKAFIQERAINNFTQVHQDFGNALRNALQKANEAMQKKREEEAEFNAKESVMMPCAIDDRMKNISNLAKYCKY

SEQ ID NO: 19926 - protein, 552 aa, Edwardsiella tarda
MAGMVIYPIVNIDFLQFLEKTQLNKPSQHATTTEESAMNIVNGINGLIAKKNVLFFLTSLAISPSVLADTLTRDNGAPVGDNQNSQTAGPNGPVMLQDVQLLQKLQRFDRERVPERVVHARGTGAHGVFTPTADISDLTVAKVFTPGSTTPVFVRFSSVVHGTHSPETLRDPRGFATKFYTAEGNWDLVGNNFPTFFIRDAIKFPDMVHAFKPDPRTNLDNDARRFDFFSHLPESTRTLTLLYSNEGTPLSYRNMDGNSVHAYKLINDKGESPLCEVHWKTRQGIKNLDPQQVEQIQGKDYSHMTQDLVTAINRGDYPKWDLYIQVLRPADLKNFDFDPLDATKAWPDVPERKIGEMVLNKNPDNVFQETEQVAMAPSNLIPGIEPSEDKLLQGRLFAYADTQFYRIGANGLSLPINKPHSVVNNGNQDGQLNSGHTLDKGVNYQPSRIYPREELVSSRYSQTPLSGTTQQSKIQREQNFKQAGELYRSYSKKEQNDLINSLGTSLASADTVSKNIMLSYFYKADKDYGTRLTSVANGDLPTVKNLADKLQD

SEQ ID NO: 19927 - protein, 131 aa, Edwardsiella tarda
VTAINRGDYPKWDLYIQVLKPADLKNFDFDPLDATKVWPDVPERKIGEMVLNKNPDNVFQETEQVAMAPSNLIPGIEPSEDKLLQGRLFAYADTQFYRIGANGLSLPINKPHSVVNNGNQDGQLNSGHTLD

SEQ ID NO: 19928 - protein, 497 aa, Nostoc punctiforme
MTEPQNLTTADGIPVSDNQNSLTAGARGPVLIQDFHLIEKLAHFNRERIPERVVHAKGAAAHGTLTITNDITRYSKAKLFSEIGKKTELILRFSTVGGEKGSADAERDPRGFSLKFYTEEGNWDLVGNNTPIFFIRDPLKFPDFIHTQKRNPQTNCKDQNAKWDFWSLSPESLHQVTILFSDRGIPKTHRHMDGFGSHTFSLINAEGDRVWCKFHFKTLQGHQTLTEEESAKIKGEDPDHATHDLFEAIAKKDYPKWRMCIQVMTEEQAEKHPDNPFDLTKVWKQGEYPLIEVGILELNRNPENYFAEVEQAAFSPSAVVPGVSFSPDKMLQARIFSYPDAQRYRLGGNYQQLPVNQPKCPVMHYQRDGFMASGNNGGSVPNYEPNSAEGTPKENPAYAEPPSHLGDVTVDRYSHREGNDDYTQAGNLYRLLTPEQQERLAKNIVGSLSQAREDIQMRQLCHFFRADVSYGRRVAEGLGIAIDPSMFSHDAQPVGNW

SEQ ID NO: 19929 - protein, 85 aa, Oryza barthii
KARYVKFHWKPTCGVSCLMDDEATIVGGKNHSHATQDLYDSIAAGNFPEWKLFVQVIDPEEEERFDFDPLDDTKTWPEDEVPLRP

SEQ ID NO: 19930 - protein, 492 aa, Hypericum perforatum
MDPYKYRPSSAFNSPFWTTNSGAPVYSNDHSLTVGSRGPILLEDYHLVEKLANFDRERIPERVVHARGASAKGFFEVTHDISHLSCADFLRAPGVQTPVIVRFSTVIHERGSPETLRDPRGFAVKFYTREGNFDLVGNNFPVFFIRDGMKFPDMVHALKPNPKSHIQEDWRILDFFSHHPESLHMFSFLFDDIGIPQDYRHMEGSGVNTYTLVNKAGKVHYVKFHWKPTCGVKSLLEDEAIKVGGSNHSHATKDLYDSIAAGNYPEWKLFIQTIDPDHEDRFDFDPLDVTKTWPEDILPLQPVGRLVLNKNIDNFFAENEQLAFCPAIVVPGIYYSDDKLLQTRIFSYSDTQRHRLGPNYLQLPVNAPKSAHHNNHHEGFMNFMHRDEEVNYFPSRYDPVRHAEKYPIPPVVLNGRREKCMIAKENNFKQPGERYRSFSPDRQERFLNRWISSLSDPRVTHEIRAIWVTYWYQADKSLGQKLASRLNVRPNM

SEQ ID NO: 19931 - protein, 492 aa, Soldanella alpina
MDPYKYRSSSAFNTPFWTTNSGAPVWNNNSSLTVGTRGPILLEDYHLVEKLANFDRERIPERVVHARGASAKGFFEVTHDISHLTCADFLRAPGVQTPVIVRFSTVIHERGSPETLRDPRGFAVKFYTREGNFDLVGNNFPVFFVRDGMKFPDMVHALKPNPKSHIQENWRILDFFSHHPESLHMFTFLFDDLGVPQDYRHMEGSGVNTYTLINKAGKAQYVKFHWKPTCGVKCLLEDEAIKVGGANHSHATKDLYDSISAGNYPEWKLFIQIIEPDHEDKFDFDPLDVTKTWPEDIIPLMPVGRLVLNKNIDNFFAENEQLAFCPALIVPGVYYSDDKLLQTRIFSYADTQRHRLGPNYLQLPPNAPKCAHHNNHHEGLMNFMHRDEEVNYFPSRFDPVRHAERHPIPPPVLTGKRDRCMIEKENNFKQPGERYRTFAPDRQERFVCRWVDALSDPRVTHEIRSIWISYWTQADKSLGQKLASRLNVRPTM

SEQ ID NO: 19932 - protein, 567 aa, Vibrio cholerae
  unsure (1)..(567): unsure at all Xaa locations
MISKNMRSHLKLSFKSIFSIKFIVISHLVKRVIYPYILAGQKRAFDFFILRNVGQNGRSHWRATMHMSKSFLIISMGFVAVSVQAQTLTRDNGAPVGDNQNSITAGEHGSVLLQDVHLIQKLQRFARERIPERVVHARGTGAHGEFVASGDFSDLTLSAPFTSKGKITPVFVRFSTVIHSKGSPETLRDPRGFATKFYTEQGNWDLVGNNLPVFFIRDSIKFPDMVHSLKPSPVTNLQDPNRFFDFFSHEPGSTHMLTWVYTNLGTPASYRTMDGFGVHAYKWINQKGDVNYVKFHWKSLQGIESLRPDEVVKVQGQDFNHLTNDLYTQINAGNHPKWDLYVQVLTPEQLSKLDYNGLDATKVWLDVPEKKVGTMTLNKVPDNFFLETEQSAFAPSNLIPGIEPSEDRLLQGRLFAYADTQLYRLGANLFQLPINRPLVEVNSHNQEGASNSAQTASDINYQPSRKLELKEDPQFKAVQTQLVGSVQQKAISNPRNFYQAGVLYRSLNEQDKQDLITNLXGXLNKVTDKEIKATMVSHFYRADKDYGTRLARATNTDLKQVAKLAAM

SEQ ID NO: 19933 - protein, 567 aa, Vibrio cholerae
  unsure (1)..(567): unsure at all Xaa locations
MISKNMRSHLKLSFKSIFSIKFIVISHLVKRVIYPYILAGQKRAFDFFILRNVGQNGRSHWRATMHMSKSFLIISMGFVAVSVQAQTLTRDNGAPVGDNQNSITAGEHGSVLLQDVHLIQKLQRFARERIPERVVHARGTGAHGEFVASGDFSDLTLSAPFTSKGKITPVFVRFSTVIHSKGSPETLRDPRGFATKFYTEQGNWDLVGNNLPVFFIRDSIKFPDMVHSLKPSPVTNLQDPNRFFDFFSHEPGSTHMLTWVYTNLGTPASYRTMDGFGVHAYKWINQKGDVNYVKFHWKSLQGIESLRPDEVVKVQGQDFNHLTNDLYTQINAGNHPKWDLYVQVLTPEQLSKLDYNGLDATKVWLDVPEKKVGTMTLNKVPDNFFLETEQSAFAPSNLIPGIEPSEDRLLQGRLFAYADTQLYRLGANLFQLPINRPLVEVNSHNQEGASNSAQTASDINYQPSRKLELKEDPQFKAVQTQLVGSVQQKAISNPRNFYQAGVLYRSLNEQDKQDLITNLXGBLNKVTDKEIKATMVSHFYRADKDYGTRLARATNTDLKQVAKLAAM

SEQ ID NO: 19934 - protein, 482 aa, Vibrio fischeri
MSKKLTTAAGCPVAHNQNVQTAGKRGPQLLQDVWFLEKLAHFDREVIPERRMHAKGSGAYGTFTVTHDITKYTKAKLFSEIGKQTELFARFTTVAGERGAADAERDIRGFALKFYTEEGNWDLVGNNTPVFFLRDPLKFPDLNHAVKRDPRTNMRSAKNNWDFWTSLPEALHQVTIVMSDRGIPATYRHMHGFGSHTFSFINSDNERFWVKFHFKSQQGIKNLSDAEAAQVIGQDRESHQRDLLESIDNQDFPKWTLKVQIMPEADAATVPYNPFDLTKVWPHKDYPLIEVGEFELNRNPQNFFAEVEQSAFNPANVVPGISFSPDKMLQGRLFAYGDAQRYRLGVNHQHIPVNAPRCPVHSYHRDGAMRVDGNFGSTLGYEPNNEGQWAEQPDFAEPALNLDGAAAHWDHREDEDYFSQPGDLFRLMTAEQQAILFDNTARNLNGVPKEIQLRHLRHCYKADPAYGEGIGKLLDIDVSEFN

SEQ ID NO: 19935 - protein, 492 aa, Zantedeschia aethiopica
MDPYRQRPSSAFNSPFWTTNSGAPVWNNNNSLTVGARGPILLEDYHLLEKLAQFDRERIPERVVHARGASAKGFFEVTHDVSHLTCADFLRAPGVQTPVIVRFSTVIHERGSPETLRDPRGFAVKFYTREGNFDLVGNNFPVFFIRDGIKFPDMVHALKPNPKTHIQENWRILDFFSHHPESLHMFTFLFDDIGIPTDYRHMDGSGVHTYTLVSKEGKAHYVKFHWKPTCGVKSLLDDEAVVVGGANHSHATKDLTDAIAAGNYPEWKLYIQIMDPDHEDRFDFDPLDVTKTWPEDILPLQPVGRMVLNKNIDNFFAENEQLAFCPAIIVPGIYYSDDKLLQTRIFSYADTQRHRLGPNYLMLPANAPKCAHHNNHHEGFMNFMHRDEEVNYFPSRYDPVRHAEQFPIPPRILNGGREKCCIQKENNFKQPGEKYRSWAPDRQERFIKRWIDALSDPRVTHEIRTIWITYWSQCDKFLGQKLASRLNIKPTL

SEQ ID NO: 19936 - protein, 484 aa, Actinobacillus actinomycetemcomitans
MSAKCPFDHNSATLTTAAGAPVVDNDNTMSAGPRGPLLLQDVWYQEKLAHFARERIPERVVHAKGSAAFGTFTVTHDITQYTKAALFSEVGKQTEVLLRFSTVAGERGAADAERDVRGFSLKFYTEQGNWDLVGNNTPVFFIRDPLKFPDFIHTQKRNPQTNLRDATAAWDFWSRHPESMHQIMILFSDRGIPASLRNMNGYGSHTYSFINADNERFWVKFHFKTQQGHKFLTNAEAAKVVGEDRESSQRDLYDAIANGNFPRWNVRIQIMPEADAEKHNYSFDLTKVWPHKDYPLIDVGVLELNRNPQNYFAEVEQAAFAPNNNVPGIGFSPDRMLQGRLFSYQDAQRYRLGVNHHQIPVNAPKCPYHTTHRDGAMRVDHNGGTHPNYAPNRFDTYVPTHDQGPSLQLEREGAHFNFRDYDEDYYSQPAALYAIMDAAQRDRLAGNFAASLAEVTDDAIVEHQLVHFERVNTELANAIRTKLA

SEQ ID NO: 19937 - protein, 508 aa, Haemophilus influenzae Rd
MSSQCPFSHLAATNLTMGNGAPVADNQNSLTAGPRGPLLAQDLWLNEKLADFVREVIPERRMHAKGSGAFGTFTVTHDITKYTRAKIFSEVGKKTEMFARFTTVAGERGAADAERDIRGFALKFYTEEGNWDLVGNNTPVFFLRDPRKFPDLNKAVKRDPRTNMRSATNNWDFWTLLPEALHQVTVVMSDRGIPASYRHMHGFGSHTYSFWNEAGERFWVKFHFRTQQGIKNLTDAEAAEIIANDRESHQRDLYEAIERGDFPKWTLFVQIMPEADAEKVPYHPFDLTKVWSKKDYPLIEVGEFELNRNPENFFADVEQSAFAPSNLVPGIGASPDRMLQARLFNYADAQRYRLGVNYRQIPVNRPRCPVHSNQRDGQGRVDGNYGSLPHYEPNSFSQWQQQPDFAEPPLRINGDAAHWDYRNDDNDYFSQPRALFNLMNAEQKQSLFNNTAAAMGDAPDFIKYRHIRNCHWCDAAYGEGVAKALGLTVEDALKARDTDPALGQGGLL

SEQ ID NO: 19938 - protein, 506 aa, Drosophila melanogaster
MAGRDAASNQLIDYKNSQTVSPGAITTGNGAPIGIKDASQTVGPRGPILLQDVNFLDEMSHFDRERIPERVVHAKGAGAFGYFEVTHDITQYCAAKIFDKVKKRTPLAVRFSTVGGESGSADTARDPRGFAVKFYTEDGVWDLVGNNTPVFFIRDPILFPSFIHTQKRNPQTHLKDPDMFWDFLTLRPESAHQVCILFSDRGTPDGYCHMNGYGSHTFKLINAKGEPIYAKFHFKTDQGIKNLDVKTADQLASTDPDYSIRDLYNRIKTCKFPSWTMYIQVMTYEQAKKFKYNPFDVTKVWSQKEYPLIPVGKMVLDRNPKNYFAEVEQIAFSPAHLVPGVEPSPDKMLHGRLFSYSDTHRHRLGPNYLQIPVNCPYKVKIENFQRDGAMNVTDNQDGAPNYFPNSFNGPQECPRARALSSCCPVTGDVYRYSSGDTEDNFGQVTDFWVHVLDKCAKKRLVQNIAGHLSNASQFLQERAVKNFTQVHADFGRMLTEELNLAKSSKF

SEQ ID NO: 19939 - protein, 506 aa, Drosophila melanogaster
MCSRDTASNQLIDYKNNDSEVQREITTSSGTPVGVKDAIQTVGPRGPALLQDFQFLDEVMHFDSERIPERVAYAKGAGAFGYFECTHDISKFCAASIFDKVRKRTAVAMRFSVACGEQGSADTVREQRGFAVKFYTDDGIWDIVGCNMPVHYVRDPMLFPSLVHAQKRNPQTHLKDPDMFWDFMTLRPETLHALLMYFSDRGTPDGYRHLHGYGVHTYRMINASGETQYVRFHFKTDQGIKNLDARRCEELMSHDPDYAIRDLYNSIKKGNYPSWSMYIQVMLNEEAKKCRFNPFDVTKVWPQKDFPLLPVGKIVLDRNPTNYFTEVEQLAFSPAHMVPGIEPSPDKMLQGRLFAYGDSQRHRLGVNYMQIPVNCPYRVNVRNFQRDGAMTVTDNQNGAPNYFPNSFCGPRESPRALGLQTCCPLSGDVYRFMSGDTEDNFSQVTDFWTYTLDNCGRKRLVRNLSEHLTEASQFLQERAVKLFTMVHSDFGRLMTEALNTARISKF

SEQ ID NO: 19940 - protein, 508 aa, Haemophilus influenzae
MSSQCPFSHLAATNLTMGNGAPVADNQNSLTAGPRGPLLAQDLWLNEKLADFVREVIPERRMHAKGSGAFGTFTVTHDITKYTRAKIFSEVGKKTEMFARFTTVAGERGAADAERDIRGFALKFYTEEGNWDLVGNNTPVFFLRDPRKFPDLNKAVKRDPRTNMRSATNNWDFWTLLPEALHQVTVVMSDRGIPASYRHMHGFGSHTYSFWNEAGERFWVKFHFRTQQGIKNLTDAEAAEIIANDRESHQRDLYEAIERGDFPKWTLFVQIMPEADAEKVPYHPFDLTKVWSKKDYPLIEVGEFELNRNPENFFADVEQSAFAPSNLVPGIGASPDRMLQARLFNYADAQRYRLGVCYRQIPVNRPRCPVHSNQRDGQGRVDGTYGSLPHYEPNSFSQWQQQPDFAEPPLRISGDAAHWDYRTDDNDYFSQPRALFNLMNAEQKQSLFNNTAAAMGDAPDFIKYRHIRNCHWCDAAYGEGVAKALGLTVEDALKARDTDPALGQGGLL

SEQ ID NO: 19941 - protein, 513 aa, Apis mellifera ligustica
MTEIKRNPSADQLIDYKKNLKPDCPIFLTGSGTPISKKASLTVGPNGPILLQDYVFLDELSHFNRERIPERVVHAKGAGAFGYFEVTHDITKYSKAKVFSSIGKRTPIAVRFSTVGGESGSADTVRDPRGFAVKFYTEEGVWDLVGNNTPIFFIKDPIYFPSFIHTQKRNPVTHLKDADMFWDFLSLRPESTHQVMFLFSDRGIPDGYRHMNGYGSHTFSLVNAKDEIVYCKFHYKTDQGIKNLPVDKAGELSASNPDYAIQDLYDAIAKNQYPTWTFYIQVMTPTQAKSFKWNPFDLTKVWPHDEYPLIPVGKLVLNRNPENYFADIEQIAFDPAHMVPGIGASPDKMLQGRMFTYGDAHRHRLGPNNLQLPVNCPFKEISVINYQRDGQATINNQNGAPNYFPNSFGGPRECPAVAPPTYFVSGDVGRYDVDPKEDNFGQVTLFWRNVLDDKEKSRLVNNLVQNLSNASMFIVERAVKNFTQVDADLGLRLTEGLRNKGVLINRYGKTARL

SEQ ID NO: 19942 - protein, 509 aa, Vibrio rumoiensis
MSDDTKKCPVTHMTTDFGAPVVTNRDSLTAGPRGPLLAQDVWLNEKLAGFVREVIPERRMHAKGSGAFGTFTVTHDITKYTRAKIFSEVGKKTEMFARFTTVAGERGAADAERDIRGFALKFYTEEGNWDMVGNNTPVFFIRDPRQFPDLNKAVKRDPRTNLRSATNNWDYWTLLPEALHQVTVVMSDRGIPASYRHMHGFSSHTYSLWNQAGERFWVKMHFRTQQGIKNLTDAEAGELVAQDRESHQRDLYEAIERGEYPKWTMFIQVMPEADAEKYALHPFDLTKVWYKGDYPLIEVGEFELNKNSENFFADVEQVAFSPSNLVPGIGVSPDRMLQARLFNYADAQRYRLGVNYHQIPVNQARCPVHSNHRDGQGRVDGNYGALPHYEPNSFGQWQGQPQFSEPPLKLTGNAAHWSYDKDDHNYFEQPGKLFRLMNDGQKEALFGNTGRAMGDAPEFIKFRHIRNCHAADPAYGAGVAKALGINLEKALASKKDDPMYGNPLVALPA

SEQ ID NO: 19943 - protein, 482 aa, Wolbachia endosymbiont of Onchocerca volvulus
MSQNKTLTTASGPPVADNQNSRSAGPRGPLLLDDFHLIEKLAHFNRENIPERRVHAKGSGAYGTFTVTQDITQYTSAKLFDSVGKQTPTFLRFSTVGGERGSADTERDPRGFALKFYTEEGNWDIVGNNTPVFFIRDPLKFPDFIHTQKRLPQSNLKSAQMMWDFWSHSPEALHQVTILFSDRGIPDGYRHMHGFGSHTYSLINAKGERHWVKWHYKTKQGIKNLAPADAARLAGTDPDYAQRDLFGAIERGDFPKWRVCIQIMTEAQANAHYENPFDVTKTWSQKEFPLIEVGELELNRNPLNYFAEVEQAAFGPSNMVPGVGLSPDRMLQGRVFAYADAHRYRVGTNHQQLPVNAPRSPVNSYQRDGSMAFGSNGGAAPNYEPNSYADAPKQAPQYAEPALALSGAADRYDHREDTDYYSHAGALFRLMNDEQKALLINNIAGAMAGVSSDVVQRQLQYFFKADPAYGEGIASALGVSLN

SEQ ID NO: 19944 - protein, 87 aa, Leersia perrieri
KARYVKFHWKPTCGVSCLMDDEATLVGGKNRSHATQDLYDSIAAGNFPEWKLFVQVIDPEEEERFDFDPLDDTKTWPEDEVPLRPVG

SEQ ID NO: 19945 - protein, 90 aa, Porteresia coarctata
RDGKARYVKFHWKPTCGVSCLMDDEATLVGGKNHSHATQDLYDSIAAGNFPEWKLFVQVINPEEEERFDFDPLDDTKTWPEDEVPLRPVG

SEQ ID NO: 19946 - protein, 526 aa, Danio rerio
MADDREKSTDQMKLWKEGRGSQRPDVLTTGAGVPIGDKLNAMTAGPRGPLLVQDVVFTDEMAHFDRERIPERVVHAKGAGAFGYFEVTHDITRYSKAKVFEHVGKTTPIVVRFSTVAGEAGSPDTVRDPRGFAVKFYTDEGNWDLTGNNTPTFFIRDTLLSPSFIHSQKRNPQTHLKDPDMVWDFWSLRPESLHQVSFLFSDRGIPDGYRHMNGYGSHTFKLVNAQGQPVYCKFHYKTNQGIKNIPVEEADRLAATDPDYSIRDLYNAIANGNFPSWTFYIQVMTFEQAENWKWNPFDLTKVWSHKEFPLIPVGRFVLNRNPVNYFAEVEQLAFDPSNMPPGIEPSPDKMLQGRLFSYPDTHRHRLGANYLQLPVNCPYRTRVANYQRDGPMCMHDNQGGAPNYYPNSFSAPDVQPRFLESKCKVSPDVARYNSADDDNVTQVRTFFTQVLNEAERERLCQNMAGHLKGAQLFIQKRMVQNLMAVHSDYGNRVQALLDKHNAEGKKNTVHVYSRGGASAVAAASKM

SEQ ID NO: 19947 - protein, 526 aa, Danio rerio
MADDREKSTDQMKLWKEGRGSQRPDVLTTGAGVPIGDKLNAMTAGPRGPLLVQDVVFTDEMAHFDRERIPERVVHAKGAGAFGYFEVTHDITRYSKAKVFEHVGKTTPIAVRFSTVAGEAGSSDTVRDPRGFAVKFYTDEGNWDLTGNNTPIFFIRDTLLFPSFIHSQKRNPQTHLKDPDMVWDFWSLRPESLHQVSFLFSDRGIPDGYRHMNGYGSHTFKLVNAQGQPVYCKFHYKTNQGIKNIPVEEADRLAATDPDYSIRDLYNAIANGNFPSWTFYIQVMTFEQAENWKWNPFDLTKVWSHKEFPLIPVGRFVLNRNPVNYFAEVEQLAFDPSNMPPGIEPSPDKNAAGRLFSYPDTHRHRLGANYLQLPVNCPYRTRVANYQRDGPMCMHDNQGGAPNYYPNSFSAPDVQPRFLESKCKVSPDVARYNSADDDNVTQVRTFFTQVLNEAERERLCQNMAGHLKGAQLFIQKRTVQNLMAVHSDYGNRVQALLDKHNAEGKKNTVHVYSRGGASAVAAASKM

SEQ ID NO: 19948 - protein, 486 aa, Bacteroides fragilis
MENKKLTAANGRPIADNQNSQTAGPRGPIMLQDPWLIEKLAHFDREVIPERRMHAKGSGAYGTFTVTHDITKYTRAAIFSQVGKQTECFVRFSTVAGERGAADAERDIRGFAMKFYTEEGNWDLVGNNTPVFFLRDPLKFPDLNHAVKRDPRNNMRSANNNWDFWTLLPEALHQVTITMSPRGIPASYRHMHGFGSHTYSFLNAENKRIWVKFHLKTMQGIKNLTDQEAEAIIAKDRESHQRDLYESIERGDFPKWKFQIQLMTEEEADNYRINPFDLTKVWPHKDFPLQDVGILELNRNPENYFAEVEQSAFNPMNIVEGIGFSPDKMLQGRLFSYGDAQRYRLGVNSEQIPVNKPRCPFHAFHRDGAMRVDGNYGSAKGYEPNSYGEWQDSPEKKEPPLKVHGDVFNYNEREYDDDYYSQPGDLFRLMPADEQQLLFENTARAMGDAELFIKQRHVRNCYKADPAYGTGVAQALGIDLEEALKE

SEQ ID NO: 19949 - protein, 492 aa, Avicennia marina
MDPYKYCPSSSFNTPHTTTNGGHPVYNDNSSLTVGTRGPVLLEDYQLIDKLAHFTRERIPERVVHARGATAKGFFEVTHDVSHLTCADFLRAPGVQTPLIVRFSTVIHERGSPETLRDPRGFAVKFYTREGNFDIVGNNFPVFFIRDAIKFPDVIHAFKPNPKSHIQESWRILDFCSHFPESLLTFAWFYDDVGIPQDYRHMEGFGVHSYTLINKAGKVNYVKFHWKPTCGVKCLMEDEAVRIGGTNHSHATQDLYDSIAAGNYPEWKLYFQIMDPDQEDRFDFDPLDTTKIWPEDIIPLIPVGRMVLNKNIDNFFAENEMLAFSPHMIVPGINFSNDKMLQTRIFAYGDTQRHRLGPNYLLLPVNAPKCAYHNNHYDGFMNFMHRDEEVDYFPSKYDPTRHAERHPIPNAVITGRRDRRVIEKEDNFKQAGDRYRSWAPDRQERFLRRWVDALSDPRLTLEIRSIWVSYWSQADKSFGQKLASRLNVRPTM

SEQ ID NO: 19950 - protein, 528 aa, Rana rugosa
MADRREKSADQMKLWKESRANQKPDVLTTGGGNPVSDKLNLLTVGPRGPLLVQDVVFTDEMAHFDRERIPERVVHAKGAGAFGYFEVTHDITRYSKAKVFEFIGKRTPIAVRFSTVAGEAGSADTVRDPRGFAVKFYTEDGNWDLTGNNTPIFFVRDAMLFPSFIHSQKRNPQTHMKDPDMVWDFWALRPESLHQVSFLFSDRGIPDGHRHMNGYGSHTFKLVNAKDEPIYCKFHFKTDQGIRNLTVEEANRLSAEDPDYGIHDLYEAIANGNYPSWTFYIQVMTFEQAERYPFNPFDLTKIWPHKDYPLIPVGKLVLNRNPANYFAEVEQIAFDPSNMPPGIEPSPDKMLQGRLFSYPDTHRHRLGANYLQLPVNCPYKARVANYQRDGPMCFSDNQGGAPNYFPNSFSAPENQPAARESKFRVSADVARYNSSDDDNVSQVRDFYTKVLSEEERKRLCENIAGHLKGAQIFIQKRAVKNFTDVHPDYGNRVQALLDKYNAEGHHKKVIKTYTQHSAHVTANDKANL

SEQ ID NO: 19951 - protein, 505 aa, Helicobacter pylori 26695
MVNKDVKQTTAFGAPVWDDNNVITAGPRGPVLLQSTWFLEKLAAFDRERIPERVVHAKGSGAYGTFTVTKDITKYTKAKIFSKVGKKTECFFRFSTVAGERGSADAVRDPRGFAMKYYTEEGNWDLVGNNTPVFFIRDAIKFPDFIHTQKRDPQTNLPNHDMVWDFWSNVPESLYQVTWVMSDRGIPKSFRHMDGFGSHTFSLINAKGERFWVKFHFHTMQGVKHLTNEEAAEVRKYDPDSNQRDLFNAIARGDFPKWKLSIQVMPEEDAKKYRFHPFDVTKIWYLQDYPLMEVGIVELNKNPENYFAEVEQAAFSPANVVPGIGYSPDRMLQGRLFSYGDTHRYRLGVNYPQIPVNKPRCPFHSSSRDGYMQNGYYGSLQNYTPSSLPGYKEDKSARDPKFNLAHIEKEFEVWNWDYRADDSDYYTQPGDYYRSLPADEKERLHDTIGESLAHVTHKEIVDKQLEHFKKADPKYAEGVKKALEKHQKMMKDMHGKDMHHTKKKK

SEQ ID NO: 19952 - protein, 505 aa, Helicobacter pylori J99
MVNKDVKQTTAFGAPVWDDNNVITAGPRGPVLLQSTWFLEKLAAFDRERIPERVVHAKGSGAYGTFTVTKDITKYTKAKIFSKVGKKTECFFRFSTVAGEKGSADAVRDPRGFAMKYYTEEGNWDLVGNNTPVFFIRDAIKFPDFIHTQKRDPQTNLPNPDMVWDFWSNVPESLYQVTWVMSDRGIPKSFRHMDGFGSHTFSLINAKGERFWVKFHFETMQGVKHLTNEEAAEVRKYDPDSNQRDLFDAIAGGDFPKWKMSIQVMPEEDAKKYRFHPFDVTKIWYLQDYPLMEVGIVELNKNPENYFAEVEQAAFTPANVVPGIGYSPDRMLQGRLFSYGDTHRYRLGVNYPQIPVNRPRCPFHSSSRDGYMQNGYYGSLQNYTPSSLPGYKEDKSARDPKFNLAHIEKEFEVWNWDYRAEDSDYYTQPGDYYRSLPADEKERLYDTIGGSLAHVTHKEIVDKQLEHFKKADPKYAEGVKKALEKHQKMMKDMHAKDMHHMKKKK

SEQ ID NO: 19953 - protein, 533 aa, Bacillus halodurans
MKDQNQDPNKRSDNETDETLTNRQGHPVTNNQHVRTVGDRGPTTLENYDFLEKISHFDRERIPERVVHARGAGAHGYFESYGTYGDEPISKYTRAKVFTEKGKQTPVFVRFSSVIHGGHSPETLRDPRGFAVKFYTEDGNWDLVGNNLKIFFIRDPLKFPDLVHAFKPDPVTNVQDGERIFDFISQTPEAMHMITFLFSPWGIPANYRMMQGSGVNTYKWVNEEGNAVLVKYHWEPKQGIKNLTQKEAEAIQAKNFNHATLDLYEAIEDGDYPEWELYVQIMSDDAHPELDFDPLDPTKLWYKDQFPWVPVGRMVLNKNPENYFAEVEQAAFGTGVLVDGLDFSDDKLLQGRTFSYSDTQRYRVGANYLQLPINAPKKRVATNQRDGQMEYHVDIGPKQNPHVNYEPSLLNGLKEAKQDGQDHTPYVEGELQRASIDRQNDYGQAGETYRRLSDWERDDLILNLVNTLAPCHEDIQKQMIDHFSQCDPEYGRRVKEGLEKQKGADTHRQPQGGADGDAAMHAAEALGHPSDPY

SEQ ID NO: 19954 - protein, 480 aa, Desulfovibrio vulgaris
MTKHKLTTNAGAPVPDNQNAMTAGPRGPMLLQDVWFLEKLAHFDREVIPERRMHAKGSGAYGTFTVTHDITSYTKAALFSKIGKKTDLFVRFSTVAGERGAATAERDIRGFAIKFYTEQGNWDLVGNNTPVFFLRDPLKFPDLNHAVKRDPRTNMRSAKNNWDFWTSLPEALHQVTVVMSDRGIPASYRHMHGFGSHTFSFISPDNQRYWVKFHLRTQQGIKNLTDAEAEAIVARDRESHQRDLYDSIERGDFPRWTNYVQVMPEKDAEKLPYHPFDLTKVWFHKDCPLIEVGVLELNRNPENYFAEVEQAAFNPANVVPGISFSPDKMLQGRLFSYGDAHRYRLGVNHHLIPVNAARCPVHSYHRDGAMRVDGNHGSTLAYEPNSYGEWQEQPDFAEPPLAIRGDAAHWNFREDDADYYDQPGRLFRLMTPQQQDELFQNTARAMGDAPEEIKRRHVGNCAKADPAYGAGVARALGLKM

SEQ ID NO: 19955 - protein, 479 aa, Desulfovibrio vulgaris (strain Miyazaki)
MTKHKLTTNAGAPVPDNQNAMTAGPRGPMLLQDVWFLEKLAHFDREVIPERRMHAKGSGAYGTFTVTHDITSYTKAALFSKIGKKTDLFVRFSTVAGERGAATAERDIRGFAIKFYTEQGNWDLVGNNTPVFFLRDPLKFPDLNHAVKRDPRTNMRSAKNNWDFWTSLPEALHQVTVVMSDRGIPASYRHMHGFGSHTFSFISPDNQRYWVKFHLRTQQGIKNLTDAEAEAIVARDRESHQRDLYDSIERGDFPRWTMYVQVMPEKDAEKLPYHPFDLTKVWFHKDCPLIEVGVLELNRNPENYFAEVEQAAFNPANVVPGISFSPDKMLQGRLFSYGDAHRYRLGVNHHLIPVNAARCPVHSYHRDGAMRVDGNHGSTLAYEPNSYGEWQEQPDFAEPPLAIRGDAAHWNFREDADYYDQPGRLFRLMTPQQQDELFQNTARAMGDAPEEIKRRHVGNCAKADPAYGAGVARALGLKM

SEQ ID NO: 19956 - protein, 487 aa, Nitrosomonas europaea
MKMDDAKKKLTTSAGAPVADNQNVMTAGPRGPMLLQDIWFLEKLAHFDREVIPERRMHAKGSGAYGTFTVTHDITRYTRANIFSQIGKKTDLFVRFSTVAGERGAADAERDIRGFAIKFYTEEGNWDLVGNNTPVFFLRDPLKFPDLNHAVKRDPRTNLRSARNNWDFWTLLPEALHQITIVMSDRGLPATYRHMHGFGSHTFSFINARQERYWVKFHFRTQQGIKNLTDAEAEALVGKDRESHQRDLYESIENGEFPRWTLFVQIMPESDAASLPYNPFDLTKVWPHKDYPLIEVGVMELNRNPENYFAEVEQAAFNPASVVPGISFSPDKMLQGRLFSYGDAQRYRLGVNHYQIPVNAPRCPFHHYHRDGAMRVDGNQGSTLGYEPNSYQEWQQQPEYAEPPLTLEGAAAHWNHRVDEDYYIQPGNLFRLMNSSQQQVLFDNTARSIGEAPREIQIRHITNCLKADRAYGEGVARALGIALSEVD

SEQ ID NO: 19957 - protein, 527 aa, Homo sapiens
MADSRDPASDQMQHWKEQRAAQKADVLTTGAGNPVGDKLNVITVGPRGPLLVQDVVFTDEMAHFDRERIPERVVHAKGAGAFGYFEVTHDITKYSKAKVFEHIGKKTPIAVRFSTVAGESGSADTVRDPRGFAVKFYTEDGNWDLVGNNTPIFFIRDPILFPSFIHSQKRNPQTHLKDPDMVWDFWSLRPESLHQVSFLFSDRGIPDGHRHMNGYGSHTFKLVNANGEAVYCKFHYKTDQGIKNLSVEDAARLSQEDPDYGIRDLFNAIATGKYPSWTFYIQVMTFNQAETFPFNPFDLTKVWPHKDYPLIPVGKLVLNRNPVNYFAEVEQIAFDPSNMPPGIEASPDKMLQGRLFAYPDTHRHRLGPNYLHIPVNCPYRARVANYQRDGPMCMQDNQGGAPNYYPNSFGAPEQQPSALEHSIQYSGEVRRFNTANDDNVTQVRAFYVNVLNEEQRKRLCENIAGHLKDAQIFIQKKAVKNFTEVHPDYGSHIQALLDKYNAEKPKNAIHTFVQSGSHLAAREKANL

SEQ ID NO: 19958 - protein, 497 aa, Homo sapiens
RDPASDQMQHWKEQRAAQKADVLTTGAGNPVGDKLNVITVGPRGPLLVQDVVFTDEMAHFDRERIPERVVHAKGAGAFGYFEVTHDITKYSKAKVFEHIGKKTPIAVRFSTVAGESGSADTVRDPRGFAVKFYTEDGNWDLVGNNTPIFFIRDPILFPSFIHSQKRNPQTHLKDPDMVWDFWSLRPESLHQVSFLFSDRGIPDGHRHMNGYGSHTFKLVNANGEAVYCKFHYKTDQGIKNLSVEDAARLSQEDPDYGIRDLFNAIATGKYPSWTFYIQVMTFNQAETFPFNPFDLTKVWPHKDYPLIPVGKLVLNRNPVNYFAEVEQIAFDPSNMPPGIEASPDKMLQGRLFAYPDTHRHRLGPNYLHIPVNCPYRARVANYQRDGPMCMQDNQGGAPNYYPNSFGAPEQQPSALEHSIQYSGEVRRFNTANDDNVTQVRAFYVNVLNEEQRKRLCENIAGHLKDAQIFIQKKAVKNFTEVHPDYGSHIQALLDKYN

SEQ ID NO: 19959 - protein, 498 aa, Homo sapiens
SRDPASDQMQHWKEQRAAQKADVLTTGAGNPVGDKLNVITVGPRGPLLVQDVVFTDEMAHFDRERIPERVVHAKGAGAFGYFEVTHDITKYSKAKVFEHIGKKTPIAVRFSTVAGESGSADTVRDPRGFAVKFYTEDGNWDLVGNNTPIFFIRDPILFPSFIHSQKRNPQTHLKDPDMVWDFWSLRPESLHQVSFLFSDRGIPDGHRHMNGYGSHTFKLVNANGEAVYCKFHYKTDQGIKNLSVEDAARLSQEDPDYGIRDLFNAIATGKYPSWTFYIQVMTFNQAETFPFNPFDLTKVWPHKDYPLIPVGKLVLNRNPVNYFAEVEQIAFDPSNMPPGIEASPDKMLQGRLFAYPDTHRHRLGPNYLHIPVNCPYRARVANYQRDGPMCMQDNQGGAPNYYPNSFGAPEQQPSALEHSIQYSGEVRRFNTANDDNVTQVRAFYVNVLNEEQRKRLCENIAGHLKDAQIFIQKKAVKNFTEVHPDYGSHIQALLDKYN

SEQ ID NO: 19960 - protein, 498 aa, Homo sapiens
  unsure (1)..(498): unsure at all Xaa locations
SRDPASDQMQHWKEQRAAQKADVLTTGAGNPVGDKLNVITVGPRGPLLVQDVVFTDEMAHFDRERIPERVVXAKGAGAFGYFEVTHDITKYSKAKVFEHIGKKTPIAVRFSTVAGESGSADTVRDPRGFAVKFYTEDGNWDLVGNNTPIFFIRDPILFPSFIHSQKRNPQTHLKDPDMVWDFWSLRPESLHQVSFLFSDRGIPDGHRHMNGYGSHTFKLVNANGEAVYCKFHYKTDQGIKNLSVEDAARLSQEDPDYGIRDLFNAIATGKYPSWTFYIQVMTFNQAETFPFNPFDLTKVWPHKDYPLIPVGKLVLNRNPVNYFAEVEQIAFDPSNMPPGIEASPDKMLQGRLFAYPDTHRHRLGPNYLHIPVNCPYRARVANYQRDGPMCMQDNQGGAPNYYPNSFGAPEQQPSALEHSIQYSGEVRRFNTANDDNVTQVRAFYVNVLNEEQRKRLCENIAGHLKDAQIFIQKKAVKNFTEVHPDYGSHIQALLDKYN

SEQ ID NO: 19961 - protein, 527 aa, Homo sapiens [sequence omitted]

SEQ ID NO: 19962 - protein, 451 aa, Homo sapiens
KGAGAFGYFEVTHDITKYSKAKVFEHIGKKTPIAVRFSTVAGESGSADTVRDPRGFAVKFYTEDGNWDLVGNNTPIFFIRDPILFPSFIHSQKRNPQTHLKDPDMVWDFWSLRPESLHQVSFLFSDRGIPDGHRHMNGYGSHTFKLVNANGEAVYCKFHYKTDQGIKNLSVEDAARLSQEDPDYGIRDLFNAIATGKYPSWTFYIQVMTFNQAETFPFNPFDLTKVWPHKDYPLIPVGKLVLNRNPVNYFAEVEQIAFDPSNMPPGIEASPDKMLQGRLFAYPDTHRHRLGPNYLHIPVNCPYRARVANYQRDGPMCMQDNQGGAPNYYPNSFGAPEQQPSALEHSIQYSGEVRRFNTANDDNVTQVRAFYVNVLNEEQRKRLCENIAGHLKDAQIFIQKKAVKNFTEVHPDYGSHIQALLDKYNAEKPKNAIHTFVQSGSHLAAREKANL

SEQ ID NO: 19963 - protein, 527 aa, Canis familiaris
MADSRDPASDQMKLWKEQRAAQKPDVLTTGGGNPIGDKLNVMTAGPRGPLLVQDVVFTDEMAHFDRERIPERVVHAKGAGAFGYFEVTHDITKYSKAKVFEHIGKRTPIAVRFSTVAGESGSADTVRDPRGFAVKFYTEDGNWDLVGNNTPIFFIRDAILFPSFIHSQKRNPQTHLKDPDMVWDFWSLRPESLHQVSFLFSDRGIPDGHRHMNGYGSHTFKLVNAAGEAVYCKFHYKTDQGIKNLSVEDAARLSHEDPDYGLRDLFNAIATGNYPSWTFYIQVMTFSQAETFPFNPFDLTKIWPHQDYPLIPVGKLVLNRNPVNYFAEVEQMAFDPSNMPPGIEPSPDKMLQGRLFAYPDTHRHRLGPNYLQIPVNCPFRARVANYQRDGPMCMLDNQGGAPNYYPNSFSAPEQQRCVLEHSSQCSPDVQRFNSANEDNVTQVRTFYLKVLGEEERKRLCENIAGHLKDAQLFIQKKAVKNFSDVHPDYGARIQALLDKYNAEKPKNAIHTFMQHGSHLAAREKANL

SEQ ID NO: 19964 - protein, 527 aa, Canis familiaris
MADSRDPASDQMKLWKEQRAAQKPDVLTTGGGNPIGDKLNVMTAGPRGPLLVQDVVFTDEMAHFDRERIPERVVHAKGAGAFGYFEVTHDITKYSKAKVFEHIGKRTPIAVRFSTVAGESGSADTVRDPRGFAVKFYTEDGNWDLVGNNTPIFFIRDAILFPSFIHSQKRNPQTHLKDPDMVWDFWSLRPESLHQVSFLFSDRGIPDGHRHMNGYGSHTFKLVNAAGEAVYCKFHYKTDQGIKNLSVEDAARLSHEDPDYGLRDLFNAIATGNYPSWTFYIQVMTFSQAETFPFNPFDLTKIWPHQDYPLIPVGKLVLNRNPVNYFTEVEQMAFDPSNMPPGIEPSPDKMLQGRLFAYPDTHRHRLGPNYLQIPVNCPFRARVANYQRDGPMCMLDNQGGAPNYYPNSFSAPEQQRCVLEHSSQCSPDVQRFNSANEDNVTQVRTFYLKVLGEEERKRLCENIAGHLKDAQLFIQKKAVKNFSDVHPDYGARIQALLDKYNAEKPKNAIHTFMQHGSHLAAREKANL

SEQ ID NO: 19965 - protein, 503 aa, Sus scrofa
MADNRDPASDQMKHWKEQRAAQKPDILTTGSGNPIGDKLNILTAGPRGPLLVQDVVFTDEMAHFDRERIPERVVHAKGAGAFGYFEVTHDITRFSKAKVFEHVGKRTPIAVRFSTVAGESGSADTVRDPRGFAVKFYTEDGNWDLVGNNTPIFFIRDAILFPSFIHSQKRNPQTHLKDPDMVWDFWSLRPESLHQVSFLFSDRGIPDGHRHMNGYGSHTFKLVNEKGEAVYCKFHYKTDQGIKNLSVEDAARLPQEDPDYGIRDLFNAIATGNYPSWTFYIQVMTFQEAEAFPFNPFDLTKVWPHSEYPLIPVGKLVLNRNPVNYFAEVEQMAFDPSNMPPGIEPSPDKMLQGRLFGYPDTHRHRLGANYLQIPVNCPFRARVANYQRDGPMCFQDNQGGAPNYYPNSFSAPEQTHSALEHCTRYSGDVQRFNSANEDNVTQVRTFYLNVLNEEERKRLCENIAGHLKDAQLFIQKKAVKNFSDVHPDYGARIQALLDKYNAE

SEQ ID NO: 19966 - protein, 506 aa, Bos taurus
ADNRDPASDQMKHWKEQRAAQKPDVLTTGGGNPVGDKLNSLTVGPRGPLLVQDVVFTDEMAHFDRERIPERVVHAKGAGAFGYFEVTHDITRYSKAKVFEHIGKRTPIAVRFSTVAGESGSADTVRDPRGFAVKFYTEDGNWDLVGNNTPIFFIRDALLFPSFIHSQKRNPQTHLKDPDMVWDFWSLRPESLHQVSFLFSDRGIPDGHRHMDGYGSHTFKLVNADGEAVYCKFHYKTDQGIKNLSVEDAARLAHEDPDYGLRDLFNAIATGNYPSWTLYIQVMTFSEAEIFPFNPFDLTKVWPHGDYPLIPVGKLVLNRNPVNYFAEVEQLAFDPSNMPPGIEPSPDKMLQGRLFAYPDTHRHRLGPNYLQIPVNCPYRARVANYQRDGPMCMMDNQGGAPNYYPNSFSAPEHQPSALEHRTHFSGDVQRFNSANDDNVTQVRTFYLKVLNEEQRKRLCENIAGHLKDAQLFIQKKAVKNFSDVHPEYGSRIQALLDKYNEEKPKN

SEQ ID NO: 19967 - protein, 505 aa, Bos taurus
ABBRBPASDQMKHWKEQRAAQKPDVLTTGGGNPVGDKLNSLTVGPRGPLLVQDVVFTDEMAHFDRERIPERVVHAKGAGAFGYFEVTHDITRYSKAKVFEHIGKRTPIAVRFSTVAGESGSADTVRDPRGFAVKFYBBBBTTZPGGVILFFWIRDALLFPSFIHSQKRNPQTHLKBBPMVWDFWSLRPESLHQVSFLFSDRGIPDGHRHMHBTSGGYFKLVNADGEAVYCKFHYKTDQGIKNLSVEDAARLAHEDPDYGLRDLFBTAAIGNYPSWTLYIQVMTFSEAEIFPFNPFDLTKVWPHGDYPLIPVGKLVLNRNPVNYFAEVEQLAFDPSNMPPGIEPSPDKMLQGRLFAYPDTHRHRLGPNYLQIPVNCPYRARVANYQRDGPMCBBBBZPPGGAMMYYSFSAPEHQPSALEHRTHFSGDVQRFNSANDDNVTQVRTFYLKVLNEEQRKRLCENIAGHLKDAQLFZIKKAVKNFSDVHPEYGSRIQALLDKYNEEKPKN

SEQ ID NO: 19968 - protein, 484 aa, Rhodospirillum rubrum
MTTRLTTTAGAPVADNQNSLTAGPRGPVLLQDYQLIEKLAHQNRERIPERVVHAKGWGAHGTLTITHDISRYTRAKLFSAVGKTTPVLARFSTVAGELGAADAERDVRGFSLKFYTEEGNWDLAGNNTPVFFVRDPLKFPDFIHTQKRHPRTHLRSPTAMWDFWSLSPESLHQVTILMSDRGLPLDPMHMNGYGSHTYSFWNDAGERFWVKFHFKTQQGHAHLTNAAAKVVVGESRESYQEALFGTIESGHFPRWTLFVQIMAEREAETTPYNPFDLTKVWPHGDFPLIEVGVLELNRNAENYFAEIEQAAFSPSNVVPGIGHSPDKMLQARVFAYADAHRYRLGTHYEALPVNAPLSPVNHYHKDGPMRFFPNNPNADAYYEPNSFGGPKEDPSVKEPPLRINGDADHYNHREGNDDYVQVGALFALFDEGERQRLFSNIAEAMAGVPEEIIRRQLVHFHRADPAYGEGVAKALGLAPVSQPA

SEQ ID NO: 19969 - protein, 394 aa, Hordeum vulgare subsp. vulgare
VRFSTVIHERGSPETIRDPRGFAVKFYTREGNWDLLGNNFPVFFIRDGIKFPDVIHAFKPNPKSHVQEYWRVFDFLSHHPESLHTFFFLFDDVGIPTDYRHMDGFGVNTYTFVSRAGKSHYVKFHWRPTCGVSCLMDDEATLVGGKNHSHATQDLYDSIDAGNFPEWKLFVQVIDPDEEDRFDFDPLDDTKTWPEDLVPLQPVGRLVLDRNVDNFFNENEQLAFGPGLVVPGIYYSDDKMLQCRVFAYADTQRYRLGPNYLMLPVNAPKCGFKNNHYDGAMNFMHRDEEVDYYPSRHAPLRHAEPASFPVPTRPVVGKREKTRIKKENDFVQPGERYRSWAPDRQDRFVRRFSDALAHPKVSHELRVIWIDFLSKCDKSCGMKVANRLNVKPSM

SEQ ID NO: 19970 - protein, 484 aa, Pseudomonas fluorescens PfO-1
MSQNKTLTTASGAPVADNQNSRSSGPRGPLLLDDFHLIEKLAHFNRENIPERRVHAKGSGAYGTFTVTRDITQYTSAKLFSAVGKQTPTFLRFSTVGGERGSADTERDPRGFALKFYTEEGNWDIVGNNTPVFFIRDPLKFPDFIHTQKRLPQSNLKSAQMMWDFWSHSPEALHQVTILFSDRGIPDGYRHMHGFGSHTYSLISAQGERHWVKWHYKTKQGIKNLAPADAARLAGTDPDYAQRDLFEAIERGDFPKWSVCIQIMTEAQAAAHYENPFDVTKTWSQKEFPLIEVGELELNRNPLNYFAEVEQAAFGPSNMVPGVGLSPDRMLQGRVFAYADAHRYRVGTNHQQLPVNAPRSPVNTYQRDGSMAFGSNGGAAPNYEPNSYVESPKQAPHYAEPALALSGAADRYDHREDSDYYSHAGALFRLMSDEQKALLVSNIAGAMGGVSSDVIDRQLQHFYKADPAYGEAIAKLLNVQLNEV

SEQ ID NO: 19971 - protein, 477 aa, Pseudomonas fluorescens PfO-1
MNKLTTAAGAPVVDNNNVQTAGPRGPMLLQDVWLLEKLAHFDREVIPERRMHAKGSGAFGTFTVTHDITRFTKARLFSSVGKTTDVFVRFSTVAGERGAADAERDIRGFAIKFYTEQGNWDLVGNNTPVFFLRDPLKFPDLNHAVKRDPRTNMRSARNNWDFWTLLPEALHQVTIVMSDRGLPRTYRHMHGFGSHTFSFISPANERFWVKFTWKTQQGIENLTDQQAATLIGDDRESAQRDLYNAIEEGHFPQWKLYVQVMPELDAETYPINPFDLTKVWPHADYPLIEVGVLELNRNPDNYFADVEQAAFNPANVVPGISFSPDKMLQARLFSYGDAQRYRVGVNHHQIPVNAPRCPVNSYHRDGQMRTDANAGSTIGYEPNSYGQWAEQPDFSEPPLALKGSAGHWNHREDDDYFSQPGALFRAMSTAQQQVLFENTARSIHGASAQTRQRHIDNCTRADPAYGAGVAQAIEALG

SEQ ID NO: 19972 - protein, 482 aa, Pseudomonas aeruginosa PAO1
MEEKTRLTTAAGAPVVDNQNVQTAGPRGPMLLQDVWFLEKLAHFDREVIPERRMHAKGSAAYGTFTVTHDITPYTRAKIFSQVGKKTDMFLRFSTVAGERGAADAERDIRGFSMRFYTEQGNWDLVGNNTPVFYLRDPLKFPDLNHVVKRDPRTNLRNATFKWDFFSHLPESLHQLTIDFSDRGLPKSYRHIHGFGSHTFSFINANNERFWVKFHFKTQQGIENLTNAEAAEVIAQDRESSQRDLYESIEKGDFPRWKMYVQIMPEKEAATYRYNPFDLTKVWPHGDYPLIEVGFFELNRNPDNYFAEVEQAAFTPANVVPGIGFSPDKMLQGRLFSYGDAHRYRLGVNHHQIPVNAARCPHQVYHRDGGMRVDGNNAHQRVTYEPNSFNQWQEQPDFSEPPLSLEGAADHWNHRVDDDYYSQPAALFHLFTDEQKQRLFANIAEDIRDVPEQIQRRQIGLFLKVDPAYGKGVADALGLKLD

SEQ ID NO: 19973 - protein, 479 aa, Pseudomonas putida
MSKILTTASGAPVADNQNSRSAGPRGPLLLDDFHLIEKLAHFNRENIPERRVHAKGSGAYGTFTVTRDITGYTSAKLFEQVGKQTETFLRFSTVGGERGSADTERDPRGFAVKFYTEEGNWDIVGNNTPVFFIRDPLKFPDFIHTQKRHPQSNLKNAQIFWDSWSHSPEALHQVTILFSDRGIPDGYRHMHGFGSHTYSLINAQGERTWVKWHFKTQQGIKNLAPADAARLAGTDPDYAQRDLFEAIERGDYPRWTVCIQVMSEAEAASRDENPFDVTKTWSQKDYPLIEVGVLELNRNPLNYFAEVEQAAFGPSNMVPGVGLSPDRMLQGRVFAYADAHRYRVGTNHQQLPVNAPRCPVNSYQRDGSMATGSYGSAPNYEPNSYAAAPKQSPRHAEPALALNGSADRYDHREDADYYSHAGALFRLMSDEQKALLISNIAGTMAGVSENVIQRQLQYFFKADPAYGEGIAKGLGINLA

SEQ ID NO: 19974 - protein, 491 aa, Oryza sativa (indica cultivar-group)
MDPCKFRPSSSFDTKTTTTNAGAPVWNDNEALTVGPRGPILLEDYHLIEKVAHFARERIPERVVHARGASAKGFFECTHDVTDITCADFLRSPGAQTPVIVRFSTVIHERGSQETIRDPRGFAVKFYTREGNWDLLGNNFPVFFIRDGIKFPDVIHAFKPNPRSHVQEYWRVFDFLSHHPESLHTFFFLFDDVGIPTDYRHMDGFGVNTYTFVTRDAKARYVKFHWKPTCGVSCLMDDEATLVGGKNHSHATQDLYDSIAAGNFPEWKLFVQVIDPEEEERFDFDPLDDTKTWPEDEVPLRPVGRLVLNRNVDNFFNENEQLAFGPGLVVPGIYYSDDKMLQCRVFAYADTQRYRLGPNYLMLPVNAPKCAHHNNHYDGAMNFMHRDEEVDYYPSRHAPLRHAPPTPITPRPVVGRRQKATIHKQNDFKQPGERYRSWAPDRQERFIAVRRRVAHPKVSPELRAIWVNYLSQCDESLGVKIANRLNVKPSM

SEQ ID NO: 19975 - protein, 91 aa, Oryza sativa (indica cultivar-group)
RDAKARYVKFHWKPTCGVSCLMDDEATLVGGKNHSHATQDLYDSIAAGNFPEWKLFVQVIDPEEEERFDFDPLDDTKTWPEDEVPLRPVGR

SEQ ID NO: 19976 - protein, 492 aa, Lycopersicon esculentum
MDPYKYRPSSAFNSPFCTTNSGAPVFNNNSSLTVGARGPVLLEDYHLVEKLANFDRERIAERVVHARGASAKGFFEVTHDIAHLTCADFLRAPGVQTPVIVRFSTVIHERGSPETLRDPRGFAVKFYTREGNFDLVGNNFPVFFIRDGMKFPDMVHALKPNPKSHIQENWRVLDFFSHHPESLHMFTFLFDDIGIPQDYRHMDGSGVHTFTLINRAGKSTYVKFHWKPTCGVKSLLEEKAIRVGGANHSHATQDLYDSIAAGNYPEWKPSIQIMGPEHEDKFDFDPLDVTKTWPEDILPLQPVGRLVLNKNIDNFLYMNEQLAFCPSIVVPGVYYSDDKMLQTRIFSYSDTQRYRLGPNYLQLPANAPKCAHHNNHYDGSMNFMHRDEEIDYFPSRYDQVRHAEVYPIPSTVCSGKREKCIIQKENNFKQPGERYRSFTPDRQERFIRRWVEALSDPRITYEIRSIWITYWSQADKSLGQKLASRLNVRPSI

SEQ ID NO: 19977 - protein, 492 aa, Lycopersicon esculentum
MDPSKYRPSSAYDTPFLTTNAGGPVYNNVSSLTVGPRGPVLLEDYYLIEKLATFDREKIPERVVHARGASAKGFFEVTHDISHLTCADFLRAPGAQTPVICRFSTVVHERGSPESIRDIRGFAVKFYTREGNFDLVGNNVPVFFNRDAKSFPDTIRALKPNPKSHIQENWRILDFFSFLPESLHTFAFFYDDVCLPTDYRHMEGFGVHAYQLINKEGKAHYVKFHWKPTCGVKCMSEEEAIRVGGTNHSHATKDLYDSIAAGNYPEWKLFIQTMDPEDVDKFDFDPLDVTKTWPEDLLPLIPVGRLVLNRNIDNFFAENEQLAFNPGHIVPGIYYSEDKLLQTRIFAYADTQRHRIGPNYMQLPVNAPKCGHHNNHRDGAMNMTHRDEEVDYLPSRFDPCRPAEQYPIPSCVLNGRRTNCVIPKENNFKQAGERYRSWEPDRQDRYINKWVESLSDPRVTHEIRSIWISYLSQADKSCGQKVASRLTVKPTM

SEQ ID NO: 19978 - protein, 90 aa, Lycopersicon esculentum
NRAGKSTYVKFHRKPTCGVMSLLEEEADRVGGANHSHATQDLYDSTAAGNYPEWKIFIQTMDPDHEDRFDFDPLDVTKTWPDDILPLQPD

SEQ ID NO: 19979 - protein, 494 aa, Hordeum vulgare
MDPCKFRPSSSFDTKTTTTNAGQPVWNDNEALTVGPRGPILLEDYHLLEKIAHFARERIPERVVHARGASAKGFFECTHDVTGLTCADFLRAPGARTPVIVRFSTVIHERGSPETIRDPRGFAVKFYTREGNWDLLGNNFPVFFIRDGIKFPDVIHAFKPNPKSHVQEYWRVFDFLSHHPESLHTFFFLFDDVGIPTDYRHMDGFGVNTYTFVSRAGKSHYVKFHWRPTCGVSCLMDDEATLVGGKNHSHATQDLYDSIDAGNFPEWKLFVQVIDPDEEDRFDFDPLDDTKTWPEDLVPLQPVGRLVLDRNVDNFFNENEQLAFGPGLVVPGIYYSDDKMLQCRVFAYADTQRYRLGPNYLMLPVNAPKCGFKNNHYDGAMNFMHRDEEVDYYPSRHAPLRHAEPASFPVPTRPVVGKREKTRIKKENDFVQPGERYRSWAPDRQDRFVRRFSDALAHPKVSHELRVIWIDFLSKCDKSCGMKVANRLNVKPSM

SEQ ID NO: 19980 - protein, 492 aa, Oryza sativa
  unsure (1)..(492): unsure at all Xaa locations
MDPCKFRPSSSFDTKTTTTNAGAPVWNDNEALTVGPRGPILLEDYHLIEKVAHFARERIPERVVHARGASAKGFFECTHDVTDITCADFLRSPGAQTPVIVRFSTVIHERGSPETIRDPRGFAVKFYTREGNWDLLGNNFPVFFIRDGIKFPDVIHAFKPNPRSHVQEYWRVFDFLSHHPESLHTFFFLFDDVGIPTDYRHMDGFGVNTYTFVTRDAKARYVKFHWKPTCGVSCLMDDEATLVGGKNHSHATQDLYDSIAAGNFPEWKLFVQVIDPEEEERFDFDPLDDTKTWPEDEVPLRPVGRLVLNRNVDNFFNENEQLAFGPGLVVPGIYYSDDKMLQCRVFAYADTQRYRLGPNYLMLPVNAPKCAHHNNHYDGAMNFMHRDEEVDYYPSRHAPLRHAPPTPITPRPVVGRRQKATIHKQNDFKQPGERYRSWAPDRQERFIRRXRRRVAHPKVSPELRAIWVNYLSQCDESLGVKIANRLNVKPSM

SEQ ID NO: 19981 - protein, 491 aa, Oryza sativa
MDPCKFRPSSSFDTKTTTTNAGAPVWNDNEALTVGPRGPILLEDYHLIEKVAHFARERIPERVVHARGASAKGFFECTHDVTDITCADFLRSPGAQTPVIVRFSTVIHERGSPETIRDPRGFAVKFYTREGNWDLLGNNFPVFFIRDGIKFPDVIHAFKPNPRSHVQEYWRVFDFLSHHPESLHTFFFLFDDVGIPTDYRHMDGFGVNTYTFVTRDAKARYVKFHWKPTCGVSCLMDDEATLVGGKNHSHATQDLYDSIAAGNFPEWKLFVQVIDPEEEERFDFDPLDDTKTWPEDEVPLRPVGRLVLNRNVDNFFNENEQLAFGPGLVVPGIYYSDDKMLQCRVFAYADTQRYRLGPNYLMLPVNAPKCAHHNNHYDGAMNFMHRDEEVDYYPSRHAPLRHAPPTPITPRPVVGRRQKATIHKQNDFKQPGERYRSWAPDRQERFIPLRRRVAHPKVSPELRAIWVNYLSQCDESLGVKIANRLNVKPSM

SEQ ID NO: 19982 - protein, 491 aa, Oryza sativa
MDPCKFRPSSSFDTKTTTTNAGAPVWNDNEALTVGPRGPILLEDYHLIEKVAHFARERIPERVVHARGASAKGFFECTHDVTDITCADFLRSPGAQTPVIVRFSTVIHERGSPETIRDPRGFAVKFYTREGNWDLLGNNFPVFFIRDGIKFPDVIHAFKPNPRSHVQEYWRVFDFLSHHPESLHTFFFLFDDVGIPTDYRHMDGFGVNTYTFVTRDAKARYVKFHWKPTCGVSCLMDDEATLVGGKNHSHATQDLYDSIAAGNFPEWKLFVQVIDPEEEERFDFDPLDDTKTWPEDEVPLRPVGRLVLNRNVDNFFNENEQLAFGPGLVVPGIYYSDDKMLQCRVFAYADTQRYRLGPNYLMLPVNAPKCAHHNNHYDGAMNFMHRDEEVDYYPSRHAPLRHAPPTPITPRPVVGRRQKATIHKQNDFKQPGERYRSWAPDRQERFIAVRRRVAHPKVSPELRAIWVNYLSQCDESLGVKIANRLNVKPSM

SEQ ID NO: 19983 - protein, 495 aa, Triticum aestivum
  unsure (1)..(495): unsure at all Xaa locations
MDPCKFRPSSSFDTKTTTTNAGQPVWNDNEALTVGPRGPILLEDYHLLEKIAHFARERIPERVVHARGASAKGFFECTHDVTGLTCADFLRAPGARTPVIVRFSTVIHERGSPETIRDPRGFAVKFYTREGNWDLLGNNFPVFFIRDGIKFPDVIHAFKPNPKSHVQEYWRVFDFLSHHPESLHTFFFLFDDVGIPTDYRHMDGSGVNTYTFVSRAGKSHYVKFHWXRPTCGVSCLMDDEATLVGGKNHSHATQDLYDSIDAGNFPEWKLFVQVIDPDDEDRFDFDPLDDTKTWPEDLVPLQPVGRLVLDRNVDNFFNENEQLAFGPGLVVPGIYYSDDKMLQCRVFAYADTQRYRLGPNYLMLPVNAPKCGFKNNHYDGAMNFMHRDEEVDYYPSRHAPLRHAEPASFPVPTRPVVGKREKTRIKKENDFVQPGERYRSWAPDRQDRFVRRFADALAHPKVSHELRVIWIDFLSKCDKSCGMKVANRLNVKPSM

SEQ ID NO: 19984 - protein, 41 aa, Sporobolus stapfianus
MDPTKFRPSSRHDVGVMTTNAGAPVWKDIEVMTVGPRGPYP

SEQ ID NO: 19985 - protein, 319 aa, Chlamydomonas sp. W80
MIGSKINAPRASMASRAAAPLRAAARPVRRLAVAPMAKASAATLAECQAECAALVKKASCAPILVRLAWHDSGNYDATTKTGGANGSIRFDPEMKHGGNAGLPLAVKLLEPIKKKFPDVGYADLFQMASATAIEVSGGPKIDMKYGRVDAADESAVPPEGRLPSAGAPFQEAQGPEPAKEAKDQSPQGHLRRVFGRMGLSDQDIVALSGAHTLGRAFKNRSGAAPLESTKFTKDGPGTKGGQSWTEEWLKFDNRYFTMLLEAEAGTCDPELLQLATDNALLTDPAFRPLVEKYAKDNAAFCADYAAAHKRLSELGSTFE

SEQ ID NO: 19986 - protein, 291 aa, Hordeum vulgare subsp. vulgare
MAAPVVDAEYLRQVDRARRAFRALIASKGCAPIMLRLAWHDAGTYDVNTRTGGANGSIRYEEEYTHGSNAGLKIAIDLLEPIKAKHPKITYADLHQLAGVVAVEVTGGPTVEFIPGRRDSSVCPREGRLPDAKKGAPHLRDIFYRMGLTDKDIVALSGGHSLGKAHPERSGFDGAWTRDPLKFDNSYFLELLKGESEGLLKLPTDKALLDDPEFRRYVELYAKDEDVFFKDYAESHKKLSELGFTPRSSGPASTKSDVSTAVVLAQSAVGVAVAAAVVIAGYLYEASKRSK

SEQ ID NO: 19987 - protein, 390 aa, Dichomitus squalens
MAFKLWSMLPLVALATVAVAAPSRQTVCSDGTVVPDSVCCEFVPLAQALQKEVLMGDCGEDAHELLRLTFHDAIAISRSKGPSAGGGADGSMLIFPTVEPAFFANLGIADSVNNLIPFLSQFPKISAGDLVQFAGAVAVGNCPGAPQLEFRAGRPNATAPAIEGLIPEPQNNITEILERFDDAGGFSPFEVVSLLASHTVARADHVDPTLDAAPFDSTPFTFDTQIFLEVLLKGVGFPGTGNNTGEVSSPLPVSSGTDVGELRLQSDFGLAHDERTACFWQGFVNEQEFMAQSFKAAMAKLAVLGHNADDLVDCSAVVPKPKPATGKPASFPATKGPKDLELSCTSKKFPTLTTDHGAQETLIPHCSNGSMNCTTVQFDGPATNFDGDDS

SEQ ID NO: 19988 - protein, 395 aa, Dichomitus squalens
MAFKWSSILALVTLATLASAAPTQSTVTCSDGTVVPDSVCCEFIPLREALNDQVIQSDCGEDAHELLRLTFHDAIAISQSLGPSAGGGADGSMLLFPTVEPAFFANLGIADSVNNLIPFMSQFPNISPGDLVQFAGAVAITNCPGAPQLEFLAGRPNGTAPAIDGLIPEPQDSIDDILARFDDAGGFTPFEVVSLLASHTVARADHVDPTLDAAPFDSTPFTFDTQIFLEVLLKGTGFPGTDNNTGEVASPIPVTNGTDVGELRLQSDFGLAHDSRTACFWQGFVNQQDFMAQSFKAAMAKLAVLGHNAADLVNCSAVIPTPLPATGKPATFPATLGPDDLELSCTTEPFPSLTTDPGAQETLIPHCSDGSMDCESVQFDGPATNFGGDDDDDDS

SEQ ID NO: 19989 - protein, 250 aa, Suaeda maritima subsp. salsa
MGKSYPTVSEENQKSIEKAKKKLRGLISEKHCAPIMLRLAWHSAGTFDVQSKTPGPFGTMRHQAELAHGANNGLDIALRLLEPIKEQFPEISFADFYQLAGVVAVEVTGGPEIPFHPGREDKPEPPQEGRLPDATKGCDHLRDVFIKQMGLTDQDIVALSGGHTLGRCHKDRSGFEGPWTPNPLVFDNSLLKELLSGEKDGLLQLPSDKALLADPVFRPLVEKYAADEDAFFADYSDAHLKLSELGFADA

SEQ ID NO: 19990 - protein, 751 aa, Geobacillus stearothermophilus
MENQNRQNAAQCPFHGSVTNQSSNRTTNKDWWPNQLNLSILHQHDRKTNPHDEEFNYAEEFQKLDYWALKEDLRKLMTESQDWWPADYGHYGPLFIRMAWHSAGTYRTGDGRGGASTGTQRFAPLNSWPNNANLDKARRLLWPIKKKYGNKISWADLFILAGNVAIESMGGKTIGFGGGRVDVWHPEEDVYWGSEKEWLASERYSGDRELENPLAAVQMGLTYVNPEGPDGKPDPKAAARDIRETFRRMGMNDEETVALIAGGHTFGKAHGAGPATHVGPEPEAAPIEAQGLGWISSYGKGKGSDTITSGIEGAWTPTPTQWDTSYFDMLFGYDWWLTKSPAGAWQWMAVDPDEKDLAPDAEDPSKKVPTMMMTTDLALRFDPEYEKIARRFHQNPEEFAEAFARAWFKLTHRDMGPKTRYLGPEVPKEDFIWQDPIPEVDYELTEAEIEEIKAKILNSGLTVSELVKTAWASASTFRNSDKRGGANGARIRLAPQKDWEVNEPERLAKVLSVYEDIQRELPKKVSIADLIVLGGSAAVEKAARDAGFDVKVPFFPGRGDATQEQTDVESFAVLEPFADGFRNYQKQEYSVPPEELLVDKAQLLGLTAPEMTVLVGGLRVLGANYRDLPHGVFTDRIGVLTNDFFVNLLDMNYEWVPTDSGIYEIRDRKTGEVRWTATRVDLIFGSNSILRSYAEFYAQDDNQEKFVRDFINAWVKVMNADRFDLVKKARESVTALQNIHGSRSKKVRVLQ

SEQ ID NO: 19991 - protein, 751 aa, Geobacillus stearothermophilus
MENQNRQNAAQCPFHGSVTNQSSNRTTNKDWWPNQLNLSILHQHDRKTNPHDEEFNYAEEFQKLDYWALKEDLRKLMTESQDWWPADYGHYGPLFIRMAWHSAGTYRTGDGRGGASTGTQRFAPLNSWPNNANLDKARRLLWPIKKKYGNKISWADLFILAGNVAIESMGGKTIGFGGGRVDVWHPEEDVYWGSEKEWLASERYSGDRELENPLAAVQMGLTYVNPEGPDGKPDPKAAARDIRETFRRMGMNDEETVALIAGGHTFGKAHGAGPATHVGPEPEAAPIEAQGLGWISSYGKGKGSDTITSGIEGAWTPTPTQWDTSYFDMLFGYDWWLTKSPAGAWQWMAVDPDEKDLAPDAEDPSKKVPTMMMTTDLALRFDPEYEKIARRFHQNPEEFAEAFARAWFKLTHRDMGPKTRYLGPEVPKEDFIWQDPIPEVDYELTEAEIEEIKAKILNSGLTVSELVKTAWASASTFRNSDKRGGANGARIRLAPQKDWEVNEPERLAKVLSVYEDIQRELPKKVSIADLIVLGGSAAVEKAARDAGFDVKVPFFPGRGDATQEQTDVESFAVLEPFADGFRNYQKQEYSVPPEELLVDKAQLLGLTAPEMTVLVGGLRVLGANYRDLPHGVFTDRIGVLTNDFFVNLLDMNYEWVPTDSGIYEIRDRKTGEVRWTATRVDLIFGSNSILRSYAEFYAQDDNQEKFVRDFINAWVKVMNADRFDLVKKARESVTALQTGDSDRSMKKTILQ

SEQ ID NO: 19992 - protein, 751 aa, Geobacillus stearothermophilus
MENQNRQNAAQCPFHGSVTNQSSNRTTNKDWWPNQLNLSILHQHDRKTNPHDEEFNYAEEFQKLDYWALKEDLRKLMTESQDWWPADYGHYGPLFIRMAWHSAGTYRTGDGRGGASTGTQRFAPLNSWPNNANLDKARRLLWPIKKKYGNKISWADLFILAGNVAIESMGGKTIGFGGGRVDVWHPEEDVYWGSEKEWLASERYSGDRELENPLAAVQMGLTYVNPEGPDGKPDPKAAARDIRETFRRMGMNDEETVALIAGGHTFGKAHGAGPATHVGPEPEAAPIEAQGLGWISSYGKGKGSDTITSGIEGAWTPTPTQWDTSYFDMLFGYDWWLTKSPAGAWQWMAVDPDEKDLAPDAEDPSKKVPTMMMTTDLALRFDPEYEKIARRFHQNPEEFAEAFARAWFKLTHRDMGPKTRYLGPEVPKEDFIWQDPIPEVDYELTEAEIEEIKAKILNSGLTVSELVKTAWASASTFRNSDKRGGANGARIRLAPQKDWEVNEPERLAKVLSVYEDIQRELPKKVSIADLIVLGGSAAVEKAARDAGFDVKVPFFPGRGDATQEQTDVESFAVLEPFADGFRNYQKQEYSVPPEELLVDKAQLLGLTAPEMTVLVGGLRVLGANYRDLPHGVFTDRIGVLTNDFFVNLLDMNYEWVPTDSGIYEIRDRKTGEVRWTATRVDLIFGSNSILRSYAEFYAQDDNQEKFVRDFINAWVKVMNADRFDLVKKARESVTALQILTGLRSVGAVVLQ

SEQ ID NO: 19993 - protein, 751 aa, Geobacillus stearothermophilus
MENQNRQNAAQCPFHGSVTNQSSNRTTNKDWWPNQLNLSILHQHDRKTNPHDEEFNYAEEFQKLDYWALKEDLRKLMTESQDWWPADYGHYGPLFIRMAWHSAGTYRTGDGRGGASTGTQRFAPLNSWPNNANLDKARRLLWPIKKKYGNKISWADLFILAGNVAIESMGGKTIGFGGGRVDVWHPEEDVYWGSEKEWLASERYSGDRELENPLAAVQMGLTYVNPEGPDGKPDPKAAARDIRETFRRMGMNDEETVALIAGGHTFGKAHGAGPATHVGPEPEAAPIEAQGLGWISSYGKGKGSDTITSGIEGAWTPTPTQWDTSYFDMLFGYDWWLTKSPAGAWQWMAVDPDEKDLAPDAEDPSKKVPTMMMTTDLALRFDPEYEKIARRFHQNPEEFAEAFARAWFKLTHRDMGPKTRYLGPEVPKEDFIWQDPIPEVDYELTEAEIEEIKAKILNSGLTVSELVKTAWASASTFRNSDKRGGANGARIRLAPQKDWEVNEPERLAKVLSVYEDIQRELPKKVSIADLIVLGGSAAVEKAARDAGFDVKVPFFPGRGDATQEQTDVESFAVLEPFADGFRNYQKQEYSVPPEELLVDKAQLLGLTAPEMTVLVGGLRVLGANYRDLPHGVFTDRIGVLTNDFFVNLLDMNYEWVPTDSGIYEIRDRKTGEVRWTATRVDLIFGSNSILRSYAEFYAQDDNQEKFVRDFINAWVKVMNADRFDLVKKARESVTALQGCSRSRSDVIEGLQ

SEQ ID NO: 19994 - protein, 751 aa, Geobacillus stearothermophilus
MENQNRQNAAQCPFHGSVTNQSSNRTTNKDWWPNQLNLSILHQHDRKTNPHDEEFNYAEEFQKLDYWALKEDLRKLMTESQDWWPADYGHYGPLFIRMAWHSAGTYRIGDGRGGASTGTQRFAPLNSWPDNANLDKARRLLWPIKKKYGNKISWADLFILAGNVAIESMGGKTIGFGGGRVDVWHPEEDVYWGSEKEWLASERYSGDRELENPLAAVQMGLIYVNPEGPDGKPDPKAAARDIRETFRRMGMNDEETVALIAGGHTFGKAHGAGPATHVGPEPEAAPIEAQGLGWISSYGKGKGSDTITSGIEGAWTPTPTQWDTSYFDMLFGYDWWLTKSPAGAWQWMAVDPDEKDLAPDAEDPSKKVPTMMMTTDLALRFDPEYEKIARRFHQNPEEFAEAFARAWFKLTHRDMGPKTRYLGPEVPKEDFIWQDPIPEVDYELTEAEIEEIKAKILNSGLTVSELVKTAWASASTFRNSDKRGGANGARIRLAPQKDWEVNEPERLAKVLSVYEDIQRELPKKVSIADLIVLGGSAAVEKAARDAGFDVKVPFFPGRGDATQEQTDVESFAVLEPFADGFRNYQKQEYSVPPEELLVDKAQLLGLTAPEMTVLVGGLRVLGANYRDLPHGVFTDRIGVLTNDFFVNLLDMNYEWVPTDSGIYEIRDRKTGEVRWTATRVDLIFGSNSILRSYAEFYAQDDNQEKFVRDFINAWVKVMNADRFDLVKKARESVTALQTSNRDRSNRDVTLQ

SEQ ID NO: 19995 - protein, 745 aa, Geobacillus stearothermophilus
MENQNRQNAAQCPFHGSVTNQSSNRTTNKDWWPNQLNLSILHQHDRKTNPHDEEFNYAEEFQKLDYWALKEDLRKLMTESQDWWPADYGHYGPLFIRMAWHSAGTYRIGDGRGGASTGTQRFAPLNSWPDNANLDKARRLLWPIKKKYGNKISWADLFILAGNVAIESMGGKTIGFGGGRVDVWHPEEDVYWGSEKEWLASERYSGDRELENPLAAVQMGLIYVNPEGPDGKPDPKAAARDIRETFRRMGMNDEETVALIAGGHTFGKAHGAGPATHVGPEPEAAPIEAQGLGWISSYGKGKGSDTITSGIEGAWTPTPTQWDTSYFDMLFGYDWWLTKSPAGAWQWMAVDPDEKDLAPDAEDPSKKVPTMMMTTDLALRFDPEYEKIARRFHQNPEEFAEAFARAWFKLTHRDMGPKTRYLGPEVPKEDFIWQDPIPEVDYELTEAEIEEIKAKILNSGLTVSELVKTAWASASTFRNSDKRGGANGARIRLAPQKDWEVNEPERLAKVLSVYEDIQRELPKKVSIADLIVLGGSAAVEKAARDAGFDVKVPFFPGRGDATQEQTDVESFAVLEPFADGFRNYQKQEYSVPPEELLVDKAQLLGLTAPEMTVLVGGLRVLGANYRDLPHGVFTDRIGVLTNDFFVNLLDMNYEWVPTDSGIYEIRDRKTGEVRWTATRVDLIFGSNSILRSYAEFYAQDDNQEKFVRDFINAWVKVMNADRFDLVKKARESVTALQSTFLRRSG

SEQ ID NO: 19996 - protein, 751 aa, Geobacillus stearothermophilus
MENQNRQNAAQCPFHGSVTNQSSNRTTNKDWWPNQLNLSILHQHDRKTNPHDEEFNYAEEFQKLDYWALKEDLRKLMTESQDWWPADYGHYGPLFIRMAWHSAGTYRIGDGRGGASTGTQRFAPLNSWPDNANLDKARRLLWPIKKKYGNKISWADLFILAGNVAIESMGGKTIGFGGGRVDVWHPEEDVYWGSEKEWLASERYSGDRELENPLAAVQMGLIYVNPEGPDGKPDPKAAARDIRETFRRMGMNDEETVALIAGGHTFGKAHGAGPATHVGPEPEAAPIEAQGLGWISSYGKGKGSDTITSGIEGAWTPTPTQWDTSYFDMLFGYDWWLTKSPAGAWQWMAVDPDEKDLAPDAEDPSKKVPTMMMTTDLALRFDPEYEKIARRFHQNPEEFAEAFARAWFKLTHRDMGPKTRYLGPEVPKEDFIWQDPIPEVDYELTEAEIEEIKAKILNSGLTVSELVKTAWASASTFRNSDKRGGANGARIRLAPQKDWEVNEPERLAKVLSVYEDIQRELPKKVSIADLIVLGGSAAVEKAARDAGFDVKVPFFPGRGDATQEQTDVESFAVLEPFADGFRNYQKQEYSVPPEELLVDKAQLLGLTAPEMTVLVGGLRVLGANYRDLPHGVFTDRIGVLTNDFFVNLLDMNYEWVPTDSGIYEIRDRKTGEVRWTATRVDLIFGSNSILRSYAEFYAQDDNQEKFVRDFINAWVKVMNADRFDLVKKARESVTALQCTTVSRSNEKAGLQ

SEQ ID NO: 19997 - protein, 751 aa, Geobacillus stearothermophilus
MENQNRQNAAQCPFHGSVTNQSSNRTTNKDWWPNQLNLSILHQHDRKTNPHDEEFNYAEEFQKLDYWALKEDLRKLMTESQDWWPADYGHYGPLFIRMAWHSAGTYRTGDGRGGASTGTQRFAPLNSWPNNANLDKARRLLWPIKKKYGNKISWADLFILAGNVAIESMGGKTIGFGGGRVDVWHPEEDVYWGSEKEWLASERYSGDRELENPLAAVQMGLTYVNPEGPDGKPDPKAAARDIRETFRRMGMNDEETVALIAGGHTFGKAHGAGPATHVGPEPEAAPIEAQGLGWISSYGKGKGSDTITSGIEGAWTPTPTQWDTSYFDMLFGYDWWLTKSPAGAWQWMAVDPDEKDLAPDAEDPSKKVPTMMMTTDLALRFDPEYEKIARRFHQNPEEFAEAFARAWFKLTHRDMGPKTRYLGPEVPKEDFIWQDPIPEVDYELTEAEIEEIKAKILNSGLTVSELVKTAWASASTFRNSDKRGGANGARIRLAPQKDWEVNEPERLAKVLSVYEDIQRELPKKVSIADLIVLGGSAAVEKAARDAGFDVKVPFFPGRGDATQEQTDVESFAVLEPFADGFRNYQKQEYSVPPEELLVDKAQLLGLTAPEMTVLVGGLRVLGANYRDLPHGVFTDRIGVLTNDFFVNLLDMNYEWVPTDSGIYEIRDRKTGEVRWTATRVDLIFGSNSILRSYAEFYAQDDNQEKFVRDFINAWVKVMNADRFDLVKKARESVTALQNIHGPRSGKKVNLQ

SEQ ID NO: 19998 - protein, 751 aa, Geobacillus stearothermophilus
MENQNRQNAAQCPFHGSVTNQSSNRTTNKDWWPNQLNLSILHQHDRKTNPHDEEFNYAEEFQKLDYWALKEDLRKLMTESQDWWPADYGHYGPLFIRMAWHSAGTYRIGDGRGGASTGTQRFAPLNSWPDNANLDKARRLLWPIKKKYGNKISWADLFILAGNVAIESMGGKTIGFGGGRVDVWHPEEDVYWGSEKEWLASERYSGDRELENPLAAVQMGLIYVNPEGPDGKPDPKAAARDIRETFRRMGMNDEETVALIAGGHTFGKAHGAGPATHVGPEPEAAPIEAQGLGWISSYGKGKGSDTITSGIEGAWTPTPTQWDTSYFDMLFGYDWWLTKSPAGAWQWMAVDPDEKDLAPDAEDPSKKVPTMMMTTDLALRFDPEYEKIARRFHQNPEEFAEAFARAWFKLTHRDMGPKTRYLGPEVPKEDFIWQDPIPEVDYELTEAEIEEIKAKILNSGLTVSELVKTAWASASTFRNSDKRGGANGARIRLAPQKDWEVNEPERLAKVLSVYEDIQRELPKKVSIADLIVLGGSAAVEKAARDAGFDVKVPFFPGRGDATQEQTDVESFAVLEPFADGFRNYQKQEYSVPPEELLVDKAQLLGLTAPEMTVLVGGLRVLGANYRDLPHGVFTDRIGVLTNDFFVNLLDMNYEWVPTDSGIYEIRDRKTGEVRWTATRVDLIFGSNSILRSYAEFYAQDDNQEKFVRDFINAWVKVMNADRFDLVKKARESVTALQPDNINRSTGTRKLQ

SEQ ID NO: 19999 - protein, 751 aa, Geobacillus stearothermophilus
MENQNRQNAAQCPFHGSVTNQSSNRTTNKDWWPNQLNLSILHQHDRKTNPHDEEFNYAEEFQKLDYWALKEDLRKLMTESQDWWPADYGHYGPLFIRMAWHSAGTYRTGDGRGGASTGTQRFAPLNSWPNNANLDKARRLLWPIKKKYGNKISWADLFILAGNVAIESMGGKTIGFGGGRVDVWHPEEDVYWGSEKEWLASERYSGDRELENPLAAVQMGLTYVNPEGPDGKPDPKAAARDIRETFRRMGMNDEETVALIAGGHTFGKAHGAGPATHVGPEPEAAPIEAQGLGWISSYGKGKGSDTITSGIEGAWTPTPTQWDTSYFDMLFGYDWWLTKSPAGAWQWMAVDPDEKDLAPDAEDPSKKVPTMMMTTDLALRFDPEYEKIARRFHQNPEEFAEAFARAWFKLTHRDMGPKTRYLGPEVPKEDFIWQDPIPEVDYELTEAEIEEIKAKILNSGLTVSELVKTAWASASTFRNSDKRGGANGARIRLAPQKDWEVNEPERLAKVLSVYEDIQRELPKKVSIADLIVLGGSAAVEKAARDAGFDVKVPFFPGRGDATQEQTDVESFAVLEPFADGFRNYQKQEYSVPPEELLVDKAQLLGLTAPEMTVLVGGLRVLGANYRDLPHGVFTDRIGVLTNDFFVNLLDMNYEWVPTDSGIYEIRDRKTGEVRWTATRVDLIFGSNSILRSYAEFYAQDDNQEKFVRDFINAWVKVMNADRFDLVKKARESVTALQFDTSTRSGSGENLQ

SEQ ID NO: 20000 - protein, 751 aa, Geobacillus stearothermophilus
MENQNRQNAAQCPFHGSVTNQSSNRTTNKDWWPNQLNLSILHQHDRKTNPHDEEFNYAEEFQKLDYWALKEDLRKLMTESQDWWPADYGHYGPLFIRMAWHSAGTYRIGDGRGGASTGTQRFAPLNSWPDNANLDKARRLLWPIKKKYGNKISWADLFILAGNVAIESMGGKTIGFGGGRVDVWHPEEDVYWGSEKEWLASERYSGDRELENPLAAVQMGLIYVNPEGPDGKPDPKAAARDIRETFRRMGMNDEETVALIAGGHTFGKAHGAGPATHVGPEPEAAPIEAQGLGWISSYGKGKGSDTITSGIEGAWTPTPTQWDTSYFDMLFGYDWWLTKSPAGAWQWMAVDPDEKDLAPDAEDPSKKVPTMMMTTDLALRFDPEYEKIARRFHQNPEEFAEAFARAWFKLTHRDMGPKTRYLGPEVPKEDFIWQDPIPEVDYELTEAEIEEIKAKILNSGLTVSELVKTAWASASTFRNSDKRGGANGARIRLAPQKDWEVNEPERLAKVLSVYEDIQRELPKKVSIADLIVLGGSAAVEKAARDAGFDVKVPFFPGRGDATQEQTDVESFAVLEPFADGFRNYQKQEYSVPPEELLVDKAQLLGLTAPEMTVLVGGLRVLGANYRDLPHGVFTDRIGVLTNDFFVNLLDMNYEWVPTDSGIYEIRDRKTGEVRWTATRVDLIFGSNSILRSYAEFYAQDDNQEKFVRDFINAWVKVMNADRFDLVKKARESVTALQDHSNVRSEVSDMLQ

SEQ ID NO: 20001 - protein, 735 aa, Geobacillus stearothermophilus
MENQNRQNAAQCPFHGSVTNQSSNRTTNKDWWPNQLNLSILHQHDRKTNPHDEEFNYAEEFQKLDYWALKEDLRKLMTESQDWWPADYGHYGPLFIRMAWHSAGTYRTGDGRGGASTGTQRFAPLNSWPNNANLDKARRLLWPIKKKYGNKISWADLFILAGNVAIESMGGKTIGFGGGRVDVWHPEEDVYWGSEKEWLASERYSGDRELENPLAAVQMGLTYVNPEGPDGKPDPKAAARDIRETFRRMGMNDEETVALIAGGHTFGKAHGAGPATHVGPEPEAAPIEAQGLGWISSYGKGKGSDTITSGIEGAWTPTPTQWDTSYFDMLFGYDWWLTKSPAGAWQWMAVDPDEKDLAPDAEDPSKKVPTMMMTTDLALRFDPEYEKIARRFHQNPEEFAEAFARAWFKLTHRDMGPKTRYLGPEVPKEDFIWQDPIPEVDYELTEAEIEEIKAKILNSGLTVSELVKTAWASASTFRNSDKRGGANGARIRLAPQKDWEVNEPERLAKVLSVYEDIQRELPKKVSIADLIVLGGSAAVEKAARDAGFDVKVPFFPGRGDATQEQTDVESFAVLEPFADGFRNYQKQEYSVPPEELLVDKAQLLGLTAPEMTVLVGGLRVLGANYRDLPHGVFTDRIGVLTNDFFVNLLDMNYEWVPTDSGIYEIRDRKTGEVRWTATRVDLIFGSNSILRSYAEFYAQDDNQEKFVRDFINAWVKVMNADRFDLVKKARESVTA

SEQ ID NO: 20002 - protein, 751 aa, Geobacillus stearothermophilus
MENQNRQNAAQCPFHGSVTNQSSNRTTNKDWWPNQLNLSILHQHDRKTNPHDEEFNYAEEFQKLDYWALKEDLRKLMTESQDWWPADYGHYGPLFIRMAWHSAGTYRIGDGRGGASTGTQRFAPLNSWPDNANLDKARRLLWPIKKKYGNKISWADLFILAGNVAIESMGGKTIGFGGGRVDVWHPEEDVYWGSEKEWLASERYSGDRELENPLAAVQMGLIYVNPEGPDGKPDPKAAARDIRETFRRMGMNDEETVALIAGGHTFGKAHGAGPATHVGPEPEAAPIEAQGLGWISSYGKGKGSDTITSGIEGAWTPTPTQWDTSYFDMLFGYDWWLTKSPAGAWQWMAVDPDEKDLAPDAEDPSKKVPTMMMTTDLALRFDPEYEKIARRFHQNPEEFAEAFARAWFKLTHRDMGPKTRYLGPEVPKEDFIWQDPIPEVDYELTEAEIEEIKAKILNSGLTVSELVKTAWASASTFRNSDKRGGANGARIRLAPQKDWEVNEPERLAKVLSVYEDIQRELPKKVSIADLIVLGGSAAVEKAARDAGFDVKVPFFPGRGDATQEQTDVESFAVLEPFADGFRNYQKQEYSVPPEELLVDKAQLLGLTAPEMTVLVGGLRVLGANYRDLPHGVFTDRIGVLTNDFFVNLLDMNYEWVPTDSGIYEIRDRKTGEVRWTATRVDLIFGSNSILRSYAEFYAQDDNQEKFVRDFINAWVKVMNADRFDLVKKARESVTALQGGNGVRSNIKGILQ

SEQ ID NO: 20003 - protein, 751 aa, Geobacillus stearothermophilus
MENQNRQNAAQCPFHGSVTNQSSNRTTNKDWWPNQLNLSILHQHDRKTNPHDEEFNYAEEFQKLDYWALKEDLRKLMTESQDWWPADYGHYGPLFIRMAWHSAGTYRTGDGRGGASTGTQRFAPLNSWPNNANLDKARRLLWPIKKKYGNKISWADLFILAGNVAIESMGGKTIGFGGGRVDVWHPEEDVYWGSEKEWLASERYSGDRELENPLAAVQMGLTYVNPEGPDGKPDPKAAARDIRETFRRMGMNDEETVALIAGGHTFGKAHGAGPATHVGPEPEAAPIEAQGLGWISSYGKGKGSDTITSGIEGAWTPTPTQWDTSYFDMLFGYDWWLTKSPAGAWQWMAVDPDEKDLAPDAEDPSKKVPTMMMTTDLALRFDPEYEKIARRFHQNPEEFAEAFARAWFKLTHRDMGPKTRYLGPEVPKEDFIWQDPIPEVDYELTEAEIEEIKAKILNSGLTVSELVKTAWASASTFRNSDKRGGANGARIRLAPQKDWEVNEPERLAKVLSVYEDIQRELPKKVSIADLIVLGGSAAVEKAARDAGFDVKVPFFPGRGDATQEQTDVESFAVLEPFADGFRNYQKQEYSVPPEELLVDKAQLLGLTAPEMTVLVGGLRVLGANYRDLPHGVFTDRIGVLTNDFFVNLLDMNYEWVPTDSGIYEIRDRKTGEVRWTATRVDLIFGSNSILRSYAEFYAQDDNQEKFVRDFINAWVKVMNADRFDLVKKARESVTALQGSIYNRSIKGEALQ

SEQ ID NO: 20004 - protein, 751 aa, Geobacillus stearothermophilus
MENQNRQNAAQCPFHGSVTNQSSNRTTNKDWWPNQLNLSILHQHDRKTNPHDEEFNYAEEFQKLDYWALKEDLRKLMTESQDWWPADYGHYGPLFIRMAWHSAGTYRTGDGRGGASTGTQRFAPLNSWPNNANLDKARRLLWPIKKKYGNKISWADLFILAGNVAIESMGGKTIGFGGGRVDVWHPEEDVYWGSEKEWLASERYSGDRELENPLAAVQMGLTYVNPEGPDGKPDPKAAARDIRETFRRMGMNDEETVALIAGGHTFGKAHGAGPATHVGPEPEAAPIEAQGLGWISSYGKGKGSDTITSGIEGAWTPTPTQWDTSYFDMLFGYDWWLTKSPAGAWQWMAVDPDEKDLAPDAEDPSKKVPTMMMTTDLALRFDPEYEKIARRFHQNPEEFAEAFARAWFKLTHRDMGPKTRYLGPEVPKEDFIWQDPIPEVDYELTEAEIEEIKAKILNSGLTVSELVKTAWASASTFRNSDKRGGANGARIRLAPQKDWEVNEPERLAKVLSVYEDIQRELPKKVSIADLIVLGGSAAVEKAARDAGFDVKVPFFPGRGDATQEQTDVESFAVLEPFADGFRNYQKQEYSVPPEELLVDKAQLLGLTAPEMTVLVGGLRVLGANYRDLPHGVFTDRIGVLTNDFFVNLLDMNYEWVPTDSGIYEIRDRKTGEVRWTATRVDLIFGSNSILRSYAEFYAQDDNQEKFVRDFINAWVKVMNADRFDLVKKARESVTALQYVRSHRSNGGRGLQ

SEQ ID NO: 20005 - protein, 751 aa, Geobacillus stearothermophilus
MENQNRQNAAQCPFHGSVTNQSSNRTTNKDWWPNQLNLSILHQHDRKTNPHDEEFNYAEEFQKLDYWALKEDLRKLMTESQDWWPADYGHYGPLFIRMAWHSAGTYRIGDGRGGASTGTQRFAPLNSWPDNANLDKARRLLWPIKKKYGNKISWADLFILAGNVAIESMGGKTIGFGGGRVDVWHPEEDVYWGSEKEWLASERYSGDRELENPLAAVQMGLIYVNPEGPDGKPDPKAAARDIRETFRRMGMNDEETVALIAGGHTFGKAHGAGPATHVGPEPEAAPIEAQGLGWISSYGKGKGSDTITSGIEGAWTPTPTQWDTSYFDMLFGYDWWLTKSPAGAWQWMAVDPDEKDLAPDAEDPSKKVPTMMMTTDLALRFDPEYEKIARRFHQNPEEFAEAFARAWFKLTHRDMGPKTRYLGPEVPKEDFIWQDPIPEVDYELTEAEIEEIKAKILNSGLTVSELVKTAWASASTFRNSDKRGGANGARIRLAPQKDWEVNEPERLAKVLSVYEDIQRELPKKVSIADLIVLGGSAAVEKAARDAGFDVKVPFFPGRGDATQEQTDVESFAVLEPFADGFRNYQKQEYSVPPEELLVDKAQLLGLTAPEMTVLVGGLRVLGANYRDLPHGVFTDRIGVLTNDFFVNLLDMNYEWVPTDSGIYEIRDRKTGEVRWTATRVDLIFGSNSILRSYAEFYAQDDNQEKFVRDFINAWVKVMNADRFDLVKKARESVTALQPYSFIRSEGSAGLQ

SEQ ID NO: 20006 - protein, 746 aa, Geobacillus stearothermophilus
MENQNRQNAAQCPFHGSVTNQSSNRTTNKDWWPNQLNLSILHQHDRKTNPHDEEFNYAEEFQKLDYWALKEDLRKLMTESQDWWPADYGHYGPLFIRMAWHSAGTYRIGDGRGGASTGTQRFAPLNSWPDNANLDKARRLLWPIKKKYGNKISWADLFILAGNVAIESMGGKTIGFGGGRVDVWHPEEDVYWGSEKEWLASERYSGDRELENPLAAVQMGLIYVNPEGPDGKPDPKAAARDIRETFRRMGMNDEETVALIAGGHTFGKAHGAGPATHVGPEPEAAPIEAQGLGWISSYGKGKGSDTITSGIEGAWTPTPTQWDTSYFDMLFGYDWWLTKSPAGAWQWMAVDPDEKDLAPDAEDPSKKVPTMMMTTDLALRFDPEYEKIARRFHQNPEEFAEAFARAWFKLTHRDMGPKTRYLGPEVPKEDFIWQDPIPEVDYELTEAEIEEIKAKILNSGLTVSELVKTAWASASTFRNSDKRGGANGARIRLAPQKDWEVNEPERLAKVLSVYEDIQRELPKKVSIADLIVLGGSAAVEKAARDAGFDVKVPFFPGRGDATQEQTDVESFAVLEPFADGFRNYQKQEYSVPPEELLVDKAQLLGLTAPEMTVLVGGLRVLGANYRDLPHGVFTDRIGVLTNDFFVNLLDMNYEWVPTDSGIYEIRDRKTGEVRWTATRVDLIFGSNSILRSYAEFYAQDDNQEKFVRDFINAWVKVMNADRFDLVKKARESVTALQLSGIIDLTG

SEQ ID NO: 20007 - protein, 751 aa, Geobacillus stearothermophilus
MENQNRQNAAQCPFHGSVTNQSSNRTTNKDWWPNQLNLSILHQHDRKTNPHDEEFNYAEEFQKLDYWALKEDLRKLMTESQDWWPADYGHYGPLFIRMAWHSAGTYRTGDGRGGASTGTQRFAPLNSWPNNANLDKARRLLWPIKKKYGNKISWADLFILAGNVAIESMGGKTIGFGGGRVDVWHPEEDVYWGSEKEWLASERYSGDRELENPLAAVQMGLTYVNPEGPDGKPDPKAAARDIRETFRRMGMNDEETVALIAGGHTFGKAHGAGPATHVGPEPEAAPIEAQGLGWISSYGKGKGSDTITSGIEGAWTPTPTQWDTSYFDMLFGYDWWLTKSPAGAWQWMAVDPDEKDLAPDAEDPSKKVPTMMMTTDLALRFDPEYEKIARRFHQNPEEFAEAFARAWFKLTHRDMGPKTRYLGPEVPKEDFIWQDPIPEVDYELTEAEIEEIKAKILNSGLTVSELVKTAWASASTFRNSDKRGGANGARIRLAPQKDWEVNEPERLAKVLSVYEDIQRELPKKVSIADLIVLGGSAAVEKAARDAGFDVKVPFFPGRGDATQEQTDVESFAVLEPFADGFRNYQKQEYSVPPEELLVDKAQLLGLTAPEMTVLVGGLRVLGANYRDLPHGVFTDRIGVLTNDFFVNLLDMNYEWVPTDSGIYEIRDRKTGEVRWTATRVDLIFGSNSILRSYAEFYAQDDNQEKFVRDFINAWVKVMNADRFDLVKKARESVTALQDALSYRSNTAVRLQ

SEQ ID NO: 20008 - protein, 751 aa, Geobacillus stearothermophilus
MENQNRQNAAQCPFHGSVTNQSSNRTTNKDWWPNQLNLSILHQHDRKTNPHDEEFNYAEEFQKLDYWALKEDLRKLMTESQDWWPADYGHYGPLFIRMAWHSAGTYRTGDGRGGASTGTQRFAPLNSWPNNANLDKARRLLWPIKKKYGNKISWADLFILAGNVAIESMGGKTIGFGGGRVDVWHPEEDVYWGSEKEWLASERYSGDRELENPLAAVQMGLTYVNPEGPDGKPDPKAAARDIRETFRRMGMNDEETVALIAGGHTFGKAHGAGPATHVGPEPEAAPIEAQGLGWISSYGKGKGSDTITSGIEGAWTPTPTQWDTSYFDMLFGYDWWLTKSPAGAWQWMAVDPDEKDLAPDAEDPSKKVPTMMMTTDLALRFDPEYEKIARRFHQNPEEFAEAFARAWFKLTHRDMGPKTRYLGPEVPKEDFIWQDPIPEVDYELTEAEIEEIKAKILNSGLTVSELVKTAWASASTFRNSDKRGGANGARIRLAPQKDWEVNEPERLAKVLSVYEDIQRELPKKVSIADLIVLGGSAAVEKAARDAGFDVKVPFFPGRGDATQEQTDVESFAVLEPFADGFRNYQKQEYSVPPEELLVDKAQLLGLTAPEMTVLVGGLRVLGANYRDLPHGVFTDRIGVLTNDFFVNLLDMNYEWVPTDSGIYEIRDRKTGEVRWTATRVDLIFGSNSILRSYAEFYAQDDNQEKFVRDFINAWVKVMNADRFDLVKKARESVTALQDYTNIRSGGVDTLQ

SEQ ID NO: 20009 - protein, 751 aa, Geobacillus stearothermophilus
MENQNRQNAAQCPFHGSVTNQSSNRTTNKDWWPNQLNLSILHQHDRKTNPHDEEFNYAEEFQKLDYWALKEDLRKLMTESQDWWPADYGHYGPLFIRMAWHSAGTYRIGDGRGGASTGTQRFAPLNSWPDNANLDKARRLLWPIKKKYGNKISWADLFILAGNVAIESMGGKTIGFGGGRVDVWHPEEDVYWGSEKEWLASERYSGDRELENPLAAVQMGLIYVNPEGPDGKPDPKAAARDIRETFRRMGMNDEETVALIAGGHTFGKAHGAGPATHVGPEPEAAPIEAQGLGWISSYGKGKGSDTITSGIEGAWTPTPTQWDTSYFDMLFGYDWWLTKSPAGAWQWMAVDPDEKDLAPDAEDPSKKVPTMMMTTDLALRFDPEYEKIARRFHQNPEEFAEAFARAWFKLTHRDMGPKTRYLGPEVPKEDFIWQDPIPEVDYELTEAEIEEIKAKILNSGLTVSELVKTAWASASTFRNSDKRGGANGARIRLAPQKDWEVNEPERLAKVLSVYEDIQRELPKKVSIADLIVLGGSAAVEKAARDAGFDVKVPFFPGRGDATQEQTDVESFAVLEPFADGFRNYQKQEYSVPPEELLVDKAQLLGLTAPEMTVLVGGLRVLGANYRDLPHGVFTDRIGVLTNDFFVNLLDMNYEWVPTDSGIYEIRDRKTGEVRWTATRVDLIFGSNSILRSYAEFYAQDDNQEKFVRDFINAWVKVMNADRFDLVKKARESVTALQIDDYNRSKDNINLQ

SEQ ID NO: 20010 - protein, 751 aa, Geobacillus stearothermophilus
MENQNRQNAAQCPFHGSVTNQSSNRTTNKDWWPNQLNLSILHQHDRKTNPHDEEFNYAEEFQKLDYWALKEDLRKLMTESQDWWPADYGHYGPLFIRMAWHSAGTYRIGDGRGGASTGTQRFAPLNSWPDNANLDKARRLLWPIKKKYGNKISWADLFILAGNVAIESMGGKTIGFGGGRVDVWHPEEDVYWGSEKEWLASERYSGDRELENPLAAVQMGLIYVNPEGPDGKPDPKAAARDIRETFRRMGMNDEETVALIAGGHTFGKAHGAGPATHVGPEPEAAPIEAQGLGWISSYGKGKGSDTITSGIEGAWTPTPTQWDTSYFDMLFGYDWWLTKSPAGAWQWMAVDPDEKDLAPDAEDPSKKVPTMMMTTDLALRFDPEYEKIARRFHQNPEEFAEAFARAWFKLTHRDMGPKTRYLGPEVPKEDFIWQDPIPEVDYELTEAEIEEIKAKILNSGLTVSELVKTAWASASTFRNSDKRGGANGARIRLAPQKDWEVNEPERLAKVLSVYEDIQRELPKKVSIADLIVLGGSAAVEKAARDAGFDVKVPFFPGRGDATQEQTDVESFAVLEPFADGFRNYQKQEYSVPPEELLVDKAQLLGLTAPEMTVLVGGLRVLGANYRDLPHGVFTDRIGVLTNDFFVNLLDMNYEWVPTDSGIYEIRDRKTGEVRWTATRVDLIFGSNSILRSYAEFYAQDDNQEKFVRDFINAWVKVMNADRFDLVKKARESVTALQVTIFYRSAAGEELQ

SEQ ID NO: 20011 - protein, 751 aa, Geobacillus stearothermophilus
MENQNRQNAAQCPFHGSVTNQSSNRTTNKDWWPNQLNLSILHQHDRKTNPHDEEFNYAEEFQKLDYWALKEDLRKLMTESQDWWPADYGHYGPLFIRMAWHSAGTYRIGDGRGGASTGTQRFAPLNSWPDNANLDKARRLLWPIKKKYGNKISWADLFILAGNVAIESMGGKTIGFGGGRVDVWHPEEDVYWGSEKEWLASERYSGDRELENPLAAVQMGLIYVNPEGPDGKPDPKAAARDIRETFRRMGMNDEETVALIAGGHTFGKAHGAGPATHVGPEPEAAPIEAQGLGWISSYGKGKGSDTITSGIEGAWTPTPTQWDTSYFDMLFGYDWWLTKSPAGAWQWMAVDPDEKDLAPDAEDPSKKVPTMMMTTDLALRFDPEYEKIARRFHQNPEEFAEAFARAWFKLTHRDMGPKTRYLGPEVPKEDFIWQDPIPEVDYELTEAEIEEIKAKILNSGLTVSELVKTAWASASTFRNSDKRGGANGARIRLAPQKDWEVNEPERLAKVLSVYEDIQRELPKKVSIADLIVLGGSAAVEKAARDAGFDVKVPFFPGRGDATQEQTDVESFAVLEPFADGFRNYQKQEYSVPPEELLVDKAQLLGLTAPEMTVLVGGLRVLGANYRDLPHGVFTDRIGVLTNDFFVNLLDMNYEWVPTDSGIYEIRDRKTGEVRWTATRVDLIFGSNSILRSYAEFYAQDDNQEKFVRDFINAWVKVMNADRFDLVKKARESVTALQNNSYRRSENDGDLQ

SEQ ID NO: 20012 - protein, 754 aa, Geobacillus stearothermophilus
MENQNRQNAAQCPFHGSVTNQSSNRTTNKDWWPNQLNLSILHQHDRKTNPHDEEFNYAEEFQKLDYWALKEDLRKLMTESQDWWPADYGHYGPLFIRMAWHSAGTYRIGDGRGGASTGTQRFAPLNSWPDNANLDKARRLLWPIKKKYGNKISWADLFILAGNVAIESMGGKTIGFGGGRVDVWHPEEDVYWGSEKEWLASERYSGDRELENPLAAVQMGLIYVNPEGPDGKPDPKAAARDIRETFRRMGMNDEETVALIAGGHTFGKAHGAGPATHVGPEPEAAPIEAQGLGWISSYGKGKGSDTITSGIEGAWTPTPTQWDTSYFDMLFGYDWWLTKSPAGAWQWMAVDPDEKDLAPDAEDPSKKVPTMMMTTDLALRFDPEYEKIARRFHQNPEEFAEAFARAWFKLTHRDMGPKTRYLGPEVPKEDFIWQDPIPEVDYELTEAEIEEIKAKILNSGLTVSELVKTAWASASTFRNSDKRGGANGARIRLAPQKDWEVNEPERLAKVLSVYEDIQRELPKKVSIADLIVLGGSAAVEKAARDAGFDVKVPFFPGRGDATQEQTDVESFAVLEPFADGFRNYQKQEYSVPPEELLVDKAQLLGLTAPEMTVLVGGLRVLGANYRDLPHGVFTDRIGVLTNDFFVNLLDMNYEWVPTDSGIYEIRDRKTGEVRWTATRVDLIFGSNSILRSYAEFYAQDDNQEKFVRDFINAWVKVMNADRFDLVKKARESVTALQSYTTPFLDLRLVLNCSK

SEQ ID NO: 20013 - protein, 751 aa, Geobacillus stearothermophilus
MENQNRQNAAQCPFHGSVTNQSSNRTTNKDWWPNQLNLSILHQHDRKTNPHDEEFNYAEEFQKLDYWALKEDLRKLMTESQDWWPADYGHYGPLFIRMAWHSAGTYRTGDGRGGASTGTQRFAPLNSWPNNANLDKARRLLWPIKKKYGNKISWADLFILAGNVAIESMGGKTIGFGGGRVDVWHPEEDVYWGSEKEWLASERYSGDRELENPLAAVQMGLTYVNPEGPDGKPDPKAAARDIRETFRRMGMNDEETVALIAGGHTFGKAHGAGPATHVGPEPEAAPIEAQGLGWISSYGKGKGSDTITSGIEGAWTPTPTQWDTSYFDMLFGYDWWLTKSPAGAWQWMAVDPDEKDLAPDAEDPSKKVPTMMMTTDLALRFDPEYEKIARRFHQNPEEFAEAFARAWFKLTHRDMGPKTRYLGPEVPKEDFIWQDPIPEVDYELTEAEIEEIKAKILNSGLTVSELVKTAWASASTFRNSDKRGGANGARIRLAPQKDWEVNEPERLAKVLSVYEDIQRELPKKVSIADLIVLGGSAAVEKAARDAGFDVKVPFFPGRGDATQEQTDVESFAVLEPFADGFRNYQKQEYSVPPEELLVDKAQLLGLTAPEMTVLVGGLRVLGANYRDLPHGVFTDRIGVLTNDFFVNLLDMNYEWVPTDSGIYEIRDRKTGEVRWTATRVDLIFGSNSILRSYAEFYAQDDNQEKFVRDFINAWVKVMNADRFDLVKKARESVTALQTPRYVRSRDGNELQ

SEQ ID NO: 20014 - protein, 753 aa, Geobacillus stearothermophilus
MENQNRQNAAQCPFHGSVTNQSSNRTTNKDWWPNQLNLSILHQHDRKTNPHDEEFNYAEEFQKLDYWALKEDLRKLMTESQDWWPADYGHYGPLFIRMAWHSAGTYRIGDGRGGASTGTQRFAPLNSWPDNANLDKARRLLWPIKKKYGNKISWADLFILAGNVAIESMGGKTIGFGGGRVDVWHPEEDVYWGSEKEWLASERYSGDRELENPLAAVQMGLIYVNPEGPDGKPDPKAAARDIRETFRRMGMNDEETVALIAGGHTFGKAHGAGPATHVGPEPEAAPIEAQGLGWISSYGKGKGSDTITSGIEGAWTPTPTQWDTSYFDMLFGYDWWLTKSPAGAWQWMAVDPDEKDLAPDAEDPSKKVPTMMMTTDLALRFDPEYEKIARRFHQNPEEFAEAFARAWFKLTHRDMGPKTRYLGPEVPKEDFIWQDPIPEVDYELTEAEIEEIKAKILNSGLTVSELVKTAWASASTFRNSDKRGGANGARIRLAPQKDWEVNEPERLAKVLSVYEDIQRELPKKVSIADLIVLGGSAAVEKAARDAGFDVKVPFFPGRGDATQEQTDVESFAVLEPFADGFRNYQKQEYSVPPEELLVDKAQLLGLTAPEMTVLVGGLRVLGANYRDLPHGVFTDRIGVLTNDFFVNLLDMNYEWVPTDSGIYEIRDRKTGEVRWTATRVDLIFGSNSILRSYAEFYAQDDNQEKFVRDFINAWVKVMNADRFDLVKKARESVTALQALDNTDLRGGCTAVSK

SEQ ID NO: 20015 - protein, 751 aa, Geobacillus stearothermophilus
MENQNRQNAAQCPFHGSVTNQSSNRTTNKDWWPNQLNLSILHQHDRKTNPHDEEFNYAEEFQKLDYWALKEDLRKLMTESQDWWPADYGHYGPLFIRMAWHSAGTYRIGDGRGGASTGTQRFAPLNSWPDNANLDKARRLLWPIKKKYGNKISWADLFILAGNVAIESMGGKTIGFGGGRVDVWHPEEDVYWGSEKEWLASERYSGDRELENPLAAVQMGLIYVNPEGPDGKPDPKAAARDIRETFRRMGMNDEETVALIAGGHTFGKAHGAGPATHVGPEPEAAPIEAQGLGWISSYGKGKGSDTITSGIEGAWTPTPTQWDTSYFDMLFGYDWWLTKSPAGAWQWMAVDPDEKDLAPDAEDPSKKVPTMMMTTDLALRFDPEYEKIARRFHQNPEEFAEAFARAWFKLTHRDMGPKTRYLGPEVPKEDFIWQDPIPEVDYELTEAEIEEIKAKILNSGLTVSELVKTAWASASTFRNSDKRGGANGARIRLAPQKDWEVNEPERLAKVLSVYEDIQRELPKKVSIADLIVLGGSAAVEKAARDAGFDVKVPFFPGRGDATQEQTDVESFAVLEPFADGFRNYQKQEYSVPPEELLVDKAQLLGLTAPEMTVLVGGLRVLGANYRDLPHGVFTDRIGVLTNDFFVNLLDMNYEWVPTDSGIYEIRDRKTGEVRWTATRVDLIFGSNSILRSYAEFYAQDDNQEKFVRDFINAWVKVMNADRFDLVKKARESVTALQTYCYPRSKSKENLQ

SEQ ID NO: 20016 - protein, 751 aa, Geobacillus stearothermophilus
MENQNRQNAAQCPFHGSVTNQSSNRTTNKDWWPNQLNLSILHQHDRKTNPHDEEFNYAEEFQKLDYWALKEDLRKLMTESQDWWPADYGHYGPLFIRMAWHSAGTYRTGDGRGGASTGTQRFAPLNSWPNNANLDKARRLLWPIKKKYGNKISWADLFILAGNVAIESMGGKTIGFGGGRVDVWHPEEDVYWGSEKEWLASERYSGDRELENPLAAVQMGLTYVNPEGPDGKPDPKAAARDIRETFRRMGMNDEETVALIAGGHTFGKAHGAGPATHVGPEPEAAPIEAQGLGWISSYGKGKGSDTITSGIEGAWTPTPTQWDTSYFDMLFGYDWWLTKSPAGAWQWMAVDPDEKDLAPDAEDPSKKVPTMMMTTDLALRFDPEYEKIARRFHQNPEEFAEAFARAWFKLTHRDMGPKTRYLGPEVPKEDFIWQDPIPEVDYELTEAEIEEIKAKILNSGLTVSELVKTAWASASTFRNSDKRGGANGARIRLAPQKDWEVNEPERLAKVLSVYEDIQRELPKKVSIADLIVLGGSAAVEKAARDAGFDVKVPFFPGRGDATQEQTDVESFAVLEPFADGFRNYQKQEYSVPPEELLVDKAQLLGLTAPEMTVLVGGLRVLGANYRDLPHGVFTDRIGVLTNDFFVNLLDMNYEWVPTDSGIYEIRDRKTGEVRWTATRVDLIFGSNSILRSYAEFYAQDDNQEKFVRDFINAWVKVMNADRFDLVKKARESVTALQDCYSVRSNDANTLQ

SEQ ID NO: 20017 - protein, 751 aa, Geobacillus stearothermophilus
MENQNRQNAAQCPFHGSVTNQSSNRTTNKDWWPNQLNLSILHQHDRKTNPHDEEFNYAEEFQKLDYWALKEDLRKLMTESQDWWPADYGHYGPLFIRMAWHSAGTYRTGDGRGGASTGTQRFAPLNSWPNNANLDKARRLLWPIKKKYGNKISWADLFILAGNVAIESMGGKTIGFGGGRVDVWHPEEDVYWGSEKEWLASERYSGDRELENPLAAVQMGLTYVNPEGPDGKPDPKAAARDIRETFRRMGMNDEETVALIAGGHTFGKAHGAGPATHVGPEPEAAPIEAQGLGWISSYGKGKGSDTITSGIEGAWTPTPTQWDTSYFDMLFGYDWWLTKSPAGAWQWMAVDPDEKDLAPDAEDPSKKVPTMMMTTDLALRFDPEYEKIARRFHQNPEEFAEAFARAWFKLTHRDMGPKTRYLGPEVPKEDFIWQDPIPEVDYELTEAEIEEIKAKILNSGLTVSELVKTAWASASTFRNSDKRGGANGARIRLAPQKDWEVNEPERLAKVLSVYEDIQRELPKKVSIADLIVLGGSAAVEKAARDAGFDVKVPFFPGRGDATQEQTDVESFAVLEPFADGFRNYQKQEYSVPPEELLVDKAQLLGLTAPEMTVLVGGLRVLGANYRDLPHGVFTDRIGVLTNDFFVNLLDMNYEWVPTDSGIYEIRDRKTGEVRWTATRVDLIFGSNSILRSYAEFYAQDDNQEKFVRDFINAWVKVMNADRFDLVKKARESVTALQNSFVCRSVGTIDLQ

SEQ ID NO: 20018 - protein, 751 aa, Geobacillus stearothermophilus
MENQNRQNAAQCPFHGSVTNQSSNRTTNKDWWPNQLNLSILHQHDRKTNPHDEEFNYAEEFQKLDYWALKEDLRKLMTESQDWWPADYGHYGPLFIRMAWHSAGTYRIGDGRGGASTGTQRFAPLNSWPDNANLDKARRLLWPIKKKYGNKISWADLFILAGNVAIESMGGKTIGFGGGRVDVWHPEEDVYWGSEKEWLASERYSGDRELENPLAAVQMGLIYVNPEGPDGKPDPKAAARDIRETFRRMGMNDEETVALIAGGHTFGKAHGAGPATHVGPEPEAAPIEAQGLGWISSYGKGKGSDTITSGIEGAWTPTPTQWDTSYFDMLFGYDWWLTKSPAGAWQWMAVDPDEKDLAPDAEDPSKKVPTMMMTTDLALRFDPEYEKIARRFHQNPEEFAEAFARAWFKLTHRDMGPKTRYLGPEVPKEDFIWQDPIPEVDYELTEAEIEEIKAKILNSGLTVSELVKTAWASASTFRNSDKRGGANGARIRLAPQKDWEVNEPERLAKVLSVYEDIQRELPKKVSIADLIVLGGSAAVEKAARDAGFDVKVPFFPGRGDATQEQTDVESFAVLEPFADGFRNYQKQEYSVPPEELLVDKAQLLGLTAPEMTVLVGGLRVLGANYRDLPHGVFTDRIGVLTNDFFVNLLDMNYEWVPTDSGIYEIRDRKTGEVRWTATRVDLIFGSNSILRSYAEFYAQDDNQEKFVRDFINAWVKVMNADRFDLVKKARESVTALQDCSIIRSDVTNKLQ

SEQ ID NO: 20019 - protein, 751 aa, Geobacillus stearothermophilus
MENQNRQNAAQCPFHGSVTNQSSNRTTNKDWWPNQLNLSILHQHDRKTNPHDEEFNYAEEFQKLDYWALKEDLRKLMTESQDWWPADYGHYGPLFIRMAWHSAGTYRTGDGRGGASTGTQRFAPLNSWPNNANLDKARRLLWPIKKKYGNKISWADLFILAGNVAIESMGGKTIGFGGGRVDVWHPEEDVYWGSEKEWLASERYSGDRELENPLAAVQMGLTYVNPEGPDGKPDPKAAARDIRETFRRMGMNDEETVALIAGGHTFGKAHGAGPATHVGPEPEAAPIEAQGLGWISSYGKGKGSDTITSGIEGAWTPTPTQWDTSYFDMLFGYDWWLTKSPAGAWQWMAVDPDEKDLAPDAEDPSKKVPTMMMTTDLALRFDPEYEKIARRFHQNPEEFAEAFARAWFKLTHRDMGPKTRYLGPEVPKEDFIWQDPIPEVDYELTEAEIEEIKAKILNSGLTVSELVKTAWASASTFRNSDKRGGANGARIRLAPQKDWEVNEPERLAKVLSVYEDIQRELPKKVSIADLIVLGGSAAVEKAARDAGFDVKVPFFPGRGDATQEQTDVESFAVLEPFADGFRNYQKQEYSVPPEELLVDKAQLLGLTAPEMTVLVGGLRVLGANYRDLPHGVFTDRIGVLTNDFFVNLLDMNYEWVPTDSGIYEIRDRKTGEVRWTATRVDLIFGSNSILRSYAEFYAQDDNQEKFVRDFINAWVKVMNADRFDLVKKARESVTALQTGFYHRSSTKVSLQ

SEQ ID NO: 20020 - protein, 751 aa, Geobacillus stearothermophilus
MENQNRQNAAQCPFHGSVTNQSSNRTTNKDWWPNQLNLSILHQHDRKTNPHDEEFNYAEEFQKLDYWALKEDLRKLMTESQDWWPADYGHYGPLFIRMAWHSAGTYRIGDGRGGASTGTQRFAPLNSWPDNANLDKARRLLWPIKKKYGNKISWADLFILAGNVAIESMGGKTIGFGGGRVDVWHPEEDVYWGSEKEWLASERYSGDRELENPLAAVQMGLIYVNPEGPDGKPDPKAAARDIRETFRRMGMNDEETVALIAGGHTFGKAHGAGPATHVGPEPEAAPIEAQGLGWISSYGKGKGSDTITSGIEGAWTPTPTQWDTSYFDMLFGYDWWLTKSPAGAWQWMAVDPDEKDLAPDAEDPSKKVPTMMMTTDLALRFDPEYEKIARRFHQNPEEFAEAFARAWFKLTHRDMGPKTRYLGPEVPKEDFIWQDPIPEVDYELTEAEIEEIKAKILNSGLTVSELVKTAWASASTFRNSDKRGGANGARIRLAPQKDWEVNEPERLAKVLSVYEDIQRELPKKVSIADLIVLGGSAAVEKAARDAGFDVKVPFFPGRGDATQEQTDVESFAVLEPFADGFRNYQKQEYSVPPEELLVDKAQLLGLTAPEMTVLVGGLRVLGANYRDLPHGVFTDRIGVLTNDFFVNLLDMNYEWVPTDSGIYEIRDRKTGEVRWTATRVDLIFGSNSILRSYAEFYAQDDNQEKFVRDFINAWVKVMNADRFDLVKKARESVTALQFNSSIRSIITKALQ

SEQ ID NO: 20021 - protein, 751 aa, Geobacillus stearothermophilus
MENQNRQNAAQCPFHGSVTNQSSNRTTNKDWWPNQLNLSILHQHDRKTNPHDEEFNYAEEFQKLDYWALKEDLRKLMTESQDWWPADYGHYGPLFIRMAWHSAGTYRIGDGRGGASTGTQRFAPLNSWPDNANLDKARRLLWPIKKKYGNKISWADLFILAGNVAIESMGGKTIGFGGGRVDVWHPEEDVYWGSEKEWLASERYSGDRELENPLAAVQMGLIYVNPEGPDGKPDPKAAARDIRETFRRMGMNDEETVALIAGGHTFGKAHGAGPATHVGPEPEAAPIEAQGLGWISSYGKGKGSDTITSGIEGAWTPTPTQWDTSYFDMLFGYDWWLTKSPAGAWQWMAVDPDEKDLAPDAEDPSKKVPTMMMTTDLALRFDPEYEKIARRFHQNPEEFAEAFARAWFKLTHRDMGPKTRYLGPEVPKEDFIWQDPIPEVDYELTEAEIEEIKAKILNSGLTVSELVKTAWASASTFRNSDKRGGANGARIRLAPQKDWEVNEPERLAKVLSVYEDIQRELPKKVSIADLIVLGGSAAVEKAARDAGFDVKVPFFPGRGDATQEQTDVESFAVLEPFADGFRNYQKQEYSVPPEELLVDKAQLLGLTAPEMTVLVGGLRVLGANYRDLPHGVFTDRIGVLTNDFFVNLLDMNYEWVPTDSGIYEIRDRKTGEVRWTATRVDLIFGSNSILRSYAEFYAQDDNQEKFVRDFINAWVKVMNADRFDLVKKARESVTALQFNISSRSVSSGNLQ

SEQ ID NO: 20022 - protein, 751 aa, Geobacillus stearothermophilus
MENQNRQNAAQCPFHGSVTNQSSNRTTNKDWWPNQLNLSILHQHDRKTNPHDEEFNYAEEFQKLDYWALKEDLRKLMTESQDWWPADYGHYGPLFIRMAWHSAGTYRTGDGRGGASTGTQRFAPLNSWPNNANLDKARRLLWPIKKKYGNKISWADLFILAGNVAIESMGGKTIGFGGGRVDVWHPEEDVYWGSEKEWLASERYSGDRELENPLAAVQMGLTYVNPEGPDGKPDPKAAARDIRETFRRMGMNDEETVALIAGGHTFGKAHGAGPATHVGPEPEAAPIEAQGLGWISSYGKGKGSDTITSGIEGAWTPTPTQWDTSYFDMLFGYDWWLTKSPAGAWQWMAVDPDEKDLAPDAEDPSKKVPTMMMTTDLALRFDPEYEKIARRFHQNPEEFAEAFARAWFKLTHRDMGPKTRYLGPEVPKEDFIWQDPIPEVDYELTEAEIEEIKAKILNSGLTVSELVKTAWASASTFRNSDKRGGANGARIRLAPQKDWEVNEPERLAKVLSVYEDIQRELPKKVSIADLIVLGGSAAVEKAARDAGFDVKVPFFPGRGDATQEQTDVESFAVLEPFADGFRNYQKQEYSVPPEELLVDKAQLLGLTAPEMTVLVGGLRVLGANYRDLPHGVFTDRIGVLTNDFFVNLLDMNYEWVPTDSGIYEIRDRKTGEVRWTATRVDLIFGSNSILRSYAEFYAQDDNQEKFVRDFINAWVKVMNADRFDLVKKARESVTALQSSNRIRSVVGESLQ

SEQ ID NO: 20023 - protein, 748 aa, Geobacillus stearothermophilus
MENQNRQNAAQCPFHGSVTNQSSNRTTNKDWWPNQLNLSILHQHDRKTNPHDEEFNYAEEFQKLDYWALKEDLRKLMTESQDWWPADYGHYGPLFIRMAWHSAGTYRIGDGRGGASTGTQRFAPLNSWPDNANLDKARRLLWPIKKKYGNKISWADLFILAGNVAIESMGGKTIGFGGGRVDVWHPEEDVYWGSEKEWLASERYSGDRELENPLAAVQMGLIYVNPEGPDGKPDPKAAARDIRETFRRMGMNDEETVALIAGGHTFGKAHGAGPATHVGPEPEAAPIEAQGLGWISSYGKGKGSDTITSGIEGAWTPTPTQWDTSYFDMLFGYDWWLTKSPAGAWQWMAVDPDEKDLAPDAEDPSKKVPTMMMTTDLALRFDPEYEKIARRFHQNPEEFAEAFARAWFKLTHRDMGPKTRYLGPEVPKEDFIWQDPIPEVDYELTEAEIEEIKAKILNSGLTVSELVKTAWASASTFRNSDKRGGANGARIRLAPQKDWEVNEPERLAKVLSVYEDIQRELPKKVSIADLIVLGGSAAVEKAARDAGFDVKVPFFPGRGDATQEQTDVESFAVLEPFADGFRNYQKQEYSVPPEELLVDKAQLLGLTAPEMTVLVGGLRVLGANYRDLPHGVFTDRIGVLTNDFFVNLLDMNYEWVPTDSGIYEIRDRKTGEVRWTATRVDLIFGSNSILRSYAEFYAQDDNQEKFVRDFINAWVKVMNADRFDLVKKARESVTALQYFISIRSKIAG

SEQ ID NO: 20024 - protein, 751 aa, Geobacillus stearothermophilus
MENQNRQNAAQCPFHGSVTNQSSNRTTNKDWWPNQLNLSILHQHDRKTNPHDEEFNYAEEFQKLDYWALKEDLRKLMTESQDWWPADYGHYGPLFIRMAWHSAGTYRIGDGRGGASTGTQRFAPLNSWPDNANLDKARRLLWPIKKKYGNKISWADLFILAGNVAIESMGGKTIGFGGGRVDVWHPEEDVYWGSEKEWLASERYSGDRELENPLAAVQMGLIYVNPEGPDGKPDPKAAARDIRETFRRMGMNDEETVALIAGGHTFGKAHGAGPATHVGPEPEAAPIEAQGLGWISSYGKGKGSDTITSGIEGAWTPTPTQWDTSYFDMLFGYDWWLTKSPAGAWQWMAVDPDEKDLAPDAEDPSKKVPTMMMTTDLALRFDPEYEKIARRFHQNPEEFAEAFARAWFKLTHRDMGPKTRYLGPEVPKEDFIWQDPIPEVDYELTEAEIEEIKAKILNSGLTVSELVKTAWASASTFRNSDKRGGANGARIRLAPQKDWEVNEPERLAKVLSVYEDIQRELPKKVSIADLIVLGGSAAVEKAARDAGFDVKVPFFPGRGDATQEQTDVESFAVLEPFADGFRNYQKQEYSVPPEELLVDKAQLLGLTAPEMTVLVGGLRVLGANYRDLPHGVFTDRIGVLTNDFFVNLLDMNYEWVPTDSGIYEIRDRKTGEVRWTATRVDLIFGSNSILRSYAEFYAQDDNQEKFVRDFINAWVKVMNADRFDLVKKARESVTALQSFNLRRSAGTTRLQ

SEQ ID NO: 20025 - protein, 752 aa, Geobacillus stearothermophilus
MENQNRQNAAQCPFHGSVTNQSSNRTTNKDWWPNQLNLSILHQHDRKTNPHDEEFNYAEEFQKLDYWALKEDLRKLMTESQDWWPADYGHYGPLFIRMAWHSAGTYRTGDGRGGASTGTQRFAPLNSWPNNANLDKARRLLWPIKKKYGNKISWADLFILAGNVAIESMGGKTIGFGGGRVDVWHPEEDVYWGSEKEWLASERYSGDRELENPLAAVQMGLTYVNPEGPDGKPDPKAAARDIRETFRRMGMNDEETVALIAGGHTFGKAHGAGPATHVGPEPEAAPIEAQGLGWISSYGKGKGSDTITSGIEGAWTPTPTQWDTSYFDMLFGYDWWLTKSPAGAWQWMAVDPDEKDLAPDAEDPSKKVPTMMMTTDLALRFDPEYEKIARRFHQNPEEFAEAFARAWFKLTHRDMGPKTRYLGPEVPKEDFIWQDPIPEVDYELTEAEIEEIKAKILNSGLTVSELVKTAWASASTFRNSDKRGGANGARIRLAPQKDWEVNEPERLAKVLSVYEDIQRELPKKVSIADLIVLGGSAAVEKAARDAGFDVKVPFFPGRGDATQEQTDVESFAVLEPFADGFRNYQKQEYSVPPEELLVDKAQLLGLTAPEMTVLVGGLRVLGANYRDLPHGVFTDRIGVLTNDFFVNLLDMNYEWVPTDSGIYEIRDRKTGEVRWTATRVDLIFGSNSILRSYAEFYAQDDNQEKFVRDFINAWVKVMNADRFDLVKKARESVTALQCSPISRSTVGRVCSK

SEQ ID NO: 20026 - protein, 751 aa, Geobacillus stearothermophilus
MENQNRQNAAQCPFHGSVTNQSSNRTTNKDWWPNQLNLSILHQHDRKTNPHDEEFNYAEEFQKLDYWALKEDLRKLMTESQDWWPADYGHYGPLFIRMAWHSAGTYRIGDGRGGASTGTQRFAPLNSWPDNANLDKARRLLWPIKKKYGNKISWADLFILAGNVAIESMGGKTIGFGGGRVDVWHPEEDVYWGSEKEWLASERYSGDRELENPLAAVQMGLIYVNPEGPDGKPDPKAAARDIRETFRRMGMNDEETVALIAGGHTFGKAHGAGPATHVGPEPEAAPIEAQGLGWISSYGKGKGSDTITSGIEGAWTPTPTQWDTSYFDMLFGYDWWLTKSPAGAWQWMAVDPDEKDLAPDAEDPSKKVPTMMMTTDLALRFDPEYEKIARRFHQNPEEFAEAFARAWFKLTHRDMGPKTRYLGPEVPKEDFIWQDPIPEVDYELTEAEIEEIKAKILNSGLTVSELVKTAWASASTFRNSDKRGGANGARIRLAPQKDWEVNEPERLAKVLSVYEDIQRELPKKVSIADLIVLGGSAAVEKAARDAGFDVKVPFFPGRGDATQEQTDVESFAVLEPFADGFRNYQKQEYSVPPEELLVDKAQLLGLTAPEMTVLVGGLRVLGANYRDLPHGVFTDRIGVLTNDFFVNLLDMNYEWVPTDSGIYEIRDRKTGEVRWTATRVDLIFGSNSILRSYAEFYAQDDNQEKFVRDFINAWVKVMNADRFDLVKKARESVTALQTGDVDRSGESDIRK

SEQ ID NO: 20027 - protein, 751 aa, Geobacillus stearothermophilus
MENQNRQNAAQCPFHGSVTNQSSNRTTNKDWWPNQLNLSILHQHDRKTNPHDEEFNYAEEFQKLDYWALKEDLRKLMTESQDWWPADYGHYGPLFIRMAWHSAGTYRIGDGRGGASTGTQRFAPLNSWPDNANLDKARRLLWPIKKKYGNKISWADLFILAGNVAIESMGGKTIGFGGGRVDVWHPEEDVYWGSEKEWLASERYSGDRELENPLAAVQMGLIYVNPEGPDGKPDPKAAARDIRETFRRMGMNDEETVALIAGGHTFGKAHGAGPATHVGPEPEAAPIEAQGLGWISSYGKGKGSDTITSGIEGAWTPTPTQWDTSYFDMLFGYDWWLTKSPAGAWQWMAVDPDEKDLAPDAEDPSKKVPTMMMTTDLALRFDPEYEKIARRFHQNPEEFAEAFARAWFKLTHRDMGPKTRYLGPEVPKEDFIWQDPIPEVDYELTEAEIEEIKAKILNSGLTVSELVKTAWASASTFRNSDKRGGANGARIRLAPQKDWEVNEPERLAKVLSVYEDIQRELPKKVSIADLIVLGGSAAVEKAARDAGFDVKVPFFPGRGDATQEQTDVESFAVLEPFADGFRNYQKQEYSVPPEELLVDKAQLLGLTAPEMTVLVGGLRVLGANYRDLPHGVFTDRIGVLTNDFFVNLLDMNYEWVPTDSGIYEIRDRKTGEVRWTATRVDLIFGSNSILRSYAEFYAQDDNQEKFVRDFINAWVKVMNADRFDLVKKARESVTALQCPHARRSAVEAGLQ

SEQ ID NO: 20028 - protein, 751 aa, Geobacillus stearothermophilus
MENQNRQNAAQCPFHGSVTNQSSNRTTNKDWWPNQLNLSILHQHDRKTNPHDEEFNYAEEFQKLDYWALKEDLRKLMTESQDWWPADYGHYGPLFIRMAWHSAGTYRTGDGRGGASTGTQRFAPLNSWPNNANLDKARRLLWPIKKKYGNKISWADLFILAGNVAIESMGGKTIGFGGGRVDVWHPEEDVYWGSEKEWLASERYSGDRELENPLAAVQMGLTYVNPEGPDGKPDPKAAARDIRETFRRMGMNDEETVALIAGGHTFGKAHGAGPATHVGPEPEAAPIEAQGLGWISSYGKGKGSDTITSGIEGAWTPTPTQWDTSYFDMLFGYDWWLTKSPAGAWQWMAVDPDEKDLAPDAEDPSKKVPTMMMTTDLALRFDPEYEKIARRFHQNPEEFAEAFARAWFKLTHRDMGPKTRYLGPEVPKEDFIWQDPIPEVDYELTEAEIEEIKAKILNSGLTVSELVKTAWASASTFRNSDKRGGANGARIRLAPQKDWEVNEPERLAKVLSVYEDIQRELPKKVSIADLIVLGGSAAVEKAARDAGFDVKVPFFPGRGDATQEQTDVESFAVLEPFADGFRNYQKQEYSVPPEELLVDKAQLLGLTAPEMTVLVGGLRVLGANYRDLPHGVFTDRIGVLTNDFFVNLLDMNYEWVPTDSGIYEIRDRKTGEVRWTATRVDLIFGSNSILRSYAEFYAQDDNQEKFVRDFINAWVKVMNADRFDLVKKARESVTALQHFVAARSKTAEELQ

SEQ ID NO: 20029 - protein, 735 aa, Geobacillus stearothermophilus
MENQNRQNAAQCPFHGSVTNQSSNRTTNKDWWPNQLNLSILHQHDRKTNPHDEEFNYAEEFQKLDYWALKEDLRKLMTESQDWWPADYGHYGPLFIRMAWHSAGTYRIGDGRGGASTGTQRFAPLNSWPDNANLDKARRLLWPIKKKYGNKISWADLFILAGNVAIESMGGKTIGFGGGRVDVWHPEEDVYWGSEKEWLASERYSGDRELENPLAAVQMGLIYVNPEGPDGKPDPKAAARDIRETFRRMGMNDEETVALIAGGHTFGKAHGAGPATHVGPEPEAAPIEAQGLGWISSYGKGKGSDTITSGIEGAWTPTPTQWDTSYFDMLFGYDWWLTKSPAGAWQWMAVDPDEKDLAPDAEDPSKKVPTMMMTTDLALRFDPEYEKIARRFHQNPEEFAEAFARAWFKLTHRDMGPKTRYLGPEVPKEDFIWQDPIPEVDYELTEAEIEEIKAKILNSGLTVSELVKTAWASASTFRNSDKRGGANGARIRLAPQKDWEVNEPERLAKVLSVYEDIQRELPKKVSIADLIVLGGSAAVEKAARDAGFDVKVPFFPGRGDATQEQTDVESFAVLEPFADGFRNYQKQEYSVPPEELLVDKAQLLGLTAPEMTVLVGGLRVLGANYRDLPHGVFTDRIGVLTNDFFVNLLDMNYEWVPTDSGIYEIRDRKTGEVRWTATRVDLIFGSNSILRSYAEFYAQDDNQEKFVRDFINAWVKVMNADRFDLVKKARESVTA

SEQ ID NO: 20030 - protein, 751 aa, Geobacillus stearothermophilus
MENQNRQNAAQCPFHGSVTNQSSNRTTNKDWWPNQLNLSILHQHDRKTNPHDEEFNYAEEFQKLDYWALKEDLRKLMTESQDWWPADYGHYGPLFIRMAWHSAGTYRIGDGRGGASTGTQRFAPLNSWPDNANLDKARRLLWPIKKKYGNKISWADLFILAGNVAIESMGGKTIGFGGGRVDVWHPEEDVYWGSEKEWLASERYSGDRELENPLAAVQMGLIYVNPEGPDGKPDPKAAARDIRETFRRMGMNDEETVALIAGGHTFGKAHGAGPATHVGPEPEAAPIEAQGLGWISSYGKGKGSDTITSGIEGAWTPTPTQWDTSYFDMLFGYDWWLTKSPAGAWQWMAVDPDEKDLAPDAEDPSKKVPTMMMTTDLALRFDPEYEKIARRFHQNPEEFAEAFARAWFKLTHRDMGPKTRYLGPEVPKEDFIWQDPIPEVDYELTEAEIEEIKAKILNSGLTVSELVKTAWASASTFRNSDKRGGANGARIRLAPQKDWEVNEPERLAKVLSVYEDIQRELPKKVSIADLIVLGGSAAVEKAARDAGFDVKVPFFPGRGDATQEQTDVESFAVLEPFADGFRNYQKQEYSVPPEELLVDKAQLLGLTAPEMTVLVGGLRVLGANYRDLPHGVFTDRIGVLTNDFFVNLLDMNYEWVPTDSGIYEIRDRKTGEVRWTATRVDLIFGSNSILRSYAEFYAQDDNQEKFVRDFINAWVKVMNADRFDLVKKARESVTALQSSRCFRSTDNAVLQ

SEQ ID NO: 20031 - protein, 752 aa, Geobacillus stearothermophilus
MENQNRQNAAQCPFHGSVTNQSSNRTTNKDWWPNQLNLSILHQHDRKTNPHDEEFNYAEEFQKLDYWALKEDLRKLMTESQDWWPADYGHYGPLFIRMAWHSAGTYRIGDGRGGASTGTQRFAPLNSWPDNANLDKARRLLWPIKKKYGNKISWADLFILAGNVAIESMGGKTIGFGGGRVDVWHPEEDVYWGSEKEWLASERYSGDRELENPLAAVQMGLIYVNPEGPDGKPDPKAAARDIRETFRRMGMNDEETVALIAGGHTFGKAHGAGPATHVGPEPEAAPIEAQGLGWISSYGKGKGSDTITSGIEGAWTPTPTQWDTSYFDMLFGYDWWLTKSPAGAWQWMAVDPDEKDLAPDAEDPSKKVPTMMMTTDLALRFDPEYEKIARRFHQNPEEFAEAFARAWFKLTHRDMGPKTRYLGPEVPKEDFIWQDPIPEVDYELTEAEIEEIKAKILNSGLTVSELVKTAWASASTFRNSDKRGGANGARIRLAPQKDWEVNEPERLAKVLSVYEDIQRELPKKVSIADLIVLGGSAAVEKAARDAGFDVKVPFFPGRGDATQEQTDVESFAVLEPFADGFRNYQKQEYSVPPEELLVDKAQLLGLTAPEMTVLVGGLRVLGANYRDLPHGVFTDRIGVLTNDFFVNLLDMNYEWVPTDSGIYEIRDRKTGEVRWTATRVDLIFGSNSILRSYAEFYAQDDNQEKFVRDFINAWVKVMNADRFDLVKKARESVTALQTNRINRSNNGTVLSK

SEQ ID NO: 20032 - protein, 751 aa, Geobacillus stearothermophilus
MENQNRQNAAQCPFHGSVTNQSSNRTTNKDWWPNQLNLSILHQHDRKTNPHDEEFNYAEEFQKLDYWALKEDLRKLMTESQDWWPADYGHYGPLFIRMAWHSAGTYRIGDGRGGASTGTQRFAPLNSWPDNANLDKARRLLWPIKKKYGNKISWADLFILAGNVAIESMGGKTIGFGGGRVDVWHPEEDVYWGSEKEWLASERYSGDRELENPLAAVQMGLIYVNPEGPDGKPDPKAAARDIRETFRRMGMNDEETVALIAGGHTFGKAHGAGPATHVGPEPEAAPIEAQGLGWISSYGKGKGSDTITSGIEGAWTPTPTQWDTSYFDMLFGYDWWLTKSPAGAWQWMAVDPDEKDLAPDAEDPSKKVPTMMMTTDLALRFDPEYEKIARRFHQNPEEFAEAFARAWFKLTHRDMGPKTRYLGPEVPKEDFIWQDPIPEVDYELTEAEIEEIKAKILNSGLTVSELVKTAWASASTFRNSDKRGGANGARIRLAPQKDWEVNEPERLAKVLSVYEDIQRELPKKVSIADLIVLGGSAAVEKAARDAGFDVKVPFFPGRGDATQEQTDVESFAVLEPFADGFRNYQKQEYSVPPEELLVDKAQLLGLTAPEMTVLVGGLRVLGANYRDLPHGVFTDRIGVLTNDFFVNLLDMNYEWVPTDSGIYEIRDRKTGEVRWTATRVDLIFGSNSILRSYAEFYAQDDNQEKFVRDFINAWVKVMNADRFDLVKKARESVTALQCFNDARSVRTGTLQ

SEQ ID NO: 20033 - protein, 751 aa, Geobacillus stearothermophilus
MENQNRQNAAQCPFHGSVTNQSSNRTTNKDWWPNQLNLSILHQHDRKTNPHDEEFNYAEEFQKLDYWALKEDLRKLMTESQDWWPADYGHYGPLFIRMAWHSAGTYRTGDGRGGASTGTQRFAPLNSWPNNANLDKARRLLWPIKKKYGNKISWADLFILAGNVAIESMGGKTIGFGGGRVDVWHPEEDVYWGSEKEWLASERYSGDRELENPLAAVQMGLTYVNPEGPDGKPDPKAAARDIRETFRRMGMNDEETVALIAGGHTFGKAHGAGPATHVGPEPEAAPIEAQGLGWISSYGKGKGSDTITSGIEGAWTPTPTQWDTSYFDMLFGYDWWLTKSPAGAWQWMAVDPDEKDLAPDAEDPSKKVPTMMMTTDLALRFDPEYEKIARRFHQNPEEFAEAFARAWFKLTHRDMGPKTRYLGPEVPKEDFIWQDPIPEVDYELTEAEIEEIKAKILNSGLTVSELVKTAWASASTFRNSDKRGGANGARIRLAPQKDWEVNEPERLAKVLSVYEDIQRELPKKVSIADLIVLGGSAAVEKAARDAGFDVKVPFFPGRGDATQEQTDVESFAVLEPFADGFRNYQKQEYSVPPEELLVDKAQLLGLTAPEMTVLVGGLRVLGANYRDLPHGVFTDRIGVLTNDFFVNLLDMNYEWVPTDSGIYEIRDRKTGEVRWTATRVDLIFGSNSILRSYAEFYAQDDNQEKFVRDFINAWVKVMNADRFDLVKKARESVTALQYDSSDRSSAAIDLQ

SEQ ID NO: 20034 - protein, 751 aa, Geobacillus stearothermophilus
MENQNRQNAAQCPFHGSVTNQSSNRTTNKDWWPNQLNLSILHQHDRKTNPHDEEFNYAEEFQKLDYWALKEDLRKLMTESQDWWPADYGHYGPLFIRMAWHSAGTYRIGDGRGGASTGTQRFAPLNSWPDNANLDKARRLLWPIKKKYGNKISWADLFILAGNVAIESMGGKTIGFGGGRVDVWHPEEDVYWGSEKEWLASERYSGDRELENPLAAVQMGLIYVNPEGPDGKPDPKAAARDIRETFRRMGMNDEETVALIAGGHTFGKAHGAGPATHVGPEPEAAPIEAQGLGWISSYGKGKGSDTITSGIEGAWTPTPTQWDTSYFDMLFGYDWWLTKSPAGAWQWMAVDPDEKDLAPDAEDPSKKVPTMMMTTDLALRFDPEYEKIARRFHQNPEEFAEAFARAWFKLTHRDMGPKTRYLGPEVPKEDFIWQDPIPEVDYELTEAEIEEIKAKILNSGLTVSELVKTAWASASTFRNSDKRGGANGARIRLAPQKDWEVNEPERLAKVLSVYEDIQRELPKKVSIADLIVLGGSAAVEKAARDAGFDVKVPFFPGRGDATQEQTDVESFAVLEPFADGFRNYQKQEYSVPPEELLVDKAQLLGLTAPEMTVLVGGLRVLGANYRDLPHGVFTDRIGVLTNDFFVNLLDMNYEWVPTDSGIYEIRDRKTGEVRWTATRVDLIFGSNSILRSYAEFYAQDDNQEKFVRDFINAWVKVMNADRFDLVKKARESVTALQDDCLGRSIIEIMLQ

SEQ ID NO: 20035 - protein, 751 aa, Geobacillus stearothermophilus
MENQNRQNAAQCPFHGSVTNQSSNRTTNKDWWPNQLNLSILHQHDRKTNPHDEEFNYAEEFQKLDYWALKEDLRKLMTESQDWWPADYGHYGPLFIRMAWHSAGTYRIGDGRGGASTGTQRFAPLNSWPDNANLDKARRLLWPIKKKYGNKISWADLFILAGNVAIESMGGKTIGFGGGRVDVWHPEEDVYWGSEKEWLASERYSGDRELENPLAAVQMGLIYVNPEGPDGKPDPKAAARDIRETFRRMGMNDEETVALIAGGHTFGKAHGAGPATHVGPEPEAAPIEAQGLGWISSYGKGKGSDTITSGIEGAWTPTPTQWDTSYFDMLFGYDWWLTKSPAGAWQWMAVDPDEKDLAPDAEDPSKKVPTMMMTTDLALRFDPEYEKIARRFHQNPEEFAEAFARAWFKLTHRDMGPKTRYLGPEVPKEDFIWQDPIPEVDYELTEAEIEEIKAKILNSGLTVSELVKTAWASASTFRNSDKRGGANGARIRLAPQKDWEVNEPERLAKVLSVYEDIQRELPKKVSIADLIVLGGSAAVEKAARDAGFDVKVPFFPGRGDATQEQTDVESFAVLEPFADGFRNYQKQEYSVPPEELLVDKAQLLGLTAPEMTVLVGGLRVLGANYRDLPHGVFTDRIGVLTNDFFVNLLDMNYEWVPTDSGIYEIRDRKTGEVRWTATRVDLIFGSNSILRSYAEFYAQDDNQEKFVRDFINAWVKVMNADRFDLVKKARESVTALQHCCHLRSSAETVLQ

SEQ ID NO: 20036 - protein, 745 aa, Geobacillus stearothermophilus
MENQNRQNAAQCPFHGSVTNQSSNRTTNKDWWPNQLNLSILHQHDRKTNPHDEEFNYAEEFQKLDYWALKEDLRKLMTESQDWWPADYGHYGPLFIRMAWHSAGTYRTGDGRGGASTGTQRFAPLNSWPNNANLDKARRLLWPIKKKYGNKISWADLFILAGNVAIESMGGKTIGFGGGRVDVWHPEEDVYWGSEKEWLASERYSGDRELENPLAAVQMGLTYVNPEGPDGKPDPKAAARDIRETFRRMGMNDEETVALIAGGHTFGKAHGAGPATHVGPEPEAAPIEAQGLGWISSYGKGKGSDTITSGIEGAWTPTPTQWDTSYFDMLFGYDWWLTKSPAGAWQWMAVDPDEKDLAPDAEDPSKKVPTMMMTTDLALRFDPEYEKIARRFHQNPEEFAEAFARAWFKLTHRDMGPKTRYLGPEVPKEDFIWQDPIPEVDYELTEAEIEEIKAKILNSGLTVSELVKTAWASASTFRNSDKRGGANGARIRLAPQKDWEVNEPERLAKVLSVYEDIQRELPKKVSIADLIVLGGSAAVEKAARDAGFDVKVPFFPGRGDATQEQTDVESFAVLEPFADGFRNYQKQEYSVPPEELLVDKAQLLGLTAPEMTVLVGGLRVLGANYRDLPHGVFTDRIGVLTNDFFVNLLDMNYEWVPTDSGIYEIRDRKTGEVRWTATRVDLIFGSNSILRSYAEFYAQDDNQEKFVRDFINAWVKVMNADRFDLVKKARESVTALQHTSPVDLS

SEQ ID NO: 20037 - protein, 751 aa, Geobacillus stearothermophilus
MENQNRQNAAQCPFHGSVTNQSSNRTTNKDWWPNQLNLSILHQHDRKTNPHDEEFNYAEEFQKLDYWALKEDLRKLMTESQDWWPADYGHYGPLFIRMAWHSAGTYRIGDGRGGASTGTQRFAPLNSWPDNANLDKARRLLWPIKKKYGNKISWADLFILAGNVAIESMGGKTIGFGGGRVDVWHPEEDVYWGSEKEWLASERYSGDRELENPLAAVQMGLIYVNPEGPDGKPDPKAAARDIRETFRRMGMNDEETVALIAGGHTFGKAHGAGPATHVGPEPEAAPIEAQGLGWISSYGKGKGSDTITSGIEGAWTPTPTQWDTSYFDMLFGYDWWLTKSPAGAWQWMAVDPDEKDLAPDAEDPSKKVPTMMMTTDLALRFDPEYEKIARRFHQNPEEFAEAFARAWFKLTHRDMGPKTRYLGPEVPKEDFIWQDPIPEVDYELTEAEIEEIKAKILNSGLTVSELVKTAWASASTFRNSDKRGGANGARIRLAPQKDWEVNEPERLAKVLSVYEDIQRELPKKVSIADLIVLGGSAAVEKAARDAGFDVKVPFFPGRGDATQEQTDVESFAVLEPFADGFRNYQKQEYSVPPEELLVDKAQLLGLTAPEMTVLVGGLRVLGANYRDLPHGVFTDRIGVLTNDFFVNLLDMNYEWVPTDSGIYEIRDRKTGEVRWTATRVDLIFGSNSILRSYAEFYAQDDNQEKFVRDFINAWVKVMNADRFDLVKKARESVTALQGNYFYRSGGIIRLQ

SEQ ID NO: 20038 - protein, 751 aa, Geobacillus stearothermophilus
MENQNRQNAAQCPFHGSVTNQSSNRTTNKDWWPNQLNLSILHQHDRKTNPHDEEFNYAEEFQKLDYWALKEDLRKLMTESQDWWPADYGHYGPLFIRMAWHSAGTYRTGDGRGGASTGTQRFAPLNSWPNNANLDKARRLLWPIKKKYGNKISWADLFILAGNVAIESMGGKTIGFGGGRVDVWHPEEDVYWGSEKEWLASERYSGDRELENPLAAVQMGLTYVNPEGPDGKPDPKAAARDIRETFRRMGMNDEETVALIAGGHTFGKAHGAGPATHVGPEPEAAPIEAQGLGWISSYGKGKGSDTITSGIEGAWTPTPTQWDTSYFDMLFGYDWWLTKSPAGAWQWMAVDPDEKDLAPDAEDPSKKVPTMMMTTDLALRFDPEYEKIARRFHQNPEEFAEAFARAWFKLTHRDMGPKTRYLGPEVPKEDFIWQDPIPEVDYELTEAEIEEIKAKILNSGLTVSELVKTAWASASTFRNSDKRGGANGARIRLAPQKDWEVNEPERLAKVLSVYEDIQRELPKKVSIADLIVLGGSAAVEKAARDAGFDVKVPFFPGRGDATQEQTDVESFAVLEPFADGFRNYQKQEYSVPPEELLVDKAQLLGLTAPEMTVLVGGLRVLGANYRDLPHGVFTDRIGVLTNDFFVNLLDMNYEWVPTDSGIYEIRDRKTGEVRWTATRVDLIFGSNSILRSYAEFYAQDDNQEKFVRDFINAWVKVMNADRFDLVKKARESVTALQDIVLARSAAIASLQ

SEQ ID NO: 20039 - protein, 751 aa, Geobacillus stearothermophilus
MENQNRQNAAQCPFHGSVTNQSSNRTTNKDWWPNQLNLSILHQHDRKTNPHDEEFNYAEEFQKLDYWALKEDLRKLMTESQDWWPADYGHYGPLFIRMAWHSAGTYRIGDGRGGASTGTQRFAPLNSWPDNANLDKARRLLWPIKKKYGNKISWADLFILAGNVAIESMGGKTIGFGGGRVDVWHPEEDVYWGSEKEWLASERYSGDRELENPLAAVQMGLIYVNPEGPDGKPDPKAAARDIRETFRRMGMNDEETVALIAGGHTFGKAHGAGPATHVGPEPEAAPIEAQGLGWISSYGKGKGSDTITSGIEGAWTPTPTQWDTSYFDMLFGYDWWLTKSPAGAWQWMAVDPDEKDLAPDAEDPSKKVPTMMMTTDLALRFDPEYEKIARRFHQNPEEFAEAFARAWFKLTHRDMGPKTRYLGPEVPKEDFIWQDPIPEVDYELTEAEIEEIKAKILNSGLTVSELVKTAWASASTFRNSDKRGGANGARIRLAPQKDWEVNEPERLAKVLSVYEDIQRELPKKVSIADLIVLGGSAAVEKAARDAGFDVKVPFFPGRGDATQEQTDVESFAVLEPFADGFRNYQKQEYSVPPEELLVDKAQLLGLTAPEMTVLVGGLRVLGANYRDLPHGVFTDRIGVLTNDFFVNLLDMNYEWVPTDSGIYEIRDRKTGEVRWTATRVDLIFGSNSILRSYAEFYAQDDNQEKFVRDFINAWVKVMNADRFDLVKKARESVTALQCCHTPRSDMIGGLQ

SEQ ID NO: 20040 - protein, 750 aa, Geobacillus stearothermophilus
MENQNRQNAAQCPFHGSVTNQSSNRTTNKDWWPNQLNLSILHQHDRKTNPHDEEFNYAEEFQKLDYWALKEDLRKLMTESQDWWPADYGHYGPLFIRMAWHSAGTYRIGDGRGGASTGTQRFAPLNSWPDNANLDKARRLLWPIKKKYGNKISWADLFILAGNVAIESMGGKTIGFGGGRVDVWHPEEDVYWGSEKEWLASERYSGDRELENPLAAVQMGLIYVNPEGPDGKPDPKAAARDIRETFRRMGMNDEETVALIAGGHTFGKAHGAGPATHVGPEPEAAPIEAQGLGWISSYGKGKGSDTITSGIEGAWTPTPTQWDTSYFDMLFGYDWWLTKSPAGAWQWMAVDPDEKDLAPDAEDPSKKVPTMMMTTDLALRFDPEYEKIARRFHQNPEEFAEAFARAWFKLTHRDMGPKTRYLGPEVPKEDFIWQDPIPEVDYELTEAEIEEIKAKILNSGLTVSELVKTAWASASTFRNSDKRGGANGARIRLAPQKDWEVNEPERLAKVLSVYEDIQRELPKKVSIADLIVLGGSAAVEKAARDAGFDVKVPFFPGRGDATQEQTDVESFAVLEPFADGFRNYQKQEYSVPPEELLVDKAQLLGLTAPEMTVLVGGLRVLGANYRDLPHGVFTDRIGVLTNDFFVNLLDMNYEWVPTDSGIYEIRDRKTGEVRWTATRVDLIFGSNSILRSYAEFYAQDDNQEKFVRDFINAWVKVMNADRFDLVKKARESVTALQFFLNRSKSIAVLQ

SEQ ID NO: 20041 - protein, 751 aa, Geobacillus stearothermophilus
MENQNRQNAAQCPFHGSVTNQSSNRTTNKDWWPNQLNLSILHQHDRKTNPHDEEFNYAEEFQKLDYWALKEDLRKLMTESQDWWPADYGHYGPLFIRMAWHSAGTYRIGDGRGGASTGTQRFAPLNSWPDNANLDKARRLLWPIKKKYGNKISWADLFILAGNVAIESMGGKTIGFGGGRVDVWHPEEDVYWGSEKEWLASERYSGDRELENPLAAVQMGLIYVNPEGPDGKPDPKAAARDIRETFRRMGMNDEETVALIAGGHTFGKAHGAGPATHVGPEPEAAPIEAQGLGWISSYGKGKGSDTITSGIEGAWTPTPTQWDTSYFDMLFGYDWWLTKSPAGAWQWMAVDPDEKDLAPDAEDPSKKVPTMMMTTDLALRFDPEYEKIARRFHQNPEEFAEAFARAWFKLTHRDMGPKTRYLGPEVPKEDFIWQDPIPEVDYELTEAEIEEIKAKILNSGLTVSELVKTAWASASTFRNSDKRGGANGARIRLAPQKDWEVNEPERLAKVLSVYEDIQRELPKKVSIADLIVLGGSAAVEKAARDAGFDVKVPFFPGRGDATQEQTDVESFAVLEPFADGFRNYQKQEYSVPPEELLVDKAQLLGLTAPEMTVLVGGLRVLGANYRDLPHGVFTDRIGVLTNDFFVNLLDMNYEWVPTDSGIYEIRDRKTGEVRWTATRVDLIFGSNSILRSYAEFYAQDDNQEKFVRDFINAWVKVMNADRFDLVKKARESVTALQHFCHPRSVNGIELQ

SEQ ID NO: 20042 - protein, 751 aa, Geobacillus stearothermophilus
MENQNRQNAAQCPFHGSVTNQSSNRTTNKDWWPNQLNLSILHQHDRKTNPHDEEFNYAEEFQKLDYWALKEDLRKLMTESQDWWPADYGHYGPLFIRMAWHSAGTYRTGDGRGGASTGTQRFAPLNSWPNNANLDKARRLLWPIKKKYGNKISWADLFILAGNVAIESMGGKTIGFGGGRVDVWHPEEDVYWGSEKEWLASERYSGDRELENPLAAVQMGLTYVNPEGPDGKPDPKAAARDIRETFRRMGMNDEETVALIAGGHTFGKAHGAGPATHVGPEPEAAPIEAQGLGWISSYGKGKGSDTITSGIEGAWTPTPTQWDTSYFDMLFGYDWWLTKSPAGAWQWMAVDPDEKDLAPDAEDPSKKVPTMMMTTDLALRFDPEYEKIARRFHQNPEEFAEAFARAWFKLTHRDMGPKTRYLGPEVPKEDFIWQDPIPEVDYELTEAEIEEIKAKILNSGLTVSELVKTAWASASTFRNSDKRGGANGARIRLAPQKDWEVNEPERLAKVLSVYEDIQRELPKKVSIADLIVLGGSAAVEKAARDAGFDVKVPFFPGRGDATQEQTDVESFAVLEPFADGFRNYQKQEYSVPPEELLVDKAQLLGLTAPEMTVLVGGLRVLGANYRDLPHGVFTDRIGVLTNDFFVNLLDMNYEWVPTDSGIYEIRDRKTGEVRWTATRVDLIFGSNSILRSYAEFYAQDDNQEKFVRDFINAWVKVMNADRFDLVKKARESVTALQDSHHLRSGAGTDLQ

SEQ ID NO: 20043 - protein, 744 aa, Geobacillus stearothermophilus
MENQNRQNAAQCPFHGSVTNQSSNRTTNKDWWPNQLNLSILHQHDRKTNPHDEEFNYAEEFQKLDYWALKEDLRKLMTESQDWWPADYGHYGPLFIRMAWHSAGTYRIGDGRGGASTGTQRFAPLNSWPDNANLDKARRLLWPIKKKYGNKISWADLFILAGNVAIESMGGKTIGFGGGRVDVWHPEEDVYWGSEKEWLASERYSGDRELENPLAAVQMGLIYVNPEGPDGKPDPKAAARDIRETFRRMGMNDEETVALIAGGHTFGKAHGAGPATHVGPEPEAAPIEAQGLGWISSYGKGKGSDTITSGIEGAWTPTPTQWDTSYFDMLFGYDWWLTKSPAGAWQWMAVDPDEKDLAPDAEDPSKKVPTMMMTTDLALRFDPEYEKIARRFHQNPEEFAEAFARAWFKLTHRDMGPKTRYLGPEVPKEDFIWQDPIPEVDYELTEAEIEEIKAKILNSGLTVSELVKTAWASASTFRNSDKRGGANGARIRLAPQKDWEVNEPERLAKVLSVYEDIQRELPKKVSIADLIVLGGSAAVEKAARDAGFDVKVPFFPGRGDATQEQTDVESFAVLEPFADGFRNYQKQEYSVPPEELLVDKAQLLGLTAPEMTVLVGGLRVLGANYRDLPHGVFTDRIGVLTNDFFVNLLDMNYEWVPTDSGIYEIRDRKTGEVRWTATRVDLIFGSNSILRSYAEFYAQDDNQEKFVRDFINAWVKVMNADRFDLVKKARESVTALQCVLATDL

SEQ ID NO: 20044 - protein, 751 aa, Geobacillus stearothermophilus
MENQNRQNAAQCPFHGSVTNQSSNRTTNKDWWPNQLNLSILHQHDRKTNPHDEEFNYAEEFQKLDYWALKEDLRKLMTESQDWWPADYGHYGPLFIRMAWHSAGTYRTGDGRGGASTGTQRFAPLNSWPNNANLDKARRLLWPIKKKYGNKISWADLFILAGNVAIESMGGKTIGFGGGRVDVWHPEEDVYWGSEKEWLASERYSGDRELENPLAAVQMGLTYVNPEGPDGKPDPKAAARDIRETFRRMGMNDEETVALIAGGHTFGKAHGAGPATHVGPEPEAAPIEAQGLGWISSYGKGKGSDTITSGIEGAWTPTPTQWDTSYFDMLFGYDWWLTKSPAGAWQWMAVDPDEKDLAPDAEDPSKKVPTMMMTTDLALRFDPEYEKIARRFHQNPEEFAEAFARAWFKLTHRDMGPKTRYLGPEVPKEDFIWQDPIPEVDYELTEAEIEEIKAKILNSGLTVSELVKTAWASASTFRNSDKRGGANGARIRLAPQKDWEVNEPERLAKVLSVYEDIQRELPKKVSIADLIVLGGSAAVEKAARDAGFDVKVPFFPGRGDATQEQTDVESFAVLEPFADGFRNYQKQEYSVPPEELLVDKAQLLGLTAPEMTVLVGGLRVLGANYRDLPHGVFTDRIGVLTNDFFVNLLDMNYEWVPTDSGIYEIRDRKTGEVRWTATRVDLIFGSNSILRSYAEFYAQDDNQEKFVRDFINAWVKVMNADRFDLVKKARESVTALQGYLTVRSMTRSNLQ

SEQ ID NO: 20045 - protein, 751 aa, Geobacillus stearothermophilus
MENQNRQNAAQCPFHGSVTNQSSNRTTNKDWWPNQLNLSILHQHDRKTNPHDEEFNYAEEFQKLDYWALKEDLRKLMTESQDWWPADYGHYGPLFIRMAWHSAGTYRTGDGRGGASTGTQRFAPLNSWPNNANLDKARRLLWPIKKKYGNKISWADLFILAGNVAIESMGGKTIGFGGGRVDVWHPEEDVYWGSEKEWLASERYSGDRELENPLAAVQMGLTYVNPEGPDGKPDPKAAARDIRETFRRMGMNDEETVALIAGGHTFGKAHGAGPATHVGPEPEAAPIEAQGLGWISSYGKGKGSDTITSGIEGAWTPTPTQWDTSYFDMLFGYDWWLTKSPAGAWQWMAVDPDEKDLAPDAEDPSKKVPTMMMTTDLALRFDPEYEKIARRFHQNPEEFAEAFARAWFKLTHRDMGPKTRYLGPEVPKEDFIWQDPIPEVDYELTEAEIEEIKAKILNSGLTVSELVKTAWASASTFRNSDKRGGANGARIRLAPQKDWEVNEPERLAKVLSVYEDIQRELPKKVSIADLIVLGGSAAVEKAARDAGFDVKVPFFPGRGDATQEQTDVESFAVLEPFADGFRNYQKQEYSVPPEELLVDKAQLLGLTAPEMTVLVGGLRVLGANYRDLPHGVFTDRIGVLTNDFFVNLLDMNYEWVPTDSGIYEIRDRKTGEVRWTATRVDLIFGSNSILRSYAEFYAQDDNQEKFVRDFINAWVKVMNADRFDLVKKARESVTALQYRSLDRSGDVENLQ

SEQ ID NO: 20046 - protein, 751 aa, Geobacillus stearothermophilus
MENQNRQNAAQCPFHGSVTNQSSNRTTNKDWWPNQLNLSILHQHDRKTNPHDEEFNYAEEFQKLDYWALKEDLRKLMTESQDWWPADYGHYGPLFIRMAWHSAGTYRTGDGRGGASTGTQRFAPLNSWPNNANLDKARRLLWPIKKKYGNKISWADLFILAGNVAIESMGGKTIGFGGGRVDVWHPEEDVYWGSEKEWLASERYSGDRELENPLAAVQMGLTYVNPEGPDGKPDPKAAARDIRETFRRMGMNDEETVALIAGGHTFGKAHGAGPATHVGPEPEAAPIEAQGLGWISSYGKGKGSDTITSGIEGAWTPTPTQWDTSYFDMLFGYDWWLTKSPAGAWQWMAVDPDEKDLAPDAEDPSKKVPTMMMTTDLALRFDPEYEKIARRFHQNPEEFAEAFARAWFKLTHRDMGPKTRYLGPEVPKEDFIWQDPIPEVDYELTEAEIEEIKAKILNSGLTVSELVKTAWASASTFRNSDKRGGANGARIRLAPQKDWEVNEPERLAKVLSVYEDIQRELPKKVSIADLIVLGGSAAVEKAARDAGFDVKVPFFPGRGDATQEQTDVESFAVLEPFADGFRNYQKQEYSVPPEELLVDKAQLLGLTAPEMTVLVGGLRVLGANYRDLPHGVFTDRIGVLTNDFFVNLLDMNYEWVPTDSGIYEIRDRKTGEVRWTATRVDLIFGSNSILRSYAEFYAQDDNQEKFVRDFINAWVKVMNADRFDLVKKARESVTALQIHSGIRSMTGANLQ

SEQ ID NO: 20047 - protein, 747 aa, Geobacillus stearothermophilus
MENQNRQNAAQCPFHGSVTNQSSNRTTNKDWWPNQLNLSILHQHDRKTNPHDEEFNYAEEFQKLDYWALKEDLRKLMTESQDWWPADYGHYGPLFIRMAWHSAGTYRTGDGRGGASTGTQRFAPLNSWPNNANLDKARRLLWPIKKKYGNKISWADLFILAGNVAIESMGGKTIGFGGGRVDVWHPEEDVYWGSEKEWLASERYSGDRELENPLAAVQMGLTYVNPEGPDGKPDPKAAARDIRETFRRMGMNDEETVALIAGGHTFGKAHGAGPATHVGPEPEAAPIEAQGLGWISSYGKGKGSDTITSGIEGAWTPTPTQWDTSYFDMLFGYDWWLTKSPAGAWQWMAVDPDEKDLAPDAEDPSKKVPTMMMTTDLALRFDPEYEKIARRFHQNPEEFAEAFARAWFKLTHRDMGPKTRYLGPEVPKEDFIWQDPIPEVDYELTEAEIEEIKAKILNSGLTVSELVKTAWASASTFRNSDKRGGANGARIRLAPQKDWEVNEPERLAKVLSVYEDIQRELPKKVSIADLIVLGGSAAVEKAARDAGFDVKVPFFPGRGDATQEQTDVESFAVLEPFADGFRNYQKQEYSVPPEELLVDKAQLLGLTAPEMTVLVGGLRVLGANYRDLPHGVFTDRIGVLTNDFFVNLLDMNYEWVPTDSGIYEIRDRKTGEVRWTATRVDLIFGSNSILRSYAEFYAQDDNQEKFVRDFINAWVKVMNADRFDLVKKARESVTALQVNYITDLPLG

SEQ ID NO: 20048 - protein, 751 aa, Geobacillus stearothermophilus
MENQNRQNAAQCPFHGSVTNQSSNRTTNKDWWPNQLNLSILHQHDRKTNPHDEEFNYAEEFQKLDYWALKEDLRKLMTESQDWWPADYGHYGPLFIRMAWHSAGTYRTGDGRGGASTGTQRFAPLNSWPNNANLDKARRLLWPIKKKYGNKISWADLFILAGNVAIESMGGKTIGFGGGRVDVWHPEEDVYWGSEKEWLASERYSGDRELENPLAAVQMGLTYVNPEGPDGKPDPKAAARDIRETFRRMGMNDEETVALIAGGHTFGKAHGAGPATHVGPEPEAAPIEAQGLGWISSYGKGKGSDTITSGIEGAWTPTPTQWDTSYFDMLFGYDWWLTKSPAGAWQWMAVDPDEKDLAPDAEDPSKKVPTMMMTTDLALRFDPEYEKIARRFHQNPEEFAEAFARAWFKLTHRDMGPKTRYLGPEVPKEDFIWQDPIPEVDYELTEAEIEEIKAKILNSGLTVSELVKTAWASASTFRNSDKRGGANGARIRLAPQKDWEVNEPERLAKVLSVYEDIQRELPKKVSIADLIVLGGSAAVEKAARDAGFDVKVPFFPGRGDATQEQTDVESFAVLEPFADGFRNYQKQEYSVPPEELLVDKAQLLGLTAPEMTVLVGGLRVLGANYRDLPHGVFTDRIGVLTNDFFVNLLDMNYEWVPTDSGIYEIRDRKTGEVRWTATRVDLIFGSNSILRSYAEFYAQDDNQEKFVRDFINAWVKVMNADRFDLVKKARESVTALQLLPNTRSIGSDMLQ

SEQ ID NO: 20049 - protein, 752 aa, Geobacillus stearothermophilus
MENQNRQNAAQCPFHGSVTNQSSNRTTNKDWWPNQLNLSILHQHDRKTNPHDEEFNYAEEFQKLDYWALKEDLRKLMTESQDWWPADYGHYGPLFIRMAWHSAGTYRIGDGRGGASTGTQRFAPLNSWPDNANLDKARRLLWPIKKKYGNKISWADLFILAGNVAIESMGGKTIGFGGGRVDVWHPEEDVYWGSEKEWLASERYSGDRELENPLAAVQMGLIYVNPEGPDGKPDPKAAARDIRETFRRMGMNDEETVALIAGGHTFGKAHGAGPATHVGPEPEAAPIEAQGLGWISSYGKGKGSDTITSGIEGAWTPTPTQWDTSYFDMLFGYDWWLTKSPAGAWQWMAVDPDEKDLAPDAEDPSKKVPTMMMTTDLALRFDPEYEKIARRFHQNPEEFAEAFARAWFKLTHRDMGPKTRYLGPEVPKEDFIWQDPIPEVDYELTEAEIEEIKAKILNSGLTVSELVKTAWASASTFRNSDKRGGANGARIRLAPQKDWEVNEPERLAKVLSVYEDIQRELPKKVSIADLIVLGGSAAVEKAARDAGFDVKVPFFPGRGDATQEQTDVESFAVLEPFADGFRNYQKQEYSVPPEELLVDKAQLLGLTAPEMTVLVGGLRVLGANYRDLPHGVFTDRIGVLTNDFFVNLLDMNYEWVPTDSGIYEIRDRKTGEVRWTATRVDLIFGSNSILRSYAEFYAQDDNQEKFVRDFINAWVKVMNADRFDLVKKARESVTALQLLVFDRYEKGTAVSK

SEQ ID NO: 20050 - protein, 751 aa, Geobacillus stearothermophilus
MENQNRQNAAQCPFHGSVTNQSSNRTTNKDWWPNQLNLSILHQHDRKTNPHDEEFNYAEEFQKLDYWALKEDLRKLMTESQDWWPADYGHYGPLFIRMAWHSAGTYRTGDGRGGASTGTQRFAPLNSWPNNANLDKARRLLWPIKKKYGNKISWADLFILAGNVAIESMGGKTIGFGGGRVDVWHPEEDVYWGSEKEWLASERYSGDRELENPLAAVQMGLTYVNPEGPDGKPDPKAAARDIRETFRRMGMNDEETVALIAGGHTFGKAHGAGPATHVGPEPEAAPIEAQGLGWISSYGKGKGSDTITSGIEGAWTPTPTQWDTSYFDMLFGYDWWLTKSPAGAWQWMAVDPDEKDLAPDAEDPSKKVPTMMMTTDLALRFDPEYEKIARRFHQNPEEFAEAFARAWFKLTHRDMGPKTRYLGPEVPKEDFIWQDPIPEVDYELTEAEIEEIKAKILNSGLTVSELVKTAWASASTFRNSDKRGGANGARIRLAPQKDWEVNEPERLAKVLSVYEDIQRELPKKVSIADLIVLGGSAAVEKAARDAGFDVKVPFFPGRGDATQEQTDVESFAVLEPFADGFRNYQKQEYSVPPEELLVDKAQLLGLTAPEMTVLVGGLRVLGANYRDLPHGVFTDRIGVLTNDFFVNLLDMNYEWVPTDSGIYEIRDRKTGEVRWTATRVDLIFGSNSILRSYAEFYAQDDNQEKFVRDFINAWVKVMNADRFDLVKKARESVTALQCICTDRSATIIKLQ

SEQ ID NO: 20051 - protein, 751 aa, Geobacillus stearothermophilus
MENQNRQNAAQCPFHGSVTNQSSNRTTNKDWWPNQLNLSILHQHDRKTNPHDEEFNYAEEFQKLDYWALKEDLRKLMTESQDWWPADYGHYGPLFIRMAWHSAGTYRIGDGRGGASTGTQRFAPLNSWPDNANLDKARRLLWPIKKKYGNKISWADLFILAGNVAIESMGGKTIGFGGGRVDVWHPEEDVYWGSEKEWLASERYSGDRELENPLAAVQMGLIYVNPEGPDGKPDPKAAARDIRETFRRMGMNDEETVALIAGGHTFGKAHGAGPATHVGPEPEAAPIEAQGLGWISSYGKGKGSDTITSGIEGAWTPTPTQWDTSYFDMLFGYDWWLTKSPAGAWQWMAVDPDEKDLAPDAEDPSKKVPTMMMTTDLALRFDPEYEKIARRFHQNPEEFAEAFARAWFKLTHRDMGPKTRYLGPEVPKEDFIWQDPIPEVDYELTEAEIEEIKAKILNSGLTVSELVKTAWASASTFRNSDKRGGANGARIRLAPQKDWEVNEPERLAKVLSVYEDIQRELPKKVSIADLIVLGGSAAVEKAARDAGFDVKVPFFPGRGDATQEQTDVESFAVLEPFADGFRNYQKQEYSVPPEELLVDKAQLLGLTAPEMTVLVGGLRVLGANYRDLPHGVFTDRIGVLTNDFFVNLLDMNYEWVPTDSGIYEIRDRKTGEVRWTATRVDLIFGSNSILRSYAEFYAQDDNQEKFVRDFINAWVKVMNADRFDLVKKARESVTALQHVDYVRSGRVSALQ

SEQ ID NO: 20052 - protein, 751 aa, Geobacillus stearothermophilus
MENQNRQNAAQCPFHGSVTNQSSNRTTNKDWWPNQLNLSILHQHDRKTNPHDEEFNYAEEFQKLDYWALKEDLRKLMTESQDWWPADYGHYGPLFIRMAWHSAGTYRIGDGRGGASTGTQRFAPLNSWPDNANLDKARRLLWPIKKKYGNKISWADLFILAGNVAIESMGGKTIGFGGGRVDVWHPEEDVYWGSEKEWLASERYSGDRELENPLAAVQMGLIYVNPEGPDGKPDPKAAARDIRETFRRMGMNDEETVALIAGGHTFGKAHGAGPATHVGPEPEAAPIEAQGLGWISSYGKGKGSDTITSGIEGAWTPTPTQWDTSYFDMLFGYDWWLTKSPAGAWQWMAVDPDEKDLAPDAEDPSKKVPTMMMTTDLALRFDPEYEKIARRFHQNPEEFAEAFARAWFKLTHRDMGPKTRYLGPEVPKEDFIWQDPIPEVDYELTEAEIEEIKAKILNSGLTVSELVKTAWASASTFRNSDKRGGANGARIRLAPQKDWEVNEPERLAKVLSVYEDIQRELPKKVSIADLIVLGGSAAVEKAARDAGFDVKVPFFPGRGDATQEQTDVESFAVLEPFADGFRNYQKQEYSVPPEELLVDKAQLLGLTAPEMTVLVGGLRVLGANYRDLPHGVFTDRIGVLTNDFFVNLLDMNYEWVPTDSGIYEIRDRKTGEVRWTATRVDLIFGSNSILRSYAEFYAQDDNQEKFVRDFINAWVKVMNADRFDLVKKARESVTALQNFGADRSMVEVALQ

SEQ ID NO: 20053 - protein, 751 aa, Geobacillus stearothermophilus
MENQNRQNAAQCPFHGSVTNQSSNRTTNKDWWPNQLNLSILHQHDRKTNPHDEEFNYAEEFQKLDYWALKEDLRKLMTESQDWWPADYGHYGPLFIRMAWHSAGTYRTGDGRGGASTGTQRFAPLNSWPNNANLDKARRLLWPIKKKYGNKISWADLFILAGNVAIESMGGKTIGFGGGRVDVWHPEEDVYWGSEKEWLASERYSGDRELENPLAAVQMGLTYVNPEGPDGKPDPKAAARDIRETFRRMGMNDEETVALIAGGHTFGKAHGAGPATHVGPEPEAAPIEAQGLGWISSYGKGKGSDTITSGIEGAWTPTPTQWDTSYFDMLFGYDWWLTKSPAGAWQWMAVDPDEKDLAPDAEDPSKKVPTMMMTTDLALRFDPEYEKIARRFHQNPEEFAEAFARAWFKLTHRDMGPKTRYLGPEVPKEDFIWQDPIPEVDYELTEAEIEEIKAKILNSGLTVSELVKTAWASASTFRNSDKRGGANGARIRLAPQKDWEVNEPERLAKVLSVYEDIQRELPKKVSIADLIVLGGSAAVEKAARDAGFDVKVPFFPGRGDATQEQTDVESFAVLEPFADGFRNYQKQEYSVPPEELLVDKAQLLGLTAPEMTVLVGGLRVLGANYRDLPHGVFTDRIGVLTNDFFVNLLDMNYEWVPTDSGIYEIRDRKTGEVRWTATRVDLIFGSNSILRSYAEFYAQDDNQEKFVRDFINAWVKVMNADRFDLVKKARESVTALQSRYRCRSNTVIGLQ

SEQ ID NO: 20054 - protein, 752 aa, Geobacillus stearothermophilus
MENQNRQNAAQCPFHGSVTNQSSNRTTNKDWWPNQLNLSILHQHDRKTNPHDEEFNYAEEFQKLDYWALKEDLRKLMTESQDWWPADYGHYGPLFIRMAWHSAGTYRIGDGRGGASTGTQRFAPLNSWPDNANLDKARRLLWPIKKKYGNKISWADLFILAGNVAIESMGGKTIGFGGGRVDVWHPEEDVYWGSEKEWLASERYSGDRELENPLAAVQMGLIYVNPEGPDGKPDPKAAARDIRETFRRMGMNDEETVALIAGGHTFGKAHGAGPATHVGPEPEAAPIEAQGLGWISSYGKGKGSDTITSGIEGAWTPTPTQWDTSYFDMLFGYDWWLTKSPAGAWQWMAVDPDEKDLAPDAEDPSKKVPTMMMTTDLALRFDPEYEKIARRFHQNPEEFAEAFARAWFKLTHRDMGPKTRYLGPEVPKEDFIWQDPIPEVDYELTEAEIEEIKAKILNSGLTVSELVKTAWASASTFRNSDKRGGANGARIRLAPQKDWEVNEPERLAKVLSVYEDIQRELPKKVSIADLIVLGGSAAVEKAARDAGFDVKVPFFPGRGDATQEQTDVESFAVLEPFADGFRNYQKQEYSVPPEELLVDKAQLLGLTAPEMTVLVGGLRVLGANYRDLPHGVFTDRIGVLTNDFFVNLLDMNYEWVPTDSGIYEIRDRKTGEVRWTATRVDLIFGSNSILRSYAEFYAQDDNQEKFVRDFINAWVKVMNADRFDLVKKARESVTALQLDSAPDLARLMICSK

SEQ ID NO: 20055 - protein, 753 aa, Geobacillus stearothermophilus
MENQNRQNAAQCPFHGSVTNQSSNRTTNKDWWPNQLNLSILHQHDRKTNPHDEEFNYAEEFQKLDYWALKEDLRKLMTESQDWWPADYGHYGPLFIRMAWHSAGTYRIGDGRGGASTGTQRFAPLNSWPDNANLDKARRLLWPIKKKYGNKISWADLFILAGNVAIESMGGKTIGFGGGRVDVWHPEEDVYWGSEKEWLASERYSGDRELENPLAAVQMGLIYVNPEGPDGKPDPKAAARDIRETFRRMGMNDEETVALIAGGHTFGKAHGAGPATHVGPEPEAAPIEAQGLGWISSYGKGKGSDTITSGIEGAWTPTPTQWDTSYFDMLFGYDWWLTKSPAGAWQWMAVDPDEKDLAPDAEDPSKKVPTMMMTTDLALRFDPEYEKIARRFHQNPEEFAEAFARAWFKLTHRDMGPKTRYLGPEVPKEDFIWQDPIPEVDYELTEAEIEEIKAKILNSGLTVSELVKTAWASASTFRNSDKRGGANGARIRLAPQKDWEVNEPERLAKVLSVYEDIQRELPKKVSIADLIVLGGSAAVEKAARDAGFDVKVPFFPGRGDATQEQTDVESFAVLEPFADGFRNYQKQEYSVPPEELLVDKAQLLGLTAPEMTVLVGGLRVLGANYRDLPHGVFTDRIGVLTNDFFVNLLDMNYEWVPTDSGIYEIRDRKTGEVRWTATRVDLIFGSNSILRSYAEFYAQDDNQEKFVRDFINAWVKVMNADRFDLVKKARESVTALQLSDESRSINEKTAVSK

SEQ ID NO: 20056 - protein, 752 aa, Geobacillus stearothermophilus
MENQNRQNAAQCPFHGSVTNQSSNRTTNKDWWPNQLNLSILHQHDRKTNPHDEEFNYAEEFQKLDYWALKEDLRKLMTESQDWWPADYGHYGPLFIRMAWHSAGTYRIGDGRGGASTGTQRFAPLNSWPDNANLDKARRLLWPIKKKYGNKISWADLFILAGNVAIESMGGKTIGFGGGRVDVWHPEEDVYWGSEKEWLASERYSGDRELENPLAAVQMGLIYVNPEGPDGKPDPKAAARDIRETFRRMGMNDEETVALIAGGHTFGKAHGAGPATHVGPEPEAAPIEAQGLGWISSYGKGKGSDTITSGIEGAWTPTPTQWDTSYFDMLFGYDWWLTKSPAGAWQWMAVDPDEKDLAPDAEDPSKKVPTMMMTTDLALRFDPEYEKIARRFHQNPEEFAEAFARAWFKLTHRDMGPKTRYLGPEVPKEDFIWQDPIPEVDYELTEAEIEEIKAKILNSGLTVSELVKTAWASASTFRNSDKRGGANGARIRLAPQKDWEVNEPERLAKVLSVYEDIQRELPKKVSIADLIVLGGSAAVEKAARDAGFDVKVPFFPGRGDATQEQTDVESFAVLEPFADGFRNYQKQEYSVPPEELLVDKAQLLGLTAPEMTVLVGGLRVLGANYRDLPHGVFTDRIGVLTNDFFVNLLDMNYEWVPTDSGIYEIRDRKTGEVRWTATRVDLIFGSNSILRSYAEFYAQDDNQEKFVRDFINAWVKVMNADRFDLVKKARESVTALQISRYPRSNTTIACSK

SEQ ID NO: 20057 - protein, 751 aa, Geobacillus stearothermophilus
MENQNRQNAAQCPFHGSVTNQSSNRTTNKDWWPNQLNLSILHQHDRKTNPHDEEFNYAEEFQKLDYWALKEDLRKLMTESQDWWPADYGHYGPLFIRMAWHSAGTYRTGDGRGGASTGTQRFAPLNSWPNNANLDKARRLLWPIKKKYGNKISWADLFILAGNVAIESMGGKTIGFGGGRVDVWHPEEDVYWGSEKEWLASERYSGDRELENPLAAVQMGLTYVNPEGPDGKPDPKAAARDIRETFRRMGMNDEETVALIAGGHTFGKAHGAGPATHVGPEPEAAPIEAQGLGWISSYGKGKGSDTITSGIEGAWTPTPTQWDTSYFDMLFGYDWWLTKSPAGAWQWMAVDPDEKDLAPDAEDPSKKVPTMMMTTDLALRFDPEYEKIARRFHQNPEEFAEAFARAWFKLTHRDMGPKTRYLGPEVPKEDFIWQDPIPEVDYELTEAEIEEIKAKILNSGLTVSELVKTAWASASTFRNSDKRGGANGARIRLAPQKDWEVNEPERLAKVLSVYEDIQRELPKKVSIADLIVLGGSAAVEKAARDAGFDVKVPFFPGRGDATQEQTDVESFAVLEPFADGFRNYQKQEYSVPPEELLVDKAQLLGLTAPEMTVLVGGLRVLGANYRDLPHGVFTDRIGVLTNDFFVNLLDMNYEWVPTDSGIYEIRDRKTGEVRWTATRVDLIFGSNSILRSYAEFYAQDDNQEKFVRDFINAWVKVMNADRFDLVKKARESVTALQYHSGSRSVITSGLQ

SEQ ID NO: 20058 - protein, 751 aa, Geobacillus stearothermophilus
MENQNRQNAAQCPFHGSVTNQSSNRTTNKDWWPNQLNLSILHQHDRKTNPHDEEFNYAEEFQKLDYWALKEDLRKLMTESQDWWPADYGHYGPLFIRMAWHSAGTYRTGDGRGGASTGTQRFAPLNSWPNNANLDKARRLLWPIKKKYGNKISWADLFILAGNVAIESMGGKTIGFGGGRVDVWHPEEDVYWGSEKEWLASERYSGDRELENPLAAVQMGLTYVNPEGPDGKPDPKAAARDIRETFRRMGMNDEETVALIAGGHTFGKAHGAGPATHVGPEPEAAPIEAQGLGWISSYGKGKGSDTITSGIEGAWTPTPTQWDTSYFDMLFGYDWWLTKSPAGAWQWMAVDPDEKDLAPDAEDPSKKVPTMMMTTDLALRFDPEYEKIARRFHQNPEEFAEAFARAWFKLTHRDMGPKTRYLGPEVPKEDFIWQDPIPEVDYELTEAEIEEIKAKILNSGLTVSELVKTAWASASTFRNSDKRGGANGARIRLAPQKDWEVNEPERLAKVLSVYEDIQRELPKKVSIADLIVLGGSAAVEKAARDAGFDVKVPFFPGRGDATQEQTDVESFAVLEPFADGFRNYQKQEYSVPPEELLVDKAQLLGLTAPEMTVLVGGLRVLGANYRDLPHGVFTDRIGVLTNDFFVNLLDMNYEWVPTDSGIYEIRDRKTGEVRWTATRVDLIFGSNSILRSYAEFYAQDDNQEKFVRDFINAWVKVMNADRFDLVKKARESVTALQTIISYRSAGDVTLQ

SEQ ID NO: 20059 - protein, 743 aa, Geobacillus stearothermophilus
MENQNRQNAAQCPFHGSVTNQSSNRTTNKDWWPNQLNLSILHQHDRKTNPHDEEFNYAEEFQKLDYWALKEDLRKLMTESQDWWPADYGHYGPLFIRMAWHSAGTYRIGDGRGGASTGTQRFAPLNSWPDNANLDKARRLLWPIKKKYGNKISWADLFILAGNVAIESMGGKTIGFGGGRVDVWHPEEDVYWGSEKEWLASERYSGDRELENPLAAVQMGLIYVNPEGPDGKPDPKAAARDIRETFRRMGMNDEETVALIAGGHTFGKAHGAGPATHVGPEPEAAPIEAQGLGWISSYGKGKGSDTITSGIEGAWTPTPTQWDTSYFDMLFGYDWWLTKSPAGAWQWMAVDPDEKDLAPDAEDPSKKVPTMMMTTDLALRFDPEYEKIARRFHQNPEEFAEAFARAWFKLTHRDMGPKTRYLGPEVPKEDFIWQDPIPEVDYELTEAEIEEIKAKILNSGLTVSELVKTAWASASTFRNSDKRGGANGARIRLAPQKDWEVNEPERLAKVLSVYEDIQRELPKKVSIADLIVLGGSAAVEKAARDAGFDVKVPFFPGRGDATQEQTDVESFAVLEPFADGFRNYQKQEYSVPPEELLVDKAQLLGLTAPEMTVLVGGLRVLGANYRDLPHGVFTDRIGVLTNDFFVNLLDMNYEWVPTDSGIYEIRDRKTGEVRWTATRVDLIFGSNSILRSYAEFYAQDDNQEKFVRDFINAWVKVMNADRFDLVKKARESVTALQDTTGNR

SEQ ID NO: 20060 - protein, 751 aa, Geobacillus stearothermophilus
MENQNRQNAAQCPFHGSVTNQSSNRTTNKDWWPNQLNLSILHQHDRKTNPHDEEFNYAEEFQKLDYWALKEDLRKLMTESQDWWPADYGHYGPLFIRMAWHSAGTYRTGDGRGGASTGTQRFAPLNSWPNNANLDKARRLLWPIKKKYGNKISWADLFILAGNVAIESMGGKTIGFGGGRVDVWHPEEDVYWGSEKEWLASERYSGDRELENPLAAVQMGLTYVNPEGPDGKPDPKAAARDIRETFRRMGMNDEETVALIAGGHTFGKAHGAGPATHVGPEPEAAPIEAQGLGWISSYGKGKGSDTITSGIEGAWTPTPTQWDTSYFDMLFGYDWWLTKSPAGAWQWMAVDPDEKDLAPDAEDPSKKVPTMMMTTDLALRFDPEYEKIARRFHQNPEEFAEAFARAWFKLTHRDMGPKTRYLGPEVPKEDFIWQDPIPEVDYELTEAEIEEIKAKILNSGLTVSELVKTAWASASTFRNSDKRGGANGARIRLAPQKDWEVNEPERLAKVLSVYEDIQRELPKKVSIADLIVLGGSAAVEKAARDAGFDVKVPFFPGRGDATQEQTDVESFAVLEPFADGFRNYQKQEYSVPPEELLVDKAQLLGLTAPEMTVLVGGLRVLGANYRDLPHGVFTDRIGVLTNDFFVNLLDMNYEWVPTDSGIYEIRDRKTGEVRWTATRVDLIFGSNSILRSYAEFYAQDDNQEKFVRDFINAWVKVMNADRFDLVKKARESVTALQVLFNTRSGTVAKLQ

SEQ ID NO: 20061 - protein, 751 aa, Geobacillus stearothermophilus
MENQNRQNAAQCPFHGSVTNQSSNRTTNKDWWPNQLNLSILHQHDRKTNPHDEEFNYAEEFQKLDYWALKEDLRKLMTESQDWWPADYGHYGPLFIRMAWHSAGTYRIGDGRGGASTGTQRFAPLNSWPDNANLDKARRLLWPIKKKYGNKISWADLFILAGNVAIESMGGKTIGFGGGRVDVWHPEEDVYWGSEKEWLASERYSGDRELENPLAAVQMGLIYVNPEGPDGKPDPKAAARDIRETFRRMGMNDEETVALIAGGHTFGKAHGAGPATHVGPEPEAAPIEAQGLGWISSYGKGKGSDTITSGIEGAWTPTPTQWDTSYFDMLFGYDWWLTKSPAGAWQWMAVDPDEKDLAPDAEDPSKKVPTMMMTTDLALRFDPEYEKIARRFHQNPEEFAEAFARAWFKLTHRDMGPKTRYLGPEVPKEDFIWQDPIPEVDYELTEAEIEEIKAKILNSGLTVSELVKTAWASASTFRNSDKRGGANGARIRLAPQKDWEVNEPERLAKVLSVYEDIQRELPKKVSIADLIVLGGSAAVEKAARDAGFDVKVPFFPGRGDATQEQTDVESFAVLEPFADGFRNYQKQEYSVPPEELLVDKAQLLGLTAPEMTVLVGGLRVLGANYRDLPHGVFTDRIGVLTNDFFVNLLDMNYEWVPTDSGIYEIRDRKTGEVRWTATRVDLIFGSNSILRSYAEFYAQDDNQEKFVRDFINAWVKVMNADRFDLVKKARESVTALQGNGHNRSSIDEVLQ

SEQ ID NO: 20062 - protein, 751 aa, Geobacillus stearothermophilus
MENQNRQNAAQCPFHGSVTNQSSNRTTNKDWWPNQLNLSILHQHDRKTNPHDEEFNYAEEFQKLDYWALKEDLRKLMTESQDWWPADYGHYGPLFIRMAWHSAGTYRIGDGRGGASTGTQRFAPLNSWPDNANLDKARRLLWPIKKKYGNKISWADLFILAGNVAIESMGGKTIGFGGGRVDVWHPEEDVYWGSEKEWLASERYSGDRELENPLAAVQMGLIYVNPEGPDGKPDPKAAARDIRETFRRMGMNDEETVALIAGGHTFGKAHGAGPATHVGPEPEAAPIEAQGLGWISSYGKGKGSDTITSGIEGAWTPTPTQWDTSYFDMLFGYDWWLTKSPAGAWQWMAVDPDEKDLAPDAEDPSKKVPTMMMTTDLALRFDPEYEKIARRFHQNPEEFAEAFARAWFKLTHRDMGPKTRYLGPEVPKEDFIWQDPIPEVDYELTEAEIEEIKAKILNSGLTVSELVKTAWASASTFRNSDKRGGANGARIRLAPQKDWEVNEPERLAKVLSVYEDIQRELPKKVSIADLIVLGGSAAVEKAARDAGFDVKVPFFPGRGDATQEQTDVESFAVLEPFADGFRNYQKQEYSVPPEELLVDKAQLLGLTAPEMTVLVGGLRVLGANYRDLPHGVFTDRIGVLTNDFFVNLLDMNYEWVPTDSGIYEIRDRKTGEVRWTATRVDLIFGSNSILRSYAEFYAQDDNQEKFVRDFINAWVKVMNADRFDLVKKARESVTALQFSTPPRSIVNNGLQ

SEQ ID NO: 20063 - protein, 751 aa, Geobacillus stearothermophilus
MENQNRQNAAQCPFHGSVTNQSSNRTTNKDWWPNQLNLSILHQHDRKTNPHDEEFNYAEEFQKLDYWALKEDLRKLMTESQDWWPADYGHYGPLFIRMAWHSAGTYRTGDGRGGASTGTQRFAPLNSWPNNANLDKARRLLWPIKKKYGNKISWADLFILAGNVAIESMGGKTIGFGGGRVDVWHPEEDVYWGSEKEWLASERYSGDRELENPLAAVQMGLTYVNPEGPDGKPDPKAAARDIRETFRRMGMNDEETVALIAGGHTFGKAHGAGPATHVGPEPEAAPIEAQGLGWISSYGKGKGSDTITSGIEGAWTPTPTQWDTSYFDMLFGYDWWLTKSPAGAWQWMAVDPDEKDLAPDAEDPSKKVPTMMMTTDLALRFDPEYEKIARRFHQNPEEFAEAFARAWFKLTHRDMGPKTRYLGPEVPKEDFIWQDPIPEVDYELTEAEIEEIKAKILNSGLTVSELVKTAWASASTFRNSDKRGGANGARIRLAPQKDWEVNEPERLAKVLSVYEDIQRELPKKVSIADLIVLGGSAAVEKAARDAGFDVKVPFFPGRGDATQEQTDVESFAVLEPFADGFRNYQKQEYSVPPEELLVDKAQLLGLTAPEMTVLVGGLRVLGANYRDLPHGVFTDRIGVLTNDFFVNLLDMNYEWVPTDSGIYEIRDRKTGEVRWTATRVDLIFGSNSILRSYAEFYAQDDNQEKFVRDFINAWVKVMNADRFDLVKKARESVTALQTFVSHRSKKESRLQ

SEQ ID NO: 20064 - protein, 751 aa, Geobacillus stearothermophilus
MENQNRQNAAQCPFHGSVTNQSSNRTTNKDWWPNQLNLSILHQHDRKTNPHDEEFNYAEEFQKLDYWALKEDLRKLMTESQDWWPADYGHYGPLFIRMAWHSAGTYRIGDGRGGASTGTQRFAPLNSWPDNANLDKARRLLWPIKKKYGNKISWADLFILAGNVAIESMGGKTIGFGGGRVDVWHPEEDVYWGSEKEWLASERYSGDRELENPLAAVQMGLIYVNPEGPDGKPDPKAAARDIRETFRRMGMNDEETVALIAGGHTFGKAHGAGPATHVGPEPEAAPIEAQGLGWISSYGKGKGSDTITSGIEGAWTPTPTQWDTSYFDMLFGYDWWLTKSPAGAWQWMAVDPDEKDLAPDAEDPSKKVPTMMMTTDLALRFDPEYEKIARRFHQNPEEFAEAFARAWFKLTHRDMGPKTRYLGPEVPKEDFIWQDPIPEVDYELTEAEIEEIKAKILNSGLTVSELVKTAWASASTFRNSDKRGGANGARIRLAPQKDWEVNEPERLAKVLSVYEDIQRELPKKVSIADLIVLGGSAAVEKAARDAGFDVKVPFFPGRGDATQEQTDVESFAVLEPFADGFRNYQKQEYSVPPEELLVDKAQLLGLTAPEMTVLVGGLRVLGANYRDLPHGVFTDRIGVLTNDFFVNLLDMNYEWVPTDSGIYEIRDRKTGEVRWTATRVDLIFGSNSILRSYAEFYAQDDNQEKFVRDFINAWVKVMNADRFDLVKKARESVTALQVSDGIRSMGTANLQ

SEQ ID NO: 20065 - protein, 751 aa, Geobacillus stearothermophilus
MENQNRQNAAQCPFHGSVTNQSSNRTTNKDWWPNQLNLSILHQHDRKTNPHDEEFNYAEEFQKLDYWALKEDLRKLMTESQDWWPADYGHYGPLFIRMAWHSAGTYRIGDGRGGASTGTQRFAPLNSWPDNANLDKARRLLWPIKKKYGNKISWADLFILAGNVAIESMGGKTIGFGGGRVDVWHPEEDVYWGSEKEWLASERYSGDRELENPLAAVQMGLIYVNPEGPDGKPDPKAAARDIRETFRRMGMNDEETVALIAGGHTFGKAHGAGPATHVGPEPEAAPIEAQGLGWISSYGKGKGSDTITSGIEGAWTPTPTQWDTSYFDMLFGYDWWLTKSPAGAWQWMAVDPDEKDLAPDAEDPSKKVPTMMMTTDLALRFDPEYEKIARRFHQNPEEFAEAFARAWFKLTHRDMGPKTRYLGPEVPKEDFIWQDPIPEVDYELTEAEIEEIKAKILNSGLTVSELVKTAWASASTFRNSDKRGGANGARIRLAPQKDWEVNEPERLAKVLSVYEDIQRELPKKVSIADLIVLGGSAAVEKAARDAGFDVKVPFFPGRGDATQEQTDVESFAVLEPFADGFRNYQKQEYSVPPEELLVDKAQLLGLTAPEMTVLVGGLRVLGANYRDLPHGVFTDRIGVLTNDFFVNLLDMNYEWVPTDSGIYEIRDRKTGEVRWTATRVDLIFGSNSILRSYAEFYAQDDNQEKFVRDFINAWVKVMNADRFDLVKKARESVTALQLVSFNRSSIINRLQ

SEQ ID NO: 20066 - protein, 751 aa, Geobacillus stearothermophilus
MENQNRQNAAQCPFHGSVTNQSSNRTTNKDWWPNQLNLSILHQHDRKTNPHDEEFNYAEEFQKLDYWALKEDLRKLMTESQDWWPADYGHYGPLFIRMAWHSAGTYRIGDGRGGASTGTQRFAPLNSWPDNANLDKARRLLWPIKKKYGNKISWADLFILAGNVAIESMGGKTIGFGGGRVDVWHPEEDVYWGSEKEWLASERYSGDRELENPLAAVQMGLIYVNPEGPDGKPDPKAAARDIRETFRRMGMNDEETVALIAGGHTFGKAHGAGPATHVGPEPEAAPIEAQGLGWISSYGKGKGSDTITSGIEGAWTPTPTQWDTSYFDMLFGYDWWLTKSPAGAWQWMAVDPDEKDLAPDAEDPSKKVPTMMMTTDLALRFDPEYEKIARRFHQNPEEFAEAFARAWFKLTHRDMGPKTRYLGPEVPKEDFIWQDPIPEVDYELTEAEIEEIKAKILNSGLTVSELVKTAWASASTFRNSDKRGGANGARIRLAPQKDWEVNEPERLAKVLSVYEDIQRELPKKVSIADLIVLGGSAAVEKAARDAGFDVKVPFFPGRGDATQEQTDVESFAVLEPFADGFRNYQKQEYSVPPEELLVDKAQLLGLTAPEMTVLVGGLRVLGANYRDLPHGVFTDRIGVLTNDFFVNLLDMNYEWVPTDSGIYEIRDRKTGEVRWTATRVDLIFGSNSILRSYAEFYAQDDNQEKFVRDFINAWVKVMNADRFDLVKKARESVTALQGIASNRSINNKGLQ

SEQ ID NO: 20067 - protein, 751 aa, Geobacillus stearothermophilus
MENQNRQNAAQCPFHGSVTNQSSNRTTNKDWWPNQLNLSILHQHDRKTNPHDEEFNYAEEFQKLDYWALKEDLRKLMTESQDWWPADYGHYGPLFIRMAWHSAGTYRIGDGRGGASTGTQRFAPLNSWPDNANLDKARRLLWPIKKKYGNKISWADLFILAGNVAIESMGGKTIGFGGGRVDVWHPEEDVYWGSEKEWLASERYSGDRELENPLAAVQMGLIYVNPEGPDGKPDPKAAARDIRETFRRMGMNDEETVALIAGGHTFGKAHGAGPATHVGPEPEAAPIEAQGLGWISSYGKGKGSDTITSGIEGAWTPTPTQWDTSYFDMLFGYDWWLTKSPAGAWQWMAVDPDEKDLAPDAEDPSKKVPTMMMTTDLALRFDPEYEKIARRFHQNPEEFAEAFARAWFKLTHRDMGPKTRYLGPEVPKEDFIWQDPIPEVDYELTEAEIEEIKAKILNSGLTVSELVKTAWASASTFRNSDKRGGANGARIRLAPQKDWEVNEPERLAKVLSVYEDIQRELPKKVSIADLIVLGGSAAVEKAARDAGFDVKVPFFPGRGDATQEQTDVESFAVLEPFADGFRNYQKQEYSVPPEELLVDKAQLLGLTAPEMTVLVGGLRVLGANYRDLPHGVFTDRIGVLTNDFFVNLLDMNYEWVPTDSGIYEIRDRKTGEVRWTATRVDLIFGSNSILRSYAEFYAQDDNQEKFVRDFINAWVKVMNADRFDLVKKARESVTALQVSAATRSVGGRNLQ

SEQ ID NO: 20068 - protein, 744 aa, Geobacillus stearothermophilus
MENQNRQNAAQCPFHGSVTNQSSNRTTNKDWWPNQLNLSILHQHDRKTNPHDEEFNYAEEFQKLDYWALKEDLRKLMTESQDWWPADYGHYGPLFIRMAWHSAGTYRIGDGRGGASTGTQRFAPLNSWPDNANLDKARRLLWPIKKKYGNKISWADLFILAGNVAIESMGGKTIGFGGGRVDVWHPEEDVYWGSEKEWLASERYSGDRELENPLAAVQMGLIYVNPEGPDGKPDPKAAARDIRETFRRMGMNDEETVALIAGGHTFGKAHGAGPATHVGPEPEAAPIEAQGLGWISSYGKGKGSDTITSGIEGAWTPTPTQWDTSYFDMLFGYDWWLTKSPAGAWQWMAVDPDEKDLAPDAEDPSKKVPTMMMTTDLALRFDPEYEKIARRFHQNPEEFAEAFARAWFKLTHRDMGPKTRYLGPEVPKEDFIWQDPIPEVDYELTEAEIEEIKAKILNSGLTVSELVKTAWASASTFRNSDKRGGANGARIRLAPQKDWEVNEPERLAKVLSVYEDIQRELPKKVSIADLIVLGGSAAVEKAARDAGFDVKVPFFPGRGDATQEQTDVESFAVLEPFADGFRNYQKQEYSVPPEELLVDKAQLLGLTAPEMTVLVGGLRVLGANYRDLPHGVFTDRIGVLTNDFFVNLLDMNYEWVPTDSGIYEIRDRKTGEVRWTATRVDLIFGSNSILRSYAEFYAQDDNQEKFVRDFINAWVKVMNADRFDLVKKARESVTALQTLILTPM

SEQ ID NO: 20069 - protein, 751 aa, Geobacillus stearothermophilus
MENQNRQNAAQCPFHGSVTNQSSNRTTNKDWWPNQLNLSILHQHDRKTNPHDEEFNYAEEFQKLDYWALKEDLRKLMTESQDWWPADYGHYGPLFIRMAWHSAGTYRIGDGRGGASTGTQRFAPLNSWPDNANLDKARRLLWPIKKKYGNKISWADLFILAGNVAIESMGGKTIGFGGGRVDVWHPEEDVYWGSEKEWLASERYSGDRELENPLAAVQMGLIYVNPEGPDGKPDPKAAARDIRETFRRMGMNDEETVALIAGGHTFGKAHGAGPATHVGPEPEAAPIEAQGLGWISSYGKGKGSDTITSGIEGAWTPTPTQWDTSYFDMLFGYDWWLTKSPAGAWQWMAVDPDEKDLAPDAEDPSKKVPTMMMTTDLALRFDPEYEKIARRFHQNPEEFAEAFARAWFKLTHRDMGPKTRYLGPEVPKEDFIWQDPIPEVDYELTEAEIEEIKAKILNSGLTVSELVKTAWASASTFRNSDKRGGANGARIRLAPQKDWEVNEPERLAKVLSVYEDIQRELPKKVSIADLIVLGGSAAVEKAARDAGFDVKVPFFPGRGDATQEQTDVESFAVLEPFADGFRNYQKQEYSVPPEELLVDKAQLLGLTAPEMTVLVGGLRVLGANYRDLPHGVFTDRIGVLTNDFFVNLLDMNYEWVPTDSGIYEIRDRKTGEVRWTATRVDLIFGSNSILRSYAEFYAQDDNQEKFVRDFINAWVKVMNADRFDLVKKARESVTALQYAYYSRSTTKNMLQ

SEQ ID NO: 20070 - protein, 749 aa, Geobacillus stearothermophilus
MENQNRQNAAQCPFHGSVTNQSSNRTTNKDWWPNQLNLSILHQHDRKTNPHDEEFNYAEEFQKLDYWALKEDLRKLMTESQDWWPADYGHYGPLFIRMAWHSAGTYRIGDGRGGASTGTQRFAPLNSWPDNANLDKARRLLWPIKKKYGNKISWADLFILAGNVAIESMGGKTIGFGGGRVDVWHPEEDVYWGSEKEWLASERYSGDRELENPLAAVQMGLIYVNPEGPDGKPDPKAAARDIRETFRRMGMNDEETVALIAGGHTFGKAHGAGPATHVGPEPEAAPIEAQGLGWISSYGKGKGSDTITSGIEGAWTPTPTQWDTSYFDMLFGYDWWLTKSPAGAWQWMAVDPDEKDLAPDAEDPSKKVPTMMMTTDLALRFDPEYEKIARRFHQNPEEFAEAFARAWFKLTHRDMGPKTRYLGPEVPKEDFIWQDPIPEVDYELTEAEIEEIKAKILNSGLTVSELVKTAWASASTFRNSDKRGGANGARIRLAPQKDWEVNEPERLAKVLSVYEDIQRELPKKVSIADLIVLGGSAAVEKAARDAGFDVKVPFFPGRGDATQEQTDVESFAVLEPFADGFRNYQKQEYSVPPEELLVDKAQLLGLTAPEMTVLVGGLRVLGANYRDLPHGVFTDRIGVLTNDFFVNLLDMNYEWVPTDSGIYEIRDRKTGEVRWTATRVDLIFGSNSILRSYAEFYAQDDNQEKFVRDFINAWVKVMNADRFDLVKKARESVTALQRFDRSMNTATLQ

SEQ ID NO: 20071 - protein, 750 aa, Geobacillus stearothermophilus
MENQNRQNAAQCPFHGSVTNQSSNRTTNKDWWPNQLNLSILHQHDRKTNPHDEEFNYAEEFQKLDYWALKEDLRKLMTESQDWWPADYGHYGPLFIRMAWHSAGTYRIGDGRGGASTGTQRFAPLNSWPDNANLDKARRLLWPIKKKYGNKISWADLFILAGNVAIESMGGKTIGFGGGRVDVWHPEEDVYWGSEKEWLASERYSGDRELENPLAAVQMGLIYVNPEGPDGKPDPKAAARDIRETFRRMGMNDEETVALIAGGHTFGKAHGAGPATHVGPEPEAAPIEAQGLGWISSYGKGKGSDTITSGIEGAWTPTPTQWDTSYFDMLFGYDWWLTKSPAGAWQWMAVDPDEKDLAPDAEDPSKKVPTMMMTTDLALRFDPEYEKIARRFHQNPEEFAEAFARAWFKLTHRDMGPKTRYLGPEVPKEDFIWQDPIPEVDYELTEAEIEEIKAKILNSGLTVSELVKTAWASASTFRNSDKRGGANGARIRLAPQKDWEVNEPERLAKVLSVYEDIQRELPKKVSIADLIVLGGSAAVEKAARDAGFDVKVPFFPGRGDATQEQTDVESFAVLEPFADGFRNYQKQEYSVPPEELLVDKAQLLGLTAPEMTVLVGGLRVLGANYRDLPHGVFTDRIGVLTNDFFVNLLDMNYEWVPTDSGIYEIRDRKTGEVRWTATRVDLIFGSNSILRSYAEFYAQDDNQEKFVRDFINAWVKVMNADRFDLVKKARESVTALQSFTINRSTTNRLQ

SEQ ID NO: 20072 - protein, 745 aa, Geobacillus stearothermophilus
MENQNRQNAAQCPFHGSVTNQSSNRTTNKDWWPNQLNLSILHQHDRKTNPHDEEFNYAEEFQKLDYWALKEDLRKLMTESQDWWPADYGHYGPLFIRMAWHSAGTYRTGDGRGGASTGTQRFAPLNSWPNNANLDKARRLLWPIKKKYGNKISWADLFILAGNVAIESMGGKTIGFGGGRVDVWHPEEDVYWGSEKEWLASERYSGDRELENPLAAVQMGLTYVNPEGPDGKPDPKAAARDIRETFRRMGMNDEETVALIAGGHTFGKAHGAGPATHVGPEPEAAPIEAQGLGWISSYGKGKGSDTITSGIEGAWTPTPTQWDTSYFDMLFGYDWWLTKSPAGAWQWMAVDPDEKDLAPDAEDPSKKVPTMMMTTDLALRFDPEYEKIARRFHQNPEEFAEAFARAWFKLTHRDMGPKTRYLGPEVPKEDFIWQDPIPEVDYELTEAEIEEIKAKILNSGLTVSELVKTAWASASTFRNSDKRGGANGARIRLAPQKDWEVNEPERLAKVLSVYEDIQRELPKKVSIADLIVLGGSAAVEKAARDAGFDVKVPFFPGRGDATQEQTDVESFAVLEPFADGFRNYQKQEYSVPPEELLVDKAQLLGLTAPEMTVLVGGLRVLGANYRDLPHGVFTDRIGVLTNDFFVNLLDMNYEWVPTDSGIYEIRDRKTGEVRWTATRVDLIFGSNSILRSYAEFYAQDDNQEKFVRDFINAWVKVMNADRFDLVKKARESVTALQIVTSTDLE

SEQ ID NO: 20073 - protein, 751 aa, Geobacillus stearothermophilus
MENQNRQNAAQCPFHGSVTNQSSNRTTNKDWWPNQLNLSILHQHDRKTNPHDEEFNYAEEFQKLDYWALKEDLRKLMTESQDWWPADYGHYGPLFIRMAWHSAGTYRIGDGRGGASTGTQRFAPLNSWPDNANLDKARRLLWPIKKKYGNKISWADLFILAGNVAIESMGGKTIGFGGGRVDVWHPEEDVYWGSEKEWLASERYSGDRELENPLAAVQMGLIYVNPEGPDGKPDPKAAARDIRETFRRMGMNDEETVALIAGGHTFGKAHGAGPATHVGPEPEAAPIEAQGLGWISSYGKGKGSDTITSGIEGAWTPTPTQWDTSYFDMLFGYDWWLTKSPAGAWQWMAVDPDEKDLAPDAEDPSKKVPTMMMTTDLALRFDPEYEKIARRFHQNPEEFAEAFARAWFKLTHRDMGPKTRYLGPEVPKEDFIWQDPIPEVDYELTEAEIEEIKAKILNSGLTVSELVKTAWASASTFRNSDKRGGANGARIRLAPQKDWEVNEPERLAKVLSVYEDIQRELPKKVSIADLIVLGGSAAVEKAARDAGFDVKVPFFPGRGDATQEQTDVESFAVLEPFADGFRNYQKQEYSVPPEELLVDKAQLLGLTAPEMTVLVGGLRVLGANYRDLPHGVFTDRIGVLTNDFFVNLLDMNYEWVPTDSGIYEIRDRKTGEVRWTATRVDLIFGSNSILRSYAEFYAQDDNQEKFVRDFINAWVKVMNADRFDLVKKARESVTALQYTHFDRSVDAAVSK

SEQ ID NO: 20074 - protein, 751 aa, Geobacillus stearothermophilus
MENQNRQNAAQCPFHGSVTNQSSNRTTNKDWWPNQLNLSILHQHDRKTNPHDEEFNYAEEFQKLDYWALKEDLRKLMTESQDWWPADYGHYGPLFIRMAWHSAGTYRTGDGRGGASTGTQRFAPLNSWPNNANLDKARRLLWPIKKKYGNKISWADLFILAGNVAIESMGGKTIGFGGGRVDVWHPEEDVYWGSEKEWLASERYSGDRELENPLAAVQMGLTYVNPEGPDGKPDPKAAARDIRETFRRMGMNDEETVALIAGGHTFGKAHGAGPATHVGPEPEAAPIEAQGLGWISSYGKGKGSDTITSGIEGAWTPTPTQWDTSYFDMLFGYDWWLTKSPAGAWQWMAVDPDEKDLAPDAEDPSKKVPTMMMTTDLALRFDPEYEKIARRFHQNPEEFAEAFARAWFKLTHRDMGPKTRYLGPEVPKEDFIWQDPIPEVDYELTEAEIEEIKAKILNSGLTVSELVKTAWASASTFRNSDKRGGANGARIRLAPQKDWEVNEPERLAKVLSVYEDIQRELPKKVSIADLIVLGGSAAVEKAARDAGFDVKVPFFPGRGDATQEQTDVESFAVLEPFADGFRNYQKQEYSVPPEELLVDKAQLLGLTAPEMTVLVGGLRVLGANYRDLPHGVFTDRIGVLTNDFFVNLLDMNYEWVPTDSGIYEIRDRKTGEVRWTATRVDLIFGSNSILRSYAEFYAQDDNQEKFVRDFINAWVKVMNADRFDLVKKARESVTALQTNTPCRSGNNMNLQ

SEQ ID NO: 20075 - protein, 752 aa, Geobacillus stearothermophilus
MENQNRQNAAQCPFHGSVTNQSSNRTTNKDWWPNQLNLSILHQHDRKTNPHDEEFNYAEEFQKLDYWALKEDLRKLMTESQDWWPADYGHYGPLFIRMAWHSAGTYRIGDGRGGASTGTQRFAPLNSWPDNANLDKARRLLWPIKKKYGNKISWADLFILAGNVAIESMGGKTIGFGGGRVDVWHPEEDVYWGSEKEWLASERYSGDRELENPLAAVQMGLIYVNPEGPDGKPDPKAAARDIRETFRRMGMNDEETVALIAGGHTFGKAHGAGPATHVGPEPEAAPIEAQGLGWISSYGKGKGSDTITSGIEGAWTPTPTQWDTSYFDMLFGYDWWLTKSPAGAWQWMAVDPDEKDLAPDAEDPSKKVPTMMMTTDLALRFDPEYEKIARRFHQNPEEFAEAFARAWFKLTHRDMGPKTRYLGPEVPKEDFIWQDPIPEVDYELTEAEIEEIKAKILNSGLTVSELVKTAWASASTFRNSDKRGGANGARIRLAPQKDWEVNEPERLAKVLSVYEDIQRELPKKVSIADLIVLGGSAAVEKAARDAGFDVKVPFFPGRGDATQEQTDVESFAVLEPFADGFRNYQKQEYSVPPEELLVDKAQLLGLTAPEMTVLVGGLRVLGANYRDLPHGVFTDRIGVLTNDFFVNLLDMNYEWVPTDSGIYEIRDRKTGEVRWTATRVDLIFGSNSILRSYAEFYAQDDNQEKFVRDFINAWVKVMNADRFDLVKKARESVTALQLIFHIRSKMVTAVSK

SEQ ID NO: 20076 - protein, 751 aa, Geobacillus stearothermophilus
MENQNRQNAAQCPFHGSVTNQSSNRTTNKDWWPNQLNLSILHQHDRKTNPHDEEFNYAEEFQKLDYWALKEDLRKLMTESQDWWPADYGHYGPLFIRMAWHSAGTYRTGDGRGGASTGTQRFAPLNSWPNNANLDKARRLLWPIKKKYGNKISWADLFILAGNVAIESMGGKTIGFGGGRVDVWHPEEDVYWGSEKEWLASERYSGDRELENPLAAVQMGLTYVNPEGPDGKPDPKAAARDIRETFRRMGMNDEETVALIAGGHTFGKAHGAGPATHVGPEPEAAPIEAQGLGWISSYGKGKGSDTITSGIEGAWTPTPTQWDTSYFDMLFGYDWWLTKSPAGAWQWMAVDPDEKDLAPDAEDPSKKVPTMMMTTDLALRFDPEYEKIARRFHQNPEEFAEAFARAWFKLTHRDMGPKTRYLGPEVPKEDFIWQDPIPEVDYELTEAEIEEIKAKILNSGLTVSELVKTAWASASTFRNSDKRGGANGARIRLAPQKDWEVNEPERLAKVLSVYEDIQRELPKKVSIADLIVLGGSAAVEKAARDAGFDVKVPFFPGRGDATQEQTDVESFAVLEPFADGFRNYQKQEYSVPPEELLVDKAQLLGLTAPEMTVLVGGLRVLGANYRDLPHGVFTDRIGVLTNDFFVNLLDMNYEWVPTDSGIYEIRDRKTGEVRWTATRVDLIFGSNSILRSYAEFYAQDDNQEKFVRDFINAWVKVMNADRFDLVKKARESVTALQSVHSNRSDTARNLQ

SEQ ID NO: 20077 - protein, 751 aa, Geobacillus stearothermophilus
MENQNRQNAAQCPFHGSVTNQSSNRTTNKDWWPNQLNLSILHQHDRKTNPHDEEFNYAEEFQKLDYWALKEDLRKLMTESQDWWPADYGHYGPLFIRMAWHSAGTYRTGDGRGGASTGTQRFAPLNSWPNNANLDKARRLLWPIKKKYGNKISWADLFILAGNVAIESMGGKTIGFGGGRVDVWHPEEDVYWGSEKEWLASERYSGDRELENPLAAVQMGLTYVNPEGPDGKPDPKAAARDIRETFRRMGMNDEETVALIAGGHTFGKAHGAGPATHVGPEPEAAPIEAQGLGWISSYGKGKGSDTITSGIEGAWTPTPTQWDTSYFDMLFGYDWWLTKSPAGAWQWMAVDPDEKDLAPDAEDPSKKVPTMMMTTDLALRFDPEYEKIARRFHQNPEEFAEAFARAWFKLTHRDMGPKTRYLGPEVPKEDFIWQDPIPEVDYELTEAEIEEIKAKILNSGLTVSELVKTAWASASTFRNSDKRGGANGARIRLAPQKDWEVNEPERLAKVLSVYEDIQRELPKKVSIADLIVLGGSAAVEKAARDAGFDVKVPFFPGRGDATQEQTDVESFAVLEPFADGFRNYQKQEYSVPPEELLVDKAQLLGLTAPEMTVLVGGLRVLGANYRDLPHGVFTDRIGVLTNDFFVNLLDMNYEWVPTDSGIYEIRDRKTGEVRWTATRVDLIFGSNSILRSYAEFYAQDDNQEKFVRDFINAWVKVMNADRFDLVKKARESVTALQLNCHNRSMGSTTLQ

SEQ ID NO: 20078 - protein, 751 aa, Geobacillus stearothermophilus
MENQNRQNAAQCPFHGSVTNQSSNRTTNKDWWPNQLNLSILHQHDRKTNPHDEEFNYAEEFQKLDYWALKEDLRKLMTESQDWWPADYGHYGPLFIRMAWHSAGTYRTGDGRGGASTGTQRFAPLNSWPNNANLDKARRLLWPIKKKYGNKISWADLFILAGNVAIESMGGKTIGFGGGRVDVWHPEEDVYWGSEKEWLASERYSGDRELENPLAAVQMGLTYVNPEGPDGKPDPKAAARDIRETFRRMGMNDEETVALIAGGHTFGKAHGAGPATHVGPEPEAAPIEAQGLGWISSYGKGKGSDTITSGIEGAWTPTPTQWDTSYFDMLFGYDWWLTKSPAGAWQWMAVDPDEKDLAPDAEDPSKKVPTMMMTTDLALRFDPEYEKIARRFHQNPEEFAEAFARAWFKLTHRDMGPKTRYLGPEVPKEDFIWQDPIPEVDYELTEAEIEEIKAKILNSGLTVSELVKTAWASASTFRNSDKRGGANGARIRLAPQKDWEVNEPERLAKVLSVYEDIQRELPKKVSIADLIVLGGSAAVEKAARDAGFDVKVPFFPGRGDATQEQTDVESFAVLEPFADGFRNYQKQEYSVPPEELLVDKAQLLGLTAPEMTVLVGGLRVLGANYRDLPHGVFTDRIGVLTNDFFVNLLDMNYEWVPTDSGIYEIRDRKTGEVRWTATRVDLIFGSNSILRSYAEFYAQDDNQEKFVRDFINAWVKVMNADRFDLVKKARESVTALQTFGDPRSVAEDVLQ

SEQ ID NO: 20079 - protein, 751 aa, Geobacillus stearothermophilus
MENQNRQNAAQCPFHGSVTNQSSNRTTNKDWWPNQLNLSILHQHDRKTNPHDEEFNYAEEFQKLDYWALKEDLRKLMTESQDWWPADYGHYGPLFIRMAWHSAGTYRTGDGRGGASTGTQRFAPLNSWPNNANLDKARRLLWPIKKKYGNKISWADLFILAGNVAIESMGGKTIGFGGGRVDVWHPEEDVYWGSEKEWLASERYSGDRELENPLAAVQMGLTYVNPEGPDGKPDPKAAARDIRETFRRMGMNDEETVALIAGGHTFGKAHGAGPATHVGPEPEAAPIEAQGLGWISSYGKGKGSDTITSGIEGAWTPTPTQWDTSYFDMLFGYDWWLTKSPAGAWQWMAVDPDEKDLAPDAEDPSKKVPTMMMTTDLALRFDPEYEKIARRFHQNPEEFAEAFARAWFKLTHRDMGPKTRYLGPEVPKEDFIWQDPIPEVDYELTEAEIEEIKAKILNSGLTVSELVKTAWASASTFRNSDKRGGANGARIRLAPQKDWEVNEPERLAKVLSVYEDIQRELPKKVSIADLIVLGGSAAVEKAARDAGFDVKVPFFPGRGDATQEQTDVESFAVLEPFADGFRNYQKQEYSVPPEELLVDKAQLLGLTAPEMTVLVGGLRVLGANYRDLPHGVFTDRIGVLTNDFFVNLLDMNYEWVPTDSGIYEIRDRKTGEVRWTATRVDLIFGSNSILRSYAEFYAQDDNQEKFVRDFINAWVKVMNADRFDLVKKARESVTALQIIYDDRSEKTVDLQ

SEQ ID NO: 20080 - protein, 751 aa, Geobacillus stearothermophilus
MENQNRQNAAQCPFHGSVTNQSSNRTTNKDWWPNQLNLSILHQHDRKTNPHDEEFNYAEEFQKLDYWALKEDLRKLMTESQDWWPADYGHYGPLFIRMAWHSAGTYRIGDGRGGASTGTQRFAPLNSWPDNANLDKARRLLWPIKKKYGNKISWADLFILAGNVAIESMGGKTIGFGGGRVDVWHPEEDVYWGSEKEWLASERYSGDRELENPLAAVQMGLIYVNPEGPDGKPDPKAAARDIRETFRRMGMNDEETVALIAGGHTFGKAHGAGPATHVGPEPEAAPIEAQGLGWISSYGKGKGSDTITSGIEGAWTPTPTQWDTSYFDMLFGYDWWLTKSPAGAWQWMAVDPDEKDLAPDAEDPSKKVPTMMMTTDLALRFDPEYEKIARRFHQNPEEFAEAFARAWFKLTHRDMGPKTRYLGPEVPKEDFIWQDPIPEVDYELTEAEIEEIKAKILNSGLTVSELVKTAWASASTFRNSDKRGGANGARIRLAPQKDWEVNEPERLAKVLSVYEDIQRELPKKVSIADLIVLGGSAAVEKAARDAGFDVKVPFFPGRGDATQEQTDVESFAVLEPFADGFRNYQKQEYSVPPEELLVDKAQLLGLTAPEMTVLVGGLRVLGANYRDLPHGVFTDRIGVLTNDFFVNLLDMNYEWVPTDSGIYEIRDRKTGEVRWTATRVDLIFGSNSILRSYAEFYAQDDNQEKFVRDFINAWVKVMNADRFDLVKKARESVTALQVYPYTRSKGVGVLQ

SEQ ID NO: 20081 - protein, 751 aa, Geobacillus stearothermophilus
MENQNRQNAAQCPFHGSVTNQSSNRTTNKDWWPNQLNLSILHQHDRKTNPHDEEFNYAEEFQKLDYWALKEDLRKLMTESQDWWPADYGHYGPLFIRMAWHSAGTYRIGDGRGGASTGTQRFAPLNSWPDNANLDKARRLLWPIKKKYGNKISWADLFILAGNVAIESMGGKTIGFGGGRVDVWHPEEDVYWGSEKEWLASERYSGDRELENPLAAVQMGLIYVNPEGPDGKPDPKAAARDIRETFRRMGMNDEETVALIAGGHTFGKAHGAGPATHVGPEPEAAPIEAQGLGWISSYGKGKGSDTITSGIEGAWTPTPTQWDTSYFDMLFGYDWWLTKSPAGAWQWMAVDPDEKDLAPDAEDPSKKVPTMMMTTDLALRFDPEYEKIARRFHQNPEEFAEAFARAWFKLTHRDMGPKTRYLGPEVPKEDFIWQDPIPEVDYELTEAEIEEIKAKILNSGLTVSELVKTAWASASTFRNSDKRGGANGARIRLAPQKDWEVNEPERLAKVLSVYEDIQRELPKKVSIADLIVLGGSAAVEKAARDAGFDVKVPFFPGRGDATQEQTDVESFAVLEPFADGFRNYQKQEYSVPPEELLVDKAQLLGLTAPEMTVLVGGLRVLGANYRDLPHGVFTDRIGVLTNDFFVNLLDMNYEWVPTDSGIYEIRDRKTGEVRWTATRVDLIFGSNSILRSYAEFYAQDDNQEKFVRDFINAWVKVMNADRFDLVKKARESVTALQCFCNFRSVGINTLQ

SEQ ID NO: 20082 - protein, 751 aa, Geobacillus stearothermophilus
MENQNRQNAAQCPFHGSVTNQSSNRTTNKDWWPNQLNLSILHQHDRKTNPHDEEFNYAEEFQKLDYWALKEDLRKLMTESQDWWPADYGHYGPLFIRMAWHSAGTYRTGDGRGGASTGTQRFAPLNSWPNNANLDKARRLLWPIKKKYGNKISWADLFILAGNVAIESMGGKTIGFGGGRVDVWHPEEDVYWGSEKEWLASERYSGDRELENPLAAVQMGLTYVNPEGPDGKPDPKAAARDIRETFRRMGMNDEETVALIAGGHTFGKAHGAGPATHVGPEPEAAPIEAQGLGWISSYGKGKGSDTITSGIEGAWTPTPTQWDTSYFDMLFGYDWWLTKSPAGAWQWMAVDPDEKDLAPDAEDPSKKVPTMMMTTDLALRFDPEYEKIARRFHQNPEEFAEAFARAWFKLTHRDMGPKTRYLGPEVPKEDFIWQDPIPEVDYELTEAEIEEIKAKILNSGLTVSELVKTAWASASTFRNSDKRGGANGARIRLAPQKDWEVNEPERLAKVLSVYEDIQRELPKKVSIADLIVLGGSAAVEKAARDAGFDVKVPFFPGRGDATQEQTDVESFAVLEPFADGFRNYQKQEYSVPPEELLVDKAQLLGLTAPEMTVLVGGLRVLGANYRDLPHGVFTDRIGVLTNDFFVNLLDMNYEWVPTDSGIYEIRDRKTGEVRWTATRVDLIFGSNSILRSYAEFYAQDDNQEKFVRDFINAWVKVMNADRFDLVKKARESVTALQGCAALRSKIGKRLQ

SEQ ID NO: 20083 - protein, 751 aa, Geobacillus stearothermophilus
MENQNRQNAAQCPFHGSVTNQSSNRTTNKDWWPNQLNLSILHQHDRKTNPHDEEFNYAEEFQKLDYWALKEDLRKLMTESQDWWPADYGHYGPLFIRMAWHSAGTYRIGDGRGGASTGTQRFAPLNSWPDNANLDKARRLLWPIKKKYGNKISWADLFILAGNVAIESMGGKTIGFGGGRVDVWHPEEDVYWGSEKEWLASERYSGDRELENPLAAVQMGLIYVNPEGPDGKPDPKAAARDIRETFRRMGMNDEETVALIAGGHTFGKAHGAGPATHVGPEPEAAPIEAQGLGWISSYGKGKGSDTITSGIEGAWTPTPTQWDTSYFDMLFGYDWWLTKSPAGAWQWMAVDPDEKDLAPDAEDPSKKVPTMMMTTDLALRFDPEYEKIARRFHQNPEEFAEAFARAWFKLTHRDMGPKTRYLGPEVPKEDFIWQDPIPEVDYELTEAEIEEIKAKILNSGLTVSELVKTAWASASTFRNSDKRGGANGARIRLAPQKDWEVNEPERLAKVLSVYEDIQRELPKKVSIADLIVLGGSAAVEKAARDAGFDVKVPFFPGRGDATQEQTDVESFAVLEPFADGFRNYQKQEYSVPPEELLVDKAQLLGLTAPEMTVLVGGLRVLGANYRDLPHGVFTDRIGVLTNDFFVNLLDMNYEWVPTDSGIYEIRDRKTGEVRWTATRVDLIFGSNSILRSYAEFYAQDDNQEKFVRDFINAWVKVMNADRFDLVKKARESVTALQNNCDNRSDVVVTLQ

SEQ ID NO: 20084 - protein, 752 aa, Geobacillus stearothermophilus
MENQNRQNAAQCPFHGSVTNQSSNRTTNKDWWPNQLNLSILHQHDRKTNPHDEEFNYAEEFQKLDYWALKEDLRKLMTESQDWWPADYGHYGPLFIRMAWHSAGTYRIGDGRGGASTGTQRFAPLNSWPDNANLDKARRLLWPIKKKYGNKISWADLFILAGNVAIESMGGKTIGFGGGRVDVWHPEEDVYWGSEKEWLASERYSGDRELENPLAAVQMGLIYVNPEGPDGKPDPKAAARDIRETFRRMGMNDEETVALIAGGHTFGKAHGAGPATHVGPEPEAAPIEAQGLGWISSYGKGKGSDTITSGIEGAWTPTPTQWDTSYFDMLFGYDWWLTKSPAGAWQWMAVDPDEKDLAPDAEDPSKKVPTMMMTTDLALRFDPEYEKIARRFHQNPEEFAEAFARAWFKLTHRDMGPKTRYLGPEVPKEDFIWQDPIPEVDYELTEAEIEEIKAKILNSGLTVSELVKTAWASASTFRNSDKRGGANGARIRLAPQKDWEVNEPERLAKVLSVYEDIQRELPKKVSIADLIVLGGSAAVEKAARDAGFDVKVPFFPGRGDATQEQTDVESFAVLEPFADGFRNYQKQEYSVPPEELLVDKAQLLGLTAPEMTVLVGGLRVLGANYRDLPHGVFTDRIGVLTNDFFVNLLDMNYEWVPTDSGIYEIRDRKTGEVRWTATRVDLIFGSNSILRSYAEFYAQDDNQEKFVRDFINAWVKVMNADRFDLVKKARESVTALQTGALPDLLLIINCSK

SEQ ID NO: 20085 - protein, 751 aa, Geobacillus stearothermophilus
MENQNRQNAAQCPFHGSVTNQSSNRTTNKDWWPNQLNLSILHQHDRKTNPHDEEFNYAEEFQKLDYWALKEDLRKLMTESQDWWPADYGHYGPLFIRMAWHSAGTYRTGDGRGGASTGTQRFAPLNSWPNNANLDKARRLLWPIKKKYGNKISWADLFILAGNVAIESMGGKTIGFGGGRVDVWHPEEDVYWGSEKEWLASERYSGDRELENPLAAVQMGLTYVNPEGPDGKPDPKAAARDIRETFRRMGMNDEETVALIAGGHTFGKAHGAGPATHVGPEPEAAPIEAQGLGWISSYGKGKGSDTITSGIEGAWTPTPTQWDTSYFDMLFGYDWWLTKSPAGAWQWMAVDPDEKDLAPDAEDPSKKVPTMMMTTDLALRFDPEYEKIARRFHQNPEEFAEAFARAWFKLTHRDMGPKTRYLGPEVPKEDFIWQDPIPEVDYELTEAEIEEIKAKILNSGLTVSELVKTAWASASTFRNSDKRGGANGARIRLAPQKDWEVNEPERLAKVLSVYEDIQRELPKKVSIADLIVLGGSAAVEKAARDAGFDVKVPFFPGRGDATQEQTDVESFAVLEPFADGFRNYQKQEYSVPPEELLVDKAQLLGLTAPEMTVLVGGLRVLGANYRDLPHGVFTDRIGVLTNDFFVNLLDMNYEWVPTDSGIYEIRDRKTGEVRWTATRVDLIFGSNSILRSYAEFYAQDDNQEKFVRDFINAWVKVMNADRFDLVKKARESVTALQFRYNRRSGDVTVLQ

SEQ ID NO: 20086 - protein, 751 aa, Geobacillus stearothermophilus
MENQNRQNAAQCPFHGSVTNQSSNRTTNKDWWPNQLNLSILHQHDRKTNPHDEEFNYAEEFQKLDYWALKEDLRKLMTESQDWWPADYGHYGPLFIRMAWHSAGTYRTGDGRGGASTGTQRFAPLNSWPNNANLDKARRLLWPIKKKYGNKISWADLFILAGNVAIESMGGKTIGFGGGRVDVWHPEEDVYWGSEKEWLASERYSGDRELENPLAAVQMGLTYVNPEGPDGKPDPKAAARDIRETFRRMGMNDEETVALIAGGHTFGKAHGAGPATHVGPEPEAAPIEAQGLGWISSYGKGKGSDTITSGIEGAWTPTPTQWDTSYFDMLFGYDWWLTKSPAGAWQWMAVDPDEKDLAPDAEDPSKKVPTMMMTTDLALRFDPEYEKIARRFHQNPEEFAEAFARAWFKLTHRDMGPKTRYLGPEVPKEDFIWQDPIPEVDYELTEAEIEEIKAKILNSGLTVSELVKTAWASASTFRNSDKRGGANGARIRLAPQKDWEVNEPERLAKVLSVYEDIQRELPKKVSIADLIVLGGSAAVEKAARDAGFDVKVPFFPGRGDATQEQTDVESFAVLEPFADGFRNYQKQEYSVPPEELLVDKAQLLGLTAPEMTVLVGGLRVLGANYRDLPHGVFTDRIGVLTNDFFVNLLDMNYEWVPTDSGIYEIRDRKTGEVRWTATRVDLIFGSNSILRSYAEFYAQDDNQEKFVRDFINAWVKVMNADRFDLVKKARESVTALQFYSFVRSVTEEKLQ

SEQ ID NO: 20087 - protein, 751 aa, Geobacillus stearothermophilus
MENQNRQNAAQCPFHGSVTNQSSNRTTNKDWWPNQLNLSILHQHDRKTNPHDEEFNYAEEFQKLDYWALKEDLRKLMTESQDWWPADYGHYGPLFIRMAWHSAGTYRTGDGRGGASTGTQRFAPLNSWPNNANLDKARRLLWPIKKKYGNKISWADLFILAGNVAIESMGGKTIGFGGGRVDVWHPEEDVYWGSEKEWLASERYSGDRELENPLAAVQMGLTYVNPEGPDGKPDPKAAARDIRETFRRMGMNDEETVALIAGGHTFGKAHGAGPATHVGPEPEAAPIEAQGLGWISSYGKGKGSDTITSGIEGAWTPTPTQWDTSYFDMLFGYDWWLTKSPAGAWQWMAVDPDEKDLAPDAEDPSKKVPTMMMTTDLALRFDPEYEKIARRFHQNPEEFAEAFARAWFKLTHRDMGPKTRYLGPEVPKEDFIWQDPIPEVDYELTEAEIEEIKAKILNSGLTVSELVKTAWASASTFRNSDKRGGANGARIRLAPQKDWEVNEPERLAKVLSVYEDIQRELPKKVSIADLIVLGGSAAVEKAARDAGFDVKVPFFPGRGDATQEQTDVESFAVLEPFADGFRNYQKQEYSVPPEELLVDKAQLLGLTAPEMTVLVGGLRVLGANYRDLPHGVFTDRIGVLTNDFFVNLLDMNYEWVPTDSGIYEIRDRKTGEVRWTATRVDLIFGSNSILRSYAEFYAQDDNQEKFVRDFINAWVKVMNADRFDLVKKARESVTALQYPAPFRSVSVGSLQ

SEQ ID NO: 20088 - protein, 751 aa, Geobacillus stearothermophilus
MENQNRQNAAQCPFHGSVTNQSSNRTTNKDWWPNQLNLSILHQHDRKTNPHDEEFNYAEEFQKLDYWALKEDLRKLMTESQDWWPADYGHYGPLFIRMAWHSAGTYRTGDGRGGASTGTQRFAPLNSWPNNANLDKARRLLWPIKKKYGNKISWADLFILAGNVAIESMGGKTIGFGGGRVDVWHPEEDVYWGSEKEWLASERYSGDRELENPLAAVQMGLTYVNPEGPDGKPDPKAAARDIRETFRRMGMNDEETVALIAGGHTFGKAHGAGPATHVGPEPEAAPIEAQGLGWISSYGKGKGSDTITSGIEGAWTPTPTQWDTSYFDMLFGYDWWLTKSPAGAWQWMAVDPDEKDLAPDAEDPSKKVPTMMMTTDLALRFDPEYEKIARRFHQNPEEFAEAFARAWFKLTHRDMGPKTRYLGPEVPKEDFIWQDPIPEVDYELTEAEIEEIKAKILNSGLTVSELVKTAWASASTFRNSDKRGGANGARIRLAPQKDWEVNEPERLAKVLSVYEDIQRELPKKVSIADLIVLGGSAAVEKAARDAGFDVKVPFFPGRGDATQEQTDVESFAVLEPFADGFRNYQKQEYSVPPEELLVDKAQLLGLTAPEMTVLVGGLRVLGANYRDLPHGVFTDRIGVLTNDFFVNLLDMNYEWVPTDSGIYEIRDRKTGEVRWTATRVDLIFGSNSILRSYAEFYAQDDNQEKFVRDFINAWVKVMNADRFDLVKKARESVTALQSDLSFRSVGVDILQ

SEQ ID NO: 20089 - protein, 751 aa, Geobacillus stearothermophilus
MENQNRQNAAQCPFHGSVTNQSSNRTTNKDWWPNQLNLSILHQHDRKTNPHDEEFNYAEEFQKLDYWALKEDLRKLMTESQDWWPADYGHYGPLFIRMAWHSAGTYRTGDGRGGASTGTQRFAPLNSWPNNANLDKARRLLWPIKKKYGNKISWADLFILAGNVAIESMGGKTIGFGGGRVDVWHPEEDVYWGSEKEWLASERYSGDRELENPLAAVQMGLTYVNPEGPDGKPDPKAAARDIRETFRRMGMNDEETVALIAGGHTFGKAHGAGPATHVGPEPEAAPIEAQGLGWISSYGKGKGSDTITSGIEGAWTPTPTQWDTSYFDMLFGYDWWLTKSPAGAWQWMAVDPDEKDLAPDAEDPSKKVPTMMMTTDLALRFDPEYEKIARRFHQNPEEFAEAFARAWFKLTHRDMGPKTRYLGPEVPKEDFIWQDPIPEVDYELTEAEIEEIKAKILNSGLTVSELVKTAWASASTFRNSDKRGGANGARIRLAPQKDWEVNEPERLAKVLSVYEDIQRELPKKVSIADLIVLGGSAAVEKAARDAGFDVKVPFFPGRGDATQEQTDVESFAVLEPFADGFRNYQKQEYSVPPEELLVDKAQLLGLTAPEMTVLVGGLRVLGANYRDLPHGVFTDRIGVLTNDFFVNLLDMNYEWVPTDSGIYEIRDRKTGEVRWTATRVDLIFGSNSILRSYAEFYAQDDNQEKFVRDFINAWVKVMNADRFDLVKKARESVTALQGCLSCRSIVIVGLQ

SEQ ID NO: 20090 - protein, 751 aa, Geobacillus stearothermophilus
MENQNRQNAAQCPFHGSVTNQSSNRTTNKDWWPNQLNLSILHQHDRKTNPHDEEFNYAEEFQKLDYWALKEDLRKLMTESQDWWPADYGHYGPLFIRMAWHSAGTYRIGDGRGGASTGTQRFAPLNSWPDNANLDKARRLLWPIKKKYGNKISWADLFILAGNVAIESMGGKTIGFGGGRVDVWHPEEDVYWGSEKEWLASERYSGDRELENPLAAVQMGLIYVNPEGPDGKPDPKAAARDIRETFRRMGMNDEETVALIAGGHTFGKAHGAGPATHVGPEPEAAPIEAQGLGWISSYGKGKGSDTITSGIEGAWTPTPTQWDTSYFDMLFGYDWWLTKSPAGAWQWMAVDPDEKDLAPDAEDPSKKVPTMMMTTDLALRFDPEYEKIARRFHQNPEEFAEAFARAWFKLTHRDMGPKTRYLGPEVPKEDFIWQDPIPEVDYELTEAEIEEIKAKILNSGLTVSELVKTAWASASTFRNSDKRGGANGARIRLAPQKDWEVNEPERLAKVLSVYEDIQRELPKKVSIADLIVLGGSAAVEKAARDAGFDVKVPFFPGRGDATQEQTDVESFAVLEPFADGFRNYQKQEYSVPPEELLVDKAQLLGLTAPEMTVLVGGLRVLGANYRDLPHGVFTDRIGVLTNDFFVNLLDMNYEWVPTDSGIYEIRDRKTGEVRWTATRVDLIFGSNSILRSYAEFYAQDDNQEKFVRDFINAWVKVMNADRFDLVKKARESVTALQCIIFSRSDVAIALQ

SEQ ID NO: 20091 - protein, 751 aa, Geobacillus stearothermophilus
MENQNRQNAAQCPFHGSVTNQSSNRTTNKDWWPNQLNLSILHQHDRKTNPHDEEFNYAEEFQKLDYWALKEDLRKLMTESQDWWPADYGHYGPLFIRMAWHSAGTYRIGDGRGGASTGTQRFAPLNSWPDNANLDKARRLLWPIKKKYGNKISWADLFILAGNVAIESMGGKTIGFGGGRVDVWHPEEDVYWGSEKEWLASERYSGDRELENPLAAVQMGLIYVNPEGPDGKPDPKAAARDIRETFRRMGMNDEETVALIAGGHTFGKAHGAGPATHVGPEPEAAPIEAQGLGWISSYGKGKGSDTITSGIEGAWTPTPTQWDTSYFDMLFGYDWWLTKSPAGAWQWMAVDPDEKDLAPDAEDPSKKVPTMMMTTDLALRFDPEYEKIARRFHQNPEEFAEAFARAWFKLTHRDMGPKTRYLGPEVPKEDFIWQDPIPEVDYELTEAEIEEIKAKILNSGLTVSELVKTAWASASTFRNSDKRGGANGARIRLAPQKDWEVNEPERLAKVLSVYEDIQRELPKKVSIADLIVLGGSAAVEKAARDAGFDVKVPFFPGRGDATQEQTDVESFAVLEPFADGFRNYQKQEYSVPPEELLVDKAQLLGLTAPEMTVLVGGLRVLGANYRDLPHGVFTDRIGVLTNDFFVNLLDMNYEWVPTDSGIYEIRDRKTGEVRWTATRVDLIFGSNSILRSYAEFYAQDDNQEKFVRDFINAWVKVMNADRFDLVKKARESVTALQGSNYPRSRITKDLQ

SEQ ID NO: 20092 - protein, 743 aa, Geobacillus stearothermophilus
MENQNRQNAAQCPFHGSVTNQSSNRTTNKDWWPNQLNLSILHQHDRKTNPHDEEFNYAEEFQKLDYWALKEDLRKLMTESQDWWPADYGHYGPLFIRMAWHSAGTYRIGDGRGGASTGTQRFAPLNSWPDNANLDKARRLLWPIKKKYGNKISWADLFILAGNVAIESMGGKTIGFGGGRVDVWHPEEDVYWGSEKEWLASERYSGDRELENPLAAVQMGLIYVNPEGPDGKPDPKAAARDIRETFRRMGMNDEETVALIAGGHTFGKAHGAGPATHVGPEPEAAPIEAQGLGWISSYGKGKGSDTITSGIEGAWTPTPTQWDTSYFDMLFGYDWWLTKSPAGAWQWMAVDPDEKDLAPDAEDPSKKVPTMMMTTDLALRFDPEYEKIARRFHQNPEEFAEAFARAWFKLTHRDMGPKTRYLGPEVPKEDFIWQDPIPEVDYELTEAEIEEIKAKILNSGLTVSELVKTAWASASTFRNSDKRGGANGARIRLAPQKDWEVNEPERLAKVLSVYEDIQRELPKKVSIADLIVLGGSAAVEKAARDAGFDVKVPFFPGRGDATQEQTDVESFAVLEPFADGFRNYQKQEYSVPPEELLVDKAQLLGLTAPEMTVLVGGLRVLGANYRDLPHGVFTDRIGVLTNDFFVNLLDMNYEWVPTDSGIYEIRDRKTGEVRWTATRVDLIFGSNSILRSYAEFYAQDDNQEKFVRDFINAWVKVMNADRFDLVKKARESVTALQYFLNFY

SEQ ID NO: 20093 - protein, 751 aa, Geobacillus stearothermophilus
MENQNRQNAAQCPFHGSVTNQSSNRTTNKDWWPNQLNLSILHQHDRKTNPHDEEFNYAEEFQKLDYWALKEDLRKLMTESQDWWPADYGHYGPLFIRMAWHSAGTYRIGDGRGGASTGTQRFAPLNSWPDNANLDKARRLLWPIKKKYGNKISWADLFILAGNVAIESMGGKTIGFGGGRVDVWHPEEDVYWGSEKEWLASERYSGDRELENPLAAVQMGLIYVNPEGPDGKPDPKAAARDIRETFRRMGMNDEETVALIAGGHTFGKAHGAGPATHVGPEPEAAPIEAQGLGWISSYGKGKGSDTITSGIEGAWTPTPTQWDTSYFDMLFGYDWWLTKSPAGAWQWMAVDPDEKDLAPDAEDPSKKVPTMMMTTDLALRFDPEYEKIARRFHQNPEEFAEAFARAWFKLTHRDMGPKTRYLGPEVPKEDFIWQDPIPEVDYELTEAEIEEIKAKILNSGLTVSELVKTAWASASTFRNSDKRGGANGARIRLAPQKDWEVNEPERLAKVLSVYEDIQRELPKKVSIADLIVLGGSAAVEKAARDAGFDVKVPFFPGRGDATQEQTDVESFAVLEPFADGFRNYQKQEYSVPPEELLVDKAQLLGLTAPEMTVLVGGLRVLGANYRDLPHGVFTDRIGVLTNDFFVNLLDMNYEWVPTDSGIYEIRDRKTGEVRWTATRVDLIFGSNSILRSYAEFYAQDDNQEKFVRDFINAWVKVMNADRFDLVKKARESVTALQINLLHRSERGNELQ

SEQ ID NO: 20094 - protein, 751 aa, Yersinia pestis KIM
MLKNSCLLVKGDLYMLKKILPVLITLAIVHNTPTAWAAEAPKTDSFYLPKSLDLSPLRLHNIESNPYGKDFNYAQQFKTLDLEAVKKDIKTVLTTSQDWWPADYGNYGPFFIRMAWHGAGTYRIYDGRGGADGGQQRFEPLNSWPDNANLDKARRLLWPIKKKYGAKISWGDLMVLTGNVALESMGFKTLGFAGGREDDWQSDLVYWGAGNKMLSDNRDKNGKLPKPLAATQMGLIYVNPEGPNGKPDPVAAAKDIREAFARMAMNDEETVALIAGGHTFGKAHGAASPEKCLGAAPGEAGLEQQGLGWANKCGSGNGKDTITSGLEGAWTTDPTHFTMQYLSNLYKHEWVLTKSPAGAWQWKPKNAANVVPDATDPTKFHPLMMFTTDIALKVDPEYKKITTRFLENPEEFKMAFARAWFKLTHRDMGPAARYLGDEVPKETFIWQDPLPAANYKMIDSADISELKDKILKTGLSDTKLIKTAWASASTFRGTDFRGGDNGARIRLAPQKDWPVNDPAELHSVLAALMEVQNNFNKDRSDGKKVSLSDLIVLGGNAAIEDAAKKAGYSISIPFTPGRTDASQEETDVSSFAVLEPTADGFRNYYDAKRNTLSPIASLIDRANKLELTVPEMTVLIGGLRVLDVNSGGSKAGVLTNTPGQLNNNFFVNLLDMSTKWTKSPKAEGYFDGYDRKTGKLKWTASSVDLVFGSNPELRAVAEVYASDDAKEKFVHDFTKVWEKVMNLDRFDIKNN

SEQ ID NO: 20095 - protein, 530 aa, Leptospira interrogans serovar lai str. 56601
MILVNFENEKEISLSKPQNLLEISLNNGIPHTHACGGNARCSTCRVLVLENPSHLSPPEQKEKELSQKKGFPKSVRLACQTTVLGDVRVRRIVLDEEDYNLTIPGSATISGEEKEIAILFSDIRDFTLFSESHLPYDVIHILNRYFYKMGDVILKHGGKIDKYIGDGLMALFGVNGGSPQEICISALRAAKEMELELYSLNEYLKSHLHTSFRIGVGVHYGNCILGQLGHPANMSYTAIGDSVNIASRIESKTKKSGASVLISESLYKQVKEKVVKGRVFSAQLKGKTGNYKLYEIQEILEKVDANLWEEAKNSLRRIILVREVGSWLKLVYHLSCLFDENQNWIGLSAANSFQKFSKLPENGDLVQNFYQIKDTFNEQFQNSFSFADLLALAGAVAIEKSGGPKIPIQPGRKDRLLSEVFQILPLSMQTQKDQLPYLQKMKLGIRDIVLISGARTIGWLGGESFTSNPYNFDNSYFHVLLKAGLEGPLLIPNDRELLKNDESRAFVLDYALDPSKFFEDFTSTYLKLTS

SEQ ID NO: 20096 - protein, 737 aa, Yersinia pestis CO92
MLKKILPVLITLAIVHNTPTAWAAEAPKTDSFYLPKSLDLSPLRLHNIESNPYGKDFNYAQQFKTLDLEAVKKDIKTVLTTSQDWWPADYGNYGPFFIRMAWHGAGTYRIYDGRGGADGGQQRFEPLNSWPDNANLDKARRLLWPIKKKYGAKISWGDLMVLTGNVALESMGFKTLGFAGGREDDWQSDLVYWGAGNKMLSDNRDKNGKLPKPLAATQMGLIYVNPEGPNGKPDPVAAAKDIREAFARMAMNDEETVALIAGGHTFGKAHGAASPEKCLGAAPGEAGLEQQGLGWANKCGSGNGKDTITSGLEGAWTTDPTHFTMQYLSNLYKHEWVLTKSPAGAWQWKPKNAANVVPDATDPTKFHPLMMFTTDIALKVDPEYKKITTRFLENPEEFKMAFARAWFKLTHRDMGPAARYLGDEVPKETFIWQDPLPAANYKMIDSADISELKDKILKTGLSDTKLIKTAWASASTFRGTDFRGGDNGARIRLAPQKDWPVNDPAELHSVLAALMEVQNNFNKDRSDGKKVSLSDLIVLGGNAAIEDAAKKAGYSISIPFTPGRTDASQEETDVSSFAVLEPTADGFRNYYDAKRNTLSPIASLIDRANKLELTVPEMTVLIGGLRVLDVNSGGSKAGVLTNTPGQLNNNFFVNLLDMSTKWTKSPKAEGYFDGYDRKTGKLKWTASSVDLVFGSNPELRAVAEVYASDDAKEKFVHDFTKVWEKVMNLDRFDIKNN

SEQ ID NO: 20097 - protein, 741 aa, Archaeoglobus fulgidus DSM 4304
MMRQGGVMVGARKRWITDWWPNRLNLKILRQNLQNPYGEDYDYVEEVENLDIDAVIRDLKELMRSSQDWWPADFGHYGPLFIRLAWHSAGSYRIFDGRGGARDGSIRFPPRINWPDNINLDKAIRLLWPIKKKYGRKLSWADLIILAGTVAMEDMGVKLFGFALGREDIFEPDESPDWGPEEEMLTAKRGEKEELERPFAATEMGLIYVNPEGPGGNPDPLGSAQEIRVAFRRMGMNDEETVALIAGGHAFGKCHGAGPADYLGPDPSSSPIEMQGLGWKYNYGKGKGSDTFTSGLEVTWSPTPTKFGINYLRILFTYEWELEKSPAGKNQWVAKDAPEIIPDAHDPNKKHRPRMLTADLALRFDPEFSKIARRFLENPEEFEKAFAIAWYKLTHRDMGPKDCYIGKYVPEETFVWQDPLPRRDYELVDEKDVEELKRRILASGLSLSQLVYFAWASASTYRNSDRRGGANGARIRLKPMSVWEVNHPEELKKVIAAYEKIQQEFNEGAKGSEKRISIADLIVLGGIAAVEEAARRAGFSVKVPFIPGRVDAQQEHVDEEFYRVIEPFADGFRNYFRYPERINERDVYTTPEYFLVDKANLLTLTVPEMVVLIGGMRALGANYSHSDYGVLTERPGVLSNDFFVNLLDMSVEWRAADDYRYTFEGYDRKSGELRWRATRVDLILGHHDELRAVAEVYGCDDAKEKFVKDFAAVCAKVMHLDRFDLWRSNRKLYKEITAGLR

SEQ ID NO: 20098 - protein, 296 aa, Euglena gracilis
RSYMEKYAKDEVAYFRDFATAYQRLAELGVPELPVPWDEIRADVAALVAEKGCAPILIRLAWHDAGTYDQQSNTGGPRAVMRFPGGEAEHGSNNGLDIARGLLQPIVDKYSWVSTADLWAFASVVATEVSGGPKIPFRPGRRDAVTAKEAVERGRLPDATQTTNHLRDVFYRMGMTDEEIVALSGAHTMGRCHAERSGFEGPWTDNPLVFDNSYFKLLLERKWTAVTNSVGNLQFQDETGTLMMLTSDLALLMDPSFRKHVERFAADQDAFFRVYAGAYQKLTEGGCPFSKGAVPL

SEQ ID NO: 20099 - protein, 327 aa, Chlamydomonas reinhardtii
MQSARVSRTARHTRPSCRPQRAVAVRVSAKVNVEQLKALKAELYNYINSRGCNPISVRLGWHDSGTYDKNIAEFPARGGANGSIRFKPEIDHGANKGLAIALAILNPIKKKYPDVSYADLFQMASATAIEASGGPKIPMRYGRKDAKGPEECSPDGRLPGAAHPFADGSGSPAEHLRRVFYRMGLNDQDIVVLSGGHTLGRARPERSGFGAEKTKYTDVGPGTSTASPSGATDRPVTPKPVGQQGTSWTVNWLEFDNSYFKEIKAKRDSDLLVLPTDACIFEDDQFRPYAEKYAADQAAFFADYCVSHQKLSELGVEWEEGAPVTLD

SEQ ID NO: 20100 - protein, 250 aa, Physcomitrella patens
MAKSYPNVSEKYAALIEKARRKIRGMVAEKNCAPIILRLAWHGSGTYDQESKTGGPLGTIRFGQELAHGANAGLDIAVNLLQPIKEQFPELSYADFYTLAGVVAVEVTGGPTIPFHPGRKDHETCPVEGRLPDATKGLDHLRCVFTKQMGLTDKDIVVLSGAHTLGRCHKDRSGFEGAWTPNPLRFDNSYFQVLLEGEKDGLIMLPSDKALLDEPKTRELVELYAKDEDKFFEDYAESHMKLSELGFAEA

SEQ ID NO: 20101 - protein, 189 aa, Pinus strobus
AWHSAGTYDVKSKTGGPFGTIKHPDELAHGANNGLDIAIRLLEPIKEQFPTISYADFYQLAGVVAVEITGGPDIPFHPGRPDKTEPPEEGRLPDATKGIDHLRDVFGHMGLSDKEIVALSGAHTLGRCHKERSGFEGAWTSNPLIFDNSYFKELLSGEKEGLLQLPSDKALLEDPIFRSYVEKYAADDD

SEQ ID NO: 20102 - protein, 788 aa, Blumeria graminis
MSVMTRHLLTKSTHKLGVLKHPPAFPLKLRPTIPLSCPIALKFQPKTLSLIQFTQIRNMGDSKCPYRDANVAGGGTHNKDWWPETLKLDALRQHTAESNPLGKDFDYASAFKTLDYEGLKKDLKDLMTDSQDWWPADFGHYGGFFVRMAWHSAGTYRSIDGRGGGGQGQHRFAPLNSWPDNGNLDKARRLLWPIKQKYGNKISWADLYLLTGNVAIESMGGKTFGFACGRPDTWEADDATFWGNETKWLGNDARYKNGSKDPKDIYTRQLEKPLSAVHMGLIYVNPEGPDGIPDPVASARDIRTTFRRMAMNDEETVALIAGGHTFGKTHGAAPATHLGKEPEGAPIEAQGLGWANSYRSGKGPDTITSGLEVIWTKTPINWSNHYLEYLFKYDWELTKSPGGANQWTAKNAEAFIPDAFDPNKKHPPRMLTTDLALRHDKEYEKISLRFLENPDQFADAFARAWFKLLHRDMGPRSRWLGPEIPKEELIWEDPIPEIDHPIISQEDINNLKKEILSSGVGHNKLIQTAWASASTFRGGDKRGGANGARIRLAPQKDWKVNNPPQLTCVLETLGKIQSSFNSSQTGGKIVSLADLIILAGCAALEKAAGVPVPFSPGRADASQEQTDIKSFSNLEPVADGFRNFGRSTPRARAEHMLVDRAQLLTLTPPELTALVGGLRVLDTNFDGSSCGVFTKRPGQLTNDFFVNLLDPAISWKGIDEDEFFEGIDRKTDEKKWIGSRADLVFGSQAELRAIAEVYGSADGNEKLIKDFIAAWNKVMNLDLFNLAH

SEQ ID NO: 20103 - protein, 96 aa, Betula pendula
CDHLRVVFGQQMGLSDQDIVALSGAHTLGRCHKERSGFEGPWTSNPLIFGNTYFTELLSGEKEGLLQLPSDKAPLSDAAFRPLVDKYAADEDAFFV

SEQ ID NO: 20104 - protein, 287 aa, Mesembryanthemum crystallinum
MAMPPVVDSVYLKEIDKARRDLRALISNRSCAPIMLRLAWHDAGTYCAKTKTGGANGSIRNEEEYAHGANNGLKKAIDWCEEVKAKYPKITYADLYQLAGVVAVEVTGGPTIEFVPGRKDSKVSTNEGRLPDAKKGPPHLRDIFYRMGLTDKDIVALSGAHTLGRAHPERSGFDGPWTQEPLKFDNSYFVELLKGESEGLLQLPTDKALVEDPAFRPYVELYAKDEDAFFRDYAVSHKKLSELGFTPSGSKSGPKDSTILAQGAVGVAVAAAVVILSYIFEVRKRLK

SEQ ID NO: 20105 - protein, 245 aa, Mesembryanthemum crystallinum
MAAPKVDADYLKHIEGARKELRTIISTKQCAPLMLRLSFHDAGTYDAKTKKGGPNGTVRFELNNPANNGIKTAVDLVEQVKVKHPKVTYADLYQLAGVVAVEVTGGPVINFVPGRPDVQQVDSGSLPLPSGDANHLREVFHRMGLSDRDIVVLSGAHTLGRANRDRSGVDGPFTKNPLKFDNSYYVELLKGDTPELVKFNTDKVLLQDPTFRKYVQLYAKDEKAFLTHYAESHKKMSELGKPKHM

SEQ ID NO: 20106 - protein, 260 aa, Mesembryanthemum crystallinum
MVDQQYMEAIEGARRDLVALVQSKNCAPIFLRLAFHDAANFNAADKTGGVNGSLRLQEELGQPPNGGIKVGIDLIEEVKKKHPTVSYADLYQLAGVVAVGASGGPAIFFVPGRKDTDVADTLNIPNPNGGADHLRTVFHQMGLVDKDIVTLSGAHTLGRAHSNISGFDGPFTREPLKFDNSYYVELLKGDTEGLVKFPTDKVLLQDDVFRPLVEIYAKHQDAFFRDYAESHKKMSELGFTPKFPNPTTGGGCHSHARHCC

SEQ ID NO: 20107 - protein, 254 aa, Mesembryanthemum crystallinum
MACGPVVDQRYLKDLEGARRDLASIIQRKNAAPVLLRLAFHDAANYNVTNNTGGVNGSVRLRQELSQPPNKGIEDGVKFCEEVKKKHPRVTYADIIQLAGVLAVELSGGPCIDFVPGRMDTNVADKLNIPNPRGGADHLRRTFYQMGLSDKDIVVLSGAHTLGRARKENSGFNGPFTRNTLKFDNSYFVELMRGETPGLVKFPTDKALVQDPVFRPLVELYARHEGAFFRDYAESHKKLSELGFTPSLHVWRWM

SEQ ID NO: 20108 - protein, 250 aa, Spinacia oleracea
MGKSYPTVSENYQKSIEKARRKLRGLIAEKQCAPLMLRLAWHSAGTFDCTSKTGGPFGTMKHQAELAHGANNGLVIAVRLLEPIKEQFPEITYADFYQLAEFVAVEVTGGPEVPFHPGREDKPEPPQEGRLPDATKGCDHLRDVFIKQMGLTDQDIVALSGGHTLGRCHKDRSGFEGAWTTNPLVFDNTYFKELLSGEKEGLLQLPSDKALLSDPVFRPLVEKYAADEDAFFADYAEAHLKLSELGFADA

SEQ ID NO: 20109 - protein, 309 aa, Spinacia oleracea
MGRVPIVNENYRRVIEAARRDLHRSLVQDNNNSAPILLRLSFHDAVDYDAATKRGGANGSVRLAQELNRTPNKGIETAVRFCEPIKRRHPDITYADLYQLAGIVAVEVTGGPAIDADVADQDNIPNPRRGADHLRTVFYRMGLNDKDIVVLSGAHALGGAHKDRSGFDGDFTRNPLTFDNSYFVELLRGDTPGLVKFPTDKALLTDPRFRPFVDLYARDQRAFFRDYAESHKKMSLLGLNHPESNLYESNSCSTRLSVVLNPTLSKTEAVQCNTDMLDPMQLEMVAAQAATDTYNMPIYTAVNCNSLRD

SEQ ID NO: 20110 - protein, 288 aa, Gossypium hirsutum
MAFPVVDTEYLKEIDKARRDLRALIALKNCAPIMLRLAWHDAGTYDVSTKTGGPNGSIRNEEEFTHGANSGLKIAIDFCEEVKAKHPKITYADLYQLAGVVAVEVTGGPTIDFVPGRKDSNICPREGRLPDAKRGAPHLRDIFYRMGLSDKDIVALSGGHTLGRAHPERSGFDGPWTNEPLKFDNSYFLELLKGESEGLLKLPTDKALLDDPEFRKYVELYAKDEDAFFRDYAESHKKLSELGFTPTSARSKVMVKDSTVLAQGAVGVAVAAAVVILSYFYEVRKRMK

SEQ ID NO: 20111 - protein, 249 aa, Cucumis sativus
MGKCYPVVSEEYQKAIEKAKRKLRGFIAEKNCAPLMLRLAWHSAGTFCKDSKTGGPFGTMRFKSELAHGANNGLDIAVRLLEPIKEQFPILSYADFYQLAGVVAVEVTGGPDVPFHPGREDKPEPPPEGRLPDATKGSDHLRDVFYTMGLSDQDIVALSGGHTLGRAHKERSGFEGPWTTNPLIFDKSYFTELLTGEKEGLLQLASDKALLSDPVFRPLVEKYAADEDAFFADYAEAHQKLSELGFADA

SEQ ID NO: 20112 - protein, 286 aa, Cucurbita cv. Kurokawa Amakuri
MALPVVDTEYLKEIEKARRDLRALIANRNCAPIMLRLAWHDAGTYDVSTKTGGPNGSIRNQEEYSHGSNNGLKKAIDFCEEVKSKHPKITYADLYQLAGVVAVEVTGGPTIDFVSGRKDSRISPREGRLPDAKKGAPHLRDIFYRMGLSDKDIVALSGGHTLGRAHPERSGFDGPWTEDPLKFDNSYFVELLKGESEGLLKLPTDKALLEDPEFRPYVELYAKDEDAFFKDYAESHKKLSELGFTPGSARAIANDSTVLAQGAVGVAVAAAVVILSYFYEIRKNLK

SEQ ID NO: 20113 - protein, 287 aa, Arabidopsis thaliana
MAAPIVDAEYLKEITKARRELRSLIANKNCAPIMLRLAWHDAGTYDAQSKTGGPNGSIRNEEEHTHGANSGLKIALDLCEGVKAKHPKITYADLYQLAGVVAVEVTGGPDIVFVPGRKDSNVCPKEGRLPDAKQGFQHLRDVFYRMGLSDKDIVALSGGHTLGRAHPERSGFDGPWTQEPLKFDNSYFVELLKGESEGLLKLPTDKTLLEDPEFRRLVELYAKDEDAFFRDYAESHKKLSELGFNPNSSAGKAVADSTILAQSAFGVAVAAAVVAFGYFYEIRKRMK

SEQ ID NO: 20114 - protein, 287 aa, Arabidopsis thaliana
MAAPIVDAEYLKEITKARRELRSLIANKNCAPIMLRLAWHDAGTYDAQSKTGGPNGSIRNEEEHTHGANSGLKIALDLCEGVKAKHPKITYADLYQLAGVVAVEVTGGPDIVFVPGRKDSNVCPKEGRLPDAKQGFQHLRDVFYRMGLSDKDIVALSGGHTLGRAHPERSGFDGPWTQEPLNFDNSYFVRELLKGESEGLLKLPTDKTLLEDPEFRRLVELYADEDAFFRDYAESHKKLSELGFNPNSSAGKAVADSTILAQSAFGVAVAAAVVAFGYFYEIRKRMK

SEQ ID NO: 20115 - protein, 250 aa, Brassica juncea
MTKSYPTVSEDYQKAIEKCKRKLRGLIAEKNCAPIMVRLAWHSAGTFDCASKTGGPFGTMRFDAEQGHGANSGIHIALRLLDPIREQFPTISFADFHQLAGVVAVEVTGGPEIPFHPGREDKPQPPPEGRLPDATKGCDHLRQVFTKQMGLSDKDIVALSGAHTLGRCHKDRSGFEGAWTSNPLIFDNSYFKELLTGEKEGLLQLVSDKALLDDPVFRPLVEKYAADEEAFFADYAEAHLKLSELGFADA

SEQ ID NO: 20116 - protein, 250 aa, Brassica juncea
MTKSYPTVSEDYQKAIEKCKRKLRGLIAEKNCAPIMVRLAWHSAGTFDCASKTGGPFGTMRFDAEQGHGANSGIHIALRLLDPIREQFPAISFADFHQLAGVVAVEVTGGPEIPFHPGREDKPQPPPEGRLPDATKGCDHLRQVFTKQMGLSDKDIVALSGAHTLGRCHKDRSGFEGAWTSNPLIFDNSYFKELLTGEKEGLLQLVSDKALLDDPVFRPLVEKYAADEEAFFADYAEAHLKLSELGFADA

SEQ ID NO: 20117 - protein, 250 aa, Brassica juncea
MTKNYPTVSEVYQKVYEKCKRKLRGLIAEKNCAPIMVRLAWHSAGTFDCASRTGVPFGTMRFDGELAHGANSGLHIALRLLEPIREQFPTISFADFHQLAGVVAVEVTGGPDIPFHPGREDKPQPPPEGRLPDATKGCDHLRQVLLKQMVLTDQDIVALSGAHTLGRYRAAPSGFEGAWTSNPLIFDNSYFKELLTGEKEGLLQLVSDKALLDDPVFRPLVEKYAADEEAFFADYAEAHLKLSELGFADA

SEQ ID NO: 20118 - protein, 250 aa, Brassica napus
MTKNYPAVSEEYQKAIEKCKRKLRGLIAEKNCAPIMVRLAWHSAGTFDCASRTGVPFGTMRFDGELAHGANSGLHIALRLLEPIREQFPTISHADFHQLAGVVAVEVTGGPEIPFHPGREDKPQPPPEGRLPDATKACDHLRQVFLKQMVLTDQDIVALSGAHTLGRCHKDRSGFEGAWTSNPLIFDNSYFKELLSGEKEGLLQLPSDKALLDEPVFRPLVEKYAADEEAFFADYAEAHLKLSELGFADA

SEQ ID NO: 20119 - protein, 250 aa, Brassica oleracea
MTKNYPAVSEEYQKAIEKCKRKLRGLIAEKNCAPIMVRLAWHSAGTFDCASRTGGPFGTMRFDDELAHGANNGLHIALRLLEPIREQFPTISHADFHQLAGVVAVEVTGGPEIPFHPGREDKPQPPPEGRLPDATKGCDHLRQVFLKQMGLTDQDIVALSGAHTLGRCHKDRSGFEGAWTSNPLIFDNSYFKELLSGEKEGLFQLPSDKALLDDPVFRPLVEKYAADEEAFFTDYAEAHLKLSELGFADA

SEQ ID NO: 20120 - protein, 250 aa, Brassica oleracea
MTKSYPTVTEDYQNAIEKCKRKLRGLIAEKNCAPIMVRLAWHSAGTFDCASRTGGPFGTMRFDAEQGHGANSGIHIALRLLEPIREQFPTISFADFHQLAGVVAVEVTGGPEIPFHPGREDKPQPPPEGRLPDATKGCDHLRQVFTKQMGLSDKDIVALSGAHTLGRCHKDRSGFEGAWTSNPLIFDNSYFKELLSGEKEGLLQLVSDKALLDDPVFRPLVEKYADDEEAFFADYAEAHLKLSELGFADA

SEQ ID NO: 20121 - protein, 250 aa, Raphanus sativus
MTKNYPAVSEEYQKEIEKCKRKLRGLIAEKNCAPIMVRLAWHSAGTFDCASRTGGPFGTMRFDDELAHGANNGLHIALRLLEPIREQFPTISHADFHQLAGVVAVEVTGGPEIPFHPGREDKPQPPPEGRLPDATKACDHLRQVFLKQMGLTDQDIVALSGAHTLGRCHKDRSGFEGAWTSNPLIFDNSYFKELLSGEKEGLLQLPSDKALLDDPVFRPLVEKYAADEEAFFADYAEAHLKLSELGFADA

SEQ ID NO: 20122 - protein, 250 aa, Fragaria x ananassa
MGKCYPTVSEEYKKAIDKAKRKLRGLIAEKNCAPLMLRLAWHSAGTYDVKTKTGGPFGTMKQSAELAHGANNGLDIAVRLLEPIKEQFPILSYADFYQLAGVVAVEVTGGPDVPFHPGREDKPEPPPEGRLPDAGKGSDHLREVFGKTMGLSDQDIVALSGGHTLGRAHKERSGFEGPWTPNPLIFDNSYFTVLLSGEKEGLLQLPTDKALLSDPVFRPLVEKYAADEDAFFSDYALAHQRLSELGFAEA

SEQ ID NO: 20123 - protein, 250 aa, Fragaria x ananassa
MGKCYPTVTEEYKKAIDKAKRKLRGLIAEKNCAPLMLRLAWHSAGTYDVKTKTGGPFGTMKQSAELAHGANNGLDIAVRLLEPIKEQFPILSYADFYQLAGVVAVEVTGGPDVPFHPGREDKPEPPPEGRLPDAGKGSDHLREVFGKTMGLSDQDIVALSGGHTLGRAHKERSGFEGPWTPNPLIFDNSYFTVLLSGEKEGLLQLPTDKALLSDPVFRPLVEKYAADEDAFFSDYALAHQRLSELGFAEA

SEQ ID NO: 20124 - protein, 250 aa, Fragaria x ananassa
MGKCYPTVSEEYKKAIDKAKRKLRGLIAEKNCAPLMLRLAWHSAGTYDVKTKTGGPFGTMKQSAELAHGANNGLDIAVRLLEPIKEQFPILSYADFYQLAGVVAVEVTGGPDVPFHPGREDKPEPPPEGRLPDAGKGSDHLREVFGKTMGLSDQDIVALSGGHTLGRAHKERSGFEGPWTPNPLIFDNSYFTVLLSGEKEGLLQLPTDKALLSDPVFRPLVEKYAADEDAFFADYALAHQRLSELGFAEA

SEQ ID NO: 20125 - protein, 250 aa, Fragaria x ananassa
MGKCYPTVTEEYKKAIDKAKRKLRGLIAEKNCAPLMLRLAWHSAGTYDVKTKTGGPFGTMKQSAELAHGANNGLDIAVRLLEPIKEQFPILSYADFYQLAGVVAVEVTGGPDVPFHPGREDKPEPPPEGRLPDAGKGSDHLREVFGKTMGLSDQDIVALSGGHTLGRAHKERSGFEGPWTPNPLIFDNSYFTVLLSGEKEGLLQLPTDKALLSDPVFRPLVEKYAADEDAFFADYALAHQRLSELGFAEA

SEQ ID NO: 20126 - protein, 250 aa, Fragaria x ananassa
MGKCYPTVSEEYKKAIDKAKRKLRGLIAEKNCAPLMLRLAWHSAGTYDVKTKTGGPFGTMKQPAELAHGANNGLDIAVRLLEPIKEQFPILSYADFYQLAGVVAVEVTGGPDVPFHPGREDKPEPPPEGRLPDAGKGSDHLREVFGKTMGLSDQDIVALSGGHTLGRAHKERSGFEGPWTPNPLIFDNSYFTVLLSGEKEGLLQLPTDKALLSDPVFRPLVEKYAADEDAFFADYALAHQRLSELGFAEA

SEQ ID NO: 20127 - protein, 177 aa, Cicer arietinum
LDIAVRLLEPLKEQFPIISYADFYQLGGVVAVEVTGGPEVPFHPGREDKPEPPPEGRLPDATKGSDHLRDVFGKAMGLSDQDIVALSGGHTIGAAHKERSGFEGPWTSNPLIFDNSYFTELLNGEKEGLLKLPSDKALLSDPVFRPLVEKYAADEDAFFADYAEAHLKLSELGFAEA

SEQ ID NO: 20128 - protein, 287 aa, Glycine max
MALPVVVDAEYLKEVDKARRDLRALIANRNCAPLMLRLAWHDAGTYDAKTKTGGPNGSIRNEEEYSHGANNGLKKAIDFCQEVKAKYPKITYADLFQLAGVVAVEVTGGPTIDFVPGRRDSKVSPNEGRLPDAKKGVPHLRDIFYRMGLTDRDIVALSGGHTLGRAHPERSGFDGPWTEDPLKFDNSYFVELLKEDSAGLLKLPTDKALLEDAEFRCYVELYAKDEDAFFRDYAESHKKLSELGFVPSSKPISIKEGTILAQGAVGVVVATAVVILSYLYEVRKRGK

SEQ ID NO: 20129 - protein, 280 aa, Glycine max
MAKPRVDAEYLKEIEKARRDLRALISNRNCAPLMLRLAWHDAGTYDAKTNTGGPNGSIRNRQELNHAANKGLETALAFCEEVKAKHPKISYADLYQLAGVVAVEVTGGPTINFVPGRKDSLESPAEGRLPDAKQGASHLRDIFYRMGLGDKDIVALSGGHTLGKAHKDRSDFHGQWTKDPLKFDNSYFVELLRGESKDLLKLPTDKALVEDPNFRKYVELYAKDEDAFFSDYATSHKKLSELGFIFKNHRSILAKGVIGIAIVLTAVILGYLRELNKKTN

SEQ ID NO: 20130 - protein, 188 aa, Medicago sativa
AWHSAGTFDSKTKTGGPFGTIKHQAELAHGANNGLDIAVRLLEPLKEQFPIISYADFYQLAGVVAVEITGGPEVPFHPGREDKPEPPPEGRLPDATKGSDHLRDVFGKAMGLSDQDIVALSGGHTIGAAHKERSGFEGPWTSNPLIFDNSYFKELLGGEKEGLLQLPSDKALLSDPVFRPLVEKYAAG

SEQ ID NO: 20131 - protein, 249 aa, Pisum sativum
GKSYPTVSPDYQKAIEKAKRKLRGFIAEKKCAPLILRLAWHSAGTFDSKTKTGGPFGTIKHQAELAHGANNGLDIAVRLLEPIKEQFPIVSYADFYQLAGVVAVEITGGPEVPFHPGREDKPEPPPEGRLPDATKGSDHLRDVFGKAMGLSDQDIVALSGGHTIGAAHKERSGFEGPWTSNPLIFDNSYFTELLTGEKDGLLQLPSDKALLTDSVFRPLVEKYAADEDVFFADYAEAHLKLSELGFAEA

SEQ ID NO: 20132 - protein, 250 aa, Pisum sativum
MGKSYPTVSPDYQKAIEKAKRKLRGFIAEKKCAPLILRLAWHSAGTFDSKTKTGGPFGTIKHQAELAHGANNGLDIAVRLLEPIKEQFPIVSYADFYQLAGVVAVEITGGPEVPFHPGREDKPEPPPEGRLPDATKGSDHLRDVFGKAMGLSDQDIVALSGGHTIGAAHKERSGFEGPWTSNPLIFDNSYFTELLTGEKDGLLQLPSDKALLTDSVFRPLVEKYAADEDVFFADYAEAHLKLSELGFAEA

SEQ ID NO: 20133 - protein, 250 aa, Vigna unguiculata
MGKSYPTVSADYQKAIEKAKKKLRGFIAEKRCAPLMLRLAWHSAGTFDVSTKTGGPFGTIKHPAELAHGANNGLDIAVRLLEPIKAEFPILSYADFYQLAGVVAVEVTGGPEVPFHPGREDKPEPPPEGRLPDATKGSDHLRDVFGKAMGLSDQDIVALSGGHTIGAAHKERSGFEGPWTSNPLIFDNSYFKELLSGEKEGLLQLPSDKALLSDPVFRPLVEKYAADEDAFFADYAVAHQKLSELGFADA

SEQ ID NO: 20134 - protein, 250 aa, Hevea brasiliensis
MTKNYPKVSEEYQKAIDKAKRKLRGFIAEKGCAPLMLRIAWHSAGTYDANTKTGGPFGTMRHAAEQAHAANNGLDIAVRLLEPIKQQFPILSYADFYQLAGVVAVEITGGPEIPFHPGREDKPEPPPEGRLPNATKGADHLREVFGKTMGLSDKDIVVLSGGHTLGRCHKERSGFDGPWTANPLIFDNSFFTELLAGQKEGLLQLPTDTVLVTDPVFRPYVEKYAADEDAFFADYAEAHVKLSELGFAEA

SEQ ID NO: 20135 - protein, 247 aa, Oryza sativa (indica cultivar-group)
MGDGGILDVVTTMGCDASVMIEGSGTERTDPANLSLGGFNVIDAAKRLLEAVCPATVSCSDILVLAARDAVTFTGGPSVPVSLGRLDGLVSLASNVRANIIDTGFSVDAMARSFSAKGLTLDDLVTLSEHTAAVDRRRGACAGGHTIGSAHCTTFGERFRVDANGSTGSASRFDNAYFANLLAGRGLLRTDAVLVQNATTRATVEAFARSEGSFFAGWAASFARLTSLGVKTGADGEVRRTCSRVNG

SEQ ID NO: 20136 - protein, 287 aa, Capsicum annuum
MAKPIVDTEYIKEIEKARRDLRALISNKNCAPIMLRLAWHDAGTYDAKSKTGGPNGSIRNEEEFTHGANNGLKIALDFCEAVKSKHPKITYADLYQLARVVAVEVTGGPTIDFVPGRKDSSISPKEGRLPDAKQGVPHLKDVFYRMGLSDKDIVALSGGHTLGRAHPERSGFDGPWTKEPLKFDNSYFVELLKGESEGLLKLPTDIALLDDPEFRHYVELYAKDEDAFFRDYAISHKKLSELGFTPSSGSKATVRDGTILAQSAVGVVVAAAVVALSYWYEVRKKMK

SEQ ID NO: 20137 - protein, 250 aa, Lycopersicon esculentum
MGKCYPTVSEEYLKAVDKCKRKLRGLIAEKNCAPIMLRLAWHSAGTYDVCSKTGGPFGTMRFKAELQHGANNGLDIALRLLEPIREQFPTLSHADFHQLAGVVAVEVTGGPDVPFHPGREDKPEPPVEGRLPDATKGCDHLRDVFKKQMGLSDQDIVALSGAHTLGRAHKERSGFEGPWTANPLIFDNSYFTELLSGEKQGLLQLPSDKALLCDPAFRPLVEKYAADEDAFFADYAEAHLKLSELGFAEA

SEQ ID NO: 20138 - protein, 250 aa, Solanum tuberosum
MGKSYPTVSEEYLKAVDKCKRKLRALIAEKNCAPIMLRLAWHSAGTYDVCSKTGGPFGTMRFKAEQAHGANNGLDIALRLLEPIREQFPTLSHADFHQLAGVVAVEVTGGPDVPFHPGREDKPEPPVEGRLPDATKGCDHLRDVFVKQMGLSDKDIVALSGAHTLGRCHKERSGFEGPWTANPLIFDNSYFTELLSGEKEGLLQLPSDKALLCDPAFRLLVEKYAADEDAFFADYAKAHLTLSELGFAEA

SEQ ID NO: 20139 - protein, 387 aa, Ceriporiopsis subvermispora
MAFTSLLALVALAAITRAAPTTICPDGTRVSNHVCCDFIPLAQALQSTLYMGDCGEDAHETIRLTFHDAIAISQSQGPSAGGGADGSMFIFPTVEPFFHANAGIDDSVNNLIPFLSKFPTITAGDLIQFAGTVALSNCPGAPQLEFLAGRPNATAPAVDGLIPEPQDNVTHILERFADAGGFTPFEVVSLLASHTVARADKVDLTIDAAPFDSTPFTFDTQIFLEVLLKGVGFPGTDNNTGEVESPLPLGNNKQGGNDTGEMRLQSDFALARDDRTACFWQGFVNEQEYMMSSFKAAMSKLAILGHNRNDLIDCSEVVPTPKPPVGKPATFPATTGPQDLQLTCKSERFPSLTIDHGARETLIPHCSNGGQDCPTVQFTGPAGEDDS

SEQ ID NO: 20140 - protein, 387 aa, Ceriporiopsis subvermispora
MAFTSLLALVALAAITRAAPTTICPDGTRVSNHVCCDFIPLAQALQSTLYMGDCGEDAHETIRLTFHDAIAISQSQGPSAGGGADGSMLIFPTVEPFFHANAGIDDSVNNLIPFLDKFPTITAGDLIQFAGTVALSNCPGAPQLEFLAGRPNATAPAVDGLIPEPQDNVTHILERFADAGGFTPFEVVSLLASHTVARADKVDLTIDAAPFDSTPFTFDTQIFLEVLLKGVGFPGTDNNTGEVESPLPLGNNKQGGNDTGEMRLQSDFALARDDRTACFWQGFVNEQEYMMSSFKAAMSKLAILGHNRNDLIDCSEVVPTPKPPVGKPASFPATTGPQDLQLTCKSERFPSLTIDHGAQETLIPHCSNGGQDCPTVQFTGPAGEDDS

SEQ ID NO: 20141 - protein, 387 aa, Ceriporiopsis subvermispora
MAFTSLLALVALAAITRAAPTTICPDGTRVSNHVCCDFIPLAQALQSTLYMGDCGEDAHETIRLTFHDAIAISQSQGPSAGGGADGSMLIFPTVEPFFHANAGIDDSVNNLIPFLDKFPTITAGDLIQFAGTVALSNCPGAPQLEFLAGRPNATAPAVDGLIPEPQDNVTHILERFADAGGFTPFEVVSLLASHTVARADKVDLTIDAAPFDSTPFTFDTQIFLEVLLKGVGFPGTDNNTGEVESPLPLGNNKQGGNETGEMRLQSDFALARDDRTACFWQGFVNEQEYMMSSFKAAMSKLAILGHNRNDLIDCSEVVPTPKPPVGKPASFPATTGPQDLQLTCKSERFPSLTIDHGAQETLIPHCSNGGQDCPTVQFTGPAGEDDS

SEQ ID NO: 20142 - protein, 377 aa, Ceriporiopsis subvermispora
MAFASLFTLVVLAAVSNAAPTAVCADGTRVSNAACCAFIPLAQDLHETLFMGDCGEDAHEVIRLTFHDAVAISSSMGPSAGGGADGSMLLFPTVEPNFSANNGIDDSVNNLIPFLSKHAVSAGDLVQFAGAVALTNCPGAPQLEFLAGRPNHTIAAIDGLIPEPQDDVTKILARFEDAGGFSPFEVVSLLASHTVARADKVDGTIDAAPFDSTPFTFDTQVFLEVLLKGTGFPGTNNNTGEVASPLPLTSGNDTGEMRLQSDFALARDERTACFWQSFVNEQEFMAQSFKAAMSKLAVLGHSRSSLVDCSDVVPAPKPAVNKPATFPATTGPDDLELTCTAERFPTLSVDPGAQQTLIPHCSDGDQVCATVQFTGPA

SEQ ID NO: 20143 - protein, 389 aa, Ceriporiopsis subvermispora
MAFTSLLAIVALAATVRGAPASSSVTCSDGTAVPDAMCCDFIPLAQDLQSMVLQNQCGEDAHEIIRLTFHDAIAISQSLGPSAGTGADGSMLLFPLVEPEFAASNGIDDSVNNLIPFLSSHPNISAGDLVQFAGAVALTNCPGAPRVNFLAGRKNAVAPAIDGLIPEPQDNVTSILARFADAGNFSPFEVVSLLASHSVARADKVDPTLDAAPFDSTPFTFDTQVFLEVLLKGVGFPGTDNNTGEVASPLPFGDTSTGVNDTGMMRLQSDFALARDERTACFWQSFVDQQDLMAQSFQAAFEKLAILGSSAADLVNCSAVVPLSVGPVTAPATFPATTGPQDLQLTCTTETFPSLSIDPGATETLIPHCPDGSEDCPTVQFSGPATDSP

SEQ ID NO: 20144 - protein, 749 aa, Legionella pneumophila
MFKRTIPLFAAFTLAISPSIFPNYAHAQEDKPKTNQYWWPKMLDLSPLRQPNATSNPMGEKFNYAEEFNSLDLNAVIEDLKKLMTTSQDWWPADYGNYGPLFIRMSWHAAGTYRIYDGRGGANGGFQRFAPQNSWPDNANLDKARRLLWPIKQKYGRKISWADLLVLAGNVAMESMGFKTIGFAGGREDAWEAININWGPEGKWLESKRQDKDGKLEKPLAATVMGLIYVNPEGPNGVPDPLAAAEKIRETFGRMAMNDEETVALIAGGHAFGKTHGAASGKYLGPAPEAAGIEEQGFGWKNSYGSGKGKDTITSGLEGAWTVTPTHWSHNYLQNLFNFNWVKTKSPGGAIQWVPENSNASSMVPDAFDPSKRHAPVMLTTDLALKFDPVYSKIAKRFLDNPKEFDDAFARAWFKLIHRDMGPRSRYLGSLVPKEAMIWQDPVPPVDYKLVDANDIANLKGKILNSGLTTSELVKTAWASASTFRGTDMRGGANGARIRLAPQKDWPANDPQELAKVLKTLESIQNNFNNAQADGKKISLADLIVLGGNAAIEQAAKQAGYDIIVPFTPGRTDATQGMTDVKSFEVLEPKADGFRNYFDKSNNMSPPEMLVEKASLLKLSVPEMTVLVGGMRVLNANTGQNQYGVFTDKPGTLNNDFFINLLSMSTEWKKSSETEGIYEGYERKTGKLKWKATSVDLIFGANSELRAVAEAYATDDAKEKFIQDFINAWVKVMTADRFDIKAANANINS

SEQ ID NO: 20145 - protein, 250 aa, Pimpinella brachycarpa
MGKCYPTVSEEYKVAVEKCRRKLRGFIAEKNCAPLMLRLAWHSAGTYDVKTKTGGPFGTMRQKLEQSHAANNGLDVAVRLLEPFKEQFPIISYGDLYQLAGVVAVEITGGPDVPFHPGRPDKDEPPQEGRLPNATLGNDHLRNVFVKTMGLSDKDIVTLSGGHTLGRAHKERSGFEGPWTSNPLIFDNSYFKELLTGEKEGLLQLPTDKSLLEDPVFRPLVDKYACDEDAFFADYAESHMKLSELGFAEA

SEQ ID NO: 20146 - protein, 291 aa, Oryza sativa
MAAPVVDAEYLRQVDRARRHLRALISSKGCAPIMLRLAWHDAGTYDVNTKTGGANGSIRYEEEYTHGSNAGLKIAIDLLEPIKAKSPKITYADLYQLAGVVAVEVTGGPTVEFIPGRRDSSVCPREGRLPDAKKGALHLRDIFYRMGLSDKDIVALSGGHTLGRAHPERSGFEGAWTQEPLKFDNSYFLELLKGESEGLLKLPTDKALLEDPSFRRYVDLYARDEDTFFKDYAESHKKLSELGFTPRSSGPASTKSDLSTGAVLAQSAVGVAVAAAVVIVSYLYEASKKSK

SEQ ID NO: 20147 - protein, 433 aa, Oryza sativa
  unsure (1)..(433): unsure at all Xaa locations
MAAPVVDAEYLRQVDRARRHLRALISSKGCAPIMLRLAWHDAGTYDVNTKTGGANGSIRYEEEYTHGSNAGLKIAIDLLEPIKAKSPKITYADLYQLAGVVAVEVTGGPTVEFIPGRRDSSVCPREGRLPDAKKGALHLRDIFYRMGLSDKDIVALSGGHTLGRAHPERSGFEGAWTQEPLXXELLKGESEGLLKLPTDKALLEDPSFRRYVDLYARDEDTFFKDYAESHKKLSELGFTPRSSGPASTKSDLSTGAVLAQSAVGVAVAAAVVIVSYLYEASKKSKSPPTRRPPSPGRRPADAAKSGCRRRLADACRRLVAARPTPPHPDAANAHRHLVAALASEQSPLSPRAVGGKPGGLVLACADLVHRGDLDGARRVAPTPCSTSPLHPAAYPSSHRRLAPQRRCLAPPPHRHLARRLAAALSPAAGRSGP

SEQ ID NO: 20148 - protein, 291 aa, Triticum aestivum
MAAPVVDAEYLRQVDRARRALRALIASKGCAPIMLRLAWHDAGTYDVNTRTGGANGSIRYEEEYTHGSNAGLKIAIDLLEPIKAKHPKITYADLYQLAGVVAVEVTGGPTVEFIPGRRDSSVCPREGRLPDAKKGAPHLRDIFYRMGLTDKDIVALSGGHSLGKAHPERSGFDGAWTRDPLKFDNSYFLELLKGESEGLLKLPTDKALLDDPEFRRYVELYAKDEDAFFKDYAESHKKLSELGFTPRISGAASTKSDVSTAVVLAQSAVGVAVAAAVVIAGYLYEASKRSK

SEQ ID NO: 20149 - protein, 293 aa, Triticum aestivum
  unsure (1)..(293): unsure at all Xaa locations
MAAPVVDAEYLRQVDRARXRALRALIASKGCAPIMLRLAWHDAGTYDVNTRTGGANGSIRYEEEYTHGSNAGLKIAIDLLEPIKAKHPKLTYADLYQLAGVVAVEVTGGPTVEFIPGRRDSSVCPREGRLPDAKKGAPHLRDIFYRMGLTDKDIVALSGGHSLGKXAHPERSGFDGAWTRDPLKFDNSYFLELLKGESEGLLKLPTDKALLDDAEFRRYVELYAKDEDAFFKDYAESHKKLSELGFTPRISGLASTKSDVSTAVVLAQRAVGVAVAASVVIAGYLYEASKRSK

SEQ ID NO: 20150 - protein, 180 aa, Musa acuminata
  unsure (1)..(180): unsure at all Xaa locations
MAKSYPTVSEEYQKAVEKAKRKLRGLIAXKNCAPLMLRLAWHSAGTYDVVSKTGGPFGTMRFPAELAHGANNGLNIAVRLLEPIKEQFPILTYADFYQLAGVVAVEVTGGPEIPFHPGREDKPEPPVXGRLPDATKGSDHLRDVFGHMGLSDRISLHYLVDTHWEGAXRXDLVSKGLGLP

SEQ ID NO: 20151 - protein, 115 aa, Musa acuminata
PGREDKTLPREEGRLPDATKGSDHLRDVFGHMGLSDQDIVALSGGHTVGRCHKERSGFEGAWTSNPLIFDNSYFKELLSSEKDDLIQLPSDKALLTDPVFRPLVEKYAADVNACS

SEQ ID NO: 20152 - protein, 301 aa, Asparagus officinalis
GSSSAHLSTNFYSSSCPKVFSTIKPVLQSAIAKEKRMGASILRLFFHDCFVNGCDGSILLADTANFRGEQHAGPNNGSVRGFKVIDKIKTAVENACPGVVSCADILAVAARDSVVILGGPDWKVKLGRRDARTASATLANNNIPPPTSSLSNLISKFAAQGLSTKDMVALSGAHTIGQARCTSFRGHIYNDADIDASFASLRQKICPRKSGSGDTNLAPLDLQTPTAFDNNYYKNLINKKGLLHSDQELFNNGATDSLVKSYSNSEGSFNSDFVKAMIKMGDISPLTGSKGEIRKICSKIN

SEQ ID NO: 20153 - protein, 381 aa, Phanerochaete sordida
MAFSTLVALVALAAIARAAPTTDSAVCSDGTTVNNAACCAFIPLAQDLQANLFQNDCGEDAHEVIRLTFHDAIAISQSQGPTAGGGADGSMLLFPTVEPNFGANNGIDDSVNNLIPFMQKHNTISAGDLVQFAGAVALANCPGAPRLEFLAGRPNKTTAAIDGLVPEPQDSVTKILQRFADAGNFSPFEVVSLLASHSIARADKVDETIDAAPFDSTPFTFDTQVFLEVLLKGVGFPGAANNTGEVTSPLPTGSGADTGEMRLQSDFALARDSRTACFWQGFVNEQAFMASSFRAAMSKLAVLGHSRSALIDCSDVVPQPKPAVNKPATFPASTGPQDLELACTTSKFPTLTTDPGASETLIPHCSDGSMSCPAIQFDGPA

SEQ ID NO: 20154 - protein, 377 aa, Phanerochaete sordida
MAFTTLFAFVALAAMTRAAPTAVCSDGTRVSNAACCAFVPLAQDLQQTLFMGDCGEDAHEVVRLTFHDAIAISQSQGPKAGGGADGSMLLFPTIEPNFGANNGIDDSVNNLIPFMQKHNTISAGDLVQFAGAVALANCPGAPRLEFLAGRPNKTIAAVDGLIPEPQDSVTKILQRFEDAGNFSPFEVVSLLASHSIARADKVDETIDAAPFDSTPFTFDTQVFLEVLLKGTGFPGQTNVTGEVASPIPVGSGEDTGEMRLQSDFALARDSRTACFWQGFVNEQAFMAASFRAAMAKLAVLGHNRNSLIDCSDVVPQPKPAVNKPATFPATKGPKDLELTCNARFPTLTTDPGAQETLIPHCSDGGMDCPAVQFDGPA

SEQ ID NO: 20155 - protein, 382 aa, Phanerochaete sordida
MAFASLLAIFALVAVASARPRPNPGAVCSDGTRVSNGACCAFIPLMQDLQQNVFQNECGEDAHEVIRLTFHDAIAISRSQGPKAGGGADGSMLLFPTVEPNFAANNGIDDSVNNLIPFMQKHNTISAGDLVQFAGAVALTNCPGAPRLEFLAGRPNKTIAAVDGLIPEPQDDVTKILKRFDDAGGFTPFEVVSLLASHSVARADKVDSTIDAAPFDSTPFTFDTQVFLEVLLKGTGFPGLSNNTGEVASPLPVGTGSDTGEMRLQSDFALARDERTACFWQSFVNEQEFMSASFKAAMSKLAVLGHNRNTLTDCSEIIPEPLPAVKKPATFPATTSAKDLQLTCRALRFPTLTTDQGAQQTLIAHCPNGSMNCTSVQFNGPA

SEQ ID NO: 20156 - protein, 294 aa, Saccharomyces cerevisiae
TTPLVHVASVEKGRSYEDFQKVYNAIALKLREDDEYDNYIGYGPVLVRLAWHTSGTWDKHDNTGGSYGGTYRFKKEFNDPSNAGLQNGFKFLEPIHKEFPWISSGDLFSLGGVTAVQEMQGPKIPWRCGRVDTPEDTTPDNGRLPDADKDADYVRTFFQRLNMNDREVVALMGAHTLGKTHLKNSGYEGPWTANPNVFDNSFYLNLLNEDWKLEKNDANNEQWDSKSGYMMLPTDYSLIQDPKYLSIVKEYANDQDKFFKDFSKAFEKLLENGITFPKDAPSPFIFKTLEEQGL

SEQ ID NO: 20157 - protein, 294 aa, Saccharomyces cerevisiae
TTPLVHVASVEKGRSYEDFQKVYNAIALKLREDDEYDNYIGYGPVLVRLAWHTSGTWDKHDNTGGSYGGTYRFKKEFNDPSNAGLQNGFKFLEPIHKEFPWISSGDLFSLGGVTAVQEMQGPKIPWRCGRVDTPEDTTPDNGRLPDADKDADYVRTFFQRLNMNDREVVALMGAHTLGKTHLKNSGYEGPWTANNNVFDNSFYLNLLNEDWKLEKNDANNEQWDSKSGYMMLPTDYSLIQDPKYLSIVKEYANDQDKFFKDFSKAFEKLLENGITFPKDAPSPFIFKTLEEQGL

SEQ ID NO: 20158 - protein, 294 aa, Saccharomyces cerevisiae
TTPLVHVASVEKGRSYEDFQKVYNAIALKLREDDEYDNYIGYGPVLVRLAWHTSGTWDKHDNTGGSYGGTYRFKKEFNDPSNAGLQNGFKFLEPIHKEFPWISSGDLFSLGGVTAVQEMQGPKIPWRCGRVDTPEDTTPDNGRLPDADKDADYVRTFFQRLNMNDREVVALMGAHTLGKTHLKNSGYEGPWDATNNVFDNSFYLNLLNEDWKLEKNDANNEQWDSKSGYMMLPTDYSLIQDPKYLSIVKEYANDQDKFFKDFSKAFEKLLENGITFPKDAPSPFIFKTLEEQGL

SEQ ID NO: 20159 - protein, 291 aa, Saccharomyces cerevisiae
  unsure (1)..(291): unsure at all Xaa locations
XVHVASVEKGRSYEDFQKVYNAIALKLREDDEYDNYIGYGPVLVRLAWHISGTWDKHDNTGGSYGGTYRFKKEFNDPSNAGLQNGFKFLEPIHKEFPWISSGDLFSLGGVTAVQEMQGPKIPWRCGRVDTPEDTTPDNGRLPDADKDAGYVRTFFQRLNMNDREVVALMGAHALGKTHLKNSGYEGPWGAANNVFTNEYYLNLLNEDWKLEKNDANNEQWDSKSGYMMLPTDYSLIQDPKYLSIVKEYANDQDKFFKDFSKAFEKLLENGITFPKDAPSPFIFKTLEEQGL

SEQ ID NO: 20160 - protein, 361 aa, Saccharomyces cerevisiae
MTTAVRLLPSLGRTAHKRSLYLFSAAAAAAAAATFAYSQSQKRSSSSPGGGSNHGWNNWGKAAALASTTPLVHVASVEKGRSYEDFQKVYNAIALKLREDDEYDNYIGYGPVLVRLAWHTSGTWDKHDNTGGSYGGTYRFKKEFNDPSNAGLQNGFKFLEPIHKEFPWISSGDLFSLGGVTAVQEMQGPKIPWRCGRVDTPEDTTPDNGRLPDADKDADYVRTFFQRLNMNDREVVALMGAHALGKTHLKNSGYEGPWGAANNVFTNEFYLNLLNEDWKLEKNDANNEQWDSKSGYMMLPTDYSLIQDPKYLSIVKEYANDQDKFFKDFSKAFEKLLENGITFPKDAPSPFIFKTLEEQGL

SEQ ID NO: 20161 - protein, 294 aa, Saccharomyces cerevisiae
TTPLVHVASVEKGRSYEDFQKVYNAIALKLREDDEYDNYIGYGPVLVRLAWHTSGTWDKHDNTGGSYGGTYRFKKEFNDPSNAGLQNGFKFLEPIHKEFPWISSGDLFSLGGVTAVQEMQGPKIPWRCGRVDTPEDTTPDNGRLPDADKDADYVRTFFQRLNMNDREVVALMGAHALGKTHLKNSGYEGPWGAANNVFTNEFYLNLLNEDWKLEKNDANNEQWDSKSGYMMLPTDYSLIQDPKYLSIVKEYANDQDKFFKDFSKAFEKLLENGITFPKDAPSPFIFKTLEEQGL

SEQ ID NO: 20162 - protein, 294 aa, Saccharomyces cerevisiae
TTPLVHVASVEKGRSYEDFQKVYNAIALKLREDDEYDNYIGYGPVLVRLAWHTSGTWDKHDNTGGSYGGTYRFKKEFNDPSNAGLQNGFKFLEPIHKEFPWISSGDLFSLGGVTAVQEMQGPKIPWRCGRVDTPEDTTPDNGRLPDADKDADYVRTFFQRLNMNDREVVALMGAHALGKTHLKNSGYEGPWGAANNVFTNEFYLNLLNEDWKLEKNDANNEQWDSKSGYMMLPTDYSLIQDPKYLSIVKEYANDQDKFFKDFSKAFEKLLEDGITFPKDAPSPFIFKTLEEQGL

SEQ ID NO: 20163 - protein, 291 aa, Saccharomyces cerevisiae
  unsure (1)..(291): unsure at all Xaa locations
XVHVASVEKGRSYEDFQKVYNAIALKLREDDEYDNYIGYGPVLVRLAWHISGTWDKHDNTGGSYGGTYRFKKEFNDPSNAGLQNGFKFLEPIHKEFPWISSGDLFSLGGVTAVQEMQGPKIPWRCGRVDTPEDTTPDNGRLPDADKDAGYVRTFFQRLNMNDREVVALKGAHALGKTHLKNSGYEGPWGAANNVFTNEFYLNLLNEDWKLEKNDANNEQWDSKSGYMMLPTDYSLIQDPKYLSIVKEYANDQDKFFKDFSKAFEKLLENGITFPKDAPSPFIFKTLEEQGL

SEQ ID NO: 20164 - protein, 296 aa, Saccharomyces cerevisiae
MITTPLVHVASVEKGRSYEDFQKVYNAIALKLREDDEYDNYIGYGPVLVRLAWHISGTWDKHDNTGGSYGGTYRFKKEFNDPSNAGLQNGFKFLEPIHKEFPWISSGDLFSLGGVTAVQEMQGPKIPWRAGRVDTPEDTTPDNGRLPDADKDAGYVRTFFQRLNMNDREVVALMGAHALGKTHLKNSGYEGPWGCANNVFTNEFYLNLLNEDWKLEKNDANNEQWDSKSGYMMLPTDYSLIQDPKYLSIVKEYANDQDKFFKDFSKAFEKLLENGITFPKDAPSPFIFKTLEEQGL

SEQ ID NO: 20165 - protein, 296 aa, Saccharomyces cerevisiae
MITTPLVHVASVEKGRSYEDFQKVYNAIALKLREDDEYDNYIGYGPVLVRLAWHISGTWDKHDNTGGSYGGTYRFKKEFNDPSNAGLQNGFKFLEPIHKEFPWISSGDLFSLGGVTAVQEMQGPKIPWRCGRVDTPEDTTPDNGRLPDADKDAGYVRTFFQRLNMNDREVVALMGAHALGKTHLKNSGYEGPWGAANNVFTNEFYLNLLNEDWKLEKNDANNEQWDSKSGYIMLPTDYSLIQDPKYLSIVKEYANDQDKFFKDFSKAFEKLLENGITFPKDAPSPFIFKTLEEQGL

SEQ ID NO: 20166 - protein, 362 aa, Saccharomyces cerevisiae
MTTAVRLLPSLGRTAHKRSLYLFSAAAAAAAAAATFAYSQSHKRSSSSPGGGSNHGWNNWGKPAALASTTPLVHVASVEKGRSYEDFQKVYNAIALKLREDDEYDNYIGYGPVLVRLAWHISGTWDKHDNTGGSYGGTYRFKKEFNDPSNAGLQNGFKFLEPIHKEFPWISSGDLFSLGGVTAVQEMQGPKIPWRCGRVDTPEDTTPDNGRLPDADKDAGYVRTFFQRLNMNDREVVALMGAHALGKTHLKNSGYEGPWGAANNVFTNEFYLNLLNEDWKLEKNDANNEQWDSKSGYMMLPTDYSLIQDPKYLSIVKEYANDQDKFFKDFSKAFEKLLENGITFPKDAPSPFIFKTLEEQGL

SEQ ID NO: 20167 - protein, 297 aa, Saccharomyces cerevisiae
MKTTTPLVHVASVEKGRSYEDFQKVYNAIALKLREDDEYDNYIGYGPVLVRLAWHISGTWDKHDNTGGSYGGTYRFKKEFNDPSNAGLQNGFKFLEPIHKEFPWISSGDLFSLGGVTAVQEMQGPKIPWRCGRVDTPEDTTPDNGRLPDADKDAGYVRTFFQRLNMNDREVVALMGAHALGKTHLKNSGYEGPWGAANNVFTNEFYLNLLNEDWKLEKNDANNEQWDSKSGYMMLPTDYSLIQDPKYLSIVKEYANDQDKFFKDFSKAFEKLLENGITFPKDAPSPFIFKTLEEQGL

SEQ ID NO: 20168 - protein, 291 aa, Saccharomyces cerevisiae
  unsure (1)..(291): unsure at all Xaa locations
XVHVASVEKGRSYEDFQKVYNAIALKLREDDEYDNYIGYGPVLVRLAWHISGTWDKHDNTGGSYGGTYRFKKEFNDPSNAGLQNGFKFLEPIHKEFPWISSGDLFSLGGVTAVQEMQGPKIPWRCGRVDTPEDTTPDNGRLPDADKDAGYVRTFFQRLNMNDREVVALMGAHALGKTHLKNSGYEGPWGAANNVFTNEFYLNLLNEDWKLEKNDANNEQWDSKSGYMHLPTDYSLIQDPKYLSIVKEYANDQDKFFKDFSKAFEKLLENGITFPKDAPSPFIFKTLEEQGL

SEQ ID NO: 20169 - protein, 296 aa, Saccharomyces cerevisiae
MITTPLVHVASVEKGRSYEDFQKVYNAIALKLREDDEYDNYIGYGPVLVRLAWHISGTWDKHDNTGGSYGGTYRFKKEFNDPSNAGLQNGFKFLEPIHKEFPWISSGDLFSLGGVTAVQEMQGPKIPWRCGRVDTPEDTTPDNGRLPDADKDAGYVRTFFQRLNMNDREVVALMGAHALGKTHLKNSGYEGPWGAANNVFTNEFYLNLLNEDWKLEKNDANNEQWDSKSGYMMLPTDYSLIQDPKYLSIVKEYANDQDKFFKDFSKAFEKLLENGITFPKDAPSPFIFKTLEEQGL

SEQ ID NO: 20170 - protein, 291 aa, Saccharomyces cerevisiae
LVHVASVEKGRSYEDFQKVYNAIALKLREDDEYDNAIGYGPVLVRLAWHISGTWDKHDNTGGSYGGTYRFKKEFNDPSNAGLQNGFKFLEPIHKEFPWISSGDLFSLGGVTAVQEMQGPKIPWRCGRVDTPEDTTPDNGRLPDADKDAGYVRTFFQRLNMNDREVVALMGAHALGKTHLKNSGYEGPWGAANNVFTNEFYLNLLNEDWKLEKNDANNEQWDSKSGYMMLPTDYSLIQDPKYLSIVKEYANDQDKFFKDFSKAFEKLLEDGITFPKDAPSPFIFKTLEEQGL

SEQ ID NO: 20171 - protein, 291 aa, Saccharomyces cerevisiae
LVHVASVEKGRSYEDFQKVYNAIALKLREDDEYDNYIGYGPVLVRLAWHISGTWDKHDNTGGSYGGTYRFKKEFNDPSNAGLQNGFKFLEPIHKEFPWISSGDLFSLGGVTAVQEMQGPKIPWRCGRVDTPEDTTPDNGRLPDADKDAGYVRTFFQRLNMNDREVVALMGAHALGKTHLKNSGYEGPWGAANNVFTNEFYLNLLNEDWKLEKNDANNEQWDSKSGYMMLPTDYSLIQDPKYLSIVKEYANDQDKFFKDFSKAFEKLLEDGITFPKDAPSPFIFKTLEEQGL

SEQ ID NO: 20172 - protein, 296 aa, Saccharomyces cerevisiae
MITTPLVHVASVEKGRSYEDFQKVYNAIALKLREDDEYDNYIGYGPVLVKLAWHISGTWDKHDNTGGSYGGTYRFKKEFNDPSNAGLQNGFKFLEPIHKEFPWISSGDLFSLGGVTAVQEMQGPKIPWRCGRVDTPEDTTPDNGRLPDADKDAGYVRTFFQRLNMNDREVVALMGAHALGKTHLKNSGYEGPWGAANNVFTNEFYLNLLNEDWKLEKNDANNEQWDSKSGYMMLPTDYSLIQDPKYLSIVKEYANDQDKFFKDFSKAFEKLLENGITFPKDAPSPFIFKTLEEQGL

SEQ ID NO: 20173 - protein, 297 aa, Saccharomyces cerevisiae
MKTTTPLVHVASVEKGRSYEDFQKVYNAIALKLREDDEYDNYIGYGPVLVRLAWHISGTWDKHDNTGGSYGGTYRFKKEFNDPSNAGLQNGFKFLEPIHKEFPWISSGDLFSLGGVTAVQEMQGPKIPWRCGRVDTPEDTTPDNGRLPDADKDAGYVRTFFQRLNMNDREVVALMGAHALGKTHLKNSGYEGPWGAANNVFTNEFYLNLLNEDWKLEKNDANNEQWDSKSGYMMLPTEYSLIQDPKYLSIVKEYANDQDKFFKDFSKAFEKLLENGITFPKDAPSPFIFKTLEEQGL

SEQ ID NO: 20174 - protein, 294 aa, Saccharomyces cerevisiae
MKTLVHVASVEKGRSYEDFQKVYNAIALKLREDDEYDNYIGYGPVLVRLAWHISGTWDKHDNTGGSYGGTYRFKKEFNDPSNAGLQNGFKFLEPIHKEFPWISSGDLFSLGGVTAVQEMQGPKIPWRCGRVDTPEDTTPDNGRLPDMDKDAGYVRTFFQRLNMNDREVVALMGAHALGKTHLKNSGYEGPWGAANNVFTNEFYLNLLNEDWKLEKNDANNEQWDSKSGYMMLPTDYSLIQDPKYLSIVKEYANDQDKFFKDFSKAFEKLLENGITFPKDAPSPFIFKTLEEQGL

SEQ ID NO: 20175 - protein, 296 aa, Saccharomyces cerevisiae
MITTPLVHVASVEKGRSYEDFQKVYNAIALKLREDDEYDNYIGYGPVLVRLAWHISGTWDKHDNTGGSYGGTYRFKKEFNDPSNAGLQNGFKFLEPIHKEFPWISSGDLFSLGGVTAVQEMQGPKIPWRCGRVDTPEDTTPDNGRLPDADKDAGYVRTFFQRLNMNDREVVALMGAHALGKTHLKNSGYEGPWGAANNVFTNEFYLNLLNEDWKLEKNDANNEQWDSKSGYMMLPTNYSLIQDPKYLSIVKEYANDQDKFFKDFSKAFEKLLENGITFPKDAPSPFIFKTLEEQGL

SEQ ID NO: 20176 - protein, 291 aa, Saccharomyces cerevisiae
  unsure (1)..(291): unsure at all Xaa locations
XVHVASVEKGRSYEDFQKVYNAIALKLREDDEYDNYIGYGPVLVRLAWHISGTWDKHDNTGGSYGGTYRFKKEFNDPSNAGLQNGFKFLEPIHKEFPWISSGDLFSLGGVTAVQEMQGPKIPWRCGRVDTPEDTTPDNGRLPDADKDAGYVRTFFQRLNMNDREVVALMGAHALGKTHLKNSGYEGPWGAANNVFTNEKYLNLLNEDWKLEKNDANNEQWDSKSGYMMLPTDYSLIQDPKYLSIVKEYANDQDKFFKDFSKAFEKLLENGITFPKDAPSPFIFKTLEEQGL

SEQ ID NO: 20177 - protein, 294 aa, Saccharomyces cerevisiae
MKTLVHVASVEKGRSYEDFQKVYNAIALKLREDDEYDNYIGYGPVLVRLAWHISGTWDKHDNTGGSYGGTYRFKKEFNDPSNAGLQNGFKFLEPIHKEFPWISSGDLFSLGGVTAVQEMQGPKIPWRCGRVDTPEDTTPDNGRLPDYDKDAGYVRTFFQRLNMNDREVVALMGAHALGKTHLKNSGYEGPWGAANNVFTNEFYLNLLNEDWKLEKNDANNEQWDSKSGYMMLPTDYSLIQDPKYLSIVKEYANDQDKFFKDFSKAFEKLLENGITFPKDAPSPFIFKTLEEQGL

SEQ ID NO: 20178 - protein, 294 aa, Saccharomyces cerevisiae
MKTLVHVASVEKGRSYEDFQKVYNAIALKLREDDEYDNYIGYGPVLVRLAWHISGTWDKHDNTGGSYGGTYRFKKEFNDPSNAGLQNGFKFLEPIHKEFPWISSGDLFSLGGVTAVQEMQGPKIPWRCGRVDTPEDTTPDNGRLPDADKDAGYVRTFFQRLNMNDREVVALMGAHALGKTHLKNSGYEGPWGAANNVFTNEGYLNLLNEDWKLEKNDANNEQWDSKSGYMMLPTDYSLIQDPKYLSIVKEYANDQDKFFKDFSKAFEKLLENGITFPKDAPSPFIFKTLEEQGL

SEQ ID NO: 20179 - protein, 291 aa, Saccharomyces cerevisiae
LVHVASVEKGRSYEDFQKVYNAIALKLREDDEYDNYIGYGPVLVALAWHISGTWDKHDNTGGSYGGTYRFKKEFNDPSNAGLQNGFKFLEPIHKEFPWISSGDLFSLGGVTAVQEMQGPKIPWRCGRVDTPEDTTPDNGRLPDADKDAGYVRTFFQRLNMNDREVVALMGAHALGKTHLKNSGYEGPWGAANNVFTNEFYLNLLNEDWKLEKNDANNEQWDSKSGYMMLPTDYSLIQDPKYLSIVKEYANDQDKFFKDFSKAFEKLLENGITFPKDAPSPFIFKTLEEQGL

SEQ ID NO: 20180 - protein, 296 aa, Saccharomyces cerevisiae
MITTPLVHVASVEKGRSYEDFQKVYNAIALKLREDDEYDNYIGYGPVLVLLAWHISGTWDKHDNTGGSYGGTYRFKKEFNDPSNAGLQNGFKFLEPIHKEFPWISSGDLFSLGGVTAVQEMQGPKIPWRCGRVDTPEDTTPDNGRLPDADKDAGYVRTFFQRLNMNDREVVALMGAHALGKTHLKNSGYEGPWGAANNVFTNEFYLNLLNEDWKLEKNDANNEQWDSKSGYMMLPTDYSLIQDPKYLSIVKEYANDQDKFFKDFSKAFEKLLENGITFPKDAPSPFIFKTLEEQGL

SEQ ID NO: 20181 - protein, 297 aa, Saccharomyces cerevisiae
MKTTTPLVHVASVEKGRSYEDFQKVYNAIALKLREDDEYDNYIGYGPVLVRLAWHISGTWDKHDNTGGSYGGTYRFKKEFNDPSNAGLQNGFKFLEPIHKEFPWISSGDLFSLGGVTAVQEMQGPKIPWRCGRVDTPEDTTPDNGRLPDADKDAGYVRTFFQRLNMNDREVVALMGAHALGKTHLKNSGYEGPWGAANNVFTNEFYLNLLNEDWKLEKNDANNEQWDSKSGYMMLPTAYSLIQDPKYLSIVKEYANDQDKFFKDFSKAFEKLLENGITFPKDAPSPFIFKTLEEQGL

SEQ ID NO: 20182 - protein, 291 aa, Saccharomyces cerevisiae
  unsure (1)..(291): unsure at all Xaa locations
XVHVASVEKGRSYEDFQKVYNAIALKLREDDEYDNYIGYGPVLVRLAWHISGTWDKHDNTGGSYGGTYRFKKEFNDPSNAGLQNGFKFLEPIHKEFPWISSGDLFSLGGVTAVQEMQGPKIPWRCGRVDTPEDTTPDNGRLPDADKDAGYVRTFFQRLNMNDREVVALMGAGALGKTHLKNSGYEGPWGAANNVFTNEFYLNLLNEDWKLEKNDANNEQWDSKSGYMMLPTDYSLIQDPKYLSIVKEYANDQDKFFKDFSKAFEKLLENGITFPKDAPSPFIFKTLEEQGL

SEQ ID NO: 20183 - protein, 292 aa, Saccharomyces cerevisiae
TLVHVASVEKGRSYEDFQKVYNAIALKLREDDEYDNYIGYGPVLVRLAWHISGTWDKHDNTGGSYGGTYRFKKEFNDPSNAGLQNGFKFLEPIHKEFPWISSGDLFSLGGVTAVQEMQGPKIPWRCGRVDTPEDTTPDNGRLPDADKDAGYVRTFFQRLNMNDREVVALMGAGALGKTHLKNSGYEGPWGAANNVFTNEFYLNLLNEDWKLEKNDANNEQWDSKSGYMMLPTDYSLIQDPKYLSIVKEYANDQDKFFKDFSKAFEKLLENGITFPKDAPSPFIFKTLEEQGL

SEQ ID NO: 20184 - protein, 293 aa, Saccharomyces cerevisiae
TPLVHVASVEKGRSYEDFQKVYNAIALKLREDDEYDNYIGYGPVLVRLAFHISGTWDKHDNTGGSYGGTYRFKKEFNDPSNAGLQNGFKFLEPIHKEFPWISSGDLFSLGGVTAVQEMQGPKIPWRCGRVDTPEDTTPDNGRLPDADKDAGYVRTFFQRLNMNDREVVALMGAHALGKTHLKNSGYEGPWGAANNVFTNEFYLNLLNEDWKLEKNDANNEQWDSKSGYMMLPTDYSLIQDPKYLSIVKEYANDQDKFFKDFSKAFEKLLENGITFPKDAPSPFIFKTLEEQGL

SEQ ID NO: 20185 - protein, 296 aa, Saccharomyces cerevisiae
MITTPLVHVASVEKGRSYEDFQKVYNAIALKLREDDEYDNYIGYGPVLVRLAWHISGTWDKHDNTGGSYGGTYRFKKEFNDPSNAGLQNGFKFLEPIHKEFPWISSGDLFSLGGVTAVQEMQGPKIPWRCGRVDTPEDTTPDNGRLPDADKDAGYVRTFFQRLNMNDREVVALMGAHALGKTHLKNSGYEGPFGAANNVFTNEFYLNLLNEDWKLEKNDANNEQWDSKSGYMMLPTDYSLIQDPKYLSIVKEYANDQDKFFKDFSKAFEKLLENGITFPKDAPSPFIFKTLEEQGL

SEQ ID NO: 20186 - protein, 291 aa, Saccharomyces cerevisiae
LVHVASVEKGRSYEDFQKVYNAIALKLREDDEYDNYIGYGPVLVRLAWHISGTWDKHDNTGGSYGGTYRFKKEFNDPSNAGLQNGFKFLEPIHKEFPWISSGDLFSLGGVTAVQEMQGPKIPWRCGRVDTPEDTTPDNGRLPDADKDAGYVRTFFQRLNMNDREVVALMGAHALGKTHLKNSGYEGPYGAANNVFTNEFYLNLLNEDWKLEKNDANNEQWDSKSGYMMLPTDYSLIQDPKYLSIVKEYANDQDKFFKDFSKAFEKLLEDGITFPKDAPSPFIFKTLEEQGL

SEQ ID NO: 20187 - protein, 296 aa, Saccharomyces cerevisiae
MITTPLVHVASVEKGRSYEDFQKVYNAIALKLREDDEYDNYIGYGPVLVRLAWLISGTWDKHDNTGGSYGGTYRFKKEFNDPSNAGLQNGFKFLEPIHKEFPWISSGDLFSLGGVTAVQEMQGPKIPWRCGRVDTPEDTTPDNGRLPDADKDAGYVRTFFQRLNMNDREVVALMGAHALGKTHLKNSGYEGPWGAANNVFTNEFYLNLLNEDWKLEKNDANNEQWDSKSGYMMLPTDYSLIQDPKYLSIVKEYANDQDKFFKDFSKAFEKLLENGITFPKDAPSPFIFKTLEEQGL

SEQ ID NO: 20188 - protein, 294 aa, Saccharomyces cerevisiae
MKTLVHVASVEKGRSYEDFQKVYNAIALKLREDDEYDNYIGYGPVLVRLAWHISGTWDKHDNTGGSYGGTYRFKKEFNDPSNAGLQNGFKFLEPIHKEFPWISSGDLFSLGGVTAVQEMQGPKIPWRCGRVDTPEDTTPDNGRLPDADKDAGYVRTFFQRLNMNDREVVALMGAHALGKTHLKNSGYEGPGGAANNVFTNEFYLNLLNEDWKLEKNDANNEQWDSKSGYMMLPTDYSLIQDPKYLSIVKEYANDQDKFFKDFSKAFEKLLENGITFPKDAPSPFIFKTLEEQGL

SEQ ID NO: 20189 - protein, 292 aa, Saccharomyces cerevisiae
TLVHVASVEKGRSYEDFQKVYNAIALKLREDDEYDNYIGYGPVLVRLAWHISGTWDKHDNTGGSYGGTYRFKKQFNDPSNAGLQNGFKFLEPIHKEFPWISSGDLFSLGGVTAVQEMQGPKIPWRCGRVDTPEDTTPDNGRLPDADKDAGYVRTFFQRLNMNDREVVALMGAGALGKTHLKNSGYEGPWGAANNVFTNEFYLNLLNEDWKLEKNDANNEQWDSKSGYMMLPTDYSLIQDPKYLSIVKEYANDQDKFFKDFSKAFEKLLENGITFPKDAPSPFIFKTLEEQGL

SEQ ID NO: 20190 - protein, 296 aa, Saccharomyces cerevisiae
MITTPLVHVASVEKGRSYEDFQKVYNAIALKLREDDEYDNYIGYGPVLVRLAWHISGTWDKHDNTGGSYGGTYRFKKEFNDPSNAGLQNGFKFLEPIHKEFPWISSGDLFSLGGVTAVQEMQGPKIPWRCGRVDTPEDTTPDNGRLPDADKDAGYVRTFFQRLNMNDREVVALMGAHALGKTHLKNSGYEGPGGAANNVFTNEFYLNLLNEDWKLEKNDANNEQWDSKSGYMMLPTDYSLIQDPKYLSIVKEYANDQDKFFKDFSKAFEKLLENGITFPKDAPSPFIFKTLEEQGL

SEQ ID NO: 20191 - protein, 296 aa, Saccharomyces cerevisiae
MIVEKLVHVASVEKGRSYEDFQKVYNAIALKLREDDEYDNYIGYGPVLVRLAWHISGTWDKHDNTGGSYGGTYRFKKEFNDPSNAGLQNGFKFLEPIHKEFPWISSGDLFSLGGVTAVQEMQGPKIPWRCGRVDTPEDTTPDNGRLPDADKDAGYVRTFFQRLNMNDREVVALMGAHALGKTHLKNSGYEGPQGAANNVFTNEFYLNLLNEDWKLEKNDANNEQWDSKSGYMMLPTDYSLIQDPKYLSIVKEYANDQDKFFKDFSKAFEKLLENGITFPKDAPSPFIFKTLEEQGL

SEQ ID NO: 20192 - protein, 294 aa, Saccharomyces cerevisiae
MKTLVHVASVEKGRSYEDFQKVYNAIALKLREDDEYDNYIGYGPVLVRLAWHISGTWDKHDNTGGSYGGTYRFKKEFNDPSNAGLQNGFKFLEPIHKEFPWISSGDLFSLGGVTAVQEMQGPKIPWRCGRVDTPEDTTPDNGRLPDADKDAGYVRTFFQRLNMNDREVVALMGAHALGKTHLKNSGYEGPGGAANNVFTNEFYLNLLNEDWKLEKNDANNEQWDSKSGYMMLPTDYSLIQDPKYLSIVKEYANDQDKFFKDFSKAFEKLLEDGITFPKDAPSPFIFKTLEEQGL

SEQ ID NO: 20193 - protein, 291 aa, Saccharomyces cerevisiae
LVHVASVEKGRSYEDFQKVYNAIALKLREDDEYDNYIGYGPVLVRLAWHISGTWDKHDNTGGSYGGTYRFKKEFNDPSNAGLQNGFKFLEPIHKEFPWISSGDLFSLGGVTAVQEMQGPKIPWRCGRVDTPEDTTPDNGRLPDADKDAGYVRTFFQRLNMNDREVVALMGAHALGKTHLKNSGYEGPQGAANNVFTNEFYLNLLNEDWKLEKNDANNEQWDSKSGYMMLPTDYSLIQDPKYLSIVKEYANDQDKFFKDFSKAFEKLLEDGITFPKDAPSPFIFKTLEEQGL

SEQ ID NO: 20194 - protein, 294 aa, Saccharomyces cerevisiae
MKTLVHVASVEKGRSYEDFQKVYNAIALKLREDDEYENYIGYGDDLVRLAWHISGTWDKHDNTGGSYGGTYRFKKEFNDPSNAGLQNGFKFLEPIHKEFPWISSGDLFSLGGVTAVQEMQGPKIPWRCGRVDTPEDTTPDNGRLPDADKDAGYVRTFFQRLNMNDREVVALMGAHALGKTHLKNSGYEGPWGAANNVFTNEFYLNLLNEDWKLEKNDANNEQWDSKSGYMMLPTDYSLIQDPKYLSIVKEYANDQDKFFKDFSKAFEKLLENGITFPKDAPSPFIFKTLEEQGL

SEQ ID NO: 20195 - protein, 291 aa, Saccharomyces cerevisiae
LVHVASVEKGRSYEDFQKVYNAIALKLREDDEYDNYIGYGPVLVRLAWHISGTWDKHDNTGGSYGGTYRFKKEFNDPSNAGLQNGFKFLEPIHKEFPWISSGDLFSLGGVTAVQEMQGPKIPWRCGRVDTPEDTTPDNGRLPDADKDAGYVRTFFQRLNMNDREVVALMGAHALGKTHLKNSGYEGPGGAANNVFTNEFYLNLLNEDWKLEKNDANNEQWDSKSGYMMLPTDYSLIQDPKYLSIVKEYANDQDKFFKDFSKAFEKLLEDGITFPKDAPSPFIFKTLEEQGL

SEQ ID NO: 20196 - protein, 290 aa, Saccharomyces cerevisiae
TLVHVASVEKGRSYEDFQKVYNAIALKLREDDEYDNYIGYGPVLVRLAWHISGTWDKHDNTGGSYGGTYRFKKEFNDPSNAGLQNGFKFLEPIHKEFPWISSGDLFSLGGVTAVQEMQGPKIPWRCGRVDTPEDTTPDNGRLPDADKDAGYVRTFFQRLNMNDREVVALMGAHALGKTHLKNSGYEGGGANNVFTNEFYLNLLNEDWKLEKNDANNEQWDSKSGYMMLPTDYSLIQDPKYLSIVKEYANDQDKFFKDFSKAFEKLLENGITFPKDAPSPFIFKTLEEQGL

SEQ ID NO: 20197 - protein, 289 aa, Saccharomyces cerevisiae
LVHVASVEKGRSYEDFQKVYNAIALKLREDDEYDNYIGYGPVLVRLAWHISGTWDKHDNTGGSYGGTYRFKKEFNDPSNAGLQNGFKFLEPIHKEFPWISSGDLFSLGGVTAVQEMQGPKIPWRCGRVDTPEDTTPDNGRLPDADKDAGYVRTFFQRLNMNDREVVALMGAHALGKTHLKNSGYEGGGANNVFTNEFYLNLLNEDWKLEKNDANNEQWDSKSGYMMLPTDYSLIQDPKYLSIVKEYANDQDKFFKDFSKAFEKLLENGITFPKDAPSPFIFKTLEEQGL

SEQ ID NO: 20198 - protein, 294 aa, Saccharomyces cerevisiae
MKTLVHVASVEKGRSYEDFQKVYNAIALKLREDDEYDNYIGYGPVLVRLAWHISGTWDKHDNTGGSYGGTYRFKKEFNDPSNAGLQNGFKFLEPIHKEFPWISSGDLFSLGGVTAVQEMQGPKIPWRCGRVDTPEDTTPDNGRLPDADKDAGYVRTFFQRLNMNDREVVALMGAHALGKTHLKNSGYEGPGGAANNVFTNEFYLNLLNEDWKLEKNDANNEQWDSKSGYMMLPTNYSLIQDPKYLSIVKEYANDQDKFFKDFSKAFEKLLENGITFPKDAPSPFIFKTLEEQGL

SEQ ID NO: 20199 - protein, 220 aa, Retama raetam
MGKSYPTVSGDYQKAVEKAKKKLRGFIAEKSCAPLILRLAWHSAGTFDVKTKTGGPFGTIKNPAELAHGANNGLDIAVRLLEPIKEQFPILSYADFYQLGGVVAVEITGGPEVPFHPGREDKPEPPPEGRLPDATKGSDHLRDVFGKAMGLSDQDIVALSGGHTIGAAHKERSGFEGPWTSNPLIFDNSYFTELLSGEKEGLLKLPSDTALLSDPVFALC

SEQ ID NO: 20200 - protein, 358 aa, Neurospora crassa
MAASRTATRTLRALRTSTRPALTAAPRAAFRQGGRRLYSSEPAKSGGSNIWAWAIGAGALGAGGLWYLNQDGASATPKVFAPKFDDYQAVYNEIASRLEEKDDYDDGSYGPVLVRLAWHASGTYDKETGTGGSNGATMRFAPESDHGANAGLKAARDFLEPVKAKFPWITYSDLWILGGVCAIQEMLGPQIPYRPGRQDRDAAGCTPDGRLPDASQAQDHLRNIFYRMGFNDQEIVALSGAHALGRCHADRSGFDGPWTFSPTVLTNDYYKLLLDEKWQWKKWNGPKQYEDKKTKSLMMLPADMALIQDKKFKQWVEKYAADNELFFKDFSNVIVKLFELGVPFAENSERWVFKTVNA

SEQ ID NO: 20201 - protein, 753 aa, Neurospora crassa
MSECPVRKSNVGGGGTRNHDWWPAQLRLNILRQHTPVSNPLDKDFDYAAAFKSLDYEGLKKDLTKLMTDSQDWWPADFGHYGGLFIRMAWHSAGTYRVTDGRGGGGEGQQRFAPLNSWPDNVSLDKARRLLWPIKQKYGNKISWSDLLLLTGNVALESMGFKTFGFAGGRPDTWEADESVYWGAETTWLGNEDRYSEGQEGHEGHGVVQGDESKKQHTDIHNRDLQSPLASSHMGLIYVNPEGPDGIPDPVASAKDIRVTFGRMAMNDEETVALIAGGHSFGKTHGAGPTHHVGKEPEAAPIEHQGLGWANSFGQGKGPDTITSGLEVTWTPTPTKWGMGYLEYLYKFDWEPTKSPAGANQWVAKNAEPTIPDAYDPNKKKLPTMLTTDIALRMDPAYDKICRDYLANPDKFADAFARAWFKLLHRDMGPRTRWIGPEVPSEILPWEDYIPPVDYQIIDDNDIAALKKEILATGVAPKKLIFVAWSSASSFRGSDKRGGANGARIRLAPQNEWKVNDPSTLREVLAALESVQQKFNDSSSGKKVSLADLIVLGGVAALEQASGLVVPFTPGRNDATQEHTDVHSFTHLEPHADGFRSYGKGTKRVRTEQFLIDRASLLTLSAPELTALIGGLRVLEANYDGSSYGVLTKTPGKLTNDYFVNLLDTNTAWKAADNEGEVFIGYDRKTHDKKWTATRADLIFGAHAELRALAEVYAAVDGEEKFKRDFVAAWHKVMNLDRFDLKQEGRGQNAPKL

SEQ ID NO: 20202 - protein, 382 aa, Phanerochaete chrysosporium
MAFGSLLAFVALAAITRAAPTAESAVCPDGTRVTNAACCAFIPLAQDLQETLFQGDCGEDAHEVIRLTFHDAIAISQSLGPQAGGGADGSMLHFPTIEPNFSANSGIDDSVNNLLPFMQKHDTISAADLVQFAGAVALSNCPGAPRLEFMAGRPNTTIPAVEGLIPEPQDSVTKILQRFEDAGNFSPFEVVSLLASHTVARADKVDETIDAAPFDSTPFTFDTQVFLEVLLKGTGFPGSNNNTGEVMSPLPLGSGSDTGEMRLQSDFALARDERTACFWQSFVNEQEFMAASFKAAMAKLAILGHSRSSLIDCSDVVPVPKPAVNKPATFPATKGPKDLDTLTCKALKFPTLTSDPGATETLIPHCSNGGMSCPGVQFDGPA

SEQ ID NO: 20203 - protein, 382 aa, Phanerochaete chrysosporium
MAFGSLLAFVALAAITRAAPTAESAVCPDGTRVTNAACCAFIPLAQDLQETLFQGDCGEDAHEVIRLTFHDAIAISQSLGPQAGGGADGSMLHFPTIEPNFSANNGIDDSVNNLLPFMQKHDTISAADLVQFAGAVALSNCPGAPRLEFMAGRPNTTIPAVEGLIPEPQDSVTKILQRFEDAGNFSPFEVVSLLASHTVARADKVDETIDAAPFDSTPFTFDTQVFLEVLLKGTGFPGSNNNTGEVMSPLPLGSGSDTGEMRLQSDFALARDERTACFWQSFVNEQEFMAASFKAAMAKLAILGHSRSSLIDCSDVVPVPKPAVNKPATFPATKGPKDLDTLTCKALKFPTLTSDPGATETLIPHCSNGGMSCPGVQFDGPA

SEQ ID NO: 20204 - protein, 357 aa, Phanerochaete chrysosporium
AVCPDGTRVSHAACCAFIPLAQDLQETIFQNECGQDAHEVIRLTFHDAIAISRSQGPKAGGGADGSMLLFPTVEPNFSANNGIDDSVNNLIPFMQKHNTISAADLVQFAGAVALSNCPGAPRLEFLAGRPNKTIAAVDGLIPEPQDSVTKILQRFEDAGGFTPFEVVSLLASHSVARANKVDQTIDAAPFDSTPFTFDTQVFLEVLLKGVGFPGSANNTGEVASPLPLGSGSDTGEMRLQSDFALAHDPRTACIWQGFVNEQAFMAASFRAAMSKLAVLGHNRNSLIDCSDVVPVPKPATGQPAMFPASTGPQDLELSCPSERFPTLTTQPGASQSLIAHCPDGSMSCPGVQFNGPA

SEQ ID NO: 20205 - protein, 357 aa, Phanerochaete chrysosporium
AVCPDGTRVSHAACCAFIPLAQDLQETIFQNECGEDAHEVIRLTFHDAIAISRSQGPKAGGGADGSMLLFPTVEPNFSANNGIDDSVNNLIPFMQKHNTISAADLVQFAGAVALSNCPGAPRLEFLAGRPNKTIAAVDGLIPEPQDSVTKILQRFEDAGGFTPFEVVSLLASHSVARANKVDQTIDAAPFDSTPFTFDTQVFLEVLLKGVGFPGSANNTGEVASPLPLGSGSDTGEMRLQSDFALAHDPRTACIWQGFVNEQAFMAASFRAAMSKLAVLGHNRNSLIDCSDVVPVPKPATGQPAMFPASTGPQDLELSCPSERFPTLTTQPGASQSLIAHCPDGSMSCPGVQFNGPA

SEQ ID NO: 20206 - protein, 357 aa, Phanerochaete chrysosporium
AVCPDGTRVSHAACCAFIPLAQDLQETIFQNECGEDAHEVIRLTFHDAIAISRSQGPKAGGGADGSMLLFPTVEPNFSANNGIDDSVNNLIPFMQKHNTISAADLVQFAGAVALSNCPGAPRLEFLAGRPNKTIAAVDGLIPEPQDSVTKILQRFEDAGGFTPFEVVSLLASHSVARADKVDQTIDAAPFDSTPFTFDTQVFLEVLLKGVGFPGSANNTGEVASPLPLGSGSDTGEMRLQSDFALAHDPRTACIWQGFVNEQAFMAASFRAAMSKLAVLGHNRNSLIDCSDVVPVPKPATGQPAMFPASTGPQDLELSCPSERFPTLTTQPGASQSLIAHCPDGSMSCPGVQFNGPA

SEQ ID NO: 20207 - protein, 378 aa, Phanerochaete chrysosporium
MAFKSLIAFVALAAAVRAAPTAVCPDGTRVSHAACCAFIPLAQDLQETIFQNECGEDAHEVIRLTFHDAIAISRLQGPKAGGGADGSMLLFPTVEPNFSANNGIDDSVNNLIPFMQKHNTISAADLVQFAGAVALSNCPGAPRLEFLAGRPNKTIAAVDGLIPEPQDSVTKILQRFEDAGGFTPFEVVSLLASHSVARADKVDQTIDAAPFDSTPFTFDTQVFLEVLLKGVGFPGSANNTGEVASPLPLGSGSDTGEMRLQSDFALAHDPRTACIWQGFVNEQAFMAASFRAAMSKLAVLGHNRNSLIDCSDVVPVPKPATGQPAMFPASTGPQDLELSCPSERFPTLTTQPGASQSLIAHCPDGSMSCPGVQFNGPA

SEQ ID NO: 20208 - protein, 378 aa, Phanerochaete chrysosporium
MAFKSLIAFVALAAAVRAAPTAVCPDGTRVSHAACCAFIPLAQDLQETIFQNECGEDAHEVIRLTFHDAIAISRSQGPKAGGGADGSMLLFPTVEPNFSANNGIDDSVNNLIPFMQKHNTISAADLVQFAGAVALSNCPGAPRLEFLAGRPNKTIAAVDGLIPEPQDSVTKILQRFEDAGGFTPFEVVSLLASHSVARADKVDQTIDAAPFDSTPFTFDTQVFLEVLLKGVGFPGSANNTGEVASPLPLGSGSDTGEMRLQSDFALAHDPRTACIWQGFVNEQAFMAASFRAAMSKLAVLGHNRNSLIDCSDVVPVPKPATGQPAMFPASTGPQDLELSCPSERFPTLTTQPGASQSLIAHCPDGSMSCPGVQFNGPA

SEQ ID NO: 20209 - protein, 382 aa, Phanerochaete chrysosporium
MAFASSLLALVALAAVTSAAPATTQATCPDGTKVNNAACCAFIPLAQDLQETIFQNDCGEDAHEVIRLTFHDAIAISQSKGPSAGGGADGSMLLFPTIEPNFSANNGIDDSVNNLIPFMQKHDTISAGDIVQFAGAVALTNCPGAPQLEFLAGRPNKTIPAIDGLIPEPQDSVTSILERFKDAGNFSPFEVVSLLASHSVARADKVDETIDAAPFDTTPFVFDTQIFLEVLLKGVGFPGTANNTGEVASPLPLTSGSDTGELRLQSDFALARDERTACIWQGFVNEQALMAASFKAAMAKLAVLGHDRNTLVDCSDVVPAPKPAVNKPASFPATTGPQDLELSCNTKPFPSLSVDAGAQQTLIPHCSDGDMTCQSVQFNGPA

SEQ ID NO: 20210 - protein, 390 aa, Phlebia radiata
MAFNFAAILAFVSLAAVTSAAPSKTTCSNGVVVPDAVCCDFVPLASALQSEVLMGDCGEDAHELVRLIFHDAIAISQSMGPSAGGGADGSMLIFPTVEPAFFPNLGIADSVNNLIPFLSQFPTISAGDLVHFAGAVAISNCPGAPQLEFLAGRPNATAPAIDGLIPEPQDDVTKILARFKDAGNFSPAEVVALLASHSIARADHVDPTLDAAPFDSTPFDFDTQVFLEVLLKGVGFPGLANNTGEVSSPLPVTDGTDVGELRLQSDFALARDERTACAWQSFVNEQEAMATAFKNAVKKLAVLGHNRNDLVDCSAVVPVPKPATGTPATFPASTGPQDLELTCTTEPFPTLSTAPGAQQTLIPHCSDGTMTCNSVQFDGPATNFGGADDS

SEQ ID NO: 20211 - protein, 328 aa, Trypanosoma cruzi
MAFCFGSFFSKYASSKSGSQARYRFLHSSAKIAAGATGALLLGGATVALCYFPSGRKVTEAPPFDVNSLRRDIEEILSEDMSKGPLFVRLAWHEAGSWDCRKKDGSPNSASMRFHPECSYAGNKGLDKGRNALESLKKKYPKISYADLWSFAAVVSIEAMGGPEIPWRWGRVDAKDGSVCGPDGRLPDASRMQDHVRDVFSRLGFNDEETVALIGAHTCGECHLENTGYVGPWTHDKYGFDNSFFTELFGNEWMLNPNVKKMQFMDKTTNRLMMLPADVSILLDDKYRSIAKKYADDNDYFCNAFSKAYQKLLEVGTTDLKSLPAESK

SEQ ID NO: 20212 - protein, 288 aa, Zantedeschia aethiopica
MAAPVVDAGYLKEVDKARRDLRALIASKNCAPVMLRLAWHDAGTYDVKTKTGGPNGSIRNEEEHKHGANAGLKIAIDLCETVKAKHPRITYADLYQLAGVVAVEVTGGPTIDFVPGRRDSLVSPKEGRLPDAKQGSAHLRDVFYRMGLSDKDIVALSGGHTLGRAHPERSGFDGPWTNEPLKFDNSYFVELLEGEKEGLLKLPTDKVLVEDPEFRGYVELFAKDEDAFFKDYAESHKKLSELGFTSPKSASKSDAHTSILLAQSAVGVAVAAAVVFLSYCYEVSRRSK

SEQ ID NO: 20213 - protein, 175 aa, Crocus sativus
MGKSSPTVSAEYLKAVEKCKRKLRGFIAEKNCAPLMLRIAWHSAGTFDCKSKTGGPFGTMRHKAELAHGANNGLDIAVRLLEPIKEQFPIISYADFYQLAGVVAVEITGGPDVPFHPGREDKPEPPVEGRLPDATKGCDHLRTVFGEQMGLSDKDIVALSGGHTLGRCHKDRSGF

SEQ ID NO: 20214 - protein, 247 aa, Galdieria partita
MVASKTDLEQKVRSRLVKLFEQTPCMPIMVRLAWHDAGTYDAQTGTGGVNGSIRFDPELRHGANNGLKIALDLLEPIKKEYPDIGYADLFQLASVTAIEFAKGPKIPFRMGRKDATGPDACPEEGRLPNAEDHMSQLRRTFHRMGLSDKDITVLSGAHTLGRCHKERSGYEGPWTHQPLEFDNSYFVEILKPNPDPGLIRLASDLSLLDDSYTRSLVETYAENKDIFFKDYTESHHKLSELGAVWEY

SEQ ID NO: 20215 - protein, 123 aa, Astragalus membranaceus
RLVEADATKGSDHLRDVFGKGMGLSDQDIVALSGGHTIGAAHKERSGFGGPWTSNPLIFDNSYFKELLSGEKEGLLQLPSDKALLTDPVFRPLVEKYAADEDAFFADYAVAHQKLSELGFAEA

SEQ ID NO: 20216 - protein, 735 aa, Bacillus halodurans
MDTNNTGKCPFHHGATTSPKSSGTTNNDWWPNALNLNILRQHDKKSNPMGEEFDYAEEFSKLDYDALKQDVRDLMRDSQDWWPADFGHYGPFFIRMSWHAAGTYRIGDGRGGGGTGNQRFAPLNSWPDNGNLDKARRLLWPIKQKYGNKISWADLLVLAGNVAIEDMGGPVIGFGAGREDIWHPEEDIYWGSEKEWLTGDKRYSGDRELENPLAAVEMGLIYVNPEGPDGKPDPIKAAHDIRETFGRMGMNDEETVALIAGGHTFGKAHGAGNPDHVGPEPEAAPIEAQGLGWQNTYGSGKGRDTITSGLEGAWTANPTQWDNGFFDLLFGYEWWLTKSPAGAYQWQAVDPDEKDLAPDAEDPSVKVPTVMLTTDLALRHDPEYEKISRRFHKNPDEFADAFARAWFKLLHRDMGPKARYLGPEVPAEDFIWQDPVPTVDYELTDAEVEELKAKILDSGLTVSELVTTAWASASTFRNSDKRGGANGARIRLAPQKDWEVNQPEQLEKVLSVLENIQSQLDKKVSIADLIVLGGSAAVEKAAKEAGFDVTVPFAPGRGDATQEQTDVEGFAVLEPVSDGFRNYQKKEYSVSPEELLIDKAQLLDLTAPEMTALIGGMRALGANYGGTQHGVFTDCVGTLTNDFFVNLLDMGIEWKPVDYNLYEGRDRKTGEVVRTATRVDLVFGSNSILRAIAEVYAQDDNKGKFVEDFIAAWVKVMNADRFDLKLNKKAQLTSK

SEQ ID NO: 20217 - protein, 447 aa, Mus musculus
MDEEYDVIVLGTGLTECILSGIMSVNGKKVLHMDRNPYYGGESSSITPLEELYKRFQMLEGPPESMGRGRDWNVDLIPKFLMANGQLVKMLLYTEVTRYLDFKVVEGSFVYKGGKIYKVPSTETEALASNLMGMFEKRRFRKFLVFVANFDENDPKTFEGVDPQTTSMRDVYRKFDLGQDVIDFTGHALALYRTDDYLDQPCLETINRIKLYSESLARYGKSPYLYPLYGLGELPQGFARLSAIYGGTYMLNKPVDDIIMENGKVVGVKSEGEVARCKQLICDPSYIPDRVQKAGQVIRIICILSHPIKNTNDANSCQIIIPQNQVNRKSDIYVCMISYAHNVAAQGKYIAIASTTVETAEPEKEVEPALELLEPIDQKFVAISDLYEPIDDGSESQVFCSCSYDATTHFETTCNDIKDIYKRMAGSAFDFENMKRKQNDVFGEADQ

SEQ ID NO: 20218 - protein, 447 aa, Mus musculus
MDEEYDVIVLGTGLTECILSGIMSVNGKKVLHMDRNPYYGGESSSITPLEELYKRFQILEGPPESMGRGRDWNVDLIPKFLMANGQLVKMLLYTEVTRYLDFKVVEGSFVYKGGKIYKVPSTETEALASNLMGMFEKRRFRKFLVFVANFDENDPKTFEGVDPQNTSMRDVYRKFDLGQDVIDFTGHALALYRTDDYLDQPCLETINRIKLYSESLARYGKSPYLYPLYGLGELPQGFARLSAIYGGTYMLNKPVDDIIMENGKVVGVKSEGEVARCKQLICDPSYIPDRVQKAGQVIRIICILSHPIKNTNDANSCQIIIPQNQVNRKSDIYVCMISYAHNVAAQGKYIAIASTTVETAEPEKEVEPALELLEPIDQKFVAISDLYEPIDDGSESQVFCSCSYDATTHFETTCNDIKDIYKRMAGSAFDFENMKRKQNDVFGEADQ

SEQ ID NO: 20219 - protein, 447 aa, Mus musculus
MDEEYDVIVLGTGLTECILSGIMSVNGKKVLHMDRNPYYGGESSSITPLEELYKRFQILEGPPESMGRGRDWNVDLIPKFLMANGQLVKMLLYTEVTRYLDFKVVEGSFVYKGGKIYKVPSTETEALASNLMGMFEKRRFRKFLVFVANFDENDPKTFEGVDPQNTSMRDVYRKFDLGQDVIDFTGHALALYRTDDYLDQPCLETINRIKLYSESLARYGKSSYLYPLYGLGELPQGFARLSAIYGGTYMLNKPVDDIIMENGKVVGVKSEGEVARCKQLICDPSYIPDRVQKAGQVIRIICILSHPIKNTNDANSCQIIIPQNQVNRKSDIYVCMISYAHNVAAQGKYIAIASTTVETAEPEKEVEPALELLEPIDQKFVAISDLYEPIDDGSESQVFCSCSYDATTHFETTCNDIKDIYKRMAGSAFDFENMKRKQNDVFGEADQ

SEQ ID NO: 20220 - protein, 445 aa, Mus musculus
MNEEYDVIVLGTGLTECILSGIMSVNGKKVLHMDQNPYYGGESASITPLEDLYKRFKLPGQPPASMGRGRDWNVDLIPKFLMANGQLVKMLLFTEVTRYMDFKVIEGSFVYKGGKIYKVPSTEAEALASSLMGLFEKRRFRKFLVYVANFDEKDPRTFEGVDPKKTSMRDVYKKFDLGQDVIDFTGHSLALYRTDDYLDQPCCETINRIKLYSESLARYGKSPYLYPLYGLGELPQGFARLSAIYGGTYMLNKPIEEIIVQNGKVVGVKSEGEIARCKQLICDPSYVKDRVEKVGQVIRVICILSHPIKNTNDANSCQIIIPQNQVNRKSDIYVCMISFAHNVAAQGKYIAIVSTTVETKEPEKEIRPALELLEPIEQKFVSISDLFVPKDLGTDSQIFISRAYDATTHFETTCDDIKDIYKRMTGSEFDFEEMKRKKNDIYGED

SEQ ID NO: 20221 - protein, 445 aa, Mus musculus
MNEEYDVIVLGTGLTECILSGIMSVNGKKVLHMDQNPYYGGESASITPLEDLYKRFKLPGQPPASMGRGRDWNVDLIPKFLMANGQLVKMLLFTEVTRYMDFKVIEGSFVYKGGKIYKVPSTEAEALASSLMGLFEKRRFRKFLVYVANFDEKDPRTFEGVDPKKTSMRDVYKKFDLGQDVIDFTGHSLALYRTDDYLDQPCCETINRIKLYSESLARYGKSPYLYPLYGLGELPQGFARLSAIYGGTYMLNKPIEEIIVQNGKVVGVKSEGEIARCKQLICDPSYVKDRVEKVGQVNRVICILSHPIKNTNDANSCQIIIPQNQVNRKSDIYVCMISFAHNVAAQGKYIAIVSTTVETKEPEKEIRPALELLEPIEQKFVSISDLFVPKDLGTDSQIFISRAYDATTHFETTCDDIKDIYKRMTGSEFDFEEMKRKKNDIYGED

SEQ ID NO: 20222 - protein, 445 aa, Mus musculus
MNEEYDVIVLGTGLTECILSGIMSVNGKKVLHMDRNPYYGGESASITPLEDLYKRFKIPGAPPASMGRGRDWNVDLIPKFLMANGQLVKMLLFTEVTRYLDFKVTEGSFVYKGGKIYKVPSTEAEALASSLMGLFEKRRFRKFLVYVANFDENDPRTFEGIDPKKTSMREVYKKFDLGQDVIDFTGHALALYRTDDYLDQPCCETINRIKLYSESLARYGKSPYLYPLYGLGELPQGFARLSAIYGGTYMLNKPIEEIIMQNGKVIGVKSEGEIARCKQLICDPSYVKDRVEKVGQVIRVICILSHPIKNTNDANSCQIIIPQNQVNRKSDIYVCMISSAHNVAAQGKYIAIASTTVETKEPEKEIRPALELLEPIEQKFVSISDLLVPKDLGTESQIFISRTYDATTHFETTCDDIKDIYKRMMGSEFDFEEMKRKKNDIYGEE

SEQ ID NO: 20223 - protein, 445 aa, Mus musculus
MNEEYDVIVLGHWLTECILSGIMSVNGKKVLHMDRNPYYGGESASITPLEDLYKRFKIPGAPPASMGRGRDWNVDLIPKFLMANGQLVKMLLFTEVTRYLDFKVTEGSFVYKGGKIYKVPSTEAEALASSLMGLFEKRRFRKFLVYVANFDENDPRTFEGIDPKKTSMREVYKKFDLGQDVIDFTGHALALYRTDDYLDQPCCETINRIKLYSESLARYGKSPYLYPLYGLGELPQGFARLSAIYGGTYMLNKPIEEIIMQNGKVIGVKSEGEIARCKQLICDPSYVKDRVEKVGQVIRVICILSHPIKNTNDANSCQIIIPQNQVNRKSDIYVCMISSAHNVAAQGKYIAIASTTVETKEPEKEIRPALELLEPIEQKFVSISDLLVPKDLGTESQIFISRTYDATTHFETTCDDIKDIYKRMMGSEFDFEEMKRKKNDIYGEE

SEQ ID NO: 20224 - protein, 445 aa, Mus musculus
MNEEYDVIVLGHTGTECILSGIMSVNGKKVLHMDRNPYYGGESASITPLEDLYKRFKIPGAPPASMGRGRDWNVDLIPKFLMANGQLVKMLLFTEVTRYLDFKVTEGSFVYKGGKIYKVPSTEAEALASSLMGLFEKRRFRKFLVYVANFDENDPRTFEGIDPKKTSMREVYKKFDLGQDVIDFTGHALALYRTDDYLDQPCCETINRIKLYSESLARYGKSPYLYPLYGLGELPQGFARLSAIYGGTYMLNKPIEEIIMQNGKVIGVKSEGEIARCKQLICDPSYVKDRVEKVGQVIRVICILSHPIKNTNDANSCQIIIPQNQVNRKSDIYVCMISSAHNVAAQGKYIAIASTTVETKEPEKEIRPALELLEPIEQKFVSISDLLVPKDLGTESQIFISRTYDATTHFETTCDDIKDIYKRMMGSEFDFEEMKRKKNDIYGEE

SEQ ID NO: 20225 - protein, 409 aa, Mus musculus
MNEEYDVIVLGTGLTLYKRFKLPGQPPASMGRGRDWNVDLIPKFLMANGQLVKMLLFTEVTRYMDFKVIEGSFVYKGGKIYKVPSTEAEALASSLMGLFEKRRFRKFLVYVANFDEKDPKTFEGVDPKKTSMRDVYKKFDLGQDVIDFTGHSLALYRTDDYLDQPCCETINRIKLYSESLARYGKSPYLYPLYGLGELPQGFARLSAIYGGTYMLNKPIEEIIVQNGKVVGVKSEGEIARCKQLICDPSYVKDRVEKVGQVIRVICILSHPIKNTNDANSCQIIIPQNQVNRKSDIYVCMISFAHNVAAQGKYIAIVSTTVETKEPEKEIRPALELLEPIEQKFVSISDLFVPKDLGTDSQIFISRAYDATTHFETTCDDIKDIYKRMTGSEFDFEEMKRKKNDIYGED

SEQ ID NO: 20226 - protein, 447 aa, Rattus norvegicus
MDEEYDVIVLGTGLTECILSGIMSVNGKKVLHMDRNPYYGGESSSITPLEELYKRFQLLEGPPESMGRGRDWNVDLIPKFLMANGQLVKMLLYTEVTRYLDFKVVEGSFVYKGGKIYKVPSTETEALASNLMGMFEKRRFRKFLVFVANFDENDPKTFEGVDPQTTSMRDVYRKFDLGQDVIDFTGHALALYRTDDYLDQPCLETINRIKLYSESLARYGKSPYLYPLYGLGELPQGFARLSAIYGGTYMLNKPVDDIIMENGKVVGVKSEGEVARCKQLICDPSYIPDRVRKAGQVIRIICILSHPIKNTNDANSCQIIIPQNQVNRKSDIYVCMISYAHNVAAQGKYIAIASTTVETAEPEKEVEPALELLEPIDQKFVAISDLYEPIDDGSESQVFCSCSYDATTHFETTCNDIKDIYKRMAGSAFDFENMKRKQNDVFGEADQ

SEQ ID NO: 20227 - protein, 447 aa, Rattus norvegicus
MDEEYDVIVLGTGLTECILSGIMSVNGKKVLHMDRNPYYGGESSSITPLEELYKRFQLLEGPPESMGRGRDWNVDLIPKFLMANGQLVKMLLYTEVTRYLDFKVVEGSFVYKGGKIYKVPSTETEALASNLMGMFEKRRFRKFLVFVANFDENDPKTFEGVDPQTTSMRDVYRKFDLGQDVIDFTGHALALYRTDDYLVQPCLETINRIKLYSESLARYGKSPYLYPLYGLGELPQGFARLSAIYGGTYMLNKPVDDIIMENGKVVGVKSEGEVARCKQLICDPSYIPDRVRKAGQVIRIICILSHPIKNTNDANSCQIIIPQNQVNRKSDIYVCMISYAHNVAAQGKYIAIASTTVETAEPEKEVEPALELLEPIDQKFVAISDLYEPIDDGSESQVFCSCSYDATTHFETTCNDIKDIYKRMAGSAFDFENMKRKQNDVFGEADQ

SEQ ID NO: 20228 - protein, 447 aa, Rattus norvegicus
MDEEYDVIVLGTGLTECILSGIMSVNGKKVLHMDRNPYYGGESSSITPLEELYKRFQLLEGPPESMGRGRDWNVDLIPKFLMANGQLVKMLLYTEVTRYLDFKVVEGSFVYKGGKIYKVPSTETEALASNLMGMFEKRRFRKFLVFVANFDENDPKTFEGVDPQTTSMRDVYRKFDLGQDVIDFTGHALALYRTDDYLDQPCLETINRIKLYSESLARYGKSPYLYPLYSLGELPQGFARLSAIYGGTYMLNKPVDDIIMENGKVVGVKSEGEVARCKQLICDPSYIPDRVRKAGQVIRIICILSHPIKNTNDANSCQIIIPQNQVNRKPDIYVCMISYAHNVAAQGKYIAIASTTVETAEPEKEVEPALELLEPIDQKFVAISDLYEPIDDGSESQVFCSCSYDATTHFETTCNDIKDIYKRMAGSAFDFENMKRKQNDVFGEADQ

SEQ ID NO: 20229 - protein, 447 aa, Rattus norvegicus
MDEEYDVIVLGTGLTECILSGIMSVNGKKVLHMDRNPYYGGESSSITPLEELYKRFQLLEGPPESMGRGRDWNVDLIPKFLMANGQLVKMLLYTEVTRYLDFKVVEGSFVYKGGKIYKVPSTETEALASNLMGMFEKRRFRKFLVFVANFDENDPKTFEGVDPQTTSMRDVYRKFDLGQDVIDFTGHALALYRTDDYLVQPCLETINRIKLYSESLARYGKSPYLYPLYGLGELPQGFARLSAIYGGTYMLNKPVHDIIMENGKVVGVKSEGEVARCKQLICDPSYIPERVRKAGQVIRIICILSHPIKNTNDANSCQIIIPQNQVNRKSDIYVCMISYAHNVAAQGKYIAIASTTVETAEPEKEVEPALELLEPIDQKFVAISDLYEPIDDGSESQVFCSCSYDATTHFETTCNDIKDIYKRMAGSAFDFENMKRKQNDVFGEADQ

SEQ ID NO: 20230 - protein, 445 aa, Rattus norvegicus
MNEEYDVIVLGTGLTECILSGIMSVNGKKVLHMDQNPYYGGESASITPLEDLYKRFKLPGQPPASMGRGRDWNVDLIPKFLMANGQLVKMLLFTEVTRYMDFKVIEGSFVYKGGKIYKVPSTEAEALASSLMGLFEKRRFRKFLVYVANFDEKDPRTFEGVDPKKTSMRDVYKKFDLGQDVIDFTGHSLALYRTDDYLDQPCCERLTELNFYSESLARYGKSPYLYPLYGPWELPQGFARLSAIYGGTYMLNKPIEEIIVQNGKVVGVKSEGEIARCKQLICDPSYVKDRVEKVGQVIRVICILSHPIKNTNDANSCQIIIPQNQVNRKSDIYVCMISFAHNVAAQGKYIAIVSTTVETKEPEKEIRPALELLEPIEQKFVSISDLFVPKDLGTDSQIFISRAYDATTHFETTCDDIKDIYKRMTGSEFDFEEMKRKKNDIYGED

SEQ ID NO: 20231 - protein, 359 aa, Rattus norvegicus
LMANGQLVKMLLYTEVTRYLDFKVVEGSFVYKGGKIYKVPSTETEALASNLMGMFEKRRFRKFLVFVANFDENDPKTFEGVDPQTTSMRDVYRKFDLGQDVIDFTGHALALYRTDDYLDQPCLETINRIKLYSESLARYGKSPYLYPLYGLGELPQGFARLSAIYGGTYMLNKPVDDIIMENGKVVGVKSEGEVARCKQLICDPSYIPDRVRKAGQVIRIICILSHPIKNTNDANSCQIIIPQNQVNRKSDIYVCMISYAHNVAAQGKYIAIASTTVETAEPEKEVEPALELLEPIDQKFVAISDLYEPIDDGSESQVFCSCSYDATTHFETTCNDIKDIYKRMAGSAFDFENMKRKQN

SEQ ID NO: 20232 - protein, 414 aa, Anopheles gambiae str. PEST
RTVIMDEEYDAIVLGTGLKECILSGMLSVSGKKVLHIDRNKYYGGESASITPLEDLFSRFAVDLPEGKYGRGRDWNVDLIPKFLMANGLLVKLLIHTGVTRYLEFKSVEGSYVYKGGKISKVPVDQKEALASDLMGLFEKRRFRNFLIYVQDFVADDPKTWKDFDPSTKDMQALYEKFGLEKSTQDFTGHALALYRDDSYLTEPAIKTINRIKLYSDSLARYGKSPYLYPMYGLGELPQGFARLSAIYGGTYMLDKPIDEIVYDASGKVVGVRSGEEVAKCKQVYCDPTYVPNKMQVDRKSDIYVSLISSTHQVSAKGWFIAMVSTTVETGNPEAEIKPGLDLLGPIAQKFLSITDYYEPTDDGLQSQVFISQSYDATTHFETTCLDVLDIFKRGTGEDFDFSKIKQELGDEEQ

SEQ ID NO: 20233 - protein, 471 aa, Giardia lamblia ATCC 50803
MDTLPKEFDAIVLGTGLKEGIVSALLSVHGRKVLHIDRNDFYGGDCASLKLSQLYSFFGESLSSIPAEFGKDNEWSIDLIPKFILSSGDLFYMLRHVDCLHYLEFGRVAGAFVYNNGVIHRVPATTKQALDSKLMGLFEKKRMANLFEYITSFEENPSATSNLSSQGKTPATATCNEYFDAYKLSDSTKEFIGHAMALELDDEYLNKPALETFRRIDLYTQSLSRFGQSPFIYPLYGLGDLPQAFSRVAAVWGGIYMLNTPVSEILYNDDKKVRGVRFGDHEVSAPIVVGDPSYFPDLVVSKGRVGRAICILKGPIPECDQQSDVEKDGAGNRIVQTAHQVILPASQIQRKSDIYVSTQGYNHRTTPRNCVLGYVSGLVYGSRSDNRDELKAGFDILKRAGISKTFYKEYDLLEPKEEAQRRNIFISKSYDATSHFESTVADAIDMYQRITGETLDLTTIVKRQAPTVEDA

SEQ ID NO: 20234 - protein, 445 aa, Kluyveromyces lactis
MDENYDVIVLGTGLTECILSGLLSIEGKKVLHVDRQDHYGGESSSVTLTQLYSKFKQHPLSKEDIESKFGKDRDWNVDLIPKFLMANGELTNILVHTDVTRYIEFKQVAGSYVYNRGKVYKVPANEMEAISSSLLGIFEKRRMKKFLEWISAYNEEDIATHQGLNLDQNTMDEVYYKFGLGNSTREFIGHAMALWTNDDYLQQPARPSVERIILYVQSISRFGKSPYIYPMYGLGELPQGFARLSAIYGGTYMLNTPIEKVLYSDDGKFEGIVTKEGTAKAPIVIADPTYFPEKCKTTGEKVIRAICITKQPVPNTSNADSCQIIIPQSQVGRKNDIYIATVSDAHKVTSKGHYLASVSTIIETDKPHIELEPAFKMLGPIEERFMGISEIFEPIEDGTKDNIYISKSYDSSSHFESMTDDVKDIYFRITGHPLVLKKREDVAEE

SEQ ID NO: 20235 - protein, 443 aa, Volvox carteri f. nagariensis
MNEEYDVIVLGTGLKECIISGLLSVDKKKVLHVDRNNYYGGESASLSLIQLYERFRGGDKPPEKLGPSRDYNVDMVPKFMMANGKLVRVLLHTDVVKYLEFKAVDGSYVLQKGKVHKVPANRSEALSSQLMGLFEKRRARNFFLYVQDYEESDPKTHKGLDLKRMTMSELYKQYDLSEDTQDFIGHALGLHRDDAYLTQPALATVLRIKLYHESLFRYEGLKSPYLYPRYGLGELPQAFARLSAVYGGTYMLNQPSMEVLYENGVAVGIKNGDDVARAKLVVGDPSYFPGKTRVVSKVVRAIAIMSHPIPNTDSAHSVQIILPQKQTGRKSDMYVFCCSYAHNVAAKDKWLAFVSTTMETPNPEVDLAPGLALLGPVDEKFVEVREVCEPLEDGARDKCYISKGYDATTHFETTVEDVLDMYRRITGRDLDLTAKDLSQVENA

SEQ ID NO: 20236 - protein, 459 aa, Plasmodium falciparum 3D7
MNEHYDVIILGTGLKECILSGLLSHYGKKILVLDRNPYYGGETASLNLTNLYNTFKPKENIPSKYGENRHWNVDLIPKFILVGGNLVKILKKTRVTNYLEWLVVEGSYVYQHQKKGFLTSEKFIHKVPATDMEALVSPLLSLMEKNRCKNFYQYVSEWDANKRNTWDNLDPYKLTMLEIYKHFNLCQLTIDFLGHAVALYLNDDYLKQPAYLTLERIKLYMQSISAFGKSPFIYPLYGLGGIPEGFSRMCAINGGTFMLNKNVVDFVFDDDNKVCGIKSSDGEIAYCDKVICDPSYVMHLKNKIKKIGQVIRCICILSNPIPETNQTNSCQIIIPQNQLNRKSDIYINLASFQHGVTLKGKYIAIVSATVETNNPIKEIEKPLELLGTIEEKFVKISDLYVSTSKKPADNIFVTSSYDATSHFETATNDLLQIWENLWGQKLNFDDLNTNADGEAPDFN

SEQ ID NO: 20237 - protein, 459 aa, Plasmodium falciparum 3D7
MNEHYDVIILGTGLKECILSGLLSHYGKKILVLDRNPYYGGETASLNLTNLYNTFKPKENIPSKYGENRHWNVDLIPKFILVGGNLVKILKKTRVTNYLEWLVVEGSYVYQHQKKGFLTSEKFIHKVPATDMEALVSPLLSLMEKNRCKNFYQYVSEWDANKRNTWDNLDPYKLTMLEIYKHFNLCQLTIDFLGHAVALYLNDDYLKQPAYLTLERIKLYMQSISAFGKSPFIYPLYGLGGIPEGFSRMCAINGGTFMLNKNVVDFVFDDDNKVCGIKSSDGEIAYCDKVICDPSYVMHLKNKIKKIGQVIRCICILSNPIPETNQTNSCQIIIPQNQLNRKSDIYINLVSFQHGVTLKGKYIAIVSATVETNNPIKEIEKPLELLGTIEEKFVKISDLYVSTSKKPADNIFVTSSYDATSHFETATNDLLQIWENLWGQKLNFDDLNTNADGEAPDFN

SEQ ID NO: 20238 - protein, 464 aa, Oryza sativa (japonica cultivar-group)
MDVEYDVIVLGTGLKECILSGLLSVDRLKVLHMDRNDYYGGDSTSLNLNQLWKRFKGEGTPPAQIGASRDYNVDMIPKFMMANGTLVRVLIHTGVTKYLSFKAVDGSYVFNKGKIHKVPSTDMEALKSPLMGLFEKRRAGKFFLFVQDYKENDPSTHKGYDLNKMTTKELISKYGLDDNTIDFIGHAVALHKEDNYLTEPAIDTLYAESVGRFQGGSPYIYPLYGLGELPQGFARLSAVYGGTYMLNKPECKIEFNDEGKVCGVTSEGETAKCKKVVCDPSYIPDKVRKVGKVFRAIAIMSHPIPNTADSHSVQIIIPQKQLGRKSDMQITLGLLVISIIVTKECSLVHARYVFCCSYSHNVASKGKFIAFVSAQAESENPAAELKPGIDLLGPVDELFIDTYDRFEPTNDPSSDNCFISTSYDATTHFESTVMDVLSIYTKITGKTVDLSVDLSAASAAEDDL

SEQ ID NO: 20239 - protein, 438 aa, Lycopersicon esculentum
IVLGTGLKECILSGLLSVDGLKVLHMDKNDYYGGESSSLNLIQLWKRFRGNDQPPEELGTSKEYNVDMIPKFAMANGTLVRVLIHTDVTKYLNFKAVDGSFVYNKGKIYKVPATDVEALKSPLMGLFEKRRARKFFLYVQDFEETDPKTHEGMDLNKITAKEFIAKYELEDDTIDFIGHALALCTDDNYLAQPAMDFIKRVKLYAESLARFQAGSPYIYPLYGLGELPQAFARLSAVYGGTYMLNKPQCKVEFDDGGKVVGVTSEGETAKCKKVVCDPSYLPDKVQKVGKVARAICIMSHPIPNTNDSHSAQVILPQKQLGRKSDMYLFCCSYSHNVAPKGKYIAFVSTEAETDDPESELKPGVDILGAVDEIFYETYDRFIPSHDSAADNCFISKSYDSTTHFESTVMDVLDMYSKITGKVIDLSVDLSAASATAEE

SEQ ID NO: 20240 - protein, 111 aa, Hordeum vulgare
DVEYDVIVLGTGLKECILSGLLSVDRLKVLHMDRNDYYGGDSTSLNLNQLWKRFKGDGTPPANIGASRDYNVDMVPKFMMANGALVRVLIHTGVTKYLSFKAVDGSYVFNK

SEQ ID NO: 20241 - protein, 447 aa, Oryza sativa
MDEEYDVIVLGTGLKECIISGLLSVDGLKVLHMDRNDYYGGESTSLNLTKLWKRFKGNETAPEHLGVSKEYNVDMVPKFMMANGALVRVLIHTSVTKYLNFKAVDGSFVYNNGKIHKVPATDVEALKSNLMGLFEKRRARKFFIYVQDYEEDDPKSHEGLDLHKVTTREVISKYGLEDDTVDFIGHALALHRDDNYLDEPAIDTVKRMKLYAESLARFQGGSPYIYPLYGLAELPQAFARLSAVYGGTYMLNKAECKVEFDENGKAYGVTSEGETAKCKKVVCDPSYLPDKVKKVGRVARAICIMKHPIPDTKDSHSVQIILPKKQLKRKSDMYVFCCSYAHNVAPKGKFIAFVSTEAEADKPEIELKPGIDLLGPVEETFFDIYDRYEPTNTADEDNCFVTNSYDATTHFETTVKDVLALYSKITGKELDLSVDLNAASAAESEAA

SEQ ID NO: 20242 - protein, 446 aa, Triticum aestivum
  unsure (1)..(446): unsure at all Xaa locations
MDEEYDVIVLGTGLKECILSGLLSVDGLKVLHMDRNDYYGGDSTSLNLNQLWKKFRGEEKPPAHLGASRDYNVDMVPKFMMANGTLVRTLIHTDVTKYLSFKAVDGSYVFSKGKIHKVPATDMEALKSPLMGLFEKRRARNFFIYVQDYNDADPRTHQGLDLTRMTTRELIAKHGLSDDTIDFIGHALALHRDDRYLSEPAIDTVKRMKLYSESLARFQGGSPYIYPLYGLGELPQAFARLSAVYGGTYMLNKPECKVEFDMEGKVCGVTSEGETAKCKKXVVCDPSYLANKGRKVGKVARAIAIMSHPIPNANDSHSIQIILPQKQLGRKSDMYVFCCSYTHNVAPKGKFIAFVSAEAETDNPQSELKPGIDLLGPVDELFFDMYDRYEPVNEPSLDNCFVSSSYDATTHFETTVTDVLNMYTLITGKTVDLSVDLSAASAAEEY

SEQ ID NO: 20243 - protein, 449 aa, Triticum aestivum
  unsure (1)..(449): unsure at all Xaa locations
MDEEYDVIVLGTGLKECILSGLLSVDGLKVLPMDXNDYYGGXDSTSLNLNQLWKKFRGEDKPPAHLGSSKDYNVDMVPKFMMANGTLVRTLIHTNVTKYLSFKAVDGSFVFSKGKIHKVPATDMEALKSPLMGLFEKRRARNFFIYVQNYDEADPKTHQGLDLTTLTPREPIATHGLVDDTXVDFMGRALALLGDDPHLNXKPALDTVKRMKLYSESLARIQGVSPYIYPLYGLGELPQRFARLSAVYGGSYMLTKPECKVEFHMEGKACGVTSEGETAKCKKVVCDPSYLTNKVRKIGKVARAIAIMSHPIPNTNESHSVQIILPQKQLGRNSDMYVFCCSYTHNVAPKGKFIAFVSAEAESDNIQSELKPGIDLLGPVDELFFDMYDRYEPVNEPSLDNCFISTSYDATTHFETTVTDVLNMYTMITGKTIDLSVDLSAASAAEEEY

SEQ ID NO: 20244 - protein, 434 aa, Triticum aestivum
  unsure (1)..(434): unsure at all Xaa locations
MDEEYDVIVLGTGLKECILSGLLSVDGLKVLHMDRNDYYGGDSTSLNLNQLWKKFRGEEKPPAHLGASRDYNVDMVPKFMMANGTLVRTLIHTDVTKYLSFKAVDGSFVFSKGKIHKVPATDMEALKSPLMGIFEKRRARNFFIYVQDYNDADPRTHQGLDLTRMTTRELIAKHGLSDDTIDFIGHALALHRDDRYLSEPAIDTVKRMKLYSESLARFQGGSPYIYPLYGLGELPQAFARLSAVYGGTYMLNKPECKVEFDMEGKVCGVTSEGETAKCKKVVCDPSYLANKVRKIGKVARAIAIMSHPIPNANDSHSIQIILPQKQLGRKSDMYVFCCSYTHNVAPKGKFIAFVSAEAETDNPQSELKPGIDLLGPVDELFFDMYDRYDQXRXPSXXNXXCPTGXKPYSFGHWDDXLIXXXFWKTXXYVXXLXX

SEQ ID NO: 20245 - protein, 306 aa, Triticum aestivum
  unsure (1)..(306): unsure at all Xaa locations
MDEEYDVIVLGTGLKECILSGILSVDGLKVLHMDRNDYYGGESTSLNLAKIWKRFKGSDTTPDHLGVSKEYNVDMVPKFMMANGALVRVLIRTSVTKYLNFKAVDGSFVYNNGKIHKVPATDVEALKSNLMGLFEKRRARKFFIYVQDYEEDDAKSHEGLDLHKVTTRELISKYGLEDDTVDFIGHALALHRDDSYLDEPALGTVKRMKLYAESLARFQGGSPYIYPLYGLGELPQAFARLSAVYGGTYMLNKPECKVEFDESGKAFGVTSEGETAKCKKVVCDPSYLPDKVNKVGRVARAICIMX

SEQ ID NO: 20246 - protein, 444 aa, Triticum aestivum
  unsure (1)..(444): unsure at all Xaa locations
MDEEYDVIVLGTGLKECILSGILSVDGLKVLHMDRNDYYGGESTSLNLAKIWKRFKGSDTTPDHLGISKEYKVDMVPKRRISYGALIDSSQLTLLRRTTAPXQLDDATTHFETTVKDVLALYSKITGKELDLSVDLNAASAXVKMMPLEHLLLVDNFSFLSFFIHRFVHRWIGSILSISFLGFHLSFHTKCSTMDLYTSNTFFTSELLAVALARVHRGSPYIYPLYGLGELPQAFARLSAVYGGTYMLNKPECKVEFDESGKAFGVTSEGETAKCKKVVCDPSYLPDKVKKVGRVARAICIMKHPIPDTKDSHSVQIILPKKQLKRKSDMYVFCCSYAHNVAPKGKFVAFVSTEAETDKPEIELKPGIDLLGPVEETFFDMYDRFEPVNAAEEDNCFLTTSYDATTHFETTVKDVLALYSKITGKELDLSVDLNAASAGENDAA

SEQ ID NO: 20247 - protein, 327 aa, Triticum aestivum
  unsure (1)..(327): unsure at all Xaa locations
MDEEYDVIVLGTGLKECILSGLLSVDGLKVLHMDRNDYYGGDSTSLNLNQLWKKFRGEEKPPAHLGASRDYNVDMVPKFMMANGTLVRTLIHTDVTKYLSFKAVDGSYVFSKGKIHKVPATDMEALKSPLMGIFEKRRARNFFIYVQDYNDADPRTHQGLDLTRMTTRELIAKHGLSDDTIDFIGHALALHRDDRYLSEPAIDTVKRMKLYSESLARFQGGSPYIYPLYGLGELPQAFARLSAVYVRTYMLNKPECKVEFDMEGKVCGVTSEGETAKCKKVVCDPSYLANKVRKIGKVARAIAFMSHPISYAYXDSHSIXYIILPQK

SEQ ID NO: 20248 - protein, 360 aa, Triticum aestivum
  unsure (1)..(360): unsure at all Xaa locations
MRVRLLPDSRTPNPTPTPNCCPFVNSTSPHRRPSVLTPLAPRSHRDKLAESPMDEEYDVIVLGTGLKECILSGLLSVDGLKVLHMDRNDYYGGDSTSLNLNQLWKKFRGEDKPPAHLGSSKDYNVDMVPKFMMANGTLVRTLIHTNVTKYLSFKAVDGSFVFSKGKIHKVPATDMEALKSPLMGLFEKRRARNFFIYVQNYDEADPKTHQGLDLTTMTTKELIAKHGLSDDTIDFIGHALALHRDDRYLSEPAIDTVKRMKLYSESLARFQGGSPYIYPLYGLGELPQAFARLSAVYGGTYMLNKPECKVEFDMEGKVCGVTSEGETAKCKKXVVCDPSYLANKGRKDGKXVARAIAIMX

SEQ ID NO: 20249 - protein, 440 aa, Schizosaccharomyces pombe
MDEEYDVIVLGTGLTECVLSGLLSVDGKKVLHIDRNDYYGADSASLNLTQLYALFRPGEQRPESLGRDRDWCVDLVPKFLMANGDLTNILIYTDVTRYIEFKQIAGSYVYRDGRIAKVPGNEMEALKSPLMSLFEKRRAKKFLEWVNNYREDDPSTYKDINIDRDSMESVFKKFGLQSGTQDFIGHAMALYLDDAYLKKPARETRERILLYASSIAKFGKSPYIYPLYGLGELPQGFARLSAIYGGTYMLNQPVDEIVYGDDGVAIGVRSGDQVAKAKQIIGDPSYFREKVRSVGRLVRAICILNHPIPNTDNLDSVQIIIPQNQVKRKHDIYIAGISSVHNVCPKGYYLAIISTIVETANPLSEIAPGLKLLGPVVESFSRVQEIYEPVTDGTKDQCYISKSVDATSHFETLTCDVRDIYKRMTGTDLVLKQRPKMEDQ

SEQ ID NO: 20250 - protein, 447 aa, Pichia pastoris
MEENYDVIVLGTGLTECILSGLLSVDGKKVLHIDRQQFYGGESASLTLSQVYNKFKPNKTAAESLGKDRDWCIDLIPKFLMANGELTNILVHTDVTRYIEFKQISGSFVYRDGRIAKVPSNEMEAIKSSLMGFFEKRRMKSFLEFITNYKEEEVGTHKGLDLDKNTMDEVYYKYGLEKGTKDFIGHAMALWPNDDYLREPARETYDRIILYLHSVARFGKSPYIYPLYGLGELPQGFARLSAIYGGTYMLDTPIEEVFYDDDGKFTGVRTKEGVAKAPIVIADPTYFPEKVKKVGQKVIRAICILNHPVPNTHDTDSAQIIIPQNQIGRKNDIYIAVVSHSHNVTAKNQYLAIISTVIETDRPHVELEPAFKLLGPTEDVLMGIAELYEPLEDGSNDHVYLSRSYDPSSHFETTTDDVKDLYRRVTGHDLVLKKRKTVEEEESLACE

SEQ ID NO: 20251 - protein, 451 aa, Saccharomyces cerevisiae
MDQETIDTDYDVIVLGTGITECILSGLLSVDGKKVLHIDKQDHYGGEAASVTLSQLYEKFKQNPISKEERESKFGKDRDWNVDLIPKFLMANGELTNILIHTDVTRYVDFKQVSGSYVFKQGKIYKVPANEIEAISSPLMGIFEKRRMKKFLEWISSYKEDDLSTHQGLDLDKNTMDEVYYKFGLGNSTKEFIGHAMALWTNDDYLQQPARPSFERILLYCQSVARYGKSPYLYPMYGLGELPQGFARLSAIYGGTYMLDTPIDEVLYKKDTGKFEGVKTKLGTFKAPLVIADPTYFPEKCKSTGQRVIRAICILNHPVPNTSNADSLQIIIPQSQLGRKSDIYVAIVSDAHNVCSKGHYLAIISTIIETDKPHIELEPAFKLLGPIEEKFMGIAELFEPREDGSKDNIYLSRSYDASSHFESMTDDVKDIYFRVTGHPLVLKQRQEQEKQ

SEQ ID NO: 20252 - protein, 603 aa, Saccharomyces cerevisiae
MLSPERRPSMAERRPSFFSFTQNPSPLVVPHLAGIEDPLPATTPDKVDVLIAGTGMVESVLAAALAWQGSNVLHIDKNDYYGDTSATLTVDQIKRWVNEVNEGSVSCYKNAKLYVSTLIGSGKYSSRDFGIDLSPKILFAKSDLLSILIKSRVHQYLEFQSLSNFHTYENDCFEKLTNTKQEIFTDQNLPLMTKRNLMKFIKFVLNWEAQTEIWQPYAERTMSDFLGEKFKLEKPQVFELIFSIGLCYDLNVKVPEALQRIRRYLTSFDVYGPFPALCSKYGGPGELSQGFCRSAAVGGATYKLNEKLVSFNPTTKVATFQDGSKVEVSEKVIISPTQAPKDSKHVPQQQYQVHRLTCIVENPCTEWFNEGESAAMVVFPPGSLKSGNKEVVQAFILGAGSEICPEGTIVWYLSTTEQGPRAEMDIDAALEAMEMALLRESSSGLENDEEIVQLTGNGHTIVNSVKLGQSFKEYVPRERLQFLFKLYYTQYTSTPPFGVVNSSFFDVNQDLEKKYIPGASDNGVIYTTMPSAEISYDEVVTAAKVLYEKIVGSDDDFFDLDFEDEDEIQASGVANAEQFENAIDDDDDVNMEGSGEFVGEMEI

SEQ ID NO: 20253 - protein, 603 aa, Saccharomyces cerevisiae
MLSPERRPSMAERRPSFFSFTQNPSPLVVPHLAGIEDPLPATTPDKVDVLIAGTGMVESVLAAALAWQGSNVLHIDKNDYYGDTSATLTVDQIKRWVNEVNEGSVSCYKNAKLYVSTLIGSGKYSSRDFGIDLSPKILFAKSDLLSILIKSRVHQYLEFQSLSNFHTYENDCFEKLTNTKQEIFTDQNLPLMTKRNLMKFIKFVLNWEAQTEIWQPYAERTMSDFLGEKFKLEKPQVFELIFSIGLCYDLNVKVPEALQRIRRYLTSFDVYGPFPALCSKYGGPGELSQGFCRSAAVGGPTYKLNEKLVSFNPTTKVATFQDGSKVEVSEKVIISPTQAPKDSKHVPQQQYQVHRLTCIVENPCTEWFNEGESAAMVVFPPGSLKSGNKEVVQAFILGAGSEICPEGTIVWYLSTTEQGPRAEMDIDAALEAMEMALLRESSSGLENDEEIVQLTGNGHTIVNSVKLGQSFKEYVPRERLQFLFKLYYTQYTSTPPFGVVNSSFFDVNQDLEKKYIPGASDNGVIYTTMPSAEISYDEVVTAAKVLYEKIVGSDDDFFDLDFEDEDEIQASGVANAEQFENAIDDDDDVNMEGSGEFVGEMEI

SEQ ID NO: 20254 - protein, 594 aa, Saccharomyces cerevisiae
MAERRPSFFSFTQNPSPLVVPHLAGIEDPLPATTPDKVDVLIAGTGMVESVLAAALAWQGSNVLHIDKNDYYGDTSATLTVDQIKRWVNEVNEGSVSCYKNAKLYVSTLIGSGKYSSRDFGIDLSPKILFAKSDLLSILIKSRVHQYLEFQSLSNFHTYENDCFEKLTNTKQEIFTDQNLPLMTKRNLMKFIKFVLNWEAQTEIWQPYAERTMSDFLGEKFKLEKPQVFELIFSIGLCYDLNVKVPEALQRIRRYLTSFDVYGPFPALCSKYGGPGELSQGFCRSAAVGGPTYKLNEKLVSFNPTTKVATFQDGSKVEVSEKVIISPTQAPKDSKHVPQQQYQVHRLTCIVENPCTEWFNEGESAAMVVFPPGSLKSGNKEVVQAFILGAGSEICPEGTIVWYLSTTEQGPRAEMDIDAALEAMEMALLRESSSGLENDEEIVQLTGNGHTIVNSVKLGQSFKEYVPRERLQFLFKLYYTQYTSTPPFGVVNSSFFDVNQDLEKKYIPGASDNGVIYTTMPSAEISYDEVVTAAKVLYEKIVGSDDDFFDLDFEDEDEIQASGVANAEQFENAIDDDDDVNMEGSGEFVGEMEI

SEQ ID NO: 20255 - protein, 463 aa, Saccharomyces cerevisiae
MIFPRVLFAKSDLLSILIKSRVHQYLEFQSLSNFHTYENDCFEKLTNTKQEIFTDQNLPLMTKRNLMKFIKFVLNWEAQTEIWQPYAERTMSDFLGEKFKLEKPQVFELIFSIGLCYDLNVKVPEALQRIRRYLTSFDVYGPFPALCSKYGGPGELSQGFCRSAAVGGPTYKLNEKLVSFNPTTKVATFQDGSKVEVSEKVIISPTQAPKDSKHVPQQQYQVHRLTCIVENPCTEWFNEGESAAMVVFPPGSLKSGNKEVVQAFILGAGSEICPEGTIVWYLSTTEQGPRAEMDIDAALEAMEMALLRESSSGLENDEEIVQLTGNGHTIVNSVKLGQSFKEYVPRERLQFLFKLYYTQYTSTPPFGVVNSSFFDVNQDLEKKYIPGASDNGVIYTTMPSAEISYDEVVTAAKVLYEKIVGSDDDFFDLDFEDEDEIQASGVANAEQFENAIDDDDDVNMEGS

SEQ ID NO: 20256 - protein, 465 aa, Neurospora crassa
MADEIAKEYDVIVLGTGLTECILSGVLSVKGKKVLHIDRNDHYGGEAASVNLETLFKKYGNFAAGTEPWKEYGRPNDWNIDLVPKFLMSSGELTNILVSTDVTRYLEFKQVAGSYVQQGAGSKATIAKVPSDAAEALRSPLMGIFEKRRMKSFIEWVGEFDPKDPATHKGLDMATCTMKDVFEKFSLEAGTKDFVGHAMALYLNDNYLDTPGAAPETIERIRLYGQSVARYGKSPYIYPLYGLGELPQGFARLSAIYGGTYMLNTNVDELVYENGKAVGIKATMTGVEPEMKFETRAKMILGDPSYFPDKVKVVGHVLRAICILKHPLASTNDADSCQLIIPQSQVGRKNDIYIACVSSAHNVCPKGYWIAIVSTIAETSANHHLELAPGIERLGKIEEQFMGPPIPLYEPLEDGRNDNIFISKSYDATSHFETSTEDVKDIYRRCAGEELVVEGLREGIQMSQE

SEQ ID NO: 20257 - protein, 640 aa, Candida albicans
MDNCDVLIIGTGLQESILAAALSWQGTQVLHIDSNTYYGDSCSTLTIEQLKKWCGDVNSGKIHQFQDAQIYIPGGKQSNQYTSKDYGIDLTPKIMFCQSDLLSLLIKSRVYRYLEFQSLSNFHVFENDDFQQKVNATTKQDIFTDKSLSLMTKRYLMKFLKFLLLDPDYKQRVKPYADTPIQVFLQQEFKLEEPQINELVYSIGLSYKEQTSTKQALIRMKRFLSSFDVYGKFPCMVSKFGGPGELSQGFCRSAAVAGTTYKLNTNLTDFDPISKIAHFNDGSHIKINEKIIISPTQLPKFLQSSYNKVVENLQPYYVTRLVTVVRRDCKEWMSGNESSAIVVFPPHSLPTDNQHSVQVIIQNGNSGVCPDGQAIWFSSTVEQDLSRAKVDLESAFEKMETSLLRESSEEIVNDILGDNNNNNNNNNNNNNNNNNNNNNDFVMNAQGTTTPVLVNSFKLGSSLINFVPKDKLEIVCKLGYVEKTFINPDLSNIFKPTKTNNIVYKDVEDANNEIIFTNMPSSELSYDGIITDVKSIYQRITGTTDDFFDVDFEDEEDEYDRNNQPVVQPKRSSVVGGIVGGGSITSLTALREQHNENNHSDNAIDSDEDEDEDINDMNDNEEEDDHGRGPEPFGADEMEL

SEQ ID NO: 20258 - protein, 476 aa, Giardia intestinalis
MDTLPKEFDAIVLGTGLKEGIVSALLSVHGRKVLHIDRNDFYGGDCASLKLSQLYSFFGESLSSIPAEFGKDNEWSIDLIPKFILSSGDLFYMLRHVDCLHYLEFGRVAGAFVYNNGVIHRVPATTKQALDSKLMGLFEKKRMANLFEYITSFEENPSATSNLSSQGKTPATATCNEYFDAYKLSDSTKEFIGHAMALELDDEYLNKPALETFRRIDLYTQSLSRFGQSPFIYPLYGLGDLPQAFSRVAAVWGGIYMLNTPVSEILYNDDKKVRGVRFGDHEVSAPIVVGDPSYFPDLVVSKGRVGRAICILKGPIPECDQQSDVEKDGAGNRIVQTAHQVILPASQIQRKSDIYVSTQGYNHRTTPRNCVLGYVSGLVYGSRSDNRDELKAGFDILKRAGISKTFYKEYDLLEPKEEAQRRNIFISKSYDATSHFESTVAESIDMYQRITGETLDLTTIVNGQAPTVEDRVIVCE

SEQ ID NO: 20259 - protein, 429 aa, Encephalitozoon cuniculi
MIAEHEYDFVILGTGLVECAVGCILARKNKRVILLDRNPMYGSDFATLRYTELETYFQSPSIAPELEVYDTEFSIDLTPKLFLADSKMLKMLVRYGIDEYLEFCRIPGSFLWRKKLHPVPTNEAQSMTTGLIGIWQKPKVMRFFWNVRDYAREAAKGKAYKFKDTMREEFKEYGLTEESMELIGHGIALNLDDSYLDRHPKETFDKIVTYVRSIICYENSMESPYLYPRYGLSEIAQGFARSCCTKGGEIMINAEILEVNEKNVEVLVREPVNKNVLRIKAGKIISGQSYFQRSTLLYEIIRGICIIRGDPVCVTRGASSAQIIFLKEELKRRNDIFVVVLGSEEKSTPEGYKVAIISTVKETSDPENEIKVVLEKLGDIVRYFVDVKPVYRAEDTENVIFTKGVDESPHFEDIYEEIEGICKKLNVFD

SEQ ID NO: 20260 - protein, 448 aa, Geodia cydonium
MDEKYDVIVLGTGLKECILSGLLSVSGKKVLHMDRNKYYGGASASLSPLEELYKHFGLEEQPPEQMGRGRDWNVDLIPKFLMANGQLVKLLIHSGVTRYLEFKSVEGSYVYKKGGKIHKVPSTEAEALSSSLMGLLEKRRFRNFVSWVGSYDEKKESTHKGVDPKKPMKAAFEKHGLEQNTIDFVGHALALYRDDAYINEPCGPTISRIQLYSESIQRYGKSPYLYPLYGLGELPQGFARLSAIYGGTYMLDKPVDEIVYEGGKVVGVKSKDEVVRTDCVIGDPSYFADKVKKTGQVVRCICIMNHPIPNTKDALSCQIILPQNQVGRSSDIYISCVSFAHNVSTKGYYLAMVSTNVETSNPEEELRPGLDLLGPIQKKFVSVDDIFEPTDNGLDSRVFVSKSYDATTHFETTCDDVLDIFRELLVKPLTSPRSRHKWRQLSNSPLLH

SEQ ID NO: 20261 - protein, 444 aa, Caenorhabditis elegans
MDEEYDAIVLGTGLKECIISGMLSVSGKKVLHIDRNNYYGGESASLTPLEQLYEKFHGPQAKPQQEMGRGRDWNVDLIPKFLMANGPLVKLLIHTGVTRYLEFKSIEASFVVKGGKIYKVPADEMEALATSLMGMFEKRRFKKFLVWVQQFDENKEDTWQGLDPHNSTMQQVYEKFGLDENTADFTGHALALYRDDEHKNQPYAPAVEKIRLYSDSLARYGKSPYLYPLYGLGELPQGFARLSAIYGGTYMLDKPVDEIVMENGKAIGVKCGDEIVRGKQIYCDPSYAKDRVKKTGQVVRAICLLNHPIPNTNDAQSCQIIIPQKQVGRHYDIYISCCSNTNMVTPKGWYLAMVSTTVETANPEAEVLPGLQLLGAIAEKFIQISDVYEPSDLGSESQIFISQSYDATTHFETTCKDVLNMFERGTTKEFDFTNITHLSLNDQE

SEQ ID NO: 20262 - protein, 443 aa, Drosophila melanogaster
MNEEYDAIVLGTGLKECILSGMLSVSGKKVLHIDRNKYYGGESASITPLEELFQRYGLEPPGERFGRGRDWNVDLIPKFLMANGQLVKLLIHTGVTRYLEFKSIEGSYVYKGGKIAKVPVDQKEALASDLMGMFEKRRFRNFLIYVQDFREDDPKTWKDFDPTKANMQGLYDKFGLDKNTQDFTGHALALFRDDEYLNEPAVNTIRRIKLYSDSLARYGKSPYLYPMYGLGELPQGFARLSAIYGGTYMLDKPIDEIVLGEGGKVVGVRSGEEVAKCKQVYCDPSYVPEKVRKRGKVIRCICILDHPVASTKDGLSTQIIIPQKQVGRKSDIYVSLVSSTHQVAAKGWFVGMVSTTVETENPEVEIKPGLDLLEPIAQKFVTISDYLEPIDDGSESQIFISESYDATTHFETTCLDVLNIFKRGTGETFDFSKIKHELGDEEQ

SEQ ID NO: 20263 - protein, 448 aa, Drosophila melanogaster
MDEEYDVDVLGTGLKECILSGIMLSVSGKKVLHIDRNKYYGGESASITPLEELFQRYRTGAARPRFGRGRDWNVDLIPKFLMANGQLVKLLIHTGVTRYLEFKSIEGSYVYKGGKIAKVPVDQKEALASDLMGMFEKRRFRNFLIYVQDFREDDPKTWKDFDPTKANMQGLYDKFGLDKNTQDFTGHALALFRDDEYLNEPAVNTIRRIKLYSDSLARYGKSPYLYPMYGLGELPQGFARLSAIYGGTYMLDKPIDEIVLGEGGKVVGVRSGEEVAKCKQVYCDPSYVPRRLRKRGKVIRCICIQDHPGASTKDGLSTQIIIPQKQVGRKSDIYVSLVSSTHQVAAKGWFVGMVSTTVETENPEVEIKPGLDLLEPIAQKFVTISDYLEPIDDGSESQIFISESYDATTHFETTCWDVLNIFKRGTGETFDFSKDQGTSWVTRSSKRE

SEQ ID NO: 20264 - protein, 448 aa, Drosophila melanogaster
MDEEYDVDVLGTGLKECILSGIMLSVSGKKVLHIDRNKYYGGESASITPLEELFQRYRTGAARPRFGRGRDWNVDLIPKFLMANGQLVKLLIHTGVTRYLEFKSIEGSYVYKGGKIAKVPVDQKRPWHPDLMGMFEKRRFRNFLIYVQDFREDDPKTWKDFDPTKANMQGLYDKFGLDKNTQDFTGHALALFRDDEYLNEPAVNTIRRIKLYSDSLARYGKSPYLYPMYGLGELPQGFARLSAIYGGTYMLDKPIDEIVLGEGGKVVGVRSGEEVAKCKQVYCDPSYVPRRLRKRGKVIRCICIQDHPGASTKDGLSTQIIIPQKQVGRKSDIYVSLVSSTHQVAAKGWFVGMVSTTVETENPEVEIKPGLDLLEPIAQKFVTISDYLEPIDDGSESQIFISESYDATTHFETTCWDVLNIFKRGTGETFDFSKDQGTSWVTRSSKRE

SEQ ID NO: 20265 - protein, 448 aa, Plasmodium yoelii yoelii
MSTNKYNIFNYNITMVACIYSKKILVLDRNPYYGGETASLNLTNLYNTFKPNEKIPSKYGENRHWNVDLIPKFILVGGNLVKILKKTRVTNYLEWLVVEGSYVYQHQKKSLLFSEKFIHKVPSTDMEALVSPLLSLMEKNRCKNFYQYVSEWNANDRNTWDNLDPYRLTMMDIYKYFNLCQLTIDFLGHAVALYLNDDYLKQPAYITLERIKLYMHSISAFGKSPFIYPLYGLGGIPEGFSRMCAINGGTFMLNKNVTDFIYNDNNQVCGIKSSDGEVAYCDKVICDPSYVMHLENKIQKIGQVIRCICILSNPIPETNDINSCQIIIPQNQLNRKSDIYVNLVSFQHGVSYKGKYIAIVSATVETNDPTKEIEKALELLGPIDEKFIKISDLYVSTNPKPKDNIFVTSSYDATSHFETATNDLLQIWENLWGQKLNFDDLNKSDNEL

SEQ ID NO: 20266 - protein, 446 aa, Branchiostoma floridae
MDETYDVIVLGTGLKECILSGLLSVSGKKVLHMDRNKYYGGESASITPLEELYEKFGLGSPPESMGRGRDWNVDLIPKFLMANGMLVKLLIHSGVTRYLEFKSCEGSYVYKSGGNKIHKVPVTEKEALSTSLMGMFEKRRYRKFLMWVNDIDESNPKTHGDIDIGKATMQEVYTHFGLDENTADFTGHALALWRDDNYKQQSCIDTIRRIKLYSESLARYGKTPYLYPLYGLGELPQGFARLSAIYGGTYMLDKPECKIHFDENGKVTGVESDGETAKCSAVVCDPGYAGDKVKKVGQVVRCICILSHPVPNTKDSLSCQLIIPQNQVDRKSDIYVCCVSHAHNVASKGKFLAICSTTVETDNPEAELKPALNLLGPIDQKFVSVSDLYEPIEDGTNSKLFVSSTYDATTHFETTCLDILDIYKRYTGEEFDFTKVADQIQTVADE

SEQ ID NO: 20267 - protein, 444 aa, Branchiostoma belcheri
MDETYDVIVLGTGLKECILSGLLSVSGKKVLHMDRNKYYGGESASITPLEELYEKFGLGSPPETMGRGRDWNVDLIPKFLMANGMLVKLLIHTGVTRYLEFKSCEGSYVYKAGKVHKVPVTEKEALSTSLMGMFEKRRYRKFLIWVNDLDESNPETHKPIDIEKATMQEVYTNFGLDKNTADFTGHALALWRDDNYKEQSCVDTIRRIKLYSESLARYGKTPYLYPLYGLGELPQGFARLSAIYGGTYMLDKEGCTIKFDEEGKVIGVESAGEVAKCSAVVCDPSYAADKVKKVGQVVRCICILSHPVPNTKDSLSCQLIIPQNQVDRKSDIYVCCVSYAHNVASKGKFLAICSTTVETDNPEAELKPALRLLGPIDQKFVSVSDLFEPIDDGPNSKLFVSTTYDATTHFETTCLDILDIYKRYYGEAFDFTKVADQIQTVADE

SEQ ID NO: 20268 - protein, 448 aa, Danio rerio
MNEEYDVIVLGTGLTECILSGIMSVKGKKVLHMDRNSYYGGESASITPLEDLFKRFSLPGSPPESMGKGRDWNVDLIPKSLMANGQLVRMLLITQVTRYLDFKVIEGSFVYKKGSIYKVPSTETEALASSLMGLFEKRRFRKFLVFVANFDENDPKTMEGVDPKKTTMRDVYKKFDLGQDVIDFTGHALALYRTDDYLDQPCIETINRIKLYSESLARYGKSPYLYPLYGLGELPQGFARLSAIYGGTYMLNKPIEEIVIENGKVVGVKSEGEIARCKQLTCDPSYIKDRVNKVGQVIRVICILSHPIKNTSDANSCQIIIPQNQVNRKHDIYVCMISYAHNVAAQGKYIAIVSTTVETNDPEKEIKPALDLLEPVEQKFVSISDLYSPTDVGSDSQIFISRSYDATTHFETTCDDIKDIYKRMTGTEFDFAEMERKKNDIFGDAADQ

SEQ ID NO: 20269 - protein, 446 aa, Xenopus laevis
MNEEYDVIVLGTGLTECILSGIMSVNGKKVLHMDRNSYYGGESASITPLEDLYKRFNIPGSPPESMGRGRDWNVDLIPKFLMANGQLVKMLLFTEVTRYLDFKVIEGSFVYKGGKIYKVPSTETEALASSLMGMFEKRRFKKFLSYVASFDENDSKTQEGVDPKKTTMRDVYKKFDLGQDVVDFTGHALALYRTDEYLDQPCLETVNRIKLYSESLARYGKSPYLYPLYGLGELPQGFARLSAIYGGTYMLNKPIEELVMENGKIVGVKSEGEVARCKQLICDPSYVPDRVTKVGQVIRVICILSHPIKNTNDANSCQIIIPQNQVNRKSDIYVCMISYAHNVAAQGKYIAIISTTVETNDPEREIKPALELLEPIEQKFVSISDMFAPTDMGTESQIFISRTYDPTTHFETTCNDIKDIYKRMMGSEFDFEEMKRKKSDIFGEDQ

SEQ ID NO: 20270 - protein, 448 aa, Gallus gallus
MNEEYDVIVLGTGLTECILSGIMSVNGKKVLHMDRNSYYGGESASITPLEDLYKRFNLPGTPPESMGRGRDWNVDLIPPFLMANGQLVKMLLYTEVTRYLDFKVIEGSFVYKGGKIYKVPSTEAEALASSLMGLFEKRRFRKFLVYVANFDENDPRTFEGVDPKKTTMRDVYKKFDLGQDVIDFTGHALALYRTDDYLDQPCQETINRIKLYSESLARYGKSPYLYPLYGLGELPQGFARLSAIYGGTYMLNKPIEEIVIENGKVVGVKSEGEVARCKQLICDPSYVSDRVTKVGQVIRVICILSHPIKNTNDANSCQIIIPQNQVNRKSDIYVCMISSAHNVAAQGKYIAIASTTVETADPEKEIKPALDLLEPIEQKFVSISDLFAPTDLGTESQIFISRTYDATTHFETTCDDIKDIYKRMMGSEFDFEEMKRKKNDIYGEEEQQ

SEQ ID NO: 20271 - protein, 447 aa, Macaca fascicularis
MDEEYDVIVLGTGLTECILSGIMSVNGKKVLHMDRNPYYGGESSSITPLEELYKRFQLLEGPPESMGRGRDWNVDLIPKFLMANGQLVKMLLYTEVTRYLDFKVVEGSFVYKGGKIYKVPSTETEALASNLMGMFEKRRFRKFLVFVANFDENDPKTFEGVDPQTTSMRDVYRKFDLGQDVIDFTGHALALYRTDDYLDQPCLETINRIKLYSESLARYGKSPYLYPLYGLGELPQGFARLSAIYGGTYMLNKPVDDIIMENGKVVGVKSEGEVARCKQLICDPSYIPDRVRKAGQVIRIICILSHPIKNTNDANSCQIIIPQNQVNRKSDIYVCMISYAHNVAAQGKYIAIASTTVETTDPEKEVEPALELLEPIDQKFVAISDLYEPIDDGCESQVFCSCSYDATTHFETTCNDIKDIYKRMAGMAFDFENMKRKQNDVFGEAEQ

SEQ ID NO: 20272 - protein, 447 aa, Homo sapiens [sequence omitted]

SEQ ID NO: 20273 - protein, 445 aa, Homo sapiens
MDEEYDVIVLGTGLTECILSGIMSVNGKKVLHMDRNPYYGGESASITPLEDLYKRFKIPGSPPESMGRGRDWNVDLIPKFLMANGQLVKMLLYTEVTRYLDFKVTEGSFVYKGGKIYKVPSTEAEALASSLMGLFEKRRFRKFLVYVANFDEKDPRTFEGIDPKKTTMRDVYKKFDLGQDVIDFTGHALALYRTDDYLDQPCYETINRIKLYSESLARYGKSPYLYPLYGLGELPQGFARLSAIYGGTYMLNKPIEEIIVQNGKVIGVKSEGEIARCKQLICDPSYVKDRVEKVGQVIRVICILSHPIKNTNDANSCQIIIPQNQVNRKSDIYVCMISFAHNVAAQGKYIAIVSTTVETKEPEKEIRPALELLEPIEQKFVSISDLLVPKDLGTESQIFISRTYDATTHFETTCDDIKNIYKRMTGSEFDFEEMKRKKNDIYGED

SEQ ID NO: 20274 - protein, 445 aa, Homo sapiens
MNEEYDVIVLGTGLTECILSGIMSVNGKKVLHMDRNPYYGGESASITPLEDLYKRFKIPGSPPESMGRGRDWNVDLIPKFLMANGQLVKMLLYTEVTRYLDFKVTEGSFVYKGGKIYKVPSTEAEALASSLMGLFEKRRFRKFLVYVANFDEKDPRTFEGIDPKKTTMRDVYKKFDLGQDVIDFTGHALALYRTDDYLDQPCYETINRIKLYSESLARYGKSPYLYPLYGLGELPQGFARLSAIYGGTYMLNKPIEEIIVQNGKVIGVKSEGEIARCKQLICDPSYVKDRVEKVGQVIRVICILSHPIKNTNDANSCQIIIPQNQVNRKSDIYVCMISFAHNVAAQGKYIAIVSTTVETKEPEKEIRPALELLEPIEQKFVSISDLLVPKDLGTESQIFISRTYDATTHFETTCDDIKNIYKRMTGSEFDFEEMKRKKNDIYGED

SEQ ID NO: 20275 - protein, 447 aa, Homo sapiens [sequence omitted]

SEQ ID NO: 20276 - protein, 359 aa, Homo sapiens
LMANGQLVKMLLYTEVTRYLDFKVTEGSFVYKGGKIYKVPSTEAEALASSLMGLFEKRRFRKFLVYVANFDEKDPRTFEGIDPKKTTMRDVYKKFDLGQDVIDFTGHALALYRTDDYLDQPCYETINRIKLYSESLARYGKSPYLYPLYGLGELPQGFARLSAIYGGTYMLNKPIEEIIVQNGKVIGVKSEGEIARCKQLICDPSYVKDRVEKVGQVIRVICILSHPIKNTNDANSCQIIIPQNQVNRKSDIYVCMISFAHNVAAQGKYIAIVSTTVETKEPEKEIRPALELLEPIEQKFVSISDLLVPKDLGTESQIFISRTYDATTHFETTCDDIKNIYKRMTGSEFDFEEMKRKKN

SEQ ID NO: 20277 - protein, 188 aa, Homo sapiens
GIVQNGKVIGVKSEGEIARCKQLICDPSYVKDRVEKVGQVIRVICILSHPIKNTNDANSCQIIIPQNQVNRKSDIYVCMISFAHNVAAQGKYIAIVSTTVETKEPEKEIRPALELLEPIEQKFVSISDLLVPKDLGTESQIFISRTYDATTHFETTCDDIKNIYKRMTGSEFDFEEMKRKKNDIYGED

SEQ ID NO: 20278 - protein, 286 aa, Homo sapiens
MNEEYDVIVLGIGLMECILSATEGSFVYKCGQIYKVPSTETEALTSSLIGLFKKRHFRKFLVYVANLDEKDPRTLEGIDPKKTTITATRLFARLSAIYGGTYMLNKPIEEIIVQDGKVIGIKSEGEIAHCKQLICDPSYVKDQLEKVGQVIRVICILSHSIKNTSDVNSCQIIIPQNQVSRKSDICVCTISSAHNVATQEKYIAIVTTTVETKEPEKEVISSLELLEPTRWEFVSISGLLVPKDLGTESQIFISRAYNPTTHFETIVMTLKTSIRRLQDSSLTLRK

SEQ ID NO: 20279 - protein, 656 aa, Homo sapiens
MADNLPTEFDVVIIGTGLPESILAAACSRSGQRVLHIDSRSYYGGNWASFSFSGLLSWLKEYQQNNDIGEESTVVWQDLIHETEEAITLRKKDETIQHTEAFPYASQDMEDNVEEIGALQKNPSLGVSNTFTEVLDSALPEESQLSYFNSDEMPAKHTQKSDTEISLEVTDVEESVEKEKYCGDKTCMHTVSDKDGDKDESKSTVEDKADEPIRNRITYSQIVKEGRRFNIDLVSKLLYSQGLLIDLLIKSDVSRYVEFKNVTRILAFREGKVEQVPCSRADVFNSKELTMVEKRMLMKFLTFCLEYEQHPDEYQAFRQCSFSEYLKTKKLTPNLQHFVLHSIAMTSESSCTTIDGLNATKNFLQCLGRFGNTPFLFPLYGQGEIPQGFCRMCAVFGGIYCLRHKVQCFVVDKESGRCKAIIDHFGQRINAKYFIVEDSYLSEETCSNVQYKQISRAVLITDQSILKTDLDQQTSILIVPPAEPGACAVRVTELCSSTMTCMKDTYLVHLTCSSSKTAREDLESVVKKLFTPYTETEINEEELTKPRLLWALYFNMRDSSGISRSSYNGLPSNVYVCSGPDCGLGNEHAVKQAETLFQEIFPTEEFCPPPPNPEDIIFDGDDKQPEAPGTNNVVMAKLESSEESKNLESPEKHLQN

SEQ ID NO: 20280 - protein, 656 aa, Homo sapiens
MADNLPTEFDVVIIGTGLPESILAAACSRSGQRVLHIDSRSYYGGNWASFSFSGLLSWLKEYQQNNDIGEESTVVWQDLIHETEEAITLRKKDETIQHTEAFCYASQDMEDNVEEIGALQKNPSLGVSNTFTEVLDSALPEESQLSYFNSDEMPAKHTQKSDTEISLEVTDVEESVEKEKYCGDKTCMHTVSDKDGDKDESKSTVEDKADEPIRNRITYSQIVKEGRRFNIDLVSKLLYSQGLLIDLLIKSDVSRYVEFKNVTRILAFREGKVEQVPCSRADVFNSKELTMVEKRMLMKFLTFCLEYEQHPDEYQAFRQCSFSEYLKTKKLTPNLQHFVLHSIAMTSESSCTTIDGLNATKNFLQCLGRFGNTPFLFPLYGQGEIPQGFCRMCAVFGGIYCLRHKVQCFVVDKESGRCKAIIDHFGQRINAKYFIVEDSYLSEETCSNVQYKQISRAVLITDQSILKTDLDQQTSILIVPPAEPGACAVRVTELCSSTMTCMKDTYLVHLTCSSSKTAREDLESVVKKLFTPYTETEINEEELTKPRLLWALYFNMRDSSGISRSSYNGLPSNVYVCSGPDCGLGNEHAVKQAETLFQEIFPTEEFCPPPPNPEDIIFDGDDKQPEAPGTNNVVMAKLESSEESKNLESPEKHLQN

SEQ ID NO: 20281 - protein, 447 aa, Canis familiaris
MDEEYDVIVLGTGLTECILSGIMSVNGKKVLHMDRNPYYGGESSSITPLEELYKRFQLLEGPPEAMGRGRDWNVDLIPKFLMANGQLVKMLLYTEVTRYLDFKVVEGSFIYKGGKIYKVPSTETEALASNLMGMFEKRRFRKFLVFVANFDENDPKTFEGVDPQSTSMRDVYRKFDLGQDVIDFTGHALALYRTDDYLDQPCLETINRIKLYSESLARYGKSPYLYPLYGLGELPQGFARLSAIYGGTYMLNKPVDDIIMENGKVVGVKSEGEVARCKQLICDPSYIPDRVRKAGQVIRIICILSHPIKNTNDANSCQIIIPQNQVNRKSDIYVCMISYAHNVAAQGKYIAIASTTVETAEPEKEVEPALELLEPIDQKFVAISDLYEPIDDGSESQVFCSCSYDATTHFETTCNDIKDIYKRMAGSAFDFENMKRKQNDVFGEADQ

SEQ ID NO: 20282 - protein, 445 aa, Canis familiaris
MNEEYDVIVLGTGLTECILSGIMTVNGKKVLHMDRNPYYGGESASITPLEDLYKRFKIPGAPPASMGRGRDWNLDLIPKFLMANGQLVKMLLYTEVTRYLDFKVTEGSFVYKGGKIYKVPSTEAEALASSLMGLFEKRRFRKFLVYVANFDEKDPRTFEGIDPKKTAIGEVYKKFDLGQDVIDFTGHALALYRTDDYLDQPCCETINRIKLYSESLARYGKSPYLYPLYGLGELPQGFARLSAIYGGTYMLNKPIEEIIVQNGKVIGVKSEGEVARCKQLICDPSYVKDRVEKVGQVIRVICILSHPIKNTNDANSCQIIIPQNQVNRKSDIYVCMISSAHNVAAQGKYIAIVSTTAETKEPEKEIRPALELLEPIEQKFVSISDLLVPKDLGTESQIFISRTYDATTHFETTCDDIKNIYKRMTGSEFDFEEMKRKKNDIYGED

SEQ ID NO: 20283 - protein, 447 aa, Bos taurus
MDEEYDVIVLGTGLTECILSGIMSVNGKKVLHMDRNPYYGGESSSITPLEELYKRFQLLEGPPETMGRGRDWNVDLIPKFLMANGQLVKMLLYTEVTRYLDFKVVEGSFVYKGGKIYKVPSTETEALASNLMGMFEKRRFRKFLVFVANFDENDPKTFEGVDPQNTSMRDVYRKFDLGQDVIDFTGHALALYRTDDYLDQPCLETINRIKLYSESLARYGKSPYLYPLYGLGELPQGFARLSAIYGGTYMLNKPVDDIIMENGKVVGVKSEGEVARCKQLICDPSYVPDRVRKAGQVIRIICILSHPIKNTNDANSCQIIIPQNQVNRKSDIYVCMISYAHNVAAQGKYIAIASTTVETTDPEKEVEPALELLEPIDQKFVAISDLYEPIDDGSESQVFCSCSYDATTHFETTCNDIKDIYKRMAGSAFDFENMKRKQNDVFGEADQ

SEQ ID NO: 20284 - protein, 433 aa, Bos taurus
HHMDEEYDVIVLGTGLTECILSGIMSVNGKKVLHMDRNPYYGGESSSITPLEELYKRFQLLEGPPETMGRGRDWNVDLIPKFLMANGQLVKMLLYTEVTRYLDFKVVEGSFVYKGGKIYKVPSTETEALASNLMGMFEKRRFRKFLVFVANFDENDPKTFEGVDPQNTSMRDVYRKFDLGQDVIDFTGHALALYRTDDYLDQPCLETINRIKLYSESLARYGKSPYLYPLYGLGELPQGFARLSAIYGGTYMLNKPVDDIIMENGKVVGVKSEGEVARCKQLICDPSYVPDRVRKAGQVIRIICILSHPIKNTNDANSCQIIIPQNQVNRKSDIYVCMISYAHNVAAQGKYIAIASTTVETTDPEKEVEPALGLLEPIDQKFVAISDLYEPIDDGSESQVFCSCSYDATTHFETTCNDIKDIYKRMAGSAFDF

SEQ ID NO: 20285 - protein, 408 aa, Mus musculus
MKEEYNVMVLGTGLTECILSGIMSINGKKVLYMGQNSYYGGESASITPLEDLYKRCKLPEQRPASMGRGRDWNVNLIPKFLMANGQLVKMLLFTEVTRYMDFRVIEGSFVYKGGKIYKVPSTEAEALACSLMGLLEKRCFGKFLVYVVNFDEKDPRTFEGVDPKKTSMRDVYKKFDLGQDVIDFTGHSLALYRTGGYLDQPCCETINRIKRCSESLARYGKSPYLYPLNGLGELLQGFARLSAIYGGTYMLNKPVEEIIVQNGKVLICDPSYVKDRVEKVGQVVRVICILSHPIKNTNDAKSCQIVIPQKQVNRKSDIYVFMISFAHNVTAKGKYIAIVSTTLETKEPEKEIRLALELLEPIEQEFVSISDLFVPKDLGTDRSSFPMPMMLPHTLRQPVMTLKISTRG

SEQ ID NO: 20286 - protein, 323 aa, Mus musculus
EALRSNLMGMFEKRRFRKFLVFVANFDENDPKTFEGVDPQNTSMRDVYRKFDLGQDVIDFTGHALALYRTDEYLDQPCLETINRIKLYSESLARYGKSPYLYPLYGLGELPQGFARLSAIYGGTYMLNKPVDDIIMENGKVVGVKSEGEVARCKQLICDPSYIPDRVQKAGQVIRIICILSHPIKNTNDANSCQIIIPQNQVNRKSDIYVCMISYAHNVAAQGKYIAIASTTVETAEPEKEVEPALELLEPIDQKFVAISDLYEPIDDGSESQVFCSCSYDATTHFETTCNDIKDIYKRMAGSAFDFENMKRKQNDVFGEADQ

SEQ ID NO: 20287 - protein, 230 aa, Mus musculus
MNEEYDVIVLGTGLTECILSGIMSVNGKKVLHMDQNPYYGGESASITPLEDLYKRFKLPGQPPASMGRGRDWNVDLIPKFLMANGQLVKMLLFTEVTRYMDFKVIEGSFVYKGGKIYKVPSTEAEALASSLMGLFEKRRFRKFLVYVANFDEKDPRTFEGVDPKKTSMRDVYKKFDLGQDVIDFTGHSLALYRTDDYLDQPCCETINRIKLYSEQSVTKHLKGHCKDVET

SEQ ID NO: 20288 - protein, 621 aa, Mus musculus
MAEKLPTEFDVVIIGTGLPESILAAACSRSGQRVLHVDSRSYYGGNWASFSFTGLQSWLKDYQQNHDSEEGVTATWQDLIHETEEAISLRKKDETIQHTEVFCYASQDVEDSVQDTETLQRSSPLEASATPADSLDSASLPKERQSAYSTSYEVPSRHTEESDRELSLPSANVEDSLEKEKYCGDKTDMHTVSGEDKGEHKLVVQDSIEQPKRNRITYSQMVKESRRFNIDLVSKPLYSQGSLIDLLIKSNVSRYAEFKNVTRILAFWEGKVEQVPCSRADVFNSKELSMVEKRMLMKFLTFCLDYEQHSDEYQDFKQCSFSDYLKTKKLTPNLQHFILHSIAMTSESSCPTLDGLQATKNFLQCLGRFGNTPFIFPLYGHGEIPQCFCRMCAVFGGVYCLRHKVQCLVVDKDSGRCKGIIDAFGQRISANYFIVEDSYLPKETCSNVQYKQISRAVLITDQSILKTDSDQQISILVVPPLEPGTTSVRVMELCSSTMTCMKDSYLVHLTCSSSKTAREDLEPVVKQLFIPEAEAEAGKDELRKPRLLWALYFNMRDSSGVSRSSYCGLPSNVYICSGPDWGLGSEHAVKQAETLFQEIFPSEEFCPPPPNPEDIIFEAEG

SEQ ID NO: 20289 - protein, 621 aa, Mus musculus
MAEKLPTEFDVVIIGTGLPESILAAACSRSGQRVLHVDSRSYYGGNWASFSFTGLQSWLKDYQQNHDSEEGVTATWQDLIHETEEAISLRKKDETIQHTEVFCYASQDVEDSVQDTETLQRSSPLEASATPADSLDSASLPKERQSAYSTSYEVPSRHTEESDRELSLPSANVEDSLEKEKYCGDKTDMHTVSGEDKGEHKLVVQDSIEQPKRNRITYSQMVKESRRFNIDLVSKPLYSQGSLIDLLIKSNVSRYAEFKNVTRILAFWEGKVEQVPCSRADVFNSKELSMVEKRMLMKFLTFCLDYEQHSDEYQDFKQCSFSDYLKTKKLTPNLQHFILHSIAMTSESSCTTLDGLQATKTFLQCLGRFGNTPFIFPLYGHGEIPQCFCRMCAVFGGVYCLRHKVQCLVVDKDSGRCKGIIDAFGQRISANYFIVEDSYLPKETCSNVQYKQISRAVLITDQSILKTDSDQQISILVVPPLEPGTTSVRVMELCSSTMTCMKDSYLVHLTCSSSKTAREDLEPVVKQLFIPEAEAEAGKDELRKPRLLWALYFNMRDSSGVSRSSYCGLPSNVYICSGPDWGLGSEHAVKQAETLFQEIFPSEEFCPPPPNPEDIIFEAEG

SEQ ID NO: 20290 - protein, 665 aa, Mus musculus
MADNLPSDFDVIVIGTGLPESIIAAACSRSGQRVLHVDSRSYYGGNWASFSFSGLLSWLKEYQENSDVVTENSMWQEQILENEEAILLSSKDKTIQHVEVFCYASQDLHKDVEEAGALQKNPASVMSAQATEAAEAAEAAEATEAAEAAEAAEAACLPTAEESLSTRSCELPAEQSQCMGPESSPQVNDAEVGEKETQSDAKCSTEQSSEILPKVQDNTETPKRNVITYSQIIKEGRRFNIDLVSKLLYSRGLLIDLLIKSNVSRYAEFKNITRILAFREGTVEQVPCSRADVFNSKQLTMVEKRMLMKFLTFCVEYEDHPDEYKAYEETTFSEYLKTQKLTPNLQYFVLHSIAMTSETTSSTVDGLKATKKFLQCLGRYGNTPFLFPLYGQGELPQCFCRMCAVFGGIYCLRHSVQCLVVDKESRKCKAIVDQFGQRIISKHFVIEDSYLSENTCSGVQYRQISRAVLITDGSVLKPDSDQQVSILTVPAEESGSFAVRVIELCSSTMTCMKGTYLVHLTCMSSKTAREDLERVVQKLFTPYTEIEAENEQVEKPRILWALYFNMRDSSDISRDCYNDLPSNVYVCSGPDCNLGNDNAVQQAEIVFQKICPNEDFCPAPPNPEDIILDGDSSQQEVSESSVIPETNSETPKESTVLGDSEEPSE

SEQ ID NO: 20291 - protein, 665 aa, Mus musculus
MADNLPSDFDVIVIGTGLPESIIAAACSRSGQRVLHVDSRSYYGGNWASFSFSGLLSWLKEYQENSDVVTENSMWQEQILENEEAILLSSKDKTIQHVEVFCYASQDLHKDVEEAGALQKNPASVMSAQATEAAEAAEAAEATEAAEAAEAAEAACLPTAEESLSTRSCELPAEQSQCMGPESSPQVNDAEVGEKETQSDAKSSTEQSSEILPKVQDNTETPKRNVITYSQIIKEGRRFNIDLVSKLLYSRGLLIDLLIKSNVSRYAEFKNITRILAFREGTVEQVPCSRADVFNSKQLTMVEKRMLMKFLTFCVEYEDHPDEYKAYEETTFSEYLKTQKLTPNLQYFVLHSIAMTSETTSSTVDGLKATKKFLQCLGRYGNTPFLFPLYGQGELPQCFCRMCAVFGGIYCLRHSVQCLVVDKESRKCKAIVDQFGQRIISKHFVIEDSYLSENTCSGVQYRQISRAVLITDGSVLKPDSDQQVSILTVPAEESGSFAVRVIELCSSTMTCMKGTYLVHLTCMSSKTAREDLERVVQKLFTPYTEIEAENEQVEKPRILWALYFNMRDSSDISRDCYNDLPSNVYVCSGPDCNLGNDNAVQQAEIVFQKICPNEDFCPAPPNPEDIILDGDSSQQEVSESSVIPETNSETPKESTVLGDSEEPSE

SEQ ID NO: 20292 - protein, 512 aa, Mus musculus
MADNLPSDFDVIVIGTGLPESIIAAACSRSGQRVLHVDSRSYYGGNWASFSFSGLLSWLKEYQENSDVVTENSMWQEQILENEEAILLSSKDKTIQHVEVFCYASQDLHKDVEEAGALQKNPASVMSAQATEAAEAAEAAEAAEATEAAEAACLPTAEESLSTRSCELPAEQSQCTGPESSPQVNDAEVGEKETQSDAKSSTEQSSEILPKVQDNTETPKRNVITYSQIIKEGRRFNIDLVSKLLYSRGLLIDLLIKSNVSRYAEFKNITRILAFREGTVEQVPCSRADVFNSKQLTMVEKRMLMKFHTFCVEYEDHPDEYKAYEETTFSEYLKTQKLTPNLQYFVLHSIAMTSETTSSTVDGLKATKKFLQCLGRYGNTPFLFPLYGQGELPQCFCRMCAVFGGIYCLRHSVQCLVVDKESRKCKAIVDQFGQRIISKHFVIEDSYLSENTCSGVQYRQISRAVLITDGSVLKPDSDQQVSILTVPAEESGSFAVRVIELCSSTMTCMKGT

SEQ ID NO: 20293 - protein, 356 aa, Mus musculus
MTNTLETTHSSLVTLYPVGFYQLSKRKIKRKYKTEGKNIHFMGSEKQILCLPVAVAFSLFIISTSVIFEVDIFKEKVAGGYLLLLPEEPMLSLFHIFLCKGNEQVQPSLHPCILAEFDPDMKRTSETKAHSQGPCSSWLAFVLVHLHNGRQHEEPLQSYWTCPSQEYTTEKGSLGFGSRISEKLMTTKASPSQWPMCSYLQIPRMKFIDHRGFCGLSPTSSDTPESTGFARLNAVYGGTYLLINQLKKITVQNGKVFGIKSELEIVHCKQLICDPNYVKDRVEKMGQNQVNGKSDIYVCMISFAHNVAAYGKYIAIVSTTVETKEPEKEIQPDLQLSEPIEQKFVSINDLFVPKAL

SEQ ID NO: 20294 - protein, 621 aa, Rattus norvegicus
MADKLPTEFDVVIIGTGLPESILAAACSRSGQRVLHVDSRSYYGGNWASFSFTGLLSWLKDYQQNHDSEGDVTGTWQDLIDETEEAIALCKKDETIQHTEVFCYASQDVEDSMQETDPLQKSPSPEASATPADSLDTASLPKERHSEDCTSYEAPSRRTEGSDGAVSLSSADAQDSLEKEKFCGDETGMHTVSDGEEGEHKLAAEDNVGQPKRNTITYSQMVKESRTFNIDLVSKLLYSQGSLIDLLIKSNVSRYAEFKNVTRILAFREGKVEQVPCSRADVFNSKELTMVEKRMLMKFLTFCLDYEQHSDEYQDFKQCSFSDYLKTKKLTPNLQHFILHSIAMSSDSSCTTLDGLQATKNFLRCLGRFGNTPFIFPLYGQGEIPQCFCRMCAVFGGVYCLRHKVQCLVVDRDSGRCKGIIDGFGQRISANYFIVEDSYLSKEMCSNIQYKQISRAVLITDQSILKTDSDQQISILVVPPLEPGTASVRVMELCSSTMTCMKDSYLVHLTCFSSKTAREDLEPVVKQLFIPFAEAEADKEELRKPRLLWALYFNMRDSSGVSRSSYCSLPSNVYICSGPDCGLGNEHAVKQAETLFQEIFPSEEFCPPPPNPEDIIFEAEG

SEQ ID NO: 20295 - protein, 650 aa, Rattus norvegicus
MADNLPSDFDVIVIGTGLPESIIAAACSRSGQRVLHVDSRSYYGGNWASFSFSGLLSWLKEYQENNDVVTENSMWQEQILENEEAIPLSSKDKTIQHVEVFCYASQDLHKDVEEAGALQKNHASVTSAQSAEAAEAAETSCLPTAVEPLSMGSCEIPAEQSQCPGPESSPEVNDAEATGKKENSDAKSSTEEPSENVPKVQDNTETPKKNRITYSQIIKEGRRFNIDLVSQLLYSRGLLIDLLIKSNVSRYAEFKNITRILAFREGTVEQVPCSRADVFNSKQLTMVEKRMLMKFLTFCVEYEEHPDEYRAYEGTTFSEYLKTQKLTPNLQYFVLHSIAMTSETTSCTVDGLKATKKFLQCLGRYGNTPFLFPLYGQGELPQCFCRMCAVFGGIYCLRHSVQCLVVDKESRKCKAVIDQFGQRIISKHFIIEDSYLSENTCSRVQYRQISRAVLITDGSVLKTDADQQVSILAVPAEEPGSFGVRVIELCSSTMTCMKGTYLVHLTCMSSKTAREDLERVVQKLFTPYTEIEAENEQVEKPRLLWALYFNMRDSSDISRDCYNDLPSNVYVCSGPDSGLGNDNAVKQAETLFQQICPNEDFCPAPPNPEDIVLDGDSSQQEVPESSVTPETNSETPKESTVLGNPEEPSE

SEQ ID NO: 20296 - protein, 221 aa, Rattus norvegicus
MLLFTEAICYMGFKVNEGGFVYKGGKFYNIPSEAEALASSLMELFEKHLFRKFLVYVANFDEKDTRNFEAHTSIHCMVLGELPQGFASAIYGGTYMLNIPIEEITVQNGKVSQINCKLDIYDCMISFAHNGAAQGKYIATVGTTVEITEPEKETRPPLELLEPIEQKFVTISDLFVPKDLATDSLIFISCAYDATTCFEISCDDIKDIYKSMTGSEFELMK

SEQ ID NO: 20297 - protein, 530 aa, Anopheles gambiae str. PEST
GLTESIIAAAASRIGKTVLHLDTNDYYGGYWASFNLEAFRKYLNSSATQISTAVEAINNNFLPLQAQPTLVRNVQVQWYNFTEKGDVDGWNREKIEQEFRKFNIDLVPKLLYARGSMVELLISSNICRYAEFRALDRVATVWDGRITTVPCSRSDVFTNKEVNVVEKRLLMKFLQSCVTYEEDSEAKEELDGKTFLEHLQSHKLTPNLTHYVLCAIAMGNARTPCREGIAAVKKFLMSLGHYGNSPFLFPVYGCGEIPQCFCRLCAVFGGIYCLNKAVEGIHFEQCNEGFKYDSVKCGKQNITSKGLVVGQGYMSRAVFSKSTPAEGAAQKLCGNLARAVILTNVPLGDLIHVTTLAVTENPEEDLKPYVAQILSKDYLPAPEITNENASATESESVKRENTSSTILYEAYFNIPSCLACAENANFSLPVGVRLVCGPYHELDYDQSIDQAKTVFHEIYPDEEFLPRAPDPEEIIIGEEEPVPDQGDSLQDSNEPVDNASECRELESESTDAQEAKEDAVDKAEECTEQK

SEQ ID NO: 20298 - protein, 444 aa, Arabidopsis thaliana
MDEEYEVIVLGTGLKECILSGLLSVDGVKVLHMDRNDYYGGESTSLNLNQLWKKFRGEEKAPEHLGASRDYNVDMMPKFMMGNGKLVRTLIHTDVTKYLSFKAVDGSYVFVKGKVQKVPATPMEALKSSLMGIFEKRRAGKFFSFVQEYDEKDPKTHDGMDLTRVTTKELIAKYGLDGNTIDFIGHAVALHTNDQHLDQPAFDTVMRMKLYAESLARFQGTSPYIYPLYGLGELPQAFARLSAVYGGTYMLNKPECKVEFDEGGKVIGVTSEGETAKCKKIVCDPSYLPNKVRKIGRVARAIAIMSHPIPNTNDSHSVQVIIPQKQLARKSDMYVFCCSYSHNVAPKGKFIAFVSTDAETDNPQTELKPGTDLLGPVDEIFFDMYDRYEPVNEPELDNCFISTSYDATTHFETTVADVLNMYTLITGKQLDLSVDLSAASAAEE

SEQ ID NO: 20299 - protein, 445 aa, Arabidopsis thaliana
MDEEYEVIVLGTGLKECILSGLLSVDGLKVLHMDRNDYYGGESTSLNLNQLWKKFRGEEKAPAHLGSSRDYNVDMMPKFMMANGKLVRVLIHTDVTKYLSFKAVDGSYVFVQGKVQKVPATPMEALKSPLMGIFEKRRAGKFFSYVQEYDEKDPKTHDGMDLRRVTTKDLIAKFGLKEDTIDFIGHAVALHCNDNHLHQPAYDTVMRMKLYAESLARFQGGSPYIYPLYGLGELPQAFARLSAVYGGTYMLNKPECKVEFDEEGKVSGVTSEGETAKCKKVVCDPSYLTNKVRKIGRVARAIAIMSHPIPNTNDSQSVQVILPQKQLGRKSDMYVFCCSYSHNVAPKGKFIAFVSTDAETDNPQTELQPGIDLLGPVDELFFDIYDRYEPVNEPTLDNCFISTSYDATTHFDTTVVDVLNMYKLITGKELDLSVDLNAASAAEEE

SEQ ID NO: 20300 - protein, 445 aa, Arabidopsis thaliana
MDEEYEVIVLGTGLKECILSGLLSVDGLKVLHMDRNDYYGGESTSLNLNQLWKKFRGEEKAPAHLGSSRDYNVDMMPKFMMANGKLVRVLIHTDVTKYLSFKAVDGSYVFVQGKVQKVPATPMEALKSPLMGIFEKRRAGKFFSYVQEYDEKDPKTHDGMDLRRVTTKDLIAKFGLKEDTIDFIGHAVALHCNDNHLHQPAYDTVMRMKLYAESLARFQGGSPYIYPLYGLGELPQAFARLSAVYGGTYMLNKPECKVEFDEEGKVSGVTSEGETAKCKKVVCDPSYLTNKVRKIGRVARAIAIMSHPIPNTNDSQSVQVILPQKQLGRKSDMYVFCCSYSHNVAPKGKFIAFVSTDAETDNPQTELQPGIDLLGPVDELFFDIYDRYEPVNEPTLDNCFISTSYDATTHFDTTVVDVLNMYKLITGKELDLSVDLNPASAAEEE

SEQ ID NO: 20301 - protein, 445 aa, Arabidopsis thaliana
MDEEYEVIVLGTGLKECILSGLLSVDGLKVLHMDRNDYYGGESTSLNLNQLWKKFRGEEKAPAHLGSSRDYNVDMMPKFMMANGKLVRVLIHTDVTKYLSFKAVDGSYVFVQGKVQKVPATPMEALKSPLMGIFEKRRAGKFFSYVQEYDEKDPKTHDGMDLRRVTTKDLIAKFGLKEDTIDFIGHAVALHCNDNHLHQPAYDTVMRMKLYAESLARFQGGSPYIYPLYGLGKLPQAFARLSAVYGGTYMLNKPECKVEFDEEGKVSGVTSEGETAKCKKVVCDPSYLTNKVRKIGRVARAIAIMSHPIPNTNDSQSVQVILPQKQLGRKSDMYVFCCSYSHNVAPKGKFIAFVSTDAETDNPQTELQPGIDLLGPVDELFFDIYDRYEPVNEPTLDNCFISTSYDATTHFDTTVVDVLNMYKLITGKEPDLSVDLNAASAAEEE

SEQ ID NO: 20302 - protein, 445 aa, Arabidopsis thaliana
MDEEYEVIVLGTGLKECILSGLLSVDGLKVLHMDRNDYYGGESTSLNLNQLWKKFRGEEKAPAHLGSSRDYNVDMMPKFMMANGKLVRVLIHTDVTKYLSFKAVDGSYVFVQGKVQKVPATPMEALKSPLMGIFEKRRAGKFFSYVQEYDEKDPKTHDGMDLRRVTTKDLIAKFGLKEDTIDFIGHAVALHCNDNHLHQPAYDTVMRMKLYAESLARFQGGSPYIYPLYGLGELPQAFARLSAVYGGTYMLNKPECKVEFDEEGKVSGVTSEGETAKCKKVVCDPSYLTNKVRKIGRVARAIAIMSHPIPNTNDSQSVQVILPQKQLGRKSDMYVFCFSYSHNVAPKGKFIAFVSTDAETDNPQTELQPGIDLLGPVDELFFDIYDRYEPVNEPTLDNCFISTSYDATTHFDTTVVDVLNMYKLITGKELDLSVDLNAASAAEEE

SEQ ID NO: 20303 - protein, 445 aa, Arabidopsis thaliana
MDEEYDVIVLGTGLKECILSGLLSVDGLKVLHMDRNDYYGGESSSLNLTQLWKRFRGSDTPEENLGASREYNVDMIPKFIMANGLLVQTLIHTDVTKYLNFKAVDGSFVYKKGKIYKVPATDVEALKSPLMGLFEKRRARKFFIYVQDYDEKDPKSHEGLDLSKVTAREIISKYGLEDDTIDFIGHALALHNDDDYLDQPAIDFVKRIKLYAESLARFQGGSPYIYPLYGLGELPQAFARLSAVYGGTYMLNKPECKVEFDGSGKAIGVTSAGETAKCKKVVCDPSYLSEKVKKVGKVTRAVCIMSHPIPDTNDAHSVQIILPQKQLGRKSDMYLFCCSYAHNVAPKGKYIAFVSAEAETDNPEEELKPGIELLGPTDEIFYHSYDTYVPTNIQEEDNCFISATYDATTHFESTVVDVLDMYTKITGKTLDLSVDLSAASAAAEN

SEQ ID NO: 20304 - protein, 444 aa, Cicer arietinum
MDEEYDVIVLGTGLKECILSGLLSVDGLKVLHMDRNDYYGGESTSLNLIQLWKRFRGDDKPPPHLGSSKDYNIDMNPKFIMANGMLVRVLIHTDVTKYLYFKAVDGSFVFNKGKVHKVPSNDMEALKSPLMGIFEKRRARKFFIYVQDYNESDPKTHDGMDLTRVTTKELIAKFGLDDNTVDFIGHALALHRDDRYLNEPALDTVKRMKLYAESLARFQGGSPYIYPLYGLGELPQAFARLSAVYGGTYMLNKPECKVEFDGEGKVLGVSSEGETAKCKKVVCDPSYLPNKVRKVGKVARAIAIMSHPIPNTNDSHSVQVILPQKQLGRKSDMYLFCCSYSHNVAPKGKFIAFVSTEAETDQPAIELKPGIDLLGPVDEIFFDMYDRFEPVNEPTLDNCFVSTSYDATTHFESTVLDVLNMYTLITGKVLDLSVDLSAAGAAEE

SEQ ID NO: 20305 - protein, 444 aa, Nicotiana tabacum
MDEEYDVIVLGTGLKECILSGLLSVDGLKVLHMDRNDYYGGESTSLNLVQLWKRFRGSDKPPAELGSSRDFNVDMIPKFIMANGALVRVLIHTDVTKYLYFKAVDGSFVYNKGKVHKVPATDMEALKSPLMGIFEKRRARKFFIYVQDYNESDPKTHEGMDLTRVTTRELIAKYGLDDNTVDFIGHALALHRDDRYLDEPAQDTVKRMKLYAESLARFQGGSPYIYPLYGLGELPQAFARLSAVYGGTYMLNKPECKVEFDEEGKVCGVTSEGETAKCKKVVCDPSYLPNKVRKVGKVARAIAIMSHPIPNTNDSHSVQIILPQKQLGRKSDMYLFCCSYTHNVAPKGKFIAFVSTEAETDNPESELKQGVNLLGPVDEIFYETYDRSEPVNEPSLDNCFISTSYDATTHFESTVDDVLNLYTKITGKVLDLNVDLSAASAAEE

SEQ ID NO: 20306 - protein, 445 aa, Oryza sativa
MDEEYDLIVLGTGLKECILSGLLSVDGLKVLHMDRNDYYGGDSTSLNLNQLWKRFRGEDKPPAHLGSSKDYNVDMVPKFMMANGTLVRTLIHTDVTKYLSFKAVDGSYVFSKGKIHKVPATDMEALKSPLMGLFEKRRARNFFIYVQDYNEADPKTHQGLDLTTMTTRELIAKYGLSDDTVDFIGHALALHKDDRYLNEPAIDTVKRMKVYAESLAPFQGGSPSIYPLYGLGELPQGHARLSAVYGGTYILNKPDCKVEFDMEGKVCGVTSEGETAKCKKVVCDPSYLPNKVRKDRKVARAIAIMSHPIASTNDSHSVQIILPQKQLGRKSDMYVFCCSYTHNVAPKGKFIAFVSTEAETDNPQSELKPGIDLLGQVDELFFDIYDRYEPVNEPSLDNCFVSTSYDATTHFETTVTDVLNMYTLITGKAVDLSVDLSAASAAEEY

SEQ ID NO: 20307 - protein, 445 aa, Oryza sativa; identical to SEQ ID NO: 20306

SEQ ID NO: 20308 - protein, 445 aa, Oryza sativa
MDEEYDVIVLGTGLKECILSGLLSVDGLKVLHMDRNDYYGGDSTSLNLNQLWKRFRGEDKPPAHLGASRDYNVDMVPKFMMANGTLVRTLIHTDVTKYLSFKAVDGSYVFSKGKIHKVPATDMEALKSPLMGLFEKRRARNFFIYVQDYDEADPKTHQGLDLTTMTTRELIAKYGLSDDTVDFIGHALALHRDDRYLNEPAIDTVKRMKLYAESLPRFQGGSPSIYPLYGLGELPQGFARLRAVYGGTYMLNKPDCKVEFDMEGKVCGVTSEGESAKCKKVVCDPSYLPNKVRKIGKVARAIAIMSHPIANTNDSHSVQIILPQKQLGRKSDMYVFGCSYTHNVAPKGKFIAFVSTEAETDHPESELKPGIDLLGQVDELFFDIYDRYEPVNEPSLDNCFVSTSYDATTHFETTVTDVLNMYTLITGKTVDLSVDLSAASAAEKY

SEQ ID NO: 20309 - protein, 445 aa, Oryza sativa; identical to SEQ ID NO: 20308

SEQ ID NO: 20310 - protein, 446 aa, Oryza sativa
MDVEYDVIVLGTGLKECILSGLLSVDRLKVLHMDRNDYYGGDSTSLNLNQLWKRFKGEGTPPAQIGASRDYNVDMIPKFMMANGTLVRVLIHTGVTKYLSFKAVDGSYVFNKGKIHKVPSTDMEALKSPLMGLFEKRRAGKFFLFVQDYKENDPSTHKGYDLNKMTTKELISKYGLDDNTIDFIGHAVALHKEDNYLTEPAIDTVKRMKLYAESVGRFQGGSPYIYPLYGLGELPQGFARLSAVYGGTYMLNKPECKIEFNDEGKVCGVTSEGETAKCKKVVCDPSYIPDKVRKVGKVFRAIAIMSHPIPNTADSHSVQIIIPQKQLGRKSDMYVFCCSYSHNVASKGKFIAFVSAQAESENPAAELKPGIDLLGPVDELFIDTYDRFEPTNDPSSDNCFISTSYDATTHFESTVMDVLSIYTKITGKTVDLSVDLSAASAAEDDL

SEQ ID NO: 20311 - protein, 907 aa, Oryza sativa
  unsure (1)..(907): unsure at all Xaa locations
MDVEYDVIVLGTGLKECILSGLLSVDRLKVLHMDRNDYYGGDSTSLNLNQLWKRFKGEGTPPAQIGASRDYNVDMIPKFMMANGTLVRVLIHTGVTKYLSFKAVDGSYVFNKGKIHKVPSTDMEALKSPLMGLFEKRRAGKFFLFVQDYKENDPSTHKGYDLNKMTTKELISKYGLDDNTIDFIGHAVALHKEDNYLTEPAIDTVKRMKAKSVGRFQGGSPYIYPLYGLGELPQGFARLSAVYGGTYMLNKPECKIEFNDEGKVCGVTSEGETAKCKKVVCDPSYIPDKIXXLGLLVISIIVTKECSLVHARYVFCCSYSHNVASKGKFIAFVSAQAESENPAAELKPGIDLLGPVDELFIDTYDRFEPTNDPSSDNCFISTSYDATTHFESTVMDVLSIYTKITGKVLYLISPLNVVDSANEHRTGTSNYFEEYLVKCSLRLCSYVERCFVALAGRFIDTSAPCASQLSRSGLRWGTSSSLALKDVRRRNEDALGRNNLAIRIVEIGIQRPTSIRRHSSRPSLSLSLRTTQLDSRALAAAAASSPTARASTPPPPPPPPRLQHCRSPPPVLPSPVIFVVSGVRFQTQLQMDGRGRKHRILMVSDFFFPNFGGVESHIYYLSQCLLKLGHKVIVMTHAYGNRSGVRYVTGGLKVYYVPWKPFLMQNTLPTLFLTFPIVRTILIREKISVVHGHQAFSTLCHEALMHARTMGYKVVFTDHSLYGFADAGSIHMNKVLQFTLADIDQAICVSHTSKENTVLRSGISPEKVFMVPNAVDTAMFTPSPDRLSCDEIVIVVISRLVYRKGADLLVEVIPEVCRLFPKVRFIVGGDGPKRVRIEEMREKFSLQDRVEMLGAVPHAQVRSVLISGHIFLNSSFFSSGIVDTHPNIITNIEEDISGENELSVENS

SEQ ID NO: 20312 - protein, 389 aa, Oryza sativa
  unsure (1)..(389): unsure at all Xaa locations
MDEEYDVIVLGTGLKECIISGLLSVDGLKVLHMDRNDYYGGESTSLNLTKLWKRFKGNETAPEHLGVSKEYNVDMVPKFMMANGALVRVLIHTSVTKYLNFKAVDGSFVYNNGKIHKVPATDVEALKSNLMGLFEKRRARKFFIYVQDYEEDDPKSHEGLDLHKVTTREVISKYGLEDDTVDFIGHALALHRDDNYLDEPAIDTVKRMKLYAESLARFQGGSPYIYPLYGLAELPQAFARLSAVYGGTYMLNKAECKVEFDENGKAYGVTSEGETAKCKKVVCDPSYLPDKVKKVGRVARAICIMKHPIPDTKDSHSVQIILPKKQLKRKSDMXKFIAFXSTEAEADKPEIELKPGIDLLGPVEETFFDIYDRYEPTNTADEDNCFVTN

SEQ ID NO: 20313 - protein, 357 aa, Oryza sativa
  unsure (1)..(357): unsure at all Xaa locations
MDVEYDVIVLGTGLKECILSGLLSVDRLKVLHMDRNDYYGGDSTSLNLNQLWKRFKGEGTPPAQIGASRDYNVDMVPKFMMANGTLVXRVLIHTGXTKYLXIKAVDGSYVXNKGKIHKGPSTDMEALKSPLMGXFEKRRAGKFFLFVQDYKENDPSTHKGYDLNKMTTKELISKYGLDDNTIDFIGHAVALHKEDNYLTEPAIDTVKRMKLYAESVGRFQGGSPYIYPLYGLGELPQGFARLSAVYGGTYMLNKPECKIEFNDEGKVCGVTSEGETAKCKKVVCDPSYIPDKVRKVGKVFRAIAIMSHPIPNTADSHSVQIIIPQKQLGRKSDMQVFCISPLVFIHYWALHLXITLG

SEQ ID NO: 20314 - protein, 305 aa, Oryza sativa
MDEEYDVIVLGTGLKECILSGLLSVDGLKVLHMDRNDYYGGDSTSLNLNQFMMANGTLVRTLIHTDVTKYLSFKAVDGSYVFSKGKIHKVPATDMEALKSPLMGLFEKRRARNFFIYVQDYNEADPKTHQGLDLTTMTTRELIAKYGLSDDTVDFIGHALALHRDDRYLNEPAIDTVKRMKLYAESLARFQGGSPYIYPLYGLGELPQGFARLSAVYGGTYMLNKPDCKVEFDMEGKVCGVTSEGETAKCKKVVCDPSYLPNKSYDATTHFETTVTDVLNMYTLITGKAVDLSVDLSAASAAEEY

SEQ ID NO: 20315 - protein, 229 aa, Oryza sativa
  unsure (1)..(229): unsure at all Xaa locations
MDVEYDVIVLGTGLKECILSGLLSVDRLKVLHMDRNDYYGGDSTSLNLNQFMMANGTLVRVLIHTGVTKYLSFKAVDGSYVFNKGKIHKVPSTDMEALKSPLMGLFEKRRAGKFFLFVQDYKENDPSTHKGYDLNKMTTKELISKYGLDDNTIDFIGHAVALHKEDNYLTEPAIDTVKRMKAKSVGRFQGGSPYIYPLYGLGELPQGFARLSAVYGGTYMLNKPECKVX

SEQ ID NO: 20316 - protein, 220 aa, Oryza sativa
  unsure (1)..(220): unsure at all Xaa locations
XTRPDPKVPSTDMEALKSPLMGLFEKRRAGKFFLFVQDYKENDPSTHKGYDLNKMTTKELISKYGLDDNTIDFIGHAVALHIEDNYLTEPAIDTVKRMKLYAESVGRFQGGSPYIYPLYGLGELPQGFARLSAVYGGTYMLNKPECKIEFNDEGKVCGVTSEGETAKCKKVVXCDPSYIPDKVRKVGKGFPAIAIMSHPIPNTADSHSVQIIIPXKQLGX

SEQ ID NO: 20317 - protein, 197 aa, Oryza sativa
  unsure (1)..(197): unsure at all Xaa locations
ARGKFIMASGILVKILLHTDVAXEYLEFKVVDGSYVFMGGKVHKVPANDTEALKSDLMGLFEKRRAKNFFTLSQNYDVNNPKTHSGFPDLNKTTMKEIFAHFGLVDDTINFIGHSLALHRDDDYLTQPAKPTIEKCRLYAESLSRFGKSPYIYPLYGLGELPQGFARLSAIYGGTYMLNKPYEGVVFDENGRVSGVX

SEQ ID NO: 20318 - protein, 158 aa, Oryza sativa
  unsure (1)..(158): unsure at all Xaa locations
XKKVRKVGKVFRPIGIRGLPIPKTADSPSAQIINPQKQLGRKSDMYVFCCSHSHNVASKGKFIAFVSAQAESENPAAELKPGIDLLGPVDELFIDTYARFEPTNDPSSDNCFISTSYDAPTPFESTVMDVLSIYTKIPGKTVDLSVDLSAASAAEDDL

SEQ ID NO: 20319 - protein, 205 aa, Triticum aestivum
  unsure (1)..(205): unsure at all Xaa locations
VFTMAFPLTRPRSPVEFDDEGKVRGVTSEGETAKGKKVVCDPSYVPEKVKKVGKVFRAIAIMSHPIPNTAESHSVQIIIPQKQLGRRSDMYVFCCSYSHNVASKGKFIAFVSAQAESDNPEAELKPGIDLLGPFDELFFDTYDRYEPTNDPSSDNCFISTSYDATTHFESTVMDVLSLYTKITGKTVDLSVDLSAASAPEDDXQF

SEQ ID NO: 20320 - protein, 193 aa, Triticum aestivum
  unsure (1)..(193): unsure at all Xaa locations
MDEEYDVIVLGTGLKECILSGLLSVDGLKVLHMDRNDYYGGDSTSLNLNQLWKKFRGEDKPPAHLGLSKDYNVDMVPKVMMANGTLVRTLIHTNVTKYLSFKAVDGSFVFSKGKIHKVPATDMEALKSPLMGLFEKRRARNFFIYVQNYDEADPKTHQGLDLTTLTTKELIAKPGXXXXVKXEQGFIGXPXHG

SEQ ID NO: 20321 - protein, 445 aa, Zea mays
MDEEYDVIVLGTGLKECILSGLLSVDGLKVLHMDRNDYYGGDSTSLNLNQLWKRFRGEDKPPAHLGASRDYNVDMVPKFMMANGTLVRTLIHTDVTKYLSFKAVDGSYVFSKGKIYKVPATDMEALKSPLMGLFEKRRARNFFIYVQDYNEADPRTHQGLDLTRVTTRELIAKYGLSDDTVDFIGHALALHRDDRYLDEPALDTVKRMKLYADSLARFQGGSPYIYPLYGLGELPQGFARLSAVYGGTYMLNKPECKVEFDMEGKVCGVTSEGETAKCKKVVCDPSYLPNKVRKIGRVVRAIAIMSHPIPNTNESHSVQIILPQKQLGRRSDMYVFCCSYTHNVAPRGKFIAFVSAEAETDNPQSELKPGIDLLGSVDEIFYDIYDRYEPVNEPSLDNCFVSTSYDATTHFETTVTDVLNMYTMITGKTVDLSVDLSAASAAEEY

SEQ ID NO: 20322 - protein, 445 aa, Zea mays
MDEEYDVIVLGTGLKECILSGLLSVDGLKVLHMDRNDYYGGDSTSLNLNQLWKRFRGEDKPPAHLGASRDYNVDMVPKFMMANGTLVRTLIHTDVTKYLSFKAVDGSYVFSKGKIYKVPATDMEALKSPLMGLFEKRRARNFFIYVQDYNEADPRTHQGLDLTRVTTRELIAKYGLSDDTVDFIGHALALHRDDRYLDEPALDTVKRMKLYSESLARFQGGSPYIYPLYGLGELPQGFARLSAVYGGTYMLNKPECKVEFDMEGKVCGVTSEGETAKCKKVVCDPSYLPNKVRKIGRVVRAIAIMSHPIPNTNESHSVQIILPQKQLGRRSDMYVFCCSYTHNVAPRGKFIAFVSAEAETDNPQSELKPGIDLLGSVDEILYDIYDRYEPVNEPSLDNCFVTTSYDATTHFETTVTDVLNMYTMITGKTVDLSVDLSAASAAEEY

SEQ ID NO: 20323 - protein, 445 aa, Zea mays
MDEEYDVIVLGTGLKECILSGLLSVDGLKVLHMDRNDYYGGDSTSLNLNQLWKRFRGEDKPPAHLGASRDYNVDMVPKFMMANGTLVRTLIHTDVTKYLSFKAVDGSYVFSKGKIYKVPATDMEALKSPLMGLFEKRRARNFFIYVQDYNEADPRTHQGLDLTRVTTRELIAKYGLSDDTVDFVGHALALHRDDRYLDEPALDTVKRMKLYADSLARFQGGSPYIYPLYGLGELPQGFARLSAVYGGTYMLNKPDCKVEFDMEGKVCGVTSEGETAKCKKVVCDPSYLQNKVRKIGRVVRAIAIMSHPIPNTNESHSVQIILPQKQLGRRSDMYVFCCSYTHNVAPRGKFIAFVSAEAETDNPQSELKPGIDLLGSVDEIFYDIYDRYEPVNEPSLDNCFVSTSYDATTHFETTVTDVLNMYTMITGKTVDLSVDLSAASAAEEY

SEQ ID NO: 20324 - protein, 446 aa, Zea mays
  unsure (1)..(446): unsure at all Xaa locations
MDEEYDVIVLGTGLKECILSGLLSVDGLKVLHMDRNDYYGGDSTSLNLNQLWKRFRGEDKPPAHLGASRDYNVDMVPKFMMANGTLVRTLIHTDVTKYLSFKAVDGSYVFSKRKIHKVPATDMEALKSPLMGLFEKRRARNFFVYVQNYNEADPVTHQGLDLTRITTRELILKHGLSDDTVDFIGHALALHRDDRYLNEPALDTVKRMKLYAESLARFQGGSPYIYPLYGLGELPQAFARLSAVYGGTYMLNKPECKVEFDIEGKVCGVTSEGETAKCKKVVCDPSYLPSKVRKIGKVARAIAIMSHPIPNTNESHSIQIILPQKQLGRKSDMYVFCCSYTHNVAPKGKXFIAFVSAEAETDNPQSELKPGIDLLGQVDELFFDMYDRYKPVNEPSLDNCFVSMSYDATTHFETTVTDVLSMYTAITGKTVDLSVDLSAASAAEEY

SEQ ID NO: 20325 - protein, 446 aa, Zea mays
MDVEYDVIVLGTGLKECILSGLLSVDRLKVLHMDRNDYYGGDSTSLNLNQLWKRFKGEETPPAHIGASRDYNVDMVPKFMMANGTLVRVLIHTGVTKYMSFKAVDGSYVFNKGKIHKVPSTDMEALKSPLMGLFEKRRAGKFFLYVQDYKENDPSTHKGYNLTKLTTKELISKYGLDDNTIDFIGHAVALHRDDSYLTEPAIDTVKRMKLYAESVARFQGGSPYIYPLYGLGELPQGFARLSAVYGGTYMLSKPECKVEFDDEGKVCGVTSEGETAKCKKVVCDPSYLPDKVKKIGKVFRAIAIMSHPIPNTAESHSVQIILPQKQLGRRSDMYVFCCSYSHNVASKGKFIAFVSAQAETDNPEKELKPGIDLLGKVDELFIDIYDRYEPTNDSSADNCFISTSYDATTHFESTVMDVLSLYTKITGKTVDLSVDLSAASAAEDDM

SEQ ID NO: 20326 - protein, 447 aa, Zea mays; identical to SEQ ID NO: 583

SEQ ID NO: 20327 - protein, 216 aa, Zea mays
MDEEYDVIVLGTGLKECILSGLLSVDGLKVLHMDRNDYYGGDSTSLNLNQLWKKFRGEEKPPAHLGASRDYNVDMVPKFMMANGTLVRTLIHTDVTKYLSFKAVDGSFVFSKGKIHKVPATDMEALKSPLMGIFEKRRARNFFIYVQDYNDADPRTHQGLDLTRMTTRELIAKHGLSDDTIDFIGHALALHRDDRYLSEPAIDTVKRMKLYSESLA

SEQ ID NO: 20328 - protein, 216 aa, Zea mays
  unsure (1)..(216): unsure at all Xaa locations
MDEEYDVIVLGTGLKECILSGLLSVDGLKVLHMDRNDYYGGDSTSLNLNQLWKKFRGEDKPPAHLGSSKDYNVDMVPKFMMANGTLVRTLIHTNVTKYLSFKAGDGSFVFSKGKIHKVPATDMEALKSPLMGLFEKRRARNFFIYVQNYDEADPKTHQGLDLTTXLTTKELIAKYGLVDDTVDFIGHALALHXRDDRHLHXEPALDTGKKMKLYSE

SEQ ID NO: 20329 - protein, 242 aa, Zea mays
  unsure (1)..(242): unsure at all Xaa locations
MNEEYDVIVLGTGLTECILSGIMSVNGKKVLHMDQNPYYGGESASITPLEDLYKRFKLPGQPPASMGRGRDWNVDLIPKFLMANGQLVKMLLFTEVTRYMDFKVIEGSFVYKGGKIYKVPSTEAEALASSLMGLFEKRRFRKFLVYVANFDEKDPRTLXGVDPKKTSMRDVXKKFDXGQDVIDFTGHSLALYRTDDYLDQPXCCETINRIKLYSESLARYGKSPYLYPLYGXLGELPQGFAX

SEQ ID NO: 20330 - protein, 459 aa, Schizosaccharomyces pombe
MDDPNSYDVIIVGTNLRNSILSAALSWANQRVLHIDENSFYGEIDGSLTLRDLEQINEKIKKVDSSQILNDNGSHKSPLKRFEVQFLNKDLIPKNKGSVIQFHPQEIFASSELVKLLSETKIYKYLLLKPARSFRLLTSNEEWIKVPESRADIFNNKNLSLASKRIVMRFMKFVSNIADEQNQNLVKEWESKPFYKFLEEVFQLSGAIEESIIYGLCQSLSKDIPTKDALDTVLKYFHSFGMYGDYSYLLAMYGTGSELCQGFCRSSAVMGGTFMLGQAIDKIDESKIVLKDGSTLSAKKIVSSVDEGKLPHQQIQQRYLLVKGDCQQLFQEDGFFAALDASLIHFSPFSISENFGNSVQAKLYGSGSGDCPEGYCIWYLKTLNDSPCNEVFNLATKKLCSFSGCDDLEIIVQVDETLNQLRHIDYDDTLHSAKSLFYEILGQNNTFLQREGLFDEDDE

SEQ ID NO: 20331 - protein, 490 aa, Neurospora crassa
MAMGSIGDTLWDVVICGTGLQQSLLALSLSRSGKNILHIDPNDYYGGAEAAFSLQEAESWVDRLATEDKGLFRSASITKPDVVGLSFPRAYSLALAPQLIHARSELLSQLVSSRAYRQVEFLAVGSFYIFKAPVGPEQQPSLVRIPSTREDVFSTTAISAKAKRGLMKFLRFVLDYDSPEQRDAWKPFADKPLVDFLQEHFKMDTELKTYIITLTLSLDGRITTEDGLFIVHRHLTSMGHFGPGFAALYPKWGGISEIAQVACRAGAVGGAVYMLGAGIKSMETATDEIELELTSGDKVKTKLLVRGDESVGDEPSISRLVAVVDSPLKTLFESTVDGAPTPCVAVVALPPGSLTTPGEANTDPVYVFAHSSGTGECPNGQSVLYLSTMVTPNSKEILSRSLESLLSAVDPDRVPQCLYQLYYEQAAGVKQSRLDGLILDLPGPSLSLLMDDASLNHVREAWKKVVGGAVDDAEYMVFTDREPVDDDDYE

SEQ ID NO: 20332 - protein, 510 aa, Caenorhabditis elegans
MDEKLPESVDVVVLGTGLPEAILASACARAGLSVLHLDRNEYYGGDWSSFTMSMVHEVTENQVKKLDSSEISKLSELLTENEQLIELGNREIVENIEMTWIPRGKDEEKPMKTQLEEASQMRRFSIDLVPKILLSKGAMVQTLCDSQVSHYAEFKLVNRQLCPTETPEAGITLNPVPCSKGEIFQSNALSILEKRALMKFITFCTQWSTKDTEEGRKLLAEHADRPFSEFLEQMGVGKTLQSFIINTIGILQQRPTAMTGMLASCQFMDSVGHFGPSPFLFPLYGCGELSQCFCRLAAVFGSLYCLGRPVQAIVKKDGKITAVIANGDRVNCRYIVMSPRFVPETVPASSTLKIERIVYATDKSIKEAEKEQLTLLNLASLRPDAAVSRLVEVGFEACTAPKGHFLVHATGTQEGETSVKTIAEKIFEKNEVEPYWKMSFTANSMKFDTAGAENVVVAPPVDANLHYASVVEECRQLFCTTWPELDFLPRAMKKEEEEEEEPETEEIAEN

SEQ ID NO: 20333 - protein, 511 aa, Drosophila melanogaster
MLDDLPEQFDLVVIGTGFTESCIAAAGSRIGKSVLHLDSNEYYGDVWSSFSMDALCARLDQEVEPHSALRNARYTWHSMEKESETDAQSWNRDSVLAKSRRFSLDLCPRILYAAGELVQLLIKSNICRYAEFRAVDHVCMRHNGEIVSVPCSRSDVFNTKTLTIVEKRLLMKFLTACNDYGEDKCNEDSLEFRGRTFLEYLQAQRVTEKISSCVMQAIAMCGPSTSFEEGMQRTQRFLGSLGRYGNTPFLFPMYGCGELPQCFCRLCAVYGGIYCLKRAVDDIALDSNSNEFLLSSAGKTLRAKNVVSAPGYTPVSKGIELKPHISRGLFISSSPLGNEELNKGGGGVNLLRLLDNEGGREAFLIQLSHYTGACPEGLYIFHLTTPALSEDPASDLAIFTSQLFDQSDAQIIFSSYFTIAAQSSKSPAAEHIYYTDPPTYELDYDAAIANARDIFGKMFPDADFLPRAPDPEEIVVDGEDPSALNEHTLPEDLRAQLHDMQQATQEMDIQE

SEQ ID NO: 20334 - protein, 511 aa, Drosophila melanogaster
MLDDLPEQFDLVVIGTGFTESCIAAAGSRIGKSVLHLDSNEYYGDVWSSFSMDALCARLDQEVEPHSALRNARYTWHSMEKESETDAQSWNRDSVLAKSRRFSLDLCPRILYAAGELVQLLIKSNICRYAEFRAVDHVCMRHNGEIVSVPCSRSDVFNTKTLTIVEKRLLMKFLTACNDYGEDKCNEDSLEFRGRTFLEYLQAQRVTEKISSCVMQAIAMCGPSTSFEEGMQRTQRFLGSLGRYGNTPFLFPMYGCGELPQCFCRLCAVYGGIYCLKRAVDDIALDSNSNEFLLSSAGKTLRAKNVVSAPGYTPVSKGIELKPHISRGLFISSSPLGNEELNKGGGGVNLLRLLDDEGGREAFLIQLSHYTGACPEGLYIFHLTTPALSEDPVSDLAIFTSQLFDQSDAQIIFSSYFTIAAQSSKSPAAEHIYYTDPPTYELDYDAAIANARDIFGKMFPDADFLPRAPDPEEIVVDGEDPSALNEHTLPEDLRAQLHDMQQATQEMDIQE

SEQ ID NO: 20335 - protein, 653 aa, Homo sapiens
MADTLPSEFDVIVIGTGLPESIIAAACSRSGRRVLHVDSRSYYGGNWASFSFSGLLSWLKEYQENSDIVSDSPVWQDQILENEEAIALSRKDKTIQHVEVFCYASQDLHEDVEEAGALQKNHALVTSANSTEAADSAFLPTEDESLSTMSCEMLTEQTPSSDPENALEVNGAEVTGEKENHCDDKTCVPSTSAEDMSENVPIAEDTTEQPKKNRITYSQIIKEGRRFNIDLVSKLLYSRGLLIDLLIKSNVSRYAEFKNITRILAFREGRVEQVPCSRADVFNSKQLTMVEKRMLMKFLTFCMEYEKYPDEYKGYEEITFYEYLKTQKLTPNLQYIVMHSIAMTSETASSTIDGLKATKNFLHCLGRYGNTPFLFPLYGQGELPQCFCRMCAVFGGIYCLRHSVQCLVVDKESRKCKAIIDQFGQRIISEHFLVEDSYFPENMCSRVQYRQISRAVLITDRSVLKTDSDQQISILTVPAEEPGTFAVRVIELCSSTMTCMKGTYLVHLTCTSSKTAREDLESVVQKLFVPYTEMEIENEQVEKPRILWALYFNMRDSSDISRSCYNDLPSNVYVCSGPDCGLGNDNAVKQAETLFQEICPNEDFCPPPPNPEDIILDGDSLQPEASESSAIPEANSETFKESTNLGNLEESSE

SEQ ID NO: 20336 - protein, 653 aa, Homo sapiens
MADTLPSEFDVIVIGTGLPESIIAAACSRSGRRVLHVDSRSYYGGNWASFSFSGLLSWLKEYQENSDIVSDSPVWQDQILENEEAIALSRKDKTIQHVEVFCYASQDLHEDVEEAGALQKNHALVTSANSTEAADSAFLPTEDESLSTMSCEMLTEQTPSSDPENALEVNGAEVTGEKENHCDDKTCVPSTSAEDMSENVPIAEDTTEQPKKNRIAYAQIIKEGRRFNIDLVSKLLYSRGLLIDLLIKSNVSRYAEFKNITRILAFREGRVEQVPCSRADVFNSKQLTMVEKRMLMKFLTFCMEYEKYPDEYKGYEEITFYEYLKTQKLTPNLQYIVMHSIAMTSETASSTIDGLKATKNFLHCLGRYGNTPFLFPLYGQGELPQCFCRMCAVFGGIYCLRHSVQCLVVDKESRKCKAIIDQFGQRIISEHFLVEDSYFPENMCSRVQYRQISRAVLITDRSVLKTDSDQQISILTVPAEEPGTFAVRVIELCSSTMTCMKGTYLVHLTCTSSKTAREDLESVVQKLFVPYTEMEIENEQVEKPRILWALYFNMRDSSDISRSCYNDLPSNVYVCSGPDCGLGNDNAVKQAETLFQEICPNEDFCPPPPNPEDIILDGDSLQPEASESSAIPEANSETFKESTNLGNLEESSE

SEQ ID NO: 20337 - protein, 109 aa, Homo sapiens
RKSDIYVCMISYAHNVAAQVKYIAIASTTVETTDPEKEVEPALELLEPIDQKFVAISDLYEPIDDGCESQVFCSCSYDATTQFETTCNGIKDIYKRMAGTAFDFENMKR

SEQ ID NO: 20338 - protein, 242 aa, Rattus norvegicus
MTEKDEQPQLEEGEDELDSKLNYKPPPQKSLKELQEMDKDDESLTKYKKTLLGDVPVVSGMASTETCIAVDHSQEQRASRLDPTVPNVTVTRLSLVCDSAPGPITMDLTGDLKALKKDTFVLKEGPTANESVSSLTCLYRHDHSEKVTDRPLRAQVNKDIVSGLKYVQQTYRNGMKVDKATFMVGSYGPRPEEYEFLTPVEEAPKGMLARGTYHNKSFFTDDDKQDHLTWEWNLAIKKDWTD

SEQ ID NO: 20339 - protein, 98 aa, Cavia
LTLVCSTAPGPLELDLTGDLESFKKQSFVLKEGVEYRIKISFRVNREIVSGMKYIQHTYRKGVKIDKTDYMVGSYGPRAEEYEFLTPMEEAPKGMLAR

SEQ ID NO: 20340 - protein, 201 aa, Anopheles gambiae str. PEST
AMSTEKEMNPAEVEQEEHDSNYQPPPQKTIEEIMAADAEDESLRKYKEALLGEAQAEKIIFDESDPRKVIVKKLALLVADRDPMELDLTGDLTKLKKNVFVIKEGIQYKIRIDFVVQREIVHGLKYVQKTYRMGVPVDKMVQMVGSYPPKKEIQSYTTPFEEAPSGMMARGTYSVTSLFTDDDKNEHLKWDWSFEIKKDWQ

SEQ ID NO: 20341 - protein, 201 aa, Giardia lamblia ATCC 50803
MSTLTSHTVMCSEVAEMTETQASGGSTKQASSPIPIGAPISAEEAAKLWDESLCPELPPIAPGAGKVSICDLRILSPDLMEPLVYSTSSITPEHTQKPLYTIKQGCLFSMGFSWRVSEAPIVGFRSLVRIYRLGIPVYKGRVFLGTFLPRSEPYIYFMSEECAPKGILAKGYFRAKLEFVDEHNTSFGSLEYLFNFSDNWG

SEQ ID NO: 20342 - protein, 240 aa, Arabidopsis thaliana
MSLVSGARDMGFDDNNNNKNNKDGDDENSSSRTRADDDALSRQMSESSLCATEEEEDDDSKLQLGPQYTIKEHLEKDKDDESLRKWKEQLLGSVDVTNIGETLDPEVRIDSLAIISPGRPDIVLLVPENGNPKGMWFTLKEGSKYNLKFTFHVNNNIVSGLRYTNTVWKTGVKVDRAKEMLGTFSPQLEPYNHVMPEETTPSGMFARGSYSARTKFLDDDNKCYLEINYSFDIRKEWPAL

SEQ ID NO: 20343 - protein, 223 aa, Arabidopsis thaliana
MVLEDEMKKGEASGETSEKMGLSRKNSGSSLSPTEDDEEDEDKKLELGPMIALKEQLERDKDDESLRRWKEQLLGVVDLEDVGETPDPVVKILDLTIRSPDREEMVLTIPEDGLPNPKGPWFTIKEGSKYTLVFNFRVTNNIVSGLRYNNTVWKTGVKVDSTKAMLGTFSPQAESYQHVMPEEMTPSGMFARGSYSARTKFIDDDNKCYLEINYTFDIRKSWQ

SEQ ID NO: 20344 - protein, 236 aa, Arabidopsis thaliana
MVLEDEMKKGEASGETSEKMGLSRKNSGSSLSPTEDDEEDEDKKLELGPMIALKEQLERDKDDESLRRWKEQLLGVVDLEDVGGKPNSLLDLDSMVQTPDPVVKILDLTIRSPDREEMVLTIPEDGLPNPKGPWFTIKEGSKYTLVFNFRVTNNIVSGLRYNNTVWKTGVKVDSTKAMLGTFSPQAESYQHVMPEEMTPSGMFARGSYSARTKFIDDDNKCYLEINYTFDIRKSWQ

SEQ ID NO: 20345 - protein, 223 aa, Arabidopsis thaliana
MVLNDEEMKAGESSEEPKGQGLSRKNSHSSMCPTDDDEEEEDKKLELGPMIALKEQLEKDKDDESLRRWKEQLLGSVDLEEVGETPDPLVKILTLTIRSPDREDMVLTIPENGKPASKGPWFTLKEGSKYTLIFTFRVTNNIVSGLQYSNTVWKTGIKVYSRKEMLGTFSPQAEPYTHVMFEETAPSGLLVRGSYSVKSKFVDDDNQCYLENNYTFDIRKNWL

SEQ ID NO: 20346 - protein, 237 aa, Glycine max
MSAAVSATKDVPFNAHLEEDIKNKESNKVVNVGEADQIPYNDDAEGTEEAEEDPKLGLDLGPQCSLKEQLEKDKEDESLRKWKEQLLGGIDVSAVGENKEPEVKIVSLTIICPGRPDLILPIPFTSDAKKSIFTLKEGSQYQLKFSFTVSNNIVSGLKYTNVVWKTGLRVDNTKKMLGTYSPSQELYTYELEEETTPSGLFARGTYSARTKFVDDDRKCYLDTSYHFEIQKNWPTPI

SEQ ID NO: 20347 - protein, 243 aa, Glycine max
  unsure (1)..(243): unsure at all Xaa locations
MSAAVSSTTPHLEEELKNKATNNKKKNNVGGESDQPPYNDGANSDVAEETEPEEDDDSNNKDLDLGPQFTLKEQLEKDKDDESLRKWKEQLLGSVDMSVVGSECKDPEVKILSLIITSPDKPDLTLPIPFTTDPKKSLFILKEGSKCQMKFTFTVSNNIVSGLKYTNVVWKTGVRVDSRKKMLGTFSPQQEPYTFELEEETIPSGMFVRGTYAARTKFVDDDRKCYLDVNYYFEIQKNRPTPX

SEQ ID NO: 20348 - protein, 240 aa, Glycine max
MSAAVSSTTSHLEEELKNNNNNNNNVGGESDQPPYNEGANSDVAEETEPEEDDDSNNKELDLGPQFTLKEQLEKDKDDVSLRKWKEQLLGSVDMSVVGSESKDPEVKILSLIITSPDKPDLTLPIPFTTDAKKSLFILKEGSKCQMKFTFTVSNNIVSGLKYTNVVWKTGVRVDSRKKMLGTFSPKQEPYTFELEEETIPSGMFVRGTYAARTKFVDDDRKCYLDVSYYFEIQKNRPTPQ

SEQ ID NO: 20349 - protein, 233 aa, Glycine max
MESGGNGKRAHEEAGPSSGIDGRKLEMTEKASDDDKEEEEEEEEEEEGAIEDSKNGFFVPGPLLSLKEQIERDKEDESLRRWKEKLLGCLESDIDGQLDPEVKFHSIGILSEDFGEIVTPLPVDENRNGCTLFTLREGSRYQLKLKFSVLHNIVSGLTYSNTVWKGGLQVDQSKGMLGAFAPQKEPYVYALKEDTTPSGALARGVYSAKLKFEDDDRRCHMELKYLFEIKKRS

SEQ ID NO: 20350 - protein, 156 aa, Glycine max
  unsure (1)..(156): unsure at all Xaa locations
XLAIKSADRPDIVLAIPEGGNPKGLWFTLKEGSRYRLMFTFQVENXHQVSGLKYTNTVWKTGIKVDSSKEMIGTFSPQAEPYTHEMPEETTPSGMFARGQYSARSKFVDDDNKCYLEINYTFDIRKEWQXESTDLSLSDMFNPKSLLFCAEISFSV

SEQ ID NO: 20351 - protein, 254 aa, Glycine max
  unsure (1)..(254): unsure at all Xaa locations
MEGANWRITDEEAGPSSSSGIASTKQQNPPETFHHRKEAEEEEETEEEEEEDVCQHKNITFVPGPLLSLKDQIEKDKEDESLRRWKEKLLGCMESELDGQIHPEVEFHSIDIISEYFGEVITSFSVDEXWQGAHILFTLREGSHYRLWLKFSVLHNIVSGLTYCNTVWKGGLQVDQSKGMLGTFAPQKEPYVHALKEDITPSGVLARGVYSAKIKFEDDDRRCHMELKYSLEIKKRXSGFMAHCDIHHASFLYF

SEQ ID NO: 20352 - protein, 137 aa, Glycine max
  unsure (1)..(137): unsure at all Xaa locations
XCTSENKEPEVKIVSLTIICPGRPDLILPIPFTSESKNSIFTLKEGSQYRLKFSFTVSNNIVSGLKYTNVVWKTGLRVDNTKKMLGTYSPSQEPYTYELEEETTPSGLFARGTYSARTKFVDDDHKCYXDTSYHFEX

SEQ ID NO: 20353 - protein, 161 aa, Glycine max
  unsure (1)..(161): unsure at all Xaa locations
XLAIKSADRPDIVLAIPEGGNPKGLWFTLKEGSREXGHQVSGLKYTNSVWKQGIKVDSRKEFQRTFKXQDEPYTQPPSKETTPFGMFARGQYSARSKFVDDDNKCYLEINYTFDIRKEWQXESTDLSLSDMFNLKSLLFCAEISFSVYLLLFHYLIISNPV

SEQ ID NO: 20354 - protein, 122 aa, Glycine max
  unsure (1)..(122): unsure at all Xaa locations
XFTTDAKKSFFXLKEGRKSQMKFTFPVSNTIVFGLKSPNVVWKPGVRVAPRKKMLGPFTPTQDPXYPFELEEEPIPFGMFVRGPYAPRPKFVDHDXKCYLDLSYSFEIQKTSPPPSMRFKLE

SEQ ID NO: 20355 - protein, 162 aa, Glycine max
  unsure (1)..(162): unsure at all Xaa locations
MSAAVCSTTPHLEEELKNKATYNKKKNNVGGESDQPPYNDGANSDVAEETEPEEDDDSNNKDLDLGPQFTLKEQLEKDRNXXKDPEVKILSLIITSPDEPDLTLPIPCTTDAXKRSFMLKEGSKWQMKCTLTVCTNIGSGLKYTXVGWKTGVRVDSRKKMLG

SEQ ID NO: 20356 - protein, 71 aa, Glycine max
  unsure (1)..(71): unsure at all Xaa locations
XLTIISPDRDDIVLPIPENENPKGLWFTTKEGSHYRLKFTFNVSNNIVFGLNKNGNIPNLHLHYDKSKXLI

SEQ ID NO: 20357 - protein, 226 aa, Nicotiana tabacum
MMEGGNNKEEAGPSRGLNFSEDKRKEELEEGDSEEDEHNQDSATDIITTSYVPGPLLSLKDQIEKDKEDESLRRWKEKLLGCLESDLNGQMEPEVKFHSVGILSSDFEEINTPLPVKEGQSKSVLFTLREGSEYRLKLTFSVLHNIVSGLAYTNTVWKAGLQVDQSKGMLGTFAPQREPYIHMLEEETTPSGALARGTYTAKLKFVDDDKRCHLVLNYSFEISKGR

SEQ ID NO: 20358 - protein, 248 aa, Oryza sativa
  unsure (1)..(248): unsure at all Xaa locations
HLLFQGHRGPADGGGDEGAGGGGGQERRRGARRRRRDDEXGKQCGEAPHCRKESNEEEEDDEEKAPKAIDLGPRVSIKDQLEKDKDDESLRRWKEQLLGSVDLNSVGETLEPDVKIMSLAILSPGRPDIFLPLPVEPNAKGVWFTLKEGSLYKLKFTFSVSNNIVSGLRYTNAVWKTGIKVDSHKEMLGTFSPQPEPYTYVTPEETTPSGMFARGSYSARTKFLDDDRKCYLEINYTFDIRREWPALS

SEQ ID NO: 20359 - protein, 222 aa, Oryza sativa
  unsure (1)..(222): unsure at all Xaa locations
XSCSKGIAAPPTEEATKERVAVVGKNGGESNEEEEDDEEKAPKAIDLGPRVSIKDQLEKDKDDESLRRWKEQLLGSVDLNSVGETLEPDVKIMSLAILSPGRPDIFLPLPVEPNAKGVWFTLKEGSLYKLKFTFSVSNNIVSGLRYTNAVWKTGIKVDSHKEMLGTFSPQPEPYTYVTPEETTPSGMFARGSYSARTKFLDDDRKCYLEINYTFDIRREWPA

SEQ ID NO: 20360 - protein, 166 aa, Triticum aestivum
  unsure (1)..(166): unsure at all Xaa locations
XKDDESLRRWKEQLLGSVDLNSVGETLEPDVKIMSLSIQSPGRPDIFLPLPVEPXSGKGVWFTLKEGSPYKLKFTFSVSNNIVSGLRYTNTVWKTGIKVDSTKEMLGTFSPQPEPYAYVTPEETTPSGMFARGSYSAKTKFLDDDRKCYLQINYTFDIRREWPSSG

SEQ ID NO: 20361 - protein, 202 aa, Saccharomyces cerevisiae
MAEESTDFSQFEEERNNDQYKVSAKKTVDEYKNLDAEDESLAKWKESLGLSSDVLPLEFPGDKRKVVVQKIQLLVNTEPNPITFDLTNEKTIKELASKRYKIKENSIYKLKIVFKVQHEIITGLRYVQYIKKAGIAVDKIDDHLGSYAPNTKTKPFYEVELPESEAPSGFLARGNYSAVSKFIDDDKTNHLTLNWGVEIVKK

SEQ ID NO: 20362 - protein, 161 aa, Neurospora crassa
MPLESLGLGGGNDLSDPNDPRVCIIHSLSMESPGREPVVIDLSTPGSLEDLKKKPFTIKEGAKFTMKAQFKVQHEILSGLHYVQTVKRGKIRIPGGKTSEMIGSYAPNTDKNPMYTKTFAEEEAPTGMLARGNYNAVSRFVDDDGKTHLEFEWSFDIAKDW

SEQ ID NO: 20363 - protein, 148 aa, Neurospora crassa
MSDPNDPRVCIIHSLSMESPGREPVVIDLSTPGSLEDLKKKPFTIKEGAKFTMKAQFKVQHEILSGLHYVQTVKRGKIRIPGGKTSEMIGSYAPNTDKNPMYTKTFAEEEAPTGMLARGNYNAVSRFVDDDGKTHLEFEWSFDIAKDW

SEQ ID NO: 20364 - protein, 168 aa, Entamoeba histolytica
KNEKDPSLVAYLKSLGIDPDYVPPKDDPRRVVISEFAVLFKEHDPVILKLNTEEDMEKAKKTPIIIKEGAEFKMRVTFRVQHQPVLGLRILNTVSKLGKQVASDEEMLGSYPPKNEFNALELPKNDWNEAPTGMLARGEYKSNVKFYDDDKVTHLQFDYLIKIAKDWD

SEQ ID NO: 20365 - protein, 191 aa, Caenorhabditis elegans
MSDHENTGENTSEYQYKQPPQKSIDELLNADKEDESLKVYKAKLLGQGTVIVDEKNPLRVIVRSVELLINGKTAQSFDLSDPAKLVNSDLSVSIKEGSNYRLSFAFHVQREITSGLHYKHKVKRSGITVENEKYMMGSYAPKLEIQEYKSPNEEAPSGMMHRGKYKVYSKITDDDNNVYLDWQWTLHITKE

SEQ ID NO: 20366 - protein, 191 aa, Caenorhabditis elegans
MLDHENTGENTSEYQYKQPPQKSIDELLNADKEDESLKVYKAKLLGQGTVIVDEKNPLRVIVRSVELLINGKTAQSFDLSDPAKLVNSDLSVSIKEGSNYRLSFAFHVQREITSGLHYKHKVKRSGITVENEKYMMGSYAPKLEIQEYKSPNEEAPSGMMHRGKYKVYSKITDDDNNVYLDWQWTLHITKE

SEQ ID NO: 20367 - protein, 203 aa, Pinus taeda
MAAVRGQVLVALGACLALAVLQSVAATTYAVGGNTGWTIPASNAKLYTDWVKARTFKLGDILVFKFATNVHNVYRVSKADYDKCVTTSPLEKYETGPASITLNTTGHHYYICAVSGHCAAGQKVSIKVSTAAAPGSSPSPAPVSSPATSASSPAPGSSTSSATPNSSASAPGASNSKSGASHSVSSDAAIFMAILSGFATLFL

SEQ ID NO: 20368 - protein, 121 aa, Spinacia oleracea
MGQGRGSARSALVVGLAILCLLAIVQPTLAAVYNIGWSFNVNGARGKSFRAGDVLVFKYIKGQHNVVAVNGRGYASCSAPRGARTYSSGQDRIKLTRGQNYFICSFPGHCGGGMKIAINAK

SEQ ID NO: 20369 - protein, 91 aa, Spinacia oleracea
AVYNIGWSFNVNGARGKSFRAGDVLVFKYIKGQHNVVAVNGRGYASCSAPRGARTYSSGQDRIKLTRGQNYFICSFPGHCGGGMKIAINAK

SEQ ID NO: 20370 - protein, 96 aa, Cucumis sativus
AVYVVGGSGGWTFNTESWPKGKRFRAGDILLFNYNPSMHNVVVVNQGGFSTCNTPAGAKVYTSGRDQIKLPKGQSYFICNFPGHCQSGMKIAVNAL

SEQ ID NO: 20371 - protein, 96 aa, Cucumis sativus
  unsure (1)..(96): unsure at all Xaa locations
AVYVVGGSGGWTFNTESWPKGKRFRAGDILLFNYNPXMHNVVVVNQGGFSTCNTPAGAKVYTSGRDQIKLPKGQSYFICNFPGHCQSGMKIAVNAL

SEQ ID NO: 20372 - protein, 108 aa, Cucurbita pepo
ATVHKVGDSTGWTTLVPYDYAKWASSNKFHVGDSLLFNYNNKFHNVLQVDQEQFKSCNSSSPAASYTSGADSIPLKRPGTFYFLCGIPGHCQLGQKVEIKVDPGSSSA

SEQ ID NO: 20373 - protein, 117 aa, Medicago sativa subsp. X varia
MNMVTVISLLGLLFLAKSTNAETYTVGGPKGWTFGIKKWPNGKSFVAGDVLDFGYNPKMHNVVLVDQTGYDKCKTPEGSKVFRTGSDQIELVKGDNYFICNLPGHCQSGMKIYINAA

SEQ ID NO: 20374 - protein, 129 aa, Arabidopsis thaliana
MAKGRGSASWSARAIVTLMAVSVLLLQADYVQAATYTVGDSGIWTFNAVGWPKGKHFRAGDVLVFNYNPRMHNVVKVDSGSYNNCKTPTGAKPYTSGKDRITLSKGQNFFICNFPNHCESDMKIAVTAV

SEQ ID NO: 20375 - protein, 129 aa, Arabidopsis thaliana
  unsure (1)..(129): unsure at all Xaa locations
MAKGRGSASWSARAIVTLMAVSVLLLQADYVQAATYTVGDSGIWTFNAVGWPKGKHFRAGDVLVFNYNPRMHNVVXVDSGSYNNCKTPTGAKPYTSGKDRITLSKGQNFFICNFPNHCESDMKIAVTAV

SEQ ID NO: 20376 - protein, 125 aa, Glycine max
  unsure (1)..(125): unsure at all Xaa locations
MAQGSGSAXXAVLVLVLLCVLLHGDFAESKVYTVGDRAGWALSSGGWPRGKRFRAGDVLLFRYGRGAHNVVAVSAAAYKSCSAARGGRTYNSGSDRVTLSRGTNYFICSVPGHCQAGMKMAVTAA

SEQ ID NO: 20377 - protein, 189 aa, Pisum sativum
MAFSNALVLCFLLAIINMALPSLATVYTVGDTSGWVIGGDYSTWASDKTFAVGDSLVFNYGAGAHTVDEVKESDYKSCTSGNSISTDSTGATTIPLKKAGKHYFICGVPGHSTGGMKLSIKVKASSGSSAAPSATPSSSGKGSPSSDDTPAATTTTTTPTKQNESSATSLSPIVALFFTVSWICSYVLV

SEQ ID NO: 20378 - protein, 129 aa, Oryza sativa (japonica cultivar-group)
MAQGRGSAAGRRNAAVLAMVLLCVLLHGELAESAVYTVGDRGGWGFNSGGWLRGKRFRAGDVLVFKYSPSAHNVVAVNAAGYKSCSAPRGAKVYKSGSDRVTLARGTNYFICSFPGHCQAGMKIAVTAA

SEQ ID NO: 20379 - protein, 107 aa, Rhus vernicifera
TVYTVGDSAGWKVPFFGDVDYDWKWASNKTFHIGDVLVFKYDRRFHNVDKVTQKNYQSCNDTTPIASYNTGBBRINLKTVGQKYYICGVPKHCDLGQKVHINVTVRS

SEQ ID NO: 20380 - protein, 122 aa, Lycopersicon esculentum
MFGVSKSTIIVIVMILCILLQSNISNAATYPAGDGKGWGFNMNGWPNGKTFNAGDVIEFKYKVDEHNVVKVSQEEYDSCKTSGGQVFNSGDDQIPLEKGTSYFICTFGPHCSEGVKAAITAN

SEQ ID NO: 20381 - protein, 123 aa, Nicotiana alata
MSGKQGSAILWVIFMVLFTIQITNAAIYNVGDGNGWTFGVSNWPNGKNFKAGDVLVFKYPKGVHNVVIVNKANYGTCNASGRTLSSGNDRVTLGKGTYYFICGIPGHCNGGQKISVTAKLTNK

SEQ ID NO: 20382 - protein, 184 aa, Nicotiana tabacum
MDMIMRMVLFGALALASLVQLTTAQTAHVVGDNEGWTIPSSGASAYTNWAAGKTFMVGDTLVFNFMTNTHDVLQVPKASFDGCSSQNAIGSAIVSGPANVTLDSAGERYYICTFGRHCQNGQKLAITVSSSTGTPGANPPTSFAAGPSGSVPGGIAPPPPPSSSTTVFASFLLGLSSIALAIFL

SEQ ID NO: 20383 - protein, 129 aa, Oryza sativa; identical to SEQ ID NO: 20378

SEQ ID NO: 20384 - protein, 125 aa, Triticum aestivum
  unsure (1)..(125): unsure at all Xaa locations
MAQGSGSAXXAVLALVLLCLLLHGDFAESKVYTVGDRNGWALSSGGWPRGKRFRAGDVLLFRYGRGAHNVVAVSAAGYRSCSAARGGRTYNSGSDRVTLARGTNYFICSVPGHCQAGMKMAVTAA

SEQ ID NO: 20385 - protein, 125 aa, Triticum aestivum
  unsure (1)..(125): unsure at all Xaa locations
MAQGSGGAXXAVLALLLLCVLLHGDFAESKVYTVGDRAGWALSSGGWPRGKRFRAGDVLLFKYGRGAHNVVAVNAAGYKSCSAARGGRTYNSGSDRVTLARGTNYFICSVPGHCQAGMKMAVTAA

SEQ ID NO: 20386 - protein, 150 aa, Triticum aestivum
  unsure (1)..(150): unsure at all Xaa locations
RTHALLPVFTPSAPAPPFPSSSAASHGAGKRRRDXAVLALLLLCVLLHGDFAESKVYTVGDRAGWALSSGGWPRGKRFRAGDVLLFRYGRGAHNVVAVSAAAYKSCSAARGGRTYNSGSDRVTLSRGTNYFICSVPGHCQAGMKMAVTAA

SEQ ID NO: 20387 - protein, 126 aa, Triticum aestivum
LAMAARGGGSANVAVLLAVLLLCTLVAEAAVFNVGDRGGWSFNTNSWPTGKRFKAGDVLVFKYDATAHDVVAVSAAGYKACAKPANGAKVYKSGADRVTLARGTNYFICSIPGHCQSGMKIAVTAA

SEQ ID NO: 20388 - protein, 158 aa, Triticum aestivum
  unsure (1)..(158): unsure at all Xaa locations
HPLTFLLSTCLSPRTCYVSSRTCLVGRSLLSXLAMAAQGRGSANVAVVLGVLLLCTLVAEAAVFNVGDRGGWSFNTNSWPTGKRFKAGDVLVFKYDATAHDVVAVSAAGYKACAKPAKGAKVYKSGADRVTLARGTNYFICSIPGHCQSGMKIAVTAA

SEQ ID NO: 20389 - protein, 127 aa, Triticum aestivum
  unsure (1)..(127): unsure at all Xaa locations
MAAQGRGSAAXXVVGVLLGGVLLSAAVAEAAVFNVGDRGGWSFNTNSWPTGKRFKAGDVLVFKYDATAHDVVAVSAAGYRACAKPAKGAKVYKSGADRVTLARGTNYFICSIPGHCQSGMKIAVTAA

SEQ ID NO: 20390 - protein, 165 aa, Brassica oleracea
MARFTVLIAAPVLAFLVAAPVPEVTAKKYLVGDKKFWNPDINYDTWVQGKHFYLGDWLYFVYYRDQHNILEVNKTDYEGCISDHPIRNYTRGGGRDIVPLNVTKQYYLLDGRGGCFKGMKLTVTVEKLPPPPKSAPVKNIRSVSITRVSKHQLVVILFCCDIHFP

SEQ ID NO: 20391 - protein, 122 aa, Cicer arietinum
MALGRGSALVVLLVCFLVIHSELAQAAIYTVGGAGGWTFNTIAWPNGKNFKAGDTLVFNYSPGAHNVVAVSKAGYGSCKTPRGAKVYRSGKDQIRLARGQNYFICNYVGHCESGMKIAINAV

SEQ ID NO: 20392 - protein, 131 aa, Oryza sativa (japonica cultivar-group)
MARGRGSAMRGAVAVAFLAVVVSCIFLSGCGVADAATYYVGDSLGWSLGSGSWPSGKKFHAGDILVFRYLPWMHNVVAVDEDGYADCNPPPFSRYYTSGSDSVRLARGDNFFVCTRYGHCNLGMKMVVTAV

SEQ ID NO: 20393 - protein, 332 aa, Lycopersicon esculentum
MARKLSSLVVFGSILFALLQHVAMAQQTHVVGDTLGWTVPNGGAASYSTWAAGKSFVVGDILVFNFRSGSHSVAEVSKGAFDSCNTSSPISISTNGPTNITLSSAGSHYYLCTFPSHCTLGQKLAINVSGSASPAPQPAPATPPTATPVMAPAPSVSVAPATAPSPASVAQTYIVGDNLGWSVPTSGPNSYQRWANNKSFKVGDTLVFNFVNGTHNVAMVSKASYDSCNTTSPINTISNGPARIRLTNSGEHYYMCTFPRHCSLGQKLAINVTGSDVTAPTPSTAATPSSPTVPSSDSPVNSPPAPSASAPSLVLATLPLTFLSFALVRLLN

SEQ ID NO: 20394 - protein, 131 aa, Oryza sativa; identical to SEQ ID NO: 20392

SEQ ID NO: 20395 - protein, 127 aa, Triticum aestivum
MAGGRGGASRVAVAAAAALAVACCCMGVASAATYYVGDGGGWSLSSGSWPNGKQFRAGDVLVFRYNPLIHNVVAVGEDGYNGCTTPAGSRTYESGNDAVRLVRGDNRFMCTRLYHCNFGMKMVVNAA

SEQ ID NO: 20396 - protein, 65 aa, Arabidopsis thaliana
FNYNPRMHNVVKVDSGSYNNCKTPTGAKPYTSGKDRITLSKGQNFFICNFPNHCESDMKIAVTAV

SEQ ID NO: 20397 - protein, 140 aa, Arabidopsis thaliana
MAQSSGHVSYVAVTVPIAIVMTVLCLFLANAVTYARRPTTYIVGGDDGWDPVVPMDTWARGKTFYAGDILEFKYDYQRFNLIVVNRTGYETCEANVGAIEYSSGDDKIQLNYGYNYFIGTYTPEDCTTGLKMAIKALAPR

SEQ ID NO: 20398 - protein, 119 aa, Zea mays
  unsure (1)..(119): unsure at all Xaa locations
LCNXNVTVISLLCLLVLVEHAHATTYTVGGPGGWTFNTNTWPNGKKFRAGXXLIFNYDSTTHNVVXXXRSGYNSCKTPAGAKVFSSGKDQIRLARGLNYFICNNAGHCESGMKVAINAV

SEQ ID NO: 20399 - protein, 195 aa, Oryza sativa (japonica cultivar-group)
MVTKKQQAALLAVVAVAALAQVAAAAVHPVGGNGAWDTTGNYNAWSVSQKFSQGDSILFTYPSSHDVVEVPKASYDACSPANALASYTGGSTTVKLDAPGKHYFICGVPGHCAAGMKLEVTVAAATATKPRHKKGAAPAAAPAMPPAVSSPTEEMPAVTSPTGSPAPSSASAASTIAINVAATLAAGMALAFLAM

SEQ ID NO: 20400 - protein, 182 aa, Cucumis sativus
MAAGSVAFVLGLIAVVFLHPATAQSTVHIVGDNTGWSVPSSPNFYSQWAAGKTFRVGDSLQFNFPANAHNVHEMETKQSFDACNFVNSDNDVERTSPVIERLDELGMHYFVCTVGTHCSNGQKLSINVVAANATVSMPPPSSSPPSSSPPSSVMPPPSPSSSNALMATLYLTFSALLVMAFF

SEQ ID NO: 20401 - protein, 179 aa, Oryza sativa (japonica cultivar-group)
MVCHRMLPLLVVAVALLPAAAVATNYTVGDEKGWNPDVDYTAWVKKHRPFYKGDWLPVFEYQNGRSDVVQVDEVGYDNCDKANAISSYSKGHSYAFQLKEAKDYYFICSYGYCYKGMKLAVTAKKGSASSSSSGSGDSSSSSKSDTASSKSKSSAAASSLANPSYAALLAVAIIFLRML

SEQ ID NO: 20402 - protein, 180 aa, Capsicum annuum
MEKMLCMIVFGALAIASLAQDASAQTVHVVGDNTGWVIPSNGAAAYTNWADRKTFRVGDTLVFNFTTNQHDVLQVQKSSFDGCNSQNAVSGPILGRTSKYNTQLHLEITTIISTFGRHCLNGQKLAIRVSSSTSTPGANPPTSSAAGPSGSVPGGTDAGPSGSVPGGTAPPPPSSSTTRI

SEQ ID NO: 20403 - protein, 165 aa, Oryza sativa
  unsure (1)..(165): unsure at all Xaa locations
MVCHRMLPLLVVAVALLPAAAVATNYTVGDEKGWNPDVDYTAWVKKHRPFYKGDWLLFEYQNGRSDVVQVDEVGYDNCDKANAISSYSKGHSYAFQLKEAKDYYFICSYGYCYKGMKLAVTAKKAPPPSPTXASSKSKSSAAASSLANPSYAALLAVAIIFLRML

SEQ ID NO: 20404 - protein, 201 aa, Triticum aestivum
  unsure (1)..(201): unsure at all Xaa locations
MAANPDREVCHRAGRGGKMLLPVMAVLAAVVLASLPSAAVATNYTVGDEKGWNPKVDYTSWVKKHRPFYKGDWLLFEYQNGRSDVVHVDEVGFDNCDKESAISSHSKGTSYAFQLKEAKDYFFICSYGYCYSGMKLPRPANKGPASSSPDSGSSSSSSPAAKSSSKSAAAPIAARKAAALAAAMLLRLLXSVDLASNSVFH

SEQ ID NO: 20405 - protein, 364 aa, Streptomyces coelicolor A3(2)
MVVSEHETFSAARPSPSKPQERCPMTDSPALPAVNREWHLVTRPVGWPKPEDFALVEAEVPTPGDGQVLVRNLYVSVDPYMRGRMSAAKSYAAPYELGKPMLGGAVGEVVASNAEGIAVGDHVLHFLGWREYAAVDAKSAVKVDPDAAPLSTYLGVLGMTGLTAYAGLLRTASFKEGDSVFVSGAAGAVGSQVGQIAKLKGASRVIGSAGSDEKVKLLLDEYGFDAAFNYKNGPVSEQLRAAAPDGVDVYFDNVGGDHLEAAIGSLNLNGRIAICGAISVYNNTEPAPGPKNLARLIQTRGRIEGFLVGDHYDLQPKFVEEVGPWVRTGELKYRETVVEGIENNLEAFLGVLRGDNTGKMIVKL

SEQ ID NO: 20406 - protein, 329 aa, Mus musculus
MVQAKSWTLKKHFEGFPTDGNFELKTTELPPLNNGEVLLEALFLSVDPYMRVAAKKLKEGDRMMGEQVARVVESKNSAFPKGTIVAALLGWTSHSISDGNGLTKLPVEWPDKLPLSLALGTVGMPGLTAYFGLLDICGVKGGETVMVSAAAGAVGSVVGQIAKLKGCKVVGTAGSDEKVAYLKKLGFDVAFNYKTVKSLEEALRTASPDGYDCYFDNVGGEFSNAVILQMKTFGRIAICGAISQYNRTGPCPQGPAPEVVIYQQLRMEGFIVNRWQGEVRQKALTELMNWVSEGKVQYHEHVTEGFEKMPAAFMGMLKGENLGKTIVKA

SEQ ID NO: 20407 - protein, 329 aa, Mus musculus
MVQAKSWTLKKHFEGFPTDGNFELKTTELPPLNNGEVLLEALFLSVDPYMRVAAKKLKEGDRMMGEQVARVVESKNSAFPKGTIVAALLGWTSHSISDGNGLTKLPVEWPDKLPLSLALGTVGMPGLTAYFGLLDICGVKGGETVMVSAAAGAVGSVVGQIAKLKGCKVVGTAGSDEKVAYLKKLGFDVAFNYKTVKSLEEALRTASPDGYDCYFDNVGGEFSNAVILQMKTFGRIAICGAISQYNRTGPCPQGPAPEVVIYQQLRMEGFIVNRWQGEVRQKALTELMNWVSEGKVQCHEYVTEGFEKMPAAFMGMLKGENLGKTIVKA

SEQ ID NO: 20408 - protein, 351 aa, Mus musculus
MIIQRVVLNSRPGKNGNTVAENFRVEEFSLPDALNEGQVQVRTLYLSVDPYMRCKMNEDTGTDYLAPWQLAQVADGGGIGVVEESKHQKLTKGDFVTSFYWPWQTKAILDGNGLEKVDPQLVDGHLSYFLGAIGMPGLTSLIGVQEKGHISAGSNQTMVVSGAAGACGSLAGQIGHLLGCSRVVGICGTQEKCLFLTSELGFDAAVNYKTGNVAEQLREACPGGVDVYFDNVGGDISNAVISQMNENSHIILCGQISQYSNDVPYPPPLPPAVEAIRKERNITRERFTVLNYKDKFEPGILQLSQWFKEGKLKVKETMAKGLENMGVAFQSMMTGGNVGKQIVCISEDSSL

SEQ ID NO: 20409 - protein, 351 aa, Mus musculus
MIIQRVVLNSRPGKNGNPVAENFRVEEFSLLDALNEGQVQVRTLYLSVDPYMRCKMNEDTGTDYLAPWQLAQVADGGGIGIVEESKHQKLAKGDFVTSFYWPWQTKAILDGNGLEKVDPQLVDGHLSYFLGAIGMPGLTSLIGVQEKGHISAGSNQTMVVSGAAGACGSLAGQIGHLLGCSRVVGICGTQEKCLFLTSELGFDAAVNYKTGNVAEQLREACPGGVDVYFDNVGGDISNTVISQMNENSHIILCGQISQYNKDVPYPPPLPPAVEAIRKERNITRERFTVLNYKDKFEPGILQLSQWFKEGKLKVKETVAKGLENMGVAFQSMMTGGNVGKQIVCISEDSSL

SEQ ID NO: 20410 - protein, 316 aa, Mus musculus
MIIQRVVLNSRPGKNGNPVAENFRVEEFSLPDALNEGQVQVRTLYLSVDPYMRCKMNEDTGTDYLAPWQLAQVADGGGIGVVEESKHQKLTKGDFVTSFYWPWQTKAILDGNGLEKVDPQLVDGHLSYFLGAIGMPGLTSLIGVQEKGHISAGSNQTMVVSGAAGACGSLAGQIGHLLGCSRVVGICGTQEKCLFLTSELGFDAAVNYKTGNVAEQLREACPGGVDVYFDNVGGDISNAVISQMNENSHIILCGQISQYSNDVPYPPPLPPAVEAIRKERNITRERFTVLNYKDKFEPGILQLSQWFKEGKLKFLF

SEQ ID NO: 20411 - protein, 329 aa, Rattus norvegicus
MVQAKTWTLKKHFEGFPTDSNFELRTTELPPLNNGEVLLEALFLSVDPYMRVAAKKLKEGDSMMGEQVARVVESKNSAFPTGTIVVALLGWTSHSISDGNGLRKLPAEWPDKLPLSLALGTVGMPGLTAYFGLLDICGLKGGETVLVNAAAGAVGSVVGQIAKLKGCKVVGTAGSDEKVAYLKKLGFDVAFNYKTVKSLEEALRTASPDGYDCYFDNVGGEFSNTVILQMKTFGRIAICGAISQYNRTGPCPPGPSPEVIIYQQLRMEGFIVTRWQGEVRQKALTDLMNWVSEGKIRYHEYITEGFEKMPAAFMGMLKGDNLGKTIVKA

SEQ ID NO: 20412 - protein, 147 aa, Rattus norvegicus
MPGLTSLIGVQEKGHVSAGSNQTMVVSGAAGACGSLAGQIGHLLGCSRVVGICGTHEKCLFLTSELGFDAAVNYKTGNVAEQLREACPDGVDVYFDNVGGDISNAVISQIKETVANGLENMGVAFQSMMTGGNIGKQIVRISEDSSP

SEQ ID NO: 20413 - protein, 329 aa, Cavia porcellus
MVKAKSWTLKKHFQGKPTQSDFELKTVELPPLKNGEVLLEALFLSVDPYMRIASKRLKEGAVMMGQQVARVVESKNSAFPAGSIVLAQSGWTTHFISDGKGLEKLLTEWPDKLPLSLALGTIGMPGLTAYFGLLEVCGVKGGETVLVSAAAGAVGSVVGQIAKLKGCKVVGAAGSDEKIAYLKQIGFDAAFNYKTVNSLEEALKKASPDGYDCYFDNVGGEFLNTVLSQMKDFGKIAICGAISVYNRMDQLPPGPSPESIIYKQLRIEGFIVYRWQGDVREKALRDLMKWVLEGKIQYHEHVTKGFENMPAAFIEMLNGANLGKAVVTA

SEQ ID NO: 20414 - protein, 356 aa, Nostoc sp. PCC 7120
MQKWKTSCTLVISLILWNNFPMADAVNQQIVLKSRPFGEPQESDFALVESPIPQPGEGEVLSRTIYLSLDPYMRGRLSANASYAASTELNSVIVGGTVSQVIKSHHLEFQAGDFVLSNHGWQTYAVAKGETLRKLDPNQAPLSYNLGVLGMPGLTAYAALLDIGQPKAGETVVISAASGAVGAVAGQIAKIKGARVVGIVGSDEKRDYIVNELGFDVGINRRTQEVSSALKEAAPDGIDVYFDNTAGEILEAVLQQINLGARIPLVGLISQYNASSPPPGPNLLPLLIKRALIKGFLVSDYQYRFPDFVRDVAGWLQSGQLKYKEDVVVGLENAPRAFIGLLRGDNFGKLIVKVSQ

SEQ ID NO: 20415 - protein, 426 aa, Rhodobacter sphaeroides
MHRCGSGHRHRAGTGLRSATGGPAARPLLPARTTEAQIVQAAAPAQERDRGSRSRRATVAASPAAAPSRAGLRHYIRPDSREKYMPQRSDINRRVVLAQRPKGTPDESTLRMEEVPISEPAEGQMLLRTVWLSLDPYMRGRMNDTKSYAKPVEIGGVMTGQVVAEVMQSSLPGFEAGDMVLAGSGWQDYALSDGTEVVNLGKAPERPSRALGILGMPGYTAYAGLLKIGEPQPGETVVVAAASGPVGATVGQIAKLKGCRAVGVAGGADKCRYVVETLGFDACIDHRAPDFEAQLAAACPNGIDIYFENVGGRVLYGVLPLLNPFARMPVCGIVSWYNSPGLPEGPDMAPALMGTILRMKVKLQGFIIFDSFPRSLYAEFAREMTGWLAEGKVKYREQVVEGLEAAPQALNDLLAGRNFGKMVVKL

SEQ ID NO: 20416 - protein, 341 aa, Rhodopseudomonas palustris
MPKGQRIVLASRPVGEPTPQNFRLEEFDVPAPGEGQVLLRTIWLSLDPYMRGRMSDGPSYAQPVPVGGVMEGGTVCEVIDSKSPGFAKGDIVLAHSGWATHAIADAKPLRKIDPALGPISTAVGVLGMPGMTAYTGLLDIGQPKEGETVVVAAASGAVGSAVGQIAKVKGARAIGIAGGKDKCDYVKQELGFDDCLDHRDPDLAAKLKAACPNGIDVYFENVGGEVFEAVFPLLNAFARIPVCGLIAQYNAFETPPTPKWATALMRHVLTKRLTIRGFIVSDFAGRRQEFLREMSGWVRDGKVKYREHVTDGLENAPEAFMGLLKGANFGKQLVRVGPERA

SEQ ID NO: 20417 - protein, 333 aa, Rhodopseudomonas palustris
MTATVNRQILLIEKPKEKLGPEHFRLAESPIPEPKDGEALVKVRYISLDAANRAWMQGATYRAAVETDSVMPGGSVAEVVSSKAPGLVSGDLVFADTGWQDYAVLPAKHLAKLPKVEPMTHLLSVYGIAGLTAYFGLLDIGKPRAGETVVVSAAAGSVGSIVGQIAKIKGCRVVGIAGGKQKCDWLVNELGFDAAVDYKDGALFKALRAAAPNGIDVYFDNVGGDILEACLPQMNLKGRIACCGAVSQYDRTPSATGPRGIPGLIVVKRLIMQGFIVMDYMDQRDEAVAKLQEWVTSGKLKVQEDVIDGLENTPQALIGLLAGENRGKRMVKV

SEQ ID NO: 20418 - protein, 337 aa, Ralstonia metallidurans
MSKQTYKRIVLASRPEAAVTPDNFRIEELPVPELADGQVLVRNHFLSLDPYMRGRMSDSKSYADPQPLNEVMIGGTVGEVIASKNPKWNVGDKVIGMFGWQELGVSDGGMMQKVDTTHIPLSAYLGSVGMPGVTAWYGLNKIIAPKAGETVVVSAASGAVGSVVGQLAKLAGCYVVGVAGGKEKCDYVVNELGFDACVDYKAAKDAKELYAMVKAVTPNGIDGYFENVGGDILDVVLSRLNPFARIAVCGLIAGYDGQDMPIRNPRAILVARAKIEGFIVSEHMELWPQALRELGTYVAQGKIKFRESIAEGLASAPEAFIGLLKGKNFGKQLVKLA

SEQ ID NO: 20419 - protein, 366 aa, Burkholderia fungorum
MSFARVRKARAVSAFVHAVRIIRRSSRQPMETIAMSQINRQLVLASRPQGAVTPDNFRLVEAPLAPLADGELRVRNHYLSLDPYMRGRMNDSKSYAPPQPLNEVMIGGTVGEVVESKNPKFAVGDKVVAMFGWQEYGTSNGTGLQKVDDTHVPLSAYLGPVGMPGVTAWYGLNRIIAPKAGETVVVSAASGAVGSVVGQLAKLAGARAVGIAGGADKCRYVTGTLGFDACVDYKAGNLYQDLKAATPNGVDGYFENVGGEVLDATLARMNPFGRIALCGFIAGYDGQPVPLRHPSLMLTQRLLVQGFIVSEHMDVWPEALKRLGTLVAQKKLHYRETIAQGLDAAPEAFMGLLKGKNFGKQLVKLI

SEQ ID NO: 20420 - protein, 376 aa, Escherichia coli O157:H7 EDL933
MLQRGGDGCKQNQSCEPATIDGFMPKAQESIMGQQKQRNRRWVLASRPHGAPVPENFRLEEDDVATPGEGQVLLRTVYLSLDPYMRGRMSDEPSYSPPVDIGGVMVGGTVSRVVESNHPDYQSGDWVLGYSGWQDYDISSGDDLVKLGDHPQNPSWSLGVLGMPGFTAYMGLLDIGQPKEGETLVVAAATGPVGATVGQIGKLKGCRVVGVAGGAEKCRHATEVLGFDVCLDHHADDFAEQLAKACPKGIDIYYENVGGKVFDAVLPLLNTSARIPVCGLVSSYNATELPPGPDRLPLLMATVLKKRIRLQGFIIAQDYGHRIHEFQREMGQWVKEDKIHYREEITDGLENAPQTFIGLLKGKNFGKVVIRVAGDD

SEQ ID NO: 20421 - protein, 333 aa, Staphylococcus aureus subsp. aureus Mu50
MQNKQILFNKIPEGMPQEDTFKIEEIDTPKLESDGVLVQTLYISVDPYMRGRMTKADSYVQPFEIGKPIVSHVVAKVIDSTLADYKKGDVVVGMLPWRIINHVQADQITKVPTTDVPLDLYLSVLGMPGQTAYHGLLDIGQPKAGDTVVVSAASGAVGSVVGQIAKIKGCRVVGIAGGDKKVNYLTETLGFDAGIDYKKEDFAEALAQAVPDGIDVYFENVGGTVGDEVFKHLNRFARVPVCGAISSYNHPEADIGPRIQGTLIKKQVMMRGFLVSEFANAFKEASEQLATWVQEGKIQSQVTIEDGFENAPHAFKNLFTGDNFGKQVIKVTE

SEQ ID NO: 20422 - protein, 333 aa, Pseudomonas putida KT2440
MTQTNRRFLLAKRPVGAVRRDDFSFETVPAEQPGEGQVLVRNLYLSLDPAMRGWMNEGKSYIPPVALGQVMRALGVGEVVASNHPGYQPGDHVSGALGVQDYFTGEPQGLHKIDPKLAPLPRYLSALGMTGMTAYFALLEVGQPKAGDTVVISGAAGAVGSIVGQIAKIKGCRVVGIAGGAEKCQYLKDELGFDGVIDYKAEDVLAGLKRECPKGVDVYFDNVGGDILDAVLTRINFKARIVICGAISQYNNKEAVKGPANYLSLLVNRARMEGFVVMDYTKDYGKAAQEIAGWLANGQVKSKEDVVEGLETFPETLLKLFSGENFGKLVLKV

SEQ ID NO: 20423 - protein, 344 aa, Pseudomonas putida KT2440
MPQSKLINRRVVLASRPHGAPLEANFRIEQSPIPEPAEGQVLLRTVYLSLDPYMRGRMSDAPSYAAPVEIGGVIVGGTVCRVEASKNPAYKVGDWVLSFAGWQDYTLSDGSDLTALGESPAHPSYALGIFGMPGFTAYMGLLDIGRPQAGETLVVAAATGPVGATVGQIGKIKGCHVVGVAGGAEKCRHAVEVLGFDACLDHRAPDFAEQLAKACPAGIDIYFENVGGKVFDAVLPLLNTKARVPVCGIIAHYNDTALPNGPDRLPALMGSILRKRIHVQGFIIFDDYGHRYNEFFNDMSSWFAQGRIKYREELVSGLEEAPKAFIGLLEGRNFGKLVVRVSED

SEQ ID NO: 20424 - protein, 334 aa, Staphylococcus epidermidis ATCC 12228
MNNEQIVFNKVPDGMPQDDTFKYEDIDVIEPSENELQLKTLYISVDPYMRGRMTNADSYVDPFKQGEPFNGHTVSKVLKSKDSNFDEGDIVVGMLPWRKINTVNSEYVNKVPTSDVPLHLYLSVLGMPGQTAYHGLLDIGQPKEGETVVISAASGAVGSVVGQIAKLKGCRVVGIAGGDKKVNYLKNELRFDAGIDYKKDNFPEALKEAVPNGIDVYFENVGGYIGDEVFKHLNTHARIPVCGAISSYNHPEKDIGPRIQQTLIKNQAMMRGFIVAEFADGFKEASKQLAQWVQENKIKTQVSVEDGFDKVPQAFRNLLTGDNFGKQVIKVASE

SEQ ID NO: 20425 - protein, 354 aa, Anopheles gambiae str. PEST
TRPTRNMKSLWQQLVRQRQYATDAAGAARKWIYAKAFQGEPHHGNFRLETEPLPATLQPGEFLAQAEYLSVDPYMRPYMLAYPEGSLMIGGQIARVTRSENAHFPVGATVFGQFGWRTHTVCDPARLEKDKPYVLPDFGGLPTSLGLGILGMPGNTAYFGLQELCQPQPGETVVVSGAAGAVGSVVGQIAKIKGCRAVGIAGTEEKCEWLRKIGFDAAINYKRNDVYGELKKAAPRGVDCYFDNVGGSVTETVLKQMNVYGRIAVCGAISNYNSAVGKVTDPQRQFVFKQLRMEGFLVWRWNDRWLEGIEGNLRWIREGRLAYEETVTEGFERMPDAFIDMLRGGNTGKAVVKV

SEQ ID NO: 20426 - protein, 343 aa, Anopheles gambiae str. PEST
LSVVYTPARPLKRMHIAKKWIYAKPFVDEPTLDNFELVEEPVPELQDGEFLIKALYLSVDPYMRIYMLPSPTGCTMIGGQVGEVIESRHADFPVGALAFAQVGWRTVSVCAPASFETRKPYVLPELGPLPASLGMGALGTVGNTAYFGLLEICQPQPGETVVVSGAAGAVGSLVGQIAKIKGCRVVGIAGSTEKCEWLRELGFDGVINYKEEDVGEALRQLAPDGVDCYFDNVGGRTAETVKGQMKPFGRIAVCGTISQYNGREPARVTDPQRDFVWKQLVQEGFSVHRWTDRWFEGVHQNLRWIQEGKLKVRETVTDGFENMPRAFIEMMRGGNVGKAVVKV

SEQ ID NO: 20427 - protein, 367 aa, Anopheles gambiae str. PEST
TVSGQSLAPDYIVRDQQDPKKGSKYSTSHGSVRKQRMVLARKWMYVRRPEGEPKETDFALKEEELPALEAEDFLVETEYFSLDAGLRGYMELGALPVGSPVIGMALAKVIESRNAQFPVGAVVCARLGWVTHAVLNQQQQKELRPYIVPEVAGQSRAVGLGPLGLSGNTAYFGLLEICKPKPGETVVVSAAAGAVGSLVGQIAKIKGCHVVGLAGTEEKCGWLRELGFDAVVNYRAGSVREQLAAATPRGVDCYFDNVGGELTELVRERMNLYGRISVCGAVSSYNGQPAQVADPQRDYVSKQLRQEGFVVFRWLPRWMEGIGQMREWLEQGKLVHRETVYEGFDSAPRSFISMLQGGNIGKAVVKV

SEQ ID NO: 20428 - protein, 340 aa, Anopheles gambiae str. PEST
NCVIVRRCASSRRDLLPVACMRARALCLVSKKKKKQYKMVVAKKWIYAKPFEGLPKDENFRLEEETLPEPGENEFVAEAVFLSVDPYMRPYMASYPAGTVMIGGQVAKVTASRHPQFPVGATVFGNFGWRTHTLVNPEQGAADSRPYVLPPFGAHPASLGLGVLGMPGNTAYFGFLELCQPKQGETVVVSGAAGAVGSLVGQIAKIKGCRVVGIAGSDDKCGWLRELGFDATINYRQAVLGQMNLYGRISVCGTISNYNAERAQVADPQRLFVFKQLRQEGFIVTRWAKRWMEGIRQNLQWIEEGRLRYQETVTDGFEQMPAAFVSMLTGGNTGKAVVKV

SEQ ID NO: 20429 - protein, 217 aa, Magnetospirillum magnetotacticum
MAVVNRRIVLAARPHGEPKPEHFRLEEARTSAPKQGEVLLRTRWLSLDPYMRGRMSAAKSYAKPVEIGEVMVGQTVSEVVASENPAFAEGDLVLGYSGWQEFALSDGKGLRRLDPADGPPSQFLGVLGMPGMTAYAGLLEIGRPQPQETVVVAAAAGPVGSLVGQIARLRARGRWHRRGRGEMRLPDRDAGLDAAIDTGPATSPMPGPRLPEGSTCI

SEQ ID NO: 20430 - protein, 342 aa, Xanthomonas campestris pv. campestris str. ATCC 33913
MTSLTNRRIVLASRPHGEPGTDNFRIEDAPVPPTGHNQILVRNRFLSLDPYMRGRMDEGPSYAAPVAIDAVMEGGTVGEVLESNHPDYHPGELLVLGGGWQTHTVLEPTAPLRKLPKDDALPLSTALGVYGMPGFTAYAGLHEIGKPQAGETLVVAAASGPVGATVAQLARLQGLRVVAIAGGEEKVRYLRDTLRVDVALDHRAEDFAAQLRAATPDGIDVYFENVGGKVFDAVMPQLNDFARIPVCGVVATYNSRGQVAPGPDRLPDFIGQVLRKRLTVRGFIQHDFIRLMPAFLREMGQWLREDKIQYREHVLHGLDSAPQGLISLLRGENFGKAVVALD

SEQ ID NO: 20431 - protein, 342 aa, Xanthomonas axonopodis pv. citri str. 306
MTSIINRRIVLASRPHGEPSADNFRIEEVPVAPTGHDQILVRNRFLSLDPYMRGRMDEGPSYAAPVAIDAVMEGGTVGEVIASNHADYHPGDLLVLPGGWQAHSLLTPTTPLRKLPKDDSLPPSTALGVYGMPGFTAYAGLHEIGKPQPGETLVVAAASGPVGATVAQLARLQGLRVVAIAGGAEKVRYLRDTLHVDVALDHRADDFAEQLRAATPNGIDIYFENVGGKVFDAVLPQLNEFARIPVCGVIATYNSRGQAHPGPDRLPDFMGQVLRKRLTVRGFIQHDFIRLMPAFLREMGQWLREDKIQYREHVLHGLDSAPQGLIDVLRGKNFGKAVVALA

SEQ ID NO: 20432 - protein, 341 aa, Caulobacter crescentus CB15
MTTSREIRLKARPVGMPKDSDFELATVELPAPGDGEIQVKNLWMSVDPYMRGRMYDRPSYVPPFQLGEALQGGAIGEVIASNDPDFKPGDIVSSMFGWREAYNAHPKSLAAAGMGAITKIETHGIPPQAFLGVAGMPGMTAYAGLLRVAALKDGDVVFVSAAAGAVGSIVCQIAKLKGHTVIGSAGGPEKVAFLKSIGVDHVIDYKATPDVVAELAKVAPKGIDVYFENVGGVHLEAAINSARPFARFALCGMISQYNETSKPEGPSNIILAVGKSLRLEGFIVSNHFDLYPQFAKDMAEWIKAGKITWKETVEDGVDRAPNAFLKLFTGENLGKMLVKLG

SEQ ID NO: 20433 - protein, 333 aa, Staphylococcus aureus subsp. aureus MW2
MQNKQILFNKIPEGMPQEDTFKIEETDTPKLESDGVLVQTLYISVDPYMRGRMTKADSYVQPFEIGKPIVSHVVAKVIDSTLADYKKGDVVVGMLPWRIINHVQADQITKVPTTDVPLDLYLSVLGMPGQTAYHGLLDIGQPKAGDTVVVSAASGAVGSVVGQIAKIKGCRVVGIAGGDKKVNYLTGTLGFDAGIDYKKEDFAEALAQAVPDGIDVYFENVGGTVGDEVFKHLNRFARVPVCGAISSYNHPEADIGPRIQGTLIKKQVMMRGFLVSEFANAFKEASEQLATWVQEGKIQSQVTIEDGFENAPHAFKNLFTGDNFGKQVIKVTE

SEQ ID NO: 20434 - protein, 398 aa, Shigella flexneri 2a str. 301
MLQRGCDGCKQNQSREPATIDGFMPKAQESIMGQQKQRNRRWVLPSRPHGAPVPENFRLEEDDVATPGEGQVLLRTVYLSLDPYMRGRMSDEPSYSPPVDIGGVMVGGTVSRVVESNHPDYQPGDWVLGYSGWQDYDISSGDDLVKLGDHPQNPSWSLGVLGMPGFTAYMGLLDIGQPKEGETLVVAAATEPVGATVGQIGKLKGCRVVGVAGGAEKCRHATEVLGFDVCLDHHADDFAEQLAKACPKGIDIYYENVGGKVFDAVLPLLNTSARIPVCGLVSSYNATELPPGPDRLPLLMATVLKKRIRLQGFIIAQDYGHRIHEFQKEMGQWVKEDKIHYREDITDGLENAPQTFIGLLKGKNFGKVVIRVAGDDKSFNGGVSRHKNPGKKLIFSFN

SEQ ID NO: 20435 - protein, 376 aa, Shigella flexneri 2a str. 2457T
MLQRGCDGCKQNQSREPATIDGFMPKAQESIMGQQKQRNRRWVLASRPHGAPVPENFRLEEDDVATPGEGQVLLRTVYLSLDPYMRGRMSDEPSYSPPVDIGGVMVGGTVSRVVESNHPDYQPGDWVLGYSGWQDYDISSGDDLVKLGDHPQNPSWSLGVLGMPGFTAYMGLLDIGQPKEGETLVVAAATEPVGATVGQIGKLKGCRVVGVAGGAEKCRHATEVLGFDVCLDHHADDFAEQLAKACPKGIDIYYENVGGKVFDAVLPLLNTSARIPVCGLVSSYNATELPPGPDRLPLLMATVLKKRIRLQGFIIAQDYGHRIHEFQKEMGQWVKEDKIHYREDITDGLENAPQTFIGLLKGKNFGKVVIRVAGDD

SEQ ID NO: 20436 - protein, 337 aa, Thermobifida fusca
MPTTAREFHLIARPQGEPAVTDFALVTRTLPDPGPGELLVRNLVLSVDPYMRGKMSGVRTYTDPYELNAPMEGGAVGVVEASTDPAVPTGTLVVHNAGWRSHALLPASRVRPLPADSPVDPSVYLGALGMPGLTAYVGLRHKAGIREGDTVFVSGAAGAVGSMVGQLAALYGARRVIGSAGSPEKVAYLRDELGFDAAFDYRAAPVREQLADAAPDGIDVYFDNVGGDHLEAAIACANDFARFAICGAISGYNATSAPRAPRNLFQIVTKRLTLRGFIVSDEPHLAEEFQREVAPAVADGRIKVRETVVEGLERTPEAFISMLRGGNIGKMVVRVAE

SEQ ID NO: 20437 - protein, 335 aa, Pseudomonas syringae pv. syringae B728a
MTDLSNRQFLLAKRPSGDARREDFTYQEVPVSALADGQILVRSKYLSLDPAMRGWMNEGKSYIPAVELGEVMRAIGVGEVIESKNPKFAVGDHVQGRLGVQDYFAGEPKGFYKVDTNLAPLPLYLSALGMTGMTAYLALLDVGQPKSGDTVVISGAAGAVGSIAGQIAKLKGCRVVGIAGGTKKCRLLTEELGFDAAIDYKSEDVMDGLKRHCPDGVNVYFDNVGGDILDAALSQLAVGARVVICGAISQYNSTKAIKGPANYMSLLVNRARMEGFIVLDHPERYAEAGQVMAGWIKEGKLKSKEHIVEGLETFPETFQMLFSGENQGKLILKVE

SEQ ID NO: 20438 - protein, 344 aa, Pseudomonas fluorescens PfO-1
MSDPLTLNQRFVLASRPVGAPTPENFRLEREALPDLEDGQVLLKTLYLSLDPYMRGRMSDAPSYAAPVQIGEVMTGGAVSRVEQSRHPKFHPGDLVVGATGWQSHSISDGRNIIPIPSGLPSPSMALGVLGMPGMTAYMGLMDIGQPKEGETLVVAAASGAVGSVVGQVAKIKGLRAVGVAGGAEKCKYVVEELGFDACIDHKAPDFAEQLAKACPDGIDIYYENVGGHVFDAVVPLLNSKARIPLCGLIAGYNASEAPKGPDRLPALQRTLLTKRVRIQGFIVFDDYGDRQPEFISAMVPWVRDGKVKFREDVVEGLEQAPQAFIGLLEGRNFGKLVVKVAQD

SEQ ID NO: 20439 - protein, 357 aa, Pseudomonas fluorescens PfO-1
MSQPCGIAHEGLSTRLHSTRVPVMTNQTNRQFLLAKRPAGAATRETFTYQELPVGEPAAGQILVKNEYLSLDPAMRGWMNEGKSYIPPVGLGEVMRALGVGKVVASNNPGFAVGDYVNGAIGVQDYFLGEPKGFYKVDPKLAPLPVYLSALGMTGMTAYFALLDVGAPKAGDTVVLSGAAGAVGSIAGQIAKIKGCRVIGIAGGADKCKFLVDELGFDGAIDYKSEDVLAGLKRECPKGVDVYFDNVGGDILDAVLSRLNFKARVVICGAISQYNNKEAVKGPANYLSLLVNRARMEGFVVMDYAAQYASAAQEMAGWMAKGQLKSKEDIVEGLETFPETLGKLFSGENFGKLVLKV

SEQ ID NO: 20440 - protein, 334 aa, Pseudomonas aeruginosa PAO1
MTSQINRQYQLAQRPSGLPGRDTFSFVETPLGEPAEGQILVKNEYLSLDPAMRGWMNDARSYIPPVGIGEVMRALGVGKVLVSKHPGFQAGDYVNGALGVQDYFIGEPKGFYKVDPSRAPLPRYLSALGMTGMTAYFALLDVGQPKNGETVVISGAAGAVGSVAGQIARLKGCRVVGIAGGAEKCRFLVEELGFDGAIDYKNEDLAAGLKRECPKGIDVFFDNVGGEILDTVLTRIAFKARIVLCGAISQYNNKEAVRGPANYLSLLVNRARMEGMVVMDYAQRFPEGLKEMATWLAEGKLQSREDIVEGLETFPETLLKLFSGENFGKLVLKV

SEQ ID NO: 20441 - protein, 345 aa, Pseudomonas aeruginosa PAO1
MSQSTQVNRRIVLASRPHGAPTRDNFRIEQVPLPEPGAGQVLLRTVYLSLDPYMRGRMSDAPSYAPPVELGAVMVGGTVSRVEASNHPGFKVGDWVLSANGWQDYALSDGSGLARLGESPEHPSYALGLLGMPGFTAYMGLLDIGKPQAGETLVVAAATGPVGATVGQIGKLKGCRVVGVAGGAEKCRHAVQVLGFDACLDHHAADFAERLAEACPDGIDIYYENVGGKVFDAVFPLLNAKARIPVCGIVAHYNDTELPPGPDRLPALMGTILRKRIKVQGFIIFDDYGHRYDEFQRDMSKWFADGLIQYREERVDGLENAPEAFFGLLQGRNFGKLVVRVGADA

SEQ ID NO: 20442 - protein, 343 aa, Vibrio vulnificus CMCP6
MTQPTNRQIVLASRPVGAPTADNFALTQSDIPTPAQGEMLLRSVYLSLDPYMRGRMSDAKSYAEPVGIDEVMVGGTVCQVEASNHAEFEVGEWVLAYTGWQDYALSDGEGLIKLGKQPSHPSYALGVMGMPGFTAYMGLLDIGQPKEGDTLVVAAATGAVGSMVGQIGKLKGCRVIGIAGGEEKCQFAKETLGFDECIDHKATDFAEQLAKVCHNGIDIYFENVGGKVFDAVMPLLNTGARIPLCGLISQYNATSLPEGPDRMSMLMAQLLIKRIKMQGFIIFDDYGHRYGEFAADMTQWLAQGKIHYREHLVQGLENAPDAFIGLLEGKNFGKMVVQTNQPR

SEQ ID NO: 20443 - protein, 339 aa, Oceanobacillus iheyensis HTE831
MSEQNQQIKLTKRPEGTPTNEHFEIVDIPINNPNDGEVLIKTIYLSVDPYMRGRMSAGKSYVKPFEVDKPMNGTIVGEVVTSESESFSKGDLVRGMLPWQRYNVVSASYVEKIDPSVAPLTAYLSVLGLTGLTAYFGLLDIGQPKEGETVVVSAAAGAVGSSVGQIAKIKGAHVVGIAGTDEKIDYLENQLGFDKAVNYKDADFKQQLKEACPNGVDVYFDNVGGEVTDNVISLLNDFARIPLCGAISTYNLKPGEDHGPSILPKILKTRTTMKGFIVSDYQEQFPEAIKDLAKWVAEDKLSYEVTTVDGFENTPTAFLDLFEGKNKGKQLVKVSEISS

SEQ ID NO: 20444 - protein, 386 aa, Pseudomonas syringae pv. tomato str. DC3000
MCHLQINMNVIATEHSYQPHGSNGIRWMIRSCLNTAPRLESTHKPLLRGPAMTDLSNRQFLLAKRPSGAVRRDDFTYQQVPVTSLADGQILVRNKFLSLDPAMRGWMNDGKSYIPAVQLGEVMRALGVGEVLESKNPKFAAGDHVQGALGTQDYFAGEPKGFYKVDTSLAPLPLYLSALGMTGMTAYLALLDVGQPKSGDTVLISGAAGAVGSIAGQIAKLKGCRVVGIAGGKDKCSLLTSELGFDAAIDYKSEDVMDAIKRHCPDGVNVYFDNVGGDILDAALSQLAVGARVVICGAISQYNNTTAIKGPANYMSLLVNRARMEGFIVLDHADRFAEAGQVMAGWIKEGKLKSKEHIVEGLETFPETFQMLFNGENQGKLILKVE

SEQ ID NO: 20445 - protein, 344 aa, Vibrio parahaemolyticus RIMD 2210633
MTNATNRRIVLASRPHGAPTTENFRLEEVAKPVPQAGEMLLRTVYLSLDPYMRGRMSDAESYAEPVALDDVMIGGTVCQVEASNHPDYEAGEWVLAYTVGWQDYAISTGEMVIKLGKEPQNPSYALGVAGMPGFTAYMGLLDIGQPKPGETIVVAAATGPVGATVGQIGKIKDCRVVGIAGGEEKCRYAKEVLGFDECIDHKADDFEQQLKDACYNGIDVYFENVGGKVFEAVMPLLNTSARIPLCGLISQYNATELPEGTDHLPLLMGKLLTKRIKVQGFIIFDDYGHRYGEFAQDINQWLAEGKIQYREHLVEGLDNAPEAFIGLLEGKNFGKLVVKINDPL

SEQ ID NO: 20446 - protein, 339 aa, Bacillus subtilis subsp. subtilis str. 168
MTASQQQIQLARRPQGIPVHEDFRFETIPVPEPKQGEVLVKTLYVSVDPYMRGRMQDTKSYVEPFALDKALSGGVIAEVVSDGNHLKKGDIVIGNLSWQEFSAVSESALRKIDTSLAPASAYLGILGMTGLTAYFGLLDIGRPKEGETVVVSGAAGAVGSTVGQIAKIKGARVVGIAGSDEKIDYLKQELQFDEAINYKTADDIQKALQNACPDGVDVYFDNVGGPISDAVMNLLNEFARIPVCGAISSYNAESEADDMGPRVQSKLIKTKSLMQGFIVSDYSDRFSEGAKQLAEWLKAGKLHYEETITEGFENIPDAFLGLFKGENKGKQLIKVSDPS

SEQ ID NO: 20447 - protein, 351 aa, Bradyrhizobium japonicum USDA 110
MTATSIQEEAIMSQAKRIVLAARPVGEPKPSDFRIEEFAVPTPGQGEVLLRTIWLSLDPYMRGRMSDGPSYAAPVPIDGVMEGEAVSEVAASNNPDFAKGDIVRARTGWQTHAISSGKGLIKVDPKLGPISTSIGVLGMPGMTAYTGLLDIGKPQEGETVVVAGASGAVGSAVGQIAKIKGARAVGIAGGKDKCDYVVKELGFDACIDHRDPDLAAKLKDACPKGIDVYFENVGGAVFEAVFPLLNPFARVPVCGLIAHYNDTEAKPPKWAASMMRATLTKRLTFRGFIVSDFAARHGDFLRDMSAWVREGKVKYKEFVTEGLESAPGAFMGLLKGANFGKQLVRVGQDKA

SEQ ID NO: 20448 - protein, 333 aa, Bradyrhizobium japonicum USDA 110
MSGSINRQILLVEKPSGKLGPEHFKMVDGAMPEPKDGEALLRVRYISLDAANRAWMHGATYRSAVEANSVMAGGGIAEVVSSKAPGLAAGDIVFGDTGWQEFAAVPAKHLTKMPKLEPMTHLLSVFGIAGLTAYFGLLEVGKPKEGETVVVSAAAGSVGSIVGQIAKIKGCRVIGIAGGADKCNWLTSELGFDAAVDYKDGAVFKALRAAAPTGIDVYFDNVGGDILEACLPQMNNYGRIACCGAISQYDGAPAAHGPRGVPGLIVVKRLVMQGFIVMDYMKDSQRALAELQGWVKSGKLKVQEDIIDGLENTPKALIGLLAGENRGKRMVKL

SEQ ID NO: 20449 - protein, 340 aa, Streptomyces avermitilis MA-4680
MTVTPQLPAVSREWHLASRPVGWPKPEDFALVEAEVQQPGEGQVLVRNKFVSVDPYMRGRMSAAKSYVAPFELNQPMQGGAVGEVVVSNAEGIEAGDHVLHFLGWREYAVVDAKQAVKVDPEAAPLSAYLGVLGMTGLTAYAGLLRTASFKEGDSVFVSGAAGAVGSQVGQIAKLKGASRVIGSAGSDDKVKLLVEEYGFDAAFNYKSGPVNEQLREAAPDGVDVYFDNVGGDHLEAAIGQLNRDGRIAVCGMISVYNDTEPAPGPKNLARLIQTRGRIQGFLVGDHYDLQSQFVQEVGGWIRSGELKYRETVVEGIENNLEAFLGVLRGDNTGKMIVKL

SEQ ID NO: 20450 - protein, 318 aa, Streptomyces avermitilis MA-4680
MKPDDWEHCSGPVEEPGPGRFAGRTRVISLDPAMRGWLDDRPSYLPPVGIGEVMRAGSVIEVTASNHPDFQPGDHVVGTFGVQEHVVSDGKGAMKIDTSLAPPSTYLGALGMPGMTAYFGLLEVGALKDGETVVVSGAAGAVGSMVGQIAKAKGCRVVGIAGGPEKCALLTDELGFDAAIDYRTEDVRKALRGHAPDGIDVYFDNVGGDILDAALTRLAMHARVVVCGAISQYNNATPVKGPSNYLSLLVRRARMEGLVVFDYAKRYPQATQEISGWIGAGHIKVKEHVVRGTVDDFPETLQMLFRSENVGKLVLELA

SEQ ID NO: 20451 - protein, 187 aa, Streptomyces avermitilis MA-4680
MVSGAAGAVGSVVGQIARIHGCRVIGVAGGPEKCRTIVDEFGCDVAIDYKSENLRDALRKHAPDGVDVYFDNVGGKTLDSVLTRLARGARIVICGSMSQYNATERPPGPANYMALLAARASMTGMVVFDYEDRYPQASAELARWLKDGRLRSREHIVEGGVRAFPETLLKLFSGENTGKLILALGNG

SEQ ID NO: 20452 - protein, 336 aa, Ralstonia solanacearum
MSNTYQRIVLASRPEGAVTPDNFRLETAQIPELQDGQVLVRNHFLSLDPYMRGRMNDSKSYAQPQPLGEVMIGGTVGVVEASRNPAYAVGDNVVGMFGWQEVGISDGRGMQKVDTRHVPLSAYLGSVGMPGVTAWYGLNRIMHPKPGQTVAVSAASGAVGSVVGQLAKLKGCRAVGFAGGKDKCDYVVNELGFDACIDYKAAKDPKELYAMLKEATPDGIDAYFENVGGDILDAVLRRMNPFGRIAMCGMIAGYDGQPLPLQNPQLILVSRLTVEGFIVSEHMDVWPEALRELGGSVAQGKLKFRESVAQGLASAPEAFIGLLKGKNFGKQLVKLV

SEQ ID NO: 20453 - protein, 350 aa, Arabidopsis thaliana
MGEVSVVENKKVILKNYVDGIPTETDMEVKLGETIELKAPKGSSCFLVKNLYLSCDPYMRGRMRDFHGSYLPPFVPGQRIEGFGLARVIDSDDTNYKPGDIVSGIIGWEEYSLLRSSDNLQLRNIQLDDDIPLSYHLGLLGMAGFTAYAGFNEICCPKKGDSVFVSAACGAVGQLVGQLAKLHGCYVVGSAGSKQKVEILKNELGYDEAFNYKEEADLDTALKRYFPEGIDIYFDNVGGSMLDAALLNMKVRGRIALCGMVSLQSLSTSSQGIKNLYSAIYKRLRLEGFLQSDYLHIFPQFLENVKRYYKEGKIVYVEDISEGLDLAPAALVGLFSGKNIGKQVVRVAKE

SEQ ID NO: 20454 - protein, 339 aa, Mesorhizobium loti
MSTETNIRIVLAARPQGRPKPSDFRIESVGIAEPGEGELLLQILYLSLDPYMRGRMNATKSYAKPVEIDGVMEGGTVARVVKSRHAGFAEGDIVLSHSGWQGFALSDGVGLRKLDPAAAPVTTALGVLGMPGFTAYAGLLTIGQPKAGETVVVAAASGAVGSAVGQIARIKGARAVGIAGGADKCAFVRRELGFDAVVDHRADNFAEQLKAACPDGIDVYFENVGGPVWDAVFPLLNEFARVPVCGLIAQYNTVAASADDRLPTLMQQVLHRSLTIRGFIQREFVDQRPAFYRDMAGWIASGQVRYREDIVDGLENAPQAFMGLLEGKNFGKLIVRVAQ

SEQ ID NO: 20455 - protein, 352 aa, Glycine max
  unsure (1)..(352): unsure at all Xaa locations
MAEEALLQNKQVLFKGYIDGVPKETDMELKVDSHIALKPPPQGSSAILVKNLYLSCDPYMRGRMRDFHGSYIPPFLPAQALEGFGVSKVIHSDNPNYKPGDFITGFTGWEEYSLIQRTXXQLRKIHPDDAIPLSFHVGLLGMPGFTAYAGFYEVSTPSKGEYVFVSAASGAVGQLVGQLAKLHGCYVVGSAGSKEKVDLLKNKPGFDEAFNYKEXELDFECRLYKRYFPEGIDIYFDNVGGDMLDAALLNMRIHGRIAVCGMVSQQSLSKPXXGIYNLFNLITKRIKMQGFLQSDYLHLYPRFLEDVSSYYKQGKIVYIEDMNEGLESAPAAFVGLFHGKNVGKQVIRVAHE

SEQ ID NO: 20456 - protein, 359 aa, Oryza sativa (japonica cultivar-group)
MEQQQAAPMARNRKVVLREYIAGRPPREDDMVLVDGGTVALRVPEAAAPAPAVLVKNLYLSCDPYMRGRMRDFHGSYIPPFKPGSVIEGLGVARVVDSTHPGFSAGDIVSGMTGWEEYSLIDRPEQLSKIQQSDIPLSYHLGLLGMPGFTAYAGFYEICSPKKGEFVFVSAASGAVGQIVGQLAKLHGCYVVGSAGTNQKVELLKGKFGFDAAFNYKEEPDLTAALKRYFPEGIDIYFENVGGPMLDAVLLNMRTHGRIAVCGMVSQNALTDPVGIHNIFCLVPKRIRMQGFIQSDHLHMFPQFVSDMAKHYRDGKIVYVEDMSIGLENAPAALVGLFSGKNVGKKVVCVSQELSQFTF

SEQ ID NO: 20457 - protein, 316 aa, Dictyostelium discoideum
MTEIKQITLDKYFERDNGMPDRNQFKITTCKFDENQKMEKDQIMIKLEYVSVDPYLRARMNSKKTFVDPFKLHDPINSGCIGKVLKSTSDRFKEGDHVSGYFDWKEIQIVKVSKEILMADPNIAPLSAYLGICGMPGVTAYYGTVLIGKPKKGETLVVNAAAGVVGTTVGQIGKILGLRVVGICGSDEKAKSLINDFHFDSGLNYHSPTYAEDLKKACPNGIDIFYENVGGEVTDDIGQRAQYIVFEKRITMQGFLVFDYSDEDYKDAFQHLSKWLKEGKMIEKHVINNGFDQIIPSFIKIFETSNKNIGKVIIKL

SEQ ID NO: 20458 - protein, 361 aa, Oryza sativa
  unsure (1)..(361): unsure at all Xaa locations
MEQQQAAPMGWNRKVVLREYIAGRPPREDDMVLVDGGTVALRVPEAAAPAPAVLVKNLYLSCDPYMRGRMRDFHGSYIPPFKPGSVIEGLGVARVVDSTHPGFSAGDIVSGMTGWEEYSLIDRPXXQLSKIQQSDIPLSYHLGLLGMPGFTAYAGFYEICSPKKGEFVFVSAASGAVGQIVGQLAKLHGCYVVGSAGTNQKVELLKGKFGFDAAFNYKEEPDLAAALKRYFPEGIDMSFENVGGPMVEAVVLNMRTHGXRNAVCGMVSQNALTDPVGIHNIFSLYPKRIRMQGFIQSDHLHMFPQFVSDMAKHYRDGKIVYVEDMSIGLENAPAALVGLFSGKNVGKKVVCVSQELSQFTF

SEQ ID NO: 20459 - protein, 358 aa, Triticum aestivum
  unsure (1)..(358): unsure at all Xaa locations
MEQANPRAGSARNRKVVLRDYISRAPREDDMALVDGGAVPLRVPEGAAGPAVLVKNLYLSCDPYMRGRMRDFHGSYIPPFKPGSVIEGLGVARVVDSTHPGFVAGDIVSGMTGWEEYSLIDKPEQLNKIQQSDIPLSYHLGLLGMPGFTAYVGFYEFCSPKEAEFVFVSAASGAVGQIVGQLAKLHGCYVVGSAGTNEKVKLLKDKFGFDAAFNYKEEPDLTAALKRYFPEGIDIYFENVGGPMLDAVLLNMRMHGRIAVCGMVSQHGMTDPAGIHNLFCLVPKRISMKGFIQSDYINLFPQFLDYMTKHYKDGKIAYVEDMSIGLENTPAAFVGLFSGKNVGKQVVCVSQEXSTCTF

SEQ ID NO: 20460 - protein, 339 aa, Novosphingobium aromaticivorans
MERTQATTRQITLARRPTGIPVPEDFALVEVPRPVPGPGEILVRMRVGSCDPAIRGFLDDRPSYLPPVALGAPINGMSLGEVIESNNPDWPVGTLLRTFAVWSEYYVVGADALGIEKVEQAPGVPLQHYMGALGPVGLTAWVGLFEIGKAKAGETVLVSAAAGATGSTVVQLAKAAGCRVIGLAGGPDKARLVRELGADVAIDYKAVADLGAAIEEAAPDGIDVYFDNVGGETLDAVLPLMRLHGRIAVCGMIAQYNDADNPHGNRNLWQLVVNRLTMRGFITYDHPEVLGEAQAMLDRLFAEGKLKPLENVREGLEKLPEAFIDLMSGRTTGKTLVLV

SEQ ID NO: 20461 - protein, 340 aa, Novosphingobium aromaticivorans
MTVNRRFLLARRPHGTPVPEDFSLVEQTVPDAPEGGFVVRNCYASLDPAQRGWMDDAPSYMPPIPLGTPVRASTVGVVATSRNPDFAVGDWVLGLNGLEDYSVNEPGGFTMKVDPSVVQSPSRFLSAMGAVGLTAYFGLTEVAKPKPGETLLVSGAAGAVGSAVGQIGKILGCRVIGIAGGPAKCRRLIDDYGFDVAIDYKGKSVEQLAAEIREAAPGGADVVFENVGGDVMDAELLNLAKHARIVLCGLISEYNSPTKIGVRNLWQVLTQQATLFGYLIMDYAPRFAEGGAVMAQWMAEGRLRIDEDVQVGLENAYDAFMRLFTGANTGKLVLKIADGL

SEQ ID NO: 20462 - protein, 336 aa, Novosphingobium aromaticivorans
MTENRFWRLDRHPEGSDFASALSLQTETLPALGEGEVRVRVGWLSMDAGTRMWMSPRTDGYQPPLPLGSKMAGLVLGRVSESRDPAFPAGTLVRGFGQWADYATVVPALSGLEAVDDGIADIRQHFGALGMNAWTAFVGVREVAAISPGEWLVVSAAAGATGSMACQVGRNLGAKVVGIAGGAEKCRYLVEELGVDIAIDYKNEDVAARLAEVPGGVNAYFDNVGGPMLDAVLPNMAHYGRVAVCGMVAAYDNDAPLPGPARFDQVLMRRLRIEGFFIPDFLHRGAEFMPILREWVDAGKLTVRLNETVGLENVLEGYERMLSGKAIGKVIVKVGD

SEQ ID NO: 20463 - protein, 349 aa, Schizosaccharomyces pombe
MVSNNAVIIKKYLDSTAGYPVIGEHLAFEKREFDLENAQVDEETPVLLKNIYTSVDPYLRMRMQSPKHASYIPPLELGKPFYNSTVAKVVKSTLDQYKPGMDVVFVSGWEEYTFVSKQALGFLQPINNPYKLPLIDFVGSLGMPSQTAYCGLKHIGKPKAGETIYISAASGAVGQMAGQLAKAMGLHVVGSVGSDEKFKICLDSGYDSVFNYKKESPFKALPRLCPKGIDIYFENVGGETMDAVLENMNLQGRIIFCGAISQYNNPNPYRVKNLGMVLVKSLTIQGFIVANILPQYQEQYFEEMPKLIAEGKIKYKCDVYDGLESAPEAFIGMLQGKNSGKTIVKIADE

SEQ ID NO: 20464 - protein, 365 aa, Saccharomyces cerevisiae
MVLAKQWVLKNLPTPGEPFNFHFHDPACTFELIEKELSSEQLKDGELLLETTYLSNDPAQKFWISSMDKNYAKGVQPGEIIPARGIGKVLASRNKAFSPGDYVSAVTGWTTHAIISQENVQGLRKLDKNKVGKLWWYLSVLGGTSLTAYFIFFTYAQLQEREEDYGKVYLISGAAGAVGTVCIQLALNVFKASKVIAIAGGPEKVAFVESFGDNVVGVDYKDPSFKQKLIEAAGGENTVDYFIDNVGSNVLEAGVLLLKQRAMLIACGAISAYNDPSKFVFKGYSFILTKRLVVKGVLVTDNIDDFPKALDKLGSLVKHGKIDLLKSATLEDGTGDKFKNVPLIWKGLFSGVNKGKLITKVNNEE

SEQ ID NO: 20465 - protein, 189 aa, Desulfitobacterium hafniense
ALAEGQVLVRHHYLSLDPYMRGRMNDSKSYAQPQPLGEVMIGGTVGEVVESRHPKFAVGDKVVGMGGWQEYSVVDGDAPGMLRKVDTTHVPLSHYLGAVGMPGVTAWYGLVKIIAPKAGETVVVSAATGAVGSAFAALAKARGCRVVGIAGGPEKCRYATEELGFDACIDYREHPDTKTMAKALKDACP

SEQ ID NO: 20466 - protein, 352 aa, Cochliobolus heterostrophus
MYQNKSLIFKNPPIGWPKPDVDFGVECRPIDINGDIPLGGVILKNCYVSLDPYQRGRMRAPTVDSYSPPFTIGDPMEGHVISRVIRSASTKLQPGDFVSGVGPIQEFSVLSAGVVDGFTRIENPYNLNLEIFLGPLGMPGLTAYSSFYEIGKPKKGETIFISAASCAVGQLVGQLAKREGLYVIGSVGDDEKVEFITKGLGFDVGFNYKKEVIGEALMRVAPEGIDIYFDNVGGQTLESALYAMRPRGRIVVSGMISQYNLQPSELYGVKNLFMVITNRITIQGFIVTDSDMGPKYSAEHLKNVSQWIYDGSLKPKIHVDTGMDHACQSFINMLKGRKIGKAVLQIADLNGD

SEQ ID NO: 20467 - protein, 362 aa, Neurospora crassa
MAPTHNKTLVFKKIPEGYPVPGEHIVIEDRGFDPDAAPPPGGMTVSILWASFDPYQRGRMRDASVKSYAPAYQLGGPVTNDTVAKVLKSDNPDYQPGDLVVAHLPIAEYAALTKTEVGSVMGGIVGQVVQTKIDNKYGFKDLGLFLGPLGMPGLTAWSSYKEIGQPKAGETIFISSAAGAVGQVVGQIAKREGLKVIGSVGAGEKLDFIINELGFDGGFNYKKEKPLDALKRLAPQGIDIYYENVGGEHLDAALECLNTFGRIVACGMISQYNVKPGEAYGVKNLIQVVAKRLTMRGFIVFDKDFGPKYAKEHQEQLSKWIAEGSVKFKLHVTEGIDNAPKGLVGIFKGENFGKAVLHIKDE

SEQ ID NO: 20468 - protein, 353 aa, Escherichia coli
MPKAQESIMGQQKQRNRRWVLASRPHGAPVPENFRLEEDDVATPGEGQVLLRTVYLSLDPYMRGRMSDEPSYSPPVDIGGVMVGGTVSRVVESNHPDYQSGDWVLGYSGWQDYDISSGDDLVKLGDHPQNPSWSLGVLGMPGFTAYMGLLDIGQPKEGETLVVAAATGPVGATVGQIGKLKGCRVVGVAGGAEKCRHATEVLGFDVCLDHHADDFAEQLAKACPKGIDIYYENVGGKVFDAVLPLLNTSARIPVCGLVSSYNATELPPGPDRLPLLMATVLKKRIRLQGFIIAQDYGHRIHEFQREMGQWVKEDKIHYREEITDGLENAPQTFIGLLKGKNFGKVVIRVAGDD

SEQ ID NO: 20469 - protein, 340 aa, Leishmania mexicana amazonensis
MSSPSNFKKLQVVSLSKDFRSSTSVVEAHLPEEVPEGMVRVSVKYAGVNASDLNFTNGSYFKNVQPPFDCGFEAAGTVVQIGAGVANVKVGDHVVLMQYGCFAEFLDAPAERCIPVPELKPEYSVLPVSALTAAVALGEVGRVKKGDVALVTAAGGGTGQIAVQLFKHVYGCTVIGTCSSEEKAEFLKSIGCDHVINYKTESLDGRLHELCPKGVDVVYECVGGHTFNDAVRHVAVHGRVVIIGSISSYKSGEVVPFSDPSGTSVTMLLLVKSASLNGFFLPQFHDVIPKYMANLLQYLKAGQVKLFVDKKVFHGLSSVADAVDHLYSGANYGKVLVEIQ

SEQ ID NO: 20470 - protein, 340 aa, Leishmania mexicana amazonensis
MSSPSNFKKLQVVSLSKDFRSSTSVVEAHLPEEVPEGMVRVSVKYAGVNASDLNFTNGSYFKNVQPPFDCGFEAAGTVVQIGAGVANVKVGDHVVLMQYGCFAEFLDAPAERCIPVPELKPEYSVLPVSALTAAVALGEVGRVKKGDVALVTAAAGGTGQIAVQLLKHVYGCTVIGTCSSEEKAEFLKSIGCDHVINYKTESLDGRLHELCPKGVDVVYECVGGHTFNDAVRHVAVHARVVIIGSISSYKSGEVVPFSDPSGTSVTMLLLVKSASLNGFFLPQFHDVIPKYMANLLQYLKAGQVKLFVDKKVFHGLSSVADAVDHLYSGANYGKVLVEIQ

SEQ ID NO: 20471 - protein, 342 aa, Leishmania major
MAAAARTYRHIVARELSTNFRAVASIVEAPFPTVLHPKAILVKNKYLGVNASDINFTAGIYQPDVRPPFACGFEAVGEVVDVGSGVKDLKAGAAVVTQSYGAFAEYQVVARRHAKPIPRVAREYLPLDLSATTASIALEHVLKPQPGERAVVTAAAGGTGQFAVQLLKHVYGCSVVGTCSSPSKEVFLTNTLKCDGVVNYKAEGGDTAAAFLRCYPRGVNIAYESVGGDLLEAVIQSLAPRGRILSLGCVSTYQCGSIEAACPSRKPLPLQLLAKSASLSTFFLPHFAKYGQLHFDRLCALHEQGLVQCCIDPTTFEGLEGVYDAIDWMFEQKNCGKVMVEL

SEQ ID NO: 20472 - protein, 335 aa, Geodia cydonium
MATKIRKYVLRSHFSGFPQRDALEIVEEELPPIKDGEFLCEAQWISVDPYMRPYTSRLPLGITMIGTQVAKVVESKNDKYSPGDLVSSNFGWVTHTISDGVQQWGGKQGPVLKLDPAIHSSPSTALGVLGMPGATSYFGFLEICQPKKGETLVVNGGAGAVGSLVGQIAKLKGCRVVGFAGSDAKVKYMLDLGFDAAYNYKTVESLDAAIKESCPNGVDLFFDNVGGEFFEVTLSNMNEFGRVSVCGAISLYNATEKPKFRSVSEIILFKQLKVEGFIVARWLDQWPKAFKEISEWIKEGKVKYDEHVTEGFDNMFDAFAGLFTGDNTGKAIVKI

SEQ ID NO: 20473 - protein, 529 aa, Caenorhabditis elegans
MRIFQARQMTSSSSSAHQPLPADNKVVIFVKRPGENNAPTIDCFDVVPIDSPSEKDITSDQCIVRTLFLSVDPAQRCRMNPSTGVDYLGPYEIGEPVDGMEGVGVVERVGSACTLEVGDLVTGCIRLWTWTKYFVCDSSDLVKVNLPSSRNFSPSVILSCAGLSGITALLGIRKKALIDRSRPQTIVVSGAAGSCGSLAGQIARIEGCSKVIGICGSDDKCTVLKREFGFNDTINYKTENVSERLGHLAPEGIDIYWDNVGGVISDDVIRAMNNEGRVVLCGQIAVYNTDLPYPPPLPEHTTKIIKERNIQRERYLVLMYKDEIDEAVAQLSEWLQQDKIKVKETIYDGLNAAPSAFVDMMNGKNIGKMLIHFSHYEKLNFFPKFKNFRFFFGKNSVKEIIMEVLKTRETMLTNQEVLSFLNALKKEEDNKQQHERCKQLSTVIYETKKYLNTSPAVTQNEAVICELIPKLAPFKLTGAETLQVINLRPSTTADIQLLIEETEERFPSEEDLEKLVSTVSECLPPPPKR

SEQ ID NO: 20474 - protein, 340 aa, Nostoc punctiforme
MSDLMNKQIILKSRPVGEPKESDFALVETPTPEPGEGEILSRTIYLSLDPYMRGRLSASESYAASVELNSAIVGGTVSQVVKSNHPQFQVGDFILSNNGWQTYAVSKAETLRKLDPTQAPLSYSLGVLGMPGLTAYAALLDIGQPKEGETVVVSAASGAVGAVAGQIAKIKGARVVGIVGSDDKRDYIVKELGFDVGINRKTQELDSALKEAAPNGIDVYYDNTAGVILETVLQQINLGARIPLVGLISEYNATSTPSGPNLMPLLVKRALIKGFLVTDYQHRFNDFLRDVSGWLQSGQLKYKEDVVMGLENAPHAFIGLLRGDNFGKLIVKVNDDPTAK

SEQ ID NO: 20475 - protein, 343 aa, Nostoc punctiforme
MTRAINRQFLLAARPVGDIKESDFEYREEPIPSPKDDEVLVRTIYLSLDPTNRIWMSDMEQYMPPVEIGEVMRGGIIGVVEESKNPNFKKGDLVSGLLGWQDYAIALGSSGFSLTRLPNPLPCPLNAFTGPLGATGFTAYFGLLDIGQPKVGETVVVSAAGGAVGSIVGQIAKIKGCRVVGITGSDEKCRWLTEELGFDAAINYKTGDLEKALAQACPNGIDVYFDNVGGIILDAVLTKINLRARLPLCGLISTYNASKPVPGPYNYSQILMKRALVQGFIILDYIPRFHEAIAEIGKWLNQGQIKYALEIVEGLENAPKAILKLFDGNKKGKLVIKVSNEPT

SEQ ID NO: 20476 - protein, 380 aa, Halobacterium sp. NRC-1
MHDRAAVNTYGCLPGVPVLGARSRTPEGAAGSVTTLPLGVVDDCMRDTSREWVFAERPEGEPDMDSFELRERDVPEPRHGELLVRVRYLSVDPYMRGRMRDSDSYADPWTVGEPLSGGVVGEVVESESDAYEAGDLVSGNGTWADYSLLDAANVAPVDPSVADLPAYLGVLGMPGRTAYFGLLEVGAPKPGDTVVVSGAAGAVGSVVGQIAKHNGCRVVGFAGSEEKVDWLTEDLGFDAGINYKQVDDYSAALDDAAPDGVDVYFDNVGGPISDAVFTKLNVDARVAVCGQIAHYNNEDVPTGPRKLPQLIAPRAKVQGLLVGDFATRFGEASEQLGQWVAAGDIEHRETVVSGLENAPDAFLGLFSGDNIGKQVVGVSE

SEQ ID NO: 20477 - protein, 376 aa, Escherichia coli K12
MLQRGCDGCKQNQSREPATIDGFMPKAQESIMGQQKQRNRRWVLASRPHGAPVPENFRLEEDDVATPGEGQVLLRTVYLSLDPYMRGRMSDEPSYSPPVDIGGVMVGGTVSRVVESNHPDYQSGDWVLGYSGWQDYDISSGDDLVKLGDHPQNPSWSLGVLGMPGFTAYMGLLDIGQPKEGETLVVAAATGPVGATVGQIGKLKGCRVVGVAGGAEKCRHATEVLGFDVCLDHHADDFAEQLAKACPKGIDIYYENVGGKVFDAVLPLLNTSARIPVCGLVSSYNATELPPGPDRLPLLMATVLKKRIRLQGFIIAQDYGHRIHEFQREMGQWVKEDKIHYREEITDGLENAPQTFIGLLKGKNFGKVVIRVAGDD

SEQ ID NO: 20478 - protein, 345 aa, Salmonella enterica subsp. enterica serovar Typhi
MKQQTNRNRRWVLASRPHGAPQMDNFRLEEDDVATPGEGQVLLRTVFLSLDPYMRGRMSDEPSYAPPVEPGCVMVGGTVSRVVASNHPDYRPDEWVLSYNGWQDYDISDGEGLVKLGDNPQHPSWSLGVLGMPGFTAYMGLLDIGQPKEGETLVVAAATGPVGATVGQIGKLKGCRVVGIAGGAEKCRHATDVLGFDLCLDHHADNFPQQLAQACPQGIDIYYENVGGKVFDAVLPLLNTSARIPLCGLVSGYNATTLPDGPDRLPLLMATLLKKRIRLQGFIINQDYGHRIHEFQQEMGRWIKEGKIHYREQITDGLENAPEAFIGLLAGKNFGKVVIRLADDA

SEQ ID NO: 20479 - protein, 329 aa, Homo sapiens
MVRTKTWTLKKHFVGYPTNSDFELKTSELPPLKNGEVLLEALFLTVDPYMRVAAKRLKEGDTMMGQQVAKVVESKNVALPKGTIVLASPGWTTHSISDGKDLEKLLTEWPDTIPLSLALGTVGMPGLTAYFGLLEICGVKGGETVMVNAAAGAVGSVVGQIAKLKGCKVVGAVGSDEKVAYLQKLGFDVVFNYKTVESLEETLKKASPDGYDCYFDNVGGEFSNTVIGQMKKFGRIAICGAISTYNRTGPLPPGPPPEIVIYQELRMEAFVVYRWQGDARQKALKDLLKWVLEGKIQYKEYIIEGFENMPAAFMGMLKGDNLGKTIVKA

SEQ ID NO: 20480 - protein, 329 aa, Homo sapiens
MVRTKTWTLKKHFVGYPTNSDFELKTAELPPLKNGEVLLEALFLTVDPYMRVAAKRLKEGDTMMGQQVAKVVESKNVALPKGTIVLASPGWTTHSISDGKDLEKLLTEWPDTIPLSLALGTVGMPGLTAYFGLLEICGVKGGETVMVNAAAGAVGSVVGQIAKLKGCKVVGAVGSDEKVAYLQKLGFDVVFNYKTVESLEETLKKASPDGYDCYFDNVGGEFSNTVIGQMKKFGRIAICGAISTYNRTGPLPPGPPPEIVIYQELRMEAFVVYRWQGDARQKALKDLLKWVLEGKIQYKEYIIEGFENMPAAFMGMLKGDNLGKTIVKA

SEQ ID NO: 20481 - protein, 351 aa, Homo sapiens
MIVQRVVLNSRPGKNGNPVAENFRMEEVYLPDNINEGQVQVRTLYLSVDPYMRCRMNEDTGTDYITPWQLSQVVDGGGIGIIEESKHTNLTKGDFVTSFYWPWQTKVILDGNSLEKVDPQLVDGHLSYFLGAIGMPGLTSLIGIQEKGHITAGSNKTMVVSGAAGACGSVAGQIGHFLGCSRVVGICGTHEKCILLTSELGFDAAINYKKDNVAEQLRESCPAGVDVYFDNVGGNISDTVISQMNENSHIILCGQISQYNKDVPYPPPLSPAIEAIQKERNITRERFLVLNYKDKFEPGILQLSQWFKEGKLKIKETVINGLENMGAAFQSMMTGGNIGKQIVCISEEISL

SEQ ID NO: 20482 - protein, 311 aa, Homo sapiens
MVRTKTWTLKKHFVGYPTNSDFELKTAELPPLKNGEVLLEALFLTVDPYMRVAAKRLKEGDTMMGQQVAKVVESKNVALPKGTIVLASPGWTTHSISDGKDLEKLLTEWPDTIPLSLALGTVGMPGLTAYFGLLEICGVKGGETVMVNAAAGAVGSVVGQIAKLKGCKVVGAVGSDEKVAYLQKLGFDVVFNYKTVESLEETLKKASPDGYDCYFDNVGGEFSNTVIGQMKKFGRIAICGAISTYNRTGPLPPGPPPEIVIYQELRMEAFVVYRWQGDARQKALKDLLKWVLEGKIQYKEYIIEGFENMPR

SEQ ID NO: 20483 - protein, 329 aa, Sus scrofa
MVRAKSWTLKKHFVGYPTPSNFELKTVELPPLKNGEVLLEALFLTVDPYMRIAARKLKEGDMMMGEQVARVIESKNAAFPTGTIVVALLGWTTHSISDGKNLERLLAEWPDTLPLSLALGTVGMPGLTAYFGLLDICGLKGGETVMVNAAAGAVGSVVGQIAKLKGCKVVGAAGSDEKVACLKKYGFDVAFNYKTIESLEETLKKASPEGYDCYFDNVGGEFSNAVTSQMKKFGRIAICGAISTYNRTGPPPPGPPPEVVIYNELCFQGFIVTRWQGEVRQKALRDLLKWVSEGKIQYHEHITEGFENMPAAFMGMLKGENLGKAIVKA

SEQ ID NO: 20484 - protein, 329 aa, Sus scrofa
MVRAKSWTLKKHFVGYPTPSNFELKTVELPPLKNGEVLLEALFLTVDPYMRIAARKLKEGDMMMGEQVARVIESKNAAFPTGTIVVALLGWTTHSISDGKNLERLLAEWPDTLPLSLTLGTVGMPGLTAYFGLLDICGLKGGETVMVNAAAGAVGSVVGQIAKLKGCKVVGAAGSDEKVACLKKYGFDVAFNYKTIESLEETLKKASPEGYDCYFDNVGGEFSNAVTSQMKKFGRIAICGAISTYNRTGPPPPGPPPEVVIYNELCFQGFIVTRWQGEVRQKALRDLLKWVSEGKIQYHEHITEGFENMPAAFMGMLKGENLGKAIVKA

SEQ ID NO: 20485 - protein, 356 aa, Salmonella typhimurium LT2
MMDYARHEENRMKQQTNRNRRWVLASRPHGAPQMDNFRLEEDDVATPGEGQVLLRTVFLSLDPYMRGRMSDEPSYAPPVEPGCVMVGGTVSRVVASNHPDYRPDEWVLSYNGWQDYDISDGEGLVKLGDNPQHPSWSLGILGMPGFTAYMGLLDIGQPKEGETLVVAAATGPVGATVGQIGKLKGCRVVGIAGGAEKCRHATDVLGFDLCLDHHADNFPQQLAQACPQGIDIYYENVGGKVFDAVLPLLNTSARIPLCGLVSGYNATALPDGPDRLPLLMATLLKKRIRLQGFIINQDYGHRIHEFQQEMGRWIKEGKIHYREQITDGLENAPEAFMGLLAGKNFGKVVIRLADDA

SEQ ID NO: 20486 - protein, 349 aa, Oryctolagus cuniculus
MVRAKNWTLKKHFHGHPTDSDFELKTVELPPLNNGEVLLEALFLSVDPYMRLGSKRLKEGDTMMGQQVARVVESKNPAWPVGTLVLAHSGWASHSISDGQQLEKLLTEWPDTLPLSLALGTVGMPGITAYFGLLEICGAKSGDTVLVNAAAGAVGAVVGQIAKIKGCRVVGAAGSEEKVDYLKKIGFDFAFNYKTVKSLEETLKKAAPDGYDCYFDNVGGEFSNTVIRQMKKFGRVAICGAISMYNSTGQLPPGPSPESVLYQEIRMEGFIFNRWKGEVGQKALKELLTWVLEGKIQYREFVIEGFENMPAAFMRMLKGENVGKARSESLKSGTCKPGDHPHDLIFPIT

SEQ ID NO: 20487 - protein, 345 aa, Arabidopsis thaliana
MTATNKQVILKDYVSGFPTESDFDFTTTTVELRVPEGTNSVLVKNLYLSCDPYMRIRMGKPDPSTAALAQAYTPGQPIQGYGVSRIIESGHPDYKKGDLLWGIVAWEEYSVITPMTHAHFKIQHTDVPLSYYTGLLGMPGMTAYAGFYEVCSPKEGETVYVSAASGAVGQLVGQLAKMMGCYVVGSAGSKEKVDLLKTKFGFDDAFNYKEESDLTAALKRCFPNGIDIYFENVGGKMLDAVLVNMNMHGRIAVCGMISQYNLENQEGVHNLSNIIYKRIRIQGFVVSDFYDKYSKFLEFVLPHIREGKITYVEDVADGLEKAPEALVGLFHGKNVGKQVVVVARE

SEQ ID NO: 20488 - protein, 350 aa, Arabidopsis thaliana
MATSGNATVANKQVILRDYVTGFPKESDLIFTDSTIDLKIPEGSKTVLVKNLYLSCDPYMRIRMGKPDPGTAALAPHYIPGEPIYGFSVSKVIDSGHPDYKKGDLLWGLVGWGEYSLITPDFSHYKIQHTDVPLSYYTGLLGMPGMTAYAGFYEICSPKKGETVFVSAASGAVGQLVGQFAKIMGCYVVGSAGSNEKVDLLKNKFGFDDAFNYKAEPDLNAALKRCFPEGIDIYFENVGGKMLDAVLLNMKLHGRIAVCGMISQYNLEDQEGVHNLANVIYKRIRIKGFVVSDYFDKHLKFLDFVLPYIREGKITYVEDVVEGLENGPSALLGLFHGKNVGKQLIAVARE

SEQ ID NO: 20489 - protein, 345 aa, Arabidopsis thaliana
MTATNKQVILKDYVSGFPTESDFDFTTTTVELRVPEGTNSVLVKNLYLSCDPYMRIRMGKPDPSTAALAQAYTPGQPIQGYGVSRIIESGHPDYKKGDLLWGIVAWEEYSVITPMTHAHFKIQHTDVPLSYYTGLLGMPGMTAYAGFYEVCSPKEGETVYVSAASGAVGQLVGQLAKMMGCYVVGSAGSKEKVDLLKTKFGFDDAFNYKEESDLTAALKRCFTNGIDIYFENVGGKMLDAVLVNMNMHGRIAVCGMISQYNLENQEGVHNLSNIIYKRIRIQGFVVSDFYDKYSKFLEFVLPHIREGKITYVEDVADGLEKAPEALVGLFHGKNVGKQVVVVARE

SEQ ID NO: 20490 - protein, 343 aa, Arabidopsis thaliana
MTTNKQVIFKDHVSGFPKESDFNFTTTTVELRVPEGSKSVLVKNLYLSCDPYMRSRMGKPDPSSALAQAYAPGKPIYGYGVSRVIESGHPDYKKGDLLWGIVGWEEYSVITPMAHMHFKIQHTDVPLSYYTGLLGMPGMTAYAGFYEVCSPKKGETVYVSAASGAVGQLVGQFAKMMGCYVVGSAGSKEKVDLLKTKFGFDDAFNYKEESDLSAALKRCFPKGIDMYFENVGGKMLDAVLLNMNPHGRIAVCGMISQYNLENQEGVHNLSNIIYKRIRIQGFVVADFYDKYPKFLELVLPRIKEGKITYVEDVADGLEKAPEALVGLFHGKNVGKQVVVIARE

SEQ ID NO: 20491 - protein, 351 aa, Arabidopsis thaliana
MTNAEAVTVTNKQIIFPDYVTGFPKESDLKITTTTIDLRLPEGSTSVLVKNLYLSCDPYMRICMGKPDPLSSSLVPPYKTGVPIIGLGVSKVIDSGHPDYKKGDLLWGLVGWEEYSVITLTTYSHFKIEHTDVPLSYYTGLLGMPGMTAYAGFYEVCSPKKGETVFVSAASGAVGQLVGQFAKLMGCYVVGSAGSKEKVDLLKTKFGFDDAFNYKEEKDFSAALKRYFPEGIDIYFENVGGKMLDAVLINMKLHGRVAVCGMISQYNLVDPEGVHNLPTILYKRIQLQGFGVCDFYDKYPKFLDFVLPYIREGKITYVEDIAEGFESGPSALLGLFEGKNVGKQLFVVARE

SEQ ID NO: 20492 - protein, 345 aa, Arabidopsis thaliana
MTATNKQVVLKNYVSGFPKESDFDFKTTTVEFKLPGGSNSVLVKNLYLSCDPYMRIRMGKPDPSTAALAQAYAPGKPIFGYGVSRVIESGHPDYKKGDLLWGIVGWEEYSVITPMTHMHFKIQHTDIPLSYYTGLLGMPGMTAYAGFYEVCSPKEGETVYVSAASGAVGQLVGQFAKMMGCYVVGSAGSTEKVDLLKTKFGFDDAFNYKEEPDLSAALKRCFPTGIDIYFENVGGKMLDAVLLNMNPHGRIAVCGMISQYNLENQEGVHNLSNIIYKRIRIQGFAVFDFYEKYSKFLDFVLPHIKEGKITYVEDVADGLEKGPEALVGLFHGKNVGKQVVVIARE

SEQ ID NO: 20493 - protein, 343 aa, Arabidopsis thaliana
  unsure (1)..(343): unsure at all Xaa locations
MTTNKQVIFKDHVXXFPKESDFNFTTTTVELRVPEGSKSVLVKNLYLSCDPYMRSRMGKPDPSSALAQAYAPGKPIYGYGVSRVIESGHPDYKKGDLLWGIVGWEEYSVITPMAHMHFKIQHTDVPLSYYTGLLGMPGMTAYAGFYEVCSPKKGETVYVSAASGAVGQLVGQFAKMMGCYVVGSAGSKEKVDLLKTKFGFDDAFNYKEESDLSAALKRCFPKGIDMYFENVGGKMLDAVLLNMNPHGRIAVCGMISQYNLENQEGVHNLSNIIYKRIRIQGFVVSDFYDKYPKFLELVLPRIKEGKITYVEDVADGLEKAPEALVGLFHGKNVGKQVVVIARE

SEQ ID NO: 20494 - protein, 351 aa, Arabidopsis thaliana
MTNAEAVTVTNKQIIFPDYVTGFPKESDLKITTTTIDLRLPEGSTSVLVKNLYLSCDPYMRICMGKPDPLSSSLVPPYKTGVPIIGLGVSKVIDSGHPDYKKGDLLWGLVGWEEYSVITLTTYSHFKIEHTDVPLSYYTGLLGMPGMTAYAGFYEVCSPKKGETVFVSAASGAVGQLVGQFAKLMGCYVVGSAGSKEKVYLLKTKFGFDDAFNYKEEKDFSAALKRYFPEGIDIYFENVGGKMLDAVLINMKLHGRVAVCGMISQYNLVDPEGVHNLPTILYKRIQLQGFGVCDFYDKYPKFLDFVLPYIREGKITYVEDIAEGFESGPSALLGLFEGKNVGKQLFVVARE

SEQ ID NO: 20495 - protein, 345 aa, Arabidopsis thaliana
MTATNKQVVLKNYVSGFPKESDFDFKTTTVEFKLPGGSNSVLVKNLYLSCDPYMRIRMGKPDPSTAALAQAYAPGKPIFGYGVSRVIESGHPDYKKGDLLWGIVGWEEYSVITPMTHMHFKIQHTDIPLSYYTGLLGMPGMTAYAGFYEVCSPKEGETVYVSAASGAVGQLVGQFAKMMGCYVVGSAGSTEKVNLLKTKFGFDDAFNYKEEPDLSAALKRCFPTGIDIYFENVGGKMLDAVLLNMNPHGRIAVCGMISQYNLENQEGVHNLSNIIYKRIRIQGFAVFDFYEKYSKFLDFVLPHIKEGKITYVEDVADGLEKGPEALVGLFHGKNVGKQVVVIARE

SEQ ID NO: 20496 - protein, 342 aa, Arabidopsis thaliana
MTTNKQVIFKDHVSFPKESDFNFTTTTVELRVPEGSKSVLVKNLYLSCDPYMRSRMGKPDPSSALAQAYAPGKPIYGYGVSRVIESGHPDYKKGDLLWGIVGWEEYSVITPMAHMHFKIQHTDVPLSYYTGLLGMPGMTAYAGFYEVCSPKKGETVYVSAASGAVGQLVGQFAKMMGCYVVGSAGSKEKVDLLKTKFGFDDAFNYKEESDLSAALKRCFPKGIDMYFENVGGKMLDAVLLNMNPHGRIAVCGMISQYNLENQEGVHNLSNIIYKRIRIQGFVVADFYDKYPKFLELVLPRIKEGKITYVEDVADGLEKAPEALVGLFHGKNVGKQVVVIARE

SEQ ID NO: 20497 - protein, 358 aa, Arabidopsis thaliana
MTATNKQVVLKNYVSGFPKESDFDFKTTTVEFKLPGGSNSVLVKNLYLSCDPYMRIRMGKPDPSTAALAQAYAPGKPIFGYGVSRVIESGHPDYKKGDLLWGIVGWEEYSVITPMTHMHFKIQHTDIPLSYYTGLLGMPGMTAYAGFYEVCSPKEGETVYVSAASGAVGQLVGQFAKMMGCYVVGSAGSTEKVDLLKTKFGFDDAFNYKEEPDLSAALKRFSELLISKRLMSLTVRIGIDIYFENVGGKMLDAVLLNMNPHGRIAVCGMISQYNLENQEGVHNLSNIIYKRIRIQGFAVFDFYEKYSKFLDFVLPHIKEGKITYVEDVADGLEKGPEALVGLFHGKNVGKQVVVIARE

SEQ ID NO: 20498 - protein, 353 aa, Arabidopsis thaliana
MANIGVVTTATNNQVILRNYVSGFPKESDLYIAATTVDLRVPPGSMAVLVKNLYLSCDPFSRIRMEKPDPSSPASLARAYSIGKPISGYGVAKAIDSGHPNYKTGDLLWGRVGWEEYSVINPTPSSHFKIHHADVPLSFYTGLLGIPGLTAYVGFYEICSPKKGETVFVSAASGAVGQLVGQFAKMAGCYVVGSASSKEKVDLLKTKFGYDDAFNYKEEHDLSAALKRCFPEGIDIYFENVGGKMLEAVLENMRTHGRIAACGMISQYNLKEPEGVHNLASIVYKRIRVQGFAAVEFFDKYSKFLDFILPYVREGKITYVEDIAQGLENGPSALIGLFHGKNVGKQLVAVARE

SEQ ID NO: 20499 - protein, 353 aa, Arabidopsis thaliana
MANISVVTTATNNQVILRNYVSGFPKESDLYIAATTVDLRVPPGSMAVLVKNLYLSCDPFSRIRMEKPDPSSPASVARAYSIGKPISGFGVAKAIDSCHPNYKTGDLLWGRVGWEEYSVITPTPSSHFKIHHTDVPLSFYTGLLGIPGLTAYVGFYEICSPKKGETVFVSAASGAVGQLVGQFAKMAGCYVVGSASSKEKVDLLKTKFGYDEAFNYKEEHDLSAALKRCFPEGIDIYFENVGGKMLDAVLENMRTHGRIAACGMISQYNLKEPEGVHNLASIVYKRIRVQGFAAVEFFDKYSKFLDFILPYVREGKITYVEDIAQGLENGPSALIGLFHGKNVGKQLVAVARE

SEQ ID NO: 20500 - protein, 353 aa, Arabidopsis thaliana
MANICIATTATNNQVILRDYVSGFPKQSDLYIATTTIDLRVPPGSMAVLVKNLYLSCDPHSRTRMGKPDPSSQASMAHAFTIGKPISGFGVAKAIDSGHPNYKTGDLLWGRVGWEEYSVITPTPSSHFKIHHTDVPLSFYTGLLGIPGLTAYVGFYEICSPKKGETVFVSAASGAVGQLVGQFAKMAGCYVVGSASSKEKVDLLKTKFGYDDAFNYKEEKDLSAALKRCFPEGIDIYFENVGGKMLDAVLQNMRTHGRIAACGMISQYNLKEPEGLHNTATIVHKRIRVQDFAAVEFFDRYSKFLDFILPHVREGKITYVEDIAQGLENGPSALIGLFHGKNVGKQLVEVARE

SEQ ID NO: 20501 - protein, 346 aa, Arabidopsis thaliana
MATKINKQVVLLDYVTGFAKESDLVITSTTIDLRVPKGSMTALVKNLYLSCDPYMRNRMRKPDPLSPATAQSFTPGKPISGFGVSKVIDSGHSDYEEGDLIWGAVGWEEYSVITPIPNLHFKIHHTNFPLSYYTGLLGMPGMTAYVGFYEICTPKKGDTVFVSAASGAVGQLVGQFAKLMGCYVVGSAGSKEKVDLLKNKFGFDDAFNYKEEHNLIGALKRCFPEGIDIYFENVGGKMLDAVILNMRPHGRIAACGMISQYNLKNPEGIYGLSLITYKRIRIEGFNCFDYFHKYSEFLEFVVPYIKEGKIKYVEDVADGLESAPAALVGLFHGKNVGKQLVLVSPS

SEQ ID NO: 20502 - protein, 346 aa, Arabidopsis thaliana
MATTINKQVVLLDYVTGFAKESDLVITSTTIDLRVLKGSMTALVKNLYLSCDPYMRNRMRKPDPLSPATAQSFTPGKPISGFGVSKVIDSGHSDYEEGDLIWGAVGWEEYSVITPIPNLHFKIHHTNFPLSYYTGLLGMPGMTAYVGFYEICTPKKGDTVFVSAASGAVGQLVGQFAKLMGCYVVGSAGSKEKVDLLKNKFGFDDAFNYKEEHNLIGALKRCFPEGIDIYFENVGGKMLDAVILNMRPHGRIAACGMISQYNLKNPEGIYGLSLITYKRIRIEGFNCFDYFHKYSEFLEFVVPYIKEGKIKYVEDVADGLESAPAALVGLFHGKNVGKQLVVVSPS

SEQ ID NO: 20503 - protein, 353 aa, Arabidopsis thaliana
MANICIATTATNNQVILRDYVSGFPKESDLYIAAATVDLRVPPGSMAVLVKNLYLSCDPHSRTRMGKPDPSSPTSMAHAFTIGKPISGFGVAKAIHSCHPNYKTGDLLWGRVGWEEYCVISPTPSSHFKIHHTDVPLSFYTGILGIPGLTAYVGFYEICSPKKGKTVFVSAASGAVGQLVGQFAKMVGCYVVGSASSKEKVDLPKTKFGYDDAFNYKEEQDLSAALKRCFPKGIDIYFENVGGKMLDAVLQNMRTHGRIAACGMISQYNLKESEVLHNTATIVHKRIRVQGFAAVEFFDRYSKFLDFILPHVREGKITYVEDIAQGLENGPSALIGLFHGKNVGKQLVEVARE

SEQ ID NO: 20504 - protein, 353 aa, Arabidopsis thaliana
MANIGVVTTATNNQVIFRNYVNGFPKESDLYIAASTVDLRVPPGSMAVLVKNLYLSCDPHSRTRMGKPDPSSPASMAHAFTIGKPISGFGVAKAIDSGHPNYKTGDLLWGRVGWEEYSVITPTPSSHFKIHHTDVPLSFYTGLLGIPGLTAYIGFYEICSPKKGETVFVSAASGAVGQLVGQFAKMAGCYVVGSASSEEKVDLLKTKFGYDDAFNYKEEKDLSAALKRCFPEGIDIYFENVGGKMLEAVLENMRTHGRIAACGMISQYNLKKPEVLHNTATIVHKRIRVQGFAAVEFFDRYSKFLDFILPHVREGKLTYVEDISQGLENGPSALIGLFHGKNVGKQLVEVARV

SEQ ID NO: 20505 - protein, 311 aa, Arabidopsis thaliana
MTTATNKQVILKDYVSGFPTESNFDFTTTTVELRVPEGTNSVLVKNLYLSCDPYMRICMGKPNPSTAALAQAYTPGQCYHLTHEHFKIQHTDVPLSYYTGLLGMPGMTAYVGFYEICSPKKGETVYVSAASGAVGQLVGQFAKMMGCYVVGSAGSKEKVDLLKTKFGFDYAFNYKEEPDLSAALKRCFPNGIDIYFENVGGKMLDAVLMNMNMHGRIAVCGMISQYNLENQEGVHNLSNIIYKRIRIQGFVVSDFYDEYSKFLEFLHPHIKEGKITYVEDVADGLEKGPEALVGLFHGKNVGKQVVVIARE

SEQ ID NO: 20506 - protein, 346 aa, Arabidopsis thaliana
METTVKNKQVILRNYVKGIPKESDLMIITASDPVELKVKPGSAAVMVRNLYLSCDPYMGILMREPTPSTLALLDAFIPGKPIAGIGVSQVIDSDDPSFTKGDMIWGIVNWEEFSTINPAAIFKIDVNINVPLSYYTGILGMIGLTAYAGFFEICSPKKGDTVFVSAASGAVGQLVGQFAKLMGCYVVGSAGSKQKVDLLLNKFGYDDAFNYKEEPDLDSALKRCVPKGIDIYFENVGGKMLDAVLLNMKTYGRIAVCGMISQYHLETRDRLQNLPDIIFKKIRMQGFASYDFIDRFPKFLEFVLPYIKEEKLAYVEDIVEGLENGPAALVGLLHGKNVGKQVLKVA

SEQ ID NO: 20507 - protein, 462 aa, Arabidopsis thaliana
METTVKNKQVILRNYVKGIPKESDLMIITASDPVELKVKPGSAAVMVRNLYLSCDPYMGILMREPTPSTLALLDAFIPGKPIAGIGVSQVIDSDDPSFTKGDMIWGIVNWEEFSTINPAAIFKIDVNINVPLSYYTGILGMIGLTAYAGFFEICSPKKGDTVFVSAASGAVGQLVGQFAKLMGCYVVGSAGSKQKVDLLLNKFGYDDAFNYKEEPDLDSALKRCVPKGIDIYFENVGGKMLDAVLLNMKTYGRIAVCGMISQYHLETRDRLQNLPDIIFKKIRMQGFASYDFIDRFPKFLEFVLPYIKEEKLAYVEDIVEGLENGPAALVGLLHGKNVGKQVLKGKKINPNSSDYNLRTTDSRVAMGILSWFTGSPKPSQSETSKPEMIQMPKSETPAPGMNGAIEVPRPDRATVFEFGSVAATGDRVTLAGYCPVSDDLEPCRWEILPADGKDAPQFRVVF

SEQ ID NO: 20508 - protein, 346 aa, Arabidopsis thaliana
METTVKNKQVILRNYVKGIPKESDLMIITASDPVELKVKPGSAAVMVRNLYLSCDPYMGILMREPTPSTLALLDAFIPGKPIAGIGVSQVIDSDDPSFTKGDMIWGIVNWEEFSTINPAAIFKIDVNINVPLSYYTGILGMIGLTAYAGFFEICSPKKGETVFVSAASGAVGQLVGQFAKLMGCYVVGSAGSKQKVDLLLNKFGYDDAFNYKEEPDLDSALKRCVPKGIDIYFENVGGKMLDAVLLNMKTYGRIAVCGMISQYHLETRDRLQNLPDIIFKKIRMQGFASYDFIDRFPKFLEFVLPYIKEEKLAYVEDIVEGLENGPAALVGLLHGKNVGKQVLKVA

SEQ ID NO: 20509 - protein, 329 aa, Botryotinia fuckeliana
MDGQKIKRSKNIMAQSTYQSVVLAKRPTGQIVPGETFEKKENPMVTEADLKDDQVLVEVLYLSLDPAMRDRRSYVPPVQIGEVMRGVSIGKVIASKSSKFNVGDYASGITGWKEVAIMASKDLTPIELPPNGKLTDALGVLGMTGLTAYFGILEVGKIKAGDFVVVSGAAGATGSVVCQIAKLKGAKVLGLAGSDDKVQWLKELGCDDALNYKDKEFPSKFKAATPNFIDVFFDNVGGEILELALSRAKPFSTFVMCGAISQYNSDTPVGPKNFSMIIAMRIRLQGFIVFDYASKYAEARKEMSQWLAEGKLQRKETIVKGGLGVAEKA

SEQ ID NO: 20510 - protein, 343 aa, Nicotiana tabacum
MAEEVSNKQVILKNYVTGYPKESDMEIKNVTIKLKVPEGSNDVVVKNLYLSCDPYMRSRMRKIEGSYVESFAPGSPITGYGVAKVLESGDPKFQKGDLVWGMTGWEEYSIITPTQTLFKIHDKDVPLSYYTGILGMPGMTAYAGFHEVCSPKKGETVFVSAASGAVGQLVGQFAKMLGCYVVGSAGSKEKVDLLKSKFGFDEAFNYKEEQDLSAALKRYFPDGIDIYFENVGGKMLDAVLVNMKLYGRIAVCGMISQYNLEQTEGVHNLFCLITKRIRMEGFLVFDYYHLYPKYLEMVIPQIKAGKVVYVEDVAHGLESAPTALVGLFSGRNIGKQVVMVSRE

SEQ ID NO: 20511 - protein, 377 aa, Triticum aestivum
QTHPTERRRGFHSTPYLRRLLQITNSSARPRKEAMAEVSNKRVILKRYVTGFPSEDDMELVPATARLAVPPGSAAVVVKNLYLSCDPYLRSRMSGNDEPSHVPDFVQGEVLTTLGVSKVVESGHQDYKPGDLVWGLTGCEEYTLITDLQSHFKINHPELPLSYYTGVLGMPGLTAYVGFFDVAKPKKGDYVFVSAASGAVGQLVGQLAKISGCYVVGSAGSDEKVNLLKTKFGFDDAFNYKKEQDLDATLKRCFPEGIDIYFENVGGAMLDAVLLNMRLHGRVSVCGLISQYNLEQSEGVRNLFCIITKRIRMEGFIVTDHYGSYRKFEEEMAGYLKEGKITYVEDVAEGIESFPTALIGLFYGRNIGKQLVVVARE

SEQ ID NO: 20512 - protein, 345 aa, Zea mays
  unsure (1)..(345): unsure at all Xaa locations
MAGQEVANKRVVLKRYVTGFPGADDMEVVTGTARVAVPPGSTAMVLKNLYVSCDPYMRGRMTKHESSYVPDFVVGEVLENFGVCKVIASGHQDFKVGDLVWGMTGWEEYTLIHNPESFFKINHPELPLSYYTGVLGMPGLTAWAGFFDVGKPKKGDCVFVSAASGAVGQLVGQFAKLTGCYVVGSAGSDEKVNLLKTKFGFDEAFNYKKEQDLDAAXLRRYFPEGIDIYFENVGGSTLEAVLPNMRIHGRIPTCGMISQYNLEEPEGVHNLFEIIAKRLRMEGFMVFDYYGQYHKFEQEMAGYLKAGKIAYVEDIAEGLEKAPEALIGLFTGRNVGKQLVAIARE

SEQ ID NO: 20513 - protein, 379 aa, Neurospora crassa
MFHHTHGYKSHSLQLELVHRPSGPIIPGHTFRVSAVPAPVPSDLNEGDLLLETLYISLDPAMRGWLDDVRSYVPPVQIGEVMRAFCICRVLASRSPKAAAGDIVTAMNGIREIGILSDRHIEKPAFLPPGGKTTDLLGVLGMTGLTAYFGMMKIGNVKRGDTVVVSAAAGATGSVAVQIARIQGAKRVVGTAGSDEKCRWLVEEGGADVALNYKDPEFRRKFKEATPDFVDVYFDNVGGEQLNMALARANRGARFVMCGGISQYNAEHKQGPKVGGFHLLGTISAMECSTDKFQNINNVITMRIRMEGFIVFDYKDEYPTALGQLAQWLAEGKLKRKETILKGGVRVADEGMVQLYKGGNIGKLLIEVKNPDEERQSRL

SEQ ID NO: 20514 - protein, 358 aa, Triticum aestivum
SCSPPTAAMAELKSRRVILKDYVEGYPTEAHMELLPAAPVDEAEEGSVLVKNLYLSCDPYMRPKMSRPLHQSYTAAFVPGAAITGYGVSEVVRSSRPGLAARAHVWGMTGWEDYSVITFTAIPGTIHRPPPPPPLPPGRRGGPRLPALRRRHHICSPEAGATVFVSAASGAVGQLVGQFARLLGCHVVGSAGSKEKVDLLINKFGFHDAFNYKEEDADLAGALKKRFPDGIDVYFENVGGKMLEAVLLNMKVHGRIAVCGLISQYNLTAGEKDADVGVRNLTSLVSKRIKMQGFIEPDHKHLYPEYMAWVLPHIKEGRVVYVEDVADGLDAAPAALIGLYHGRNVGKQVVRLTNPDPK

SEQ ID NO: 20515 - protein, 329 aa, Cavia porcellus
MATGQKLMRAIRVFEFGGPEVLKVQSDVAVPIPKDHQVLIKVHACGINPVETYIRSGTYTRIPLLPYTPGTDVAGVVESIGNDVSAFKKGDRVFTTSTISGGYAEYALASDHTVYRLPEKLDFRQGAAIGIPYFTACRALFHSARAKAGESVLVHGASGGVGLAACQIARAYGLKVLGTAGTEEGQKVVLQNGAHEVFNHRDAHYIDEIKKSIGEKGVDVIIEMLANVNLSNDLKLLSCGGRVIIVGCRGSIEINPRDTMAKESTISGVSLFSSTKEEFQQFASTIQAGMELGWVKPVIGSQYPLEKASQAHENIIHSSGTVGKTVLLM

SEQ ID NO: 20516 - protein, 368 aa, Rhodobacter sphaeroides
MPARAGGHFTAAAATGMRPRPPDSSGPDRRRSSPPIEEIRVSLPETMRAIEISRPGGPEVLRPATVPVPVPGHGQILIRVAYAGVNRPDALQRAGAYAPPPGASPLPGLEASGTVAAVGPGVTRWRVGEEVCALLPGGGYADYAVTPADHALPVPSGLTLREAACLPETCFTVWSNVALRGGLRAGERFLVHGGSSGIGTTAIQLAAALGARVFATAGSEEKCAACRALGAERAINYREEDFVAVLKAEGGADLILDMVGGSYLPRNVKALATEGRLVQIAFLEGTKVELNFAEVMMRRLTITGSTLRPQSDLAKARYARDIETQVWPLVARGALRPVIDSEFPIEQAAEAHARMEGSSHIGKIVLKL

SEQ ID NO: 20517 - protein, 2546 aa, Burkholderia mallei
MVNTKIAIIGASCRFPGGVAGLEEYWQLLKSERDAVTEIPPERFGTDFYRHPSKREPGKSYTFSAGVLDNVAGFDAAFFGISPREATQMDPQQRLLLELAWEAFEDAGVRPADMRGSNCGVYVGVAGTDYGNRSMDDLNAIDPYSATGNTLSIASNRVSYLFDLRGPSMSVDTACSSSLVALHQAVQALQSGEAETALAGGVNLLLHPFGFVSFSKASMLSPRGRCRAFDATGDGYVRAEGGAFVLLKPLDRAIADGDTIHAVIAGSGVNSVGHSPGGISVPGAAAQAALLRSVYARAGVDPQSLAYLEAHGTGTAVGDPIEARALIDVVSGARPADRPLLIGSVKTNIGHLETASGMAGLLKAVLCLKHRAVPRSLHFSIPNPAIDFDGGRLRVVDRYMPLEAGNAPLTVGVNSFGFGGTNAHIVLTEAPVSAAVADDVPTSATQAARAPSALVLTARSPNALGALANRYLAALENGGDWQALAAAAARRRQWLEHRAIVAPADAAEGRAALAALARPAPEGGPSCVTTGRAPADAPRTALVFSGNGCQWVGMGNALYAEDAVFRAALDEVDALWCADGSPSLVDVMRGGPGAQWLAGAGAEWLAATENAQPLLFAIQVGMIRVIDARGMRYDAAIGHSVGEVAAAWVTGALSLTDAVRVIKIRSRAQAMTRGCGRMAAVGIGDAAARELIARHGLARRVEIAGVNSPDAVTLAGEPQGLQVLEAALRGSGKFFQMLDLDYAFHSSHMDRIEPVVLAGLAGLRPQPGNGAFVSTVTGGALAGSELDARYWWRNIREPVRFGDGIAHLIEQGVRLFVEVSPHSILRTYVKQALAAAGVTGVALPTLKRDHGSAATLRQAILAAIAHGASVDPDRFAPGASRAALPSYPWQRERFWLTPTVEGYGLVNRRREHPLLGYRLHEHAFAWENQLDPAKLPMLADHVVDGGVAFPGAGYVEMALAAACTFFDTPDAALENVEIRMPVVFQPQQAKLFRLVIEPRTATFTIETRDRMSDGAWTLNVTGRMLESGNALGTASVVPSDMLERLLALPAADGDMLYANTAAIGLGYGPAFRWVRTVRLAEGDDAALADVAAPDACGDARTLSAYRLHPALMDSGFHPLFALLAAHARDGEHPAYVPVQIGRVDYLRGDTVARVLARIDRRSPHSIVAHFEFLDAQGAIVARLGACRFRRVDLVGRRQNLPARFVYRLEAMPLPGDVDAAGLPAPDALLARAVARLDAGHDGRRTRHLTEILPLLDVLASLYVLQAFDALGAFAGTWRPAHGCAALAARLADMLVEDGLAHRDGDRLVRDDAACAALPPLDELWRGLLAESPAHVAELTLLAHCGSALPGVLSGAKDGTRLLSPTGHSLVEHLLAASPTWQHVYALLTASVEQAVDAWQPARRLRVLELGATDGDVLQTLGMHLAPARCDHTIAATAGQLAGFGADAQAAVTTVALQPGERLSLAADEAGPYDVIVANRALSGRRDVADALNAMRSWLAPGGLLLLAESRRGRFSDIVFGMQAPSTQTDAPAPLAPADLEAALAHAGYVGVVRHVEQSLDLEGTPMFVIARNPASAVAAPSGGDSSDLDTLARSEQWLVLHAPDVVGGFGARLADALAHAGYPADIVEITHAADAIASLPAGQPAHVVFCAPETPLAEAATGDDLMAAQRNGVIALAALVRVLGAQPNATTRLTIVTRGGAPFAGTAHAHPEQATLWGLGRVLANEHPELACRLIDIDCAADRIPEALIRELTGAALEEEVVLGAHGRRVPRMLTAAQDAARNDGAIARAAVLAFDAPGSLRNLEWFALAESALGADEVEIEPVATGLNFRDVMYAMGLLSDEAVETGFAGATIGMELSGRVVRVGSAVTEFAPGDAILGFAPASFATRVRTRAQAIAPKPERLSFEEAATVPTTFFTAYYALVELARLRRGERVLVHGGAGGVGIAAIQLARYFGAEVFATAGSDEKREFVRLLGADHVLDSRSLAFADEIRAMTGGEGIDIVLNSLAGEAMVRSIDTLRPFGRFLELGKRDFYENSHIGLRPFRNNISYFGIDADQLMGALPELTARLFGDVMGLFAAGVLHPLPYRAFPAERAEDAFRYMQQARQIGKVLVTYPCGTPAPTHGAARADSLALDPHGAYLVVGGTGGLGFASARWMVERGARRLTLASRSGELAVAARDEIECWRATLGVAVDIVSCDVTDAAAVDAMIAAIVRRDIPLKGVLHSAMTIDDGLVRNLDDARMAAVLAPKVAGAWNLHRATRSLPLDLFVVYSSATTYLGNPGQSNYVAANSFLEALVEHRRAAGLPGTFMAWGPLEDVGFLARHADTREALQSRIGGASITSGEAMIALERALVAGAAGEAVVRLDWHAVARGMPAAKARRYSLLQSHANGGDARDGGTQLREEVLALPRDEAIALVAGTLQAQIARILHMTPDRIALDKSVLDMGMDSLMGMELGLAVEEAFEVKLSVMAIAEGASAMTLAGRIVDSIGASADAGAGAAADSAHEAVAALAAKHAIDGDARAVLDIRPAPVAGQVSPTLEVAR

SEQ ID NO: 20518 - protein, 184 aa, Enterococcus faecium
MQEQVVWRTAAIQLARQLSHAKIIVTAGSEEKLAFCKELGADELINYKKQDFQEEVRKIPEGRGVDVILDFIGASYWEKNLASIAVDGRWVLIGMLGGTIVPEIDLGVLIGKRVQLLGTLLTPRSDQYKAELAQTFMQKAGPFLENGKIRPIIDRTFQFSAVKQAHEYMEANKNIGKIILKITE

SEQ ID NO: 20519 - protein, 352 aa, Acinetobacter sp. SE19
MHCYCVTHHGQPLEDVEKEIPQPKGTEVLLHVKAAGLCHTDLHLWEGYYDLGGGKRLSLADRGLKPPLTLSHEITGQVVAVGPDAESVKVGMVSLVHPWIGCGECNYCKRGEENLCAKPQQLGIAKPGGFAEYIIVPHPRYLVDIAGLDLAEAAPLACAGVTTYSALKKFGDLIQSEPVVIIGAGGLGLMALELLKAMQAKGAIVVDIDDSKLEAARAAGALSVINSRSEDAAQQLIQATDGGARLILDLVGSNPTLSLALASAARGGHIVICGLMGGEIKLSIPVIPMRPLTIQGSYVGTVEELRELVELVKETHMSAIPVKKLPISQINSAFGDLKDGNVIGRIVLMHEN

SEQ ID NO: 20520 - protein, 328 aa, Lactococcus lactis subsp. lactis
MKAIGTIDSSKNFIDFEIEKPILRPHDLLIKVEAISINPVDTKVRKGIKGNLAEPKILGWDGLGTVVELGSETKLFKVGDKVFWAGDVTRSGSNAEFQAVDERIVGFAPKNLTKEKAVAMPLTSLTAYELLFEKLEVTDKSKGKSLLIINGAGGVGSVAIQMAKNAGLTVIATASNPQAIEWVKNFGADYTVNHHEKLVPQVHELGFKFVDYILILNAVVEHMPAVNELIAPQGSIANIVEPGQAINLDQLAHKSARFNFEWMFTKVVSNTSDLQSQHDILNKVSEWLDNDVLKSTMTQNLGPITAENVKKAHELIEENHTIGKIILS

SEQ ID NO: 20521 - protein, 167 aa, Bacillus cereus
LRKRASIPLVGLTSYQALHDIMQLQKGQKILIHAGSGGVGTFAIQLAKIMGATVTTTASEAGANLVTSLGADEIINYKTEKFEDILKNYDAVFDTIGGATLEKSFNIIKSEGNIVSVSGMPNARFGKEFGSGFFKTLLFSLASKKLTALEKKHNAQYSFLFMKPSGD

SEQ ID NO: 20522 - protein, 327 aa, Escherichia coli O157:H7 EDL933
MATRIEFHKHGGPEVLQAVEFTPADPAENEIQVENKAIGINFIDTYIRSGLYPPPSLPSGLGTEAAGIVSKVGSGVKHIKAGDRVVYAQSALGAYSSVHNINADKAAILPAAISFEQAAASFLKGLTVYYLLRKTYEIKPDEQFLFHAAAGGVGLIACQWAKALGAKLIGTVGTAQKAQSALKAGAWQVINYREENLVERLKEITGGKKVRVVYDSVGRDTWERSLDCLQRRGLMVSFGNSSGAVTGVNLGILNQKGSLYVTRPSLQGYITTREELTEASNELFSLIASGVIKVDVAEQQKYPLKDAQRAHEILESRATQGSSLLIP

SEQ ID NO: 20523 - protein, 317 aa, Vigna radiata
MTSIPSHMRAWIYSEYGNIEEVLKFDPNVPTPHLMENQVLIKVVAAAINPVDYKRALGHFKDIDSPLPTAPGYDVAGVVVKVGNQVKKFQVGDEVYGDINEVTLDHPKTIGSLAEYTAVEEKVLAHKPSNLSFVEAASLPLAIITAYQGLETAQFSVGKSILVLGGAGGVGSLVIQIAKHIFGASKIAATGSTGKLELFENLGTDLPIDYTKENFEELAEKFDVVYDAVGQSERALKSVKEGGKVVTIVAPATPPAIPFLLTSDGDLLEKLRPYLENGQVKPILDPKSPFPFSQTVEAFSYLKTNRATGKVVIYPIP

SEQ ID NO: 20524 - protein, 335 aa, Staphylococcus aureus subsp. aureus Mu50
MKMIGFEKPFKLEEGNLFKVYEQRKPTPENDDILVKVNSISVNPVDTKQRQMKVTQAPRVLGFDAIGTVEAIGPDVTLFSPGDVVFYAGSPNRQGSNATYQLVSEAIVAKAPHNISANEAVSLPLTGITAYETFFDTFKISHNPSENVGKSVLIINGAGGVGSIATQIAKRYGLTVITTASRQETTEWCEKMGADIVLNHKEDLVRQFKEKEIPLVDYIFCTYNTDLYYNTMIELIKPLGHITTIVAFNEDQDLNALKLKSITFTHEFMFARPIHRTPDMIKQHEYLEDITKNIELGHYQPTTTQVFEGLSPENLYQAHQLLEKQSMIGKLVINI

SEQ ID NO: 20525 - protein, 320 aa, Pseudomonas putida KT2440
MKALQGVDGHVEWVEAERPTCDAGQVRIRVAAAGLNRADLLQMKGLYPPPPGASPYMGLECSGVVEEVGAGAAWRVGDRVCALLASGAMAEEVVVDARHVLPVPEGLGLHEAAALPEVYATAWLNIFQLGAVKAGEKVLVHAGASGVGSAAIQLCKAFGSPVWVSVGSQDRLAYCQALGAAGGVVRNENLDALEGFGPFDVILDPVGASYGELNLKLLARDGRWVIIGLMGGRKFELDLAQVLGKRLEITGSTLRNRDDGFKAELLRELQQQVWPLFAEGRLSPQLVDTYPVEFAQAAYAELETNQVSGKLVMVIDPSLV

SEQ ID NO: 20526 - protein, 332 aa, Listeria innocua
MKVVGLTKASTDFVDMEIKQPVPENHDLLVKIKAISINPVDTKQREATKLTGDEVRILGWDAVGEVVEIGSKVTLFKTGQEVYFAGDVTRPGAYAEFTLIDERLVGLKPKHLSLEEAAAMPLTTITAWEALFDRLGIVEADKGKSILIINGAGGVGSIATQLAANIGLNVIATASREETIEWTKKHGANHIINHRENLTKQLKELGFEQGVDFILCLHNTNAHWDDMQEAIRPQGKICSIVELAEPVKMSLLKDKSATFSYEFMFTRSKYNTEDKIKQHEILTEAARMLDKGDLTSTLNKVLSPVNAKTIEEAHKIISSGKMIGKLVVKGFE

SEQ ID NO: 20527 - protein, 313 aa, Listeria innocua
MKAVVIENYGGKEELKEKEVAMPKAGKNQVIVKEVATSINPIDWKLREGYLKQMMDWEFPIILGWDVAGVISEVGEGVTDWKVGDEVFARPETTRFGTYAEYTAVDDHLLAPLPEGISFEEAASIPLAGLTAWQALFDHAKLQKGEKVLIHAGAGGVGTLAIQLAKYAGAEVITTASAKNHELLKSLGADQVIDYKEVNFKDVLSDIDVVFDTMGGQIETDSYDVLKEGTGRLVSIVGISNEDRAKEKNVTANGIWLQPNGEQLKKLGELLANKTVKPIVGATFPFSEKGVFDAHALSETHHAVGKIVISFNK

SEQ ID NO: 20528 - protein, 347 aa, Sulfolobus sp. RC3
MRAVRLVEIGKPLVLKDIDIPKPKGAQVLIKVEAAGVCHSDVHMRQGRFGNLRIVEDLGVKLPVTLGHEIAGKIEEMGDEVVGYSKGDLVAVNPWQGEGNCYYCRIGEEHLCDSPRWLGINFDGAYAEYVLNPHYKYMYKLRRLNAVEASPLTCSGITTYRAVRKASLDPTKTLVVVGAGGGLGTMAVQIAKAVGGATIIGVDVREEAVETAKRAGADYVINASVQDPLAEIRRITEGKGVDAVIDLNNSEKTLSVYPKALAKQGKYIMVGLFGADLHFHAPLITLSEIQFVGSLVGNQSDFLGIMRLAEAGKVKPMITKTMKLEEANEAIDNLENFKAVGRQVLIP

SEQ ID NO: 20529 - protein, 313 aa, Listeria monocytogenes EGD-e
MKAVVIENYGGKEELKEKEVAMPKAGKNQVIVKEAATSINPIDWKLREGYLKQMMDWEFPIILGWDVAGVISEVGEGVTDWKVGDEVFARPETTRFGTYAEYTAVDDHLLAPLPEGISFDEAASIPLAGLTAWQALFDHAKLQKGEKVLIHAGAGGVGTLAIQLAKHAGAEVITTASAKNHELLKSLGADQVIDYKEVNFKDVLSDIDVVFDTMGGQIETDSYDVLKEGTGRLVSIVGISNEDRAKEKNVTATGIWLQPNGEQLKELGKLLANKTIKPIVGATFPFSEKGVFDAHALSETHHAVGKIVISFNK

SEQ ID NO: 20530 - protein, 332 aa, Listeria monocytogenes EGD-e
MKAVGLTKASTDFVDIEIDKPVPENHDLLVKIKAISINPVDTKQREAAKLSGEEVRILGWDAVGEVVDTGSEVTLFQTGQDVYFAGDVTRPGVYAEYTLIDERLVGLKPHNLNVEEAAAMPLTTITAWEALFDRLTITENDKGKSILIINGAGGVGSIATQLAANTGLEVIATASRSETVEWTKSHGANYVINHRENIPEQLEELGFKKGVDFILCLHNTSAHWDEMQEAIRPQGKICSIVELTEPVEMTLLKDKSATFSYEFMFTRSKYDTADKIRQHEILTEAAHMLDKGNLTTTLNQVLSPVNAATIEEAHKIISSGKMIGKLVVKGFE

SEQ ID NO: 20531 - protein, 336 aa, Staphylococcus epidermidis ATCC 12228
MKAIGFKSSFQLDEGNCFEEFNFDIPHPSGHELLVKVQSISVNPVDTKQRTMPVDKVPRVLGFDAVGVIEKIGDQVSMFQEGDVVFYSGSPNQNGSNEEYQLIEEYLVAKAPTNLKSEQAASLPLTGLTAYETLFDVFGISKEPSENKGKSLLIINGAGGVGSIATQIAKFYGLKVITTASREDTIKWSVNMGADVVLNHKKDLSQQFKDNHIEGVDYIFCTFDTDMYYEMMVNLVKPRGHIATIVAFNSQQDLNLLKSKSVTFTHEFMFSRPLHHTDDVIKHHEYLKDITEKVEQGYYQPTTTKVIDGLDVDSLYEAHQILESHSMIGKLVINLK

SEQ ID NO: 20532 - protein, 315 aa, Staphylococcus epidermidis ATCC 12228
MRKVSYNEHGGPKVLEYSDNNEVPSIESNEILVKVISTSFNPADAMIREGMLKDVLPIAFPFTPNVDVAGKIEKVGPDVKNFNVGDNIIGFLNMHENGAAADYVVTHPENLVLAPSNISIEDSGVIPSVSLTAWQALFDHYHLQSNDRILITGAAGGVGTFAVQLAKDRGAYVIGTASERSYELLQDINIDEIINYKTEEVTKDRTGKLDYILNLAPISSEGLEQLLPLLKKGGTLVSTLNTVTDQALDKYDVNVVRMAVTMNQEELDQIVNKIDNGNIKPIITKRDTLENLQMIHENRNDYNGKVLITVNEKND

SEQ ID NO: 20533 - protein, 2110 aa, Mycobacterium bovis
MESRVTPVAVIGMGCRLPGGINSPDKLWESLLRGDDLVTEIPPDRWDADDYYDPEPGVPGRSVSRWGGFLDDVAGFDAEFFGISEREATSIDPQQRLLLETSWEAIEHAGLDPASLAGSSTAVFTGLTHEDYLVLTTTAGGLASPYVVTGLNNSVASGRIAHTLGLHGPAMTFDTACSSGLMAVHLACRSLHDGERDLALAGGCAVLLEPHACVAASAQGMLSSTGRCHSFDADADGFVRSEGCAMVLLKRLPDALRDGNRIFAVVRGTATNQDGRTETLTMPSEDAQVAVYRAALAAAGVQPETVGVVEAHGTGTPIGDPIEYRSLARVYGAGTPCALGSAKSNMGHSTASAGTVGLIKAILSLRHGVVPPLLHFNRLPDELSDVETGLFVPQAVTPWPNGNDHTPKRVAVSSFGMSGTNVHAIVEEAPAEASAPESSPGDAEVGPRLFMLSSTSSDALRQTARQLATWVEEHQDCVAASDLAYTLARGRRHRPVRTAVVAANLPELVEGLREVADGDALYDAAVGHGDRGPVWVFSGQGSQWAAMGTQLLASEPVFAATIAKLEPVIAAESGFSVTEAITAQQTVTGIDKVQPAVFAVQVALAATMEQTYGVRPGAVVGHSMGESAAAVVAGALSLEDAARVICRRSKLMTRIAGAGAMGSVELPAKQVNSELMARGIDDVVVSVVASPQSTVIGGTSDTVRDLIARWEQRDVMAREVAVDVASHSPQVDPILDDLAAALADIAPMTPKVPYYSATLFDPREQPVCDGAYWVDNLRNTVQFAAAVQAAMEDGYRVFADVSPHPLLTHAVEQTGRSLDMSVAALAGMRREQPLPHGLRGLLTELHRAGAALDYSALYPAGRLVDAPLPAWTHARLFIDDDGQEQRAQGACTITVHPLLGSHVRLTEEPERHVWQGDVGTSVLSWLSDHQVHNVAALPGAAYCEMALAAAAEVFGEAAEVRDITFEQMLLLDEQTPIDAVASIDAPGVVNFTVETNRDGETTRHATAALRAAEDDCPPPGYDITALLQAHPHAVNGTAMRESFAERGVTLGAAFGGLTTAHTPRREPRRCWPRSRCPRRSGSSRAPTESTRRCWTLVSSRSARASSRYGHWWPAVAVGCAQPACLRAYPQCPLLLHAVDQGLQRRDPRWEADLDVLDEHGTVLLAVRGLRMGTGTSERDERDRLVSERLLTLGWQQRALPEVGDGEAGSWLLIDTSNAVDTPDMLASTLTDALKSHGPQGTECASLSWSVQDTPPNDQAGLEKLGSQLRGRDGVVIVYGPRVGDPDEHSLLAGREQVRHLVRITRELAEFEGELPRLFVVTRQAQIVKPHDSGERANLEQAGLRGLLRVISSEHPMLRTTLIDVDEHTDVERVAQQLLSGSEEDETAWRNGDWYVARLTPSPLGHEERRTAVLDPDHDGMRVQVRRPGDLQTLEFVASDRVPPGPGQIEVAVSMSSINFADVLIAFGRFPIIDDREPQLGMDFVGVVTAVGEGVTGHQVGDRVGGFSEGGCWRTFLTCDANLAVTLPPGLTDEQAITAATAHATAWYGLNDLAQIKAGDKVLIHSATGGVGQAAISIARAKGAEIFATAGNPAKRAMLRDMGVEHVYDSRSVEFAEQIRRDTDGYGVDIVLNSLTGAAQRAGLELLPFGGRFVEIGKADVYGNTRLGLFPFRRGLTFYYLDLALMSVTQPDRVRELLATVFKLTADGVLTAPQCTHYPLAEAADAIRAMSNAEHTGKLVLDVPRSGRRSVAVTPEQRPLYRRDGSYIITGGLGGLGLFFASKLAAAGCGRIVLTARSQPNPKARQTIEGLRAAGADIVVECGNIAEPDTADRLVSAATATGLPLRGVLHSAAVVEDATLTNITDELIDRDWSPKVFGSWNLHRATLGQPLDWFCLFSSGAALLGSPGQGAYAAANSWVDVFAHWPRAQGLPVSAIAWGAWGEVGRATFLAEGGEIMITPEEGAYAFETLVRHDRAYSGYIPILGAPWLADLVRRSPWGEMFASTGQRSRGPSKFRMELLSLPQDEWAGRLRRLLVEQASVILRRTIDADRSFIEYGLDSLGMLEMRTHVETETGIRLTPKVIATNKTARALAQYLADTLAEEQAAAPAAS

SEQ ID NO: 20534 - protein, 336 aa, Mycobacterium leprae
MHAIVAESANQMVWREVPDVTAGPGEVLIEVAASGVNRADVLQVAGKYPHPPGASAIIGMEVAGVVAAVSSGVTEWSVGQEVCALLAGGGYAEYVAVPASQVMPIPKGVNVVDSAGIPEVACTVWSNLVMAAHLSAGQLLLLHGGTSGIGSHGIQVARALGAKVAVTAGSEEKLEFCRALGAQITINYRDEDFVARLQQQNGGADVILDIMGAAYLDRNIDALAIDGQLIVIGLQGGVKGELNLGKVLSKRARIIGSTLRARPVNGPNSKSEIVAAVTASIWPMIADGSVRPIIGARMAVQQAADAHQLLLSGKVSGKIVLTVAGSGTETLLSRHH

SEQ ID NO: 20535 - protein, 2201 aa, Mycobacterium leprae
MTASTPDRRAIITEALHKIDDLTARLEIAEKSSTEPIAVIGMGCRFPGGVNNPEQFWDLLCDGRSGIVRVPSDRWDADAYYTDDHTVPGTICSTEGGFLTGWQPDEFDAEFFSISPREASAMDPQQRLLIEVAWEALEDAGVAPHTIRGTQTSVFVGVTAYDYMLTLAGRLRPEDLDAYIPTGNSANFAAGRLAYILGVRGPAVVIDTACSSSLVAVHLACQSLRHRESDAALVGGTNLLLSPGPSIACSRWGMLSPAGQCKAFDVSADGYVRGEGAGVVVLKRLDDAVRDGNRILAIVRGSAVNQDGASSGVTVPNGPAQQELLRTALASSKLTAADIDYIEAHGTGTPLGDPIELDSLSKVFSDRQSRRGSVPLVIGSVKTNLGHLEAAAGIAGFIKAVLAVQRGFIPRHLNFHQLTTHASEAASRLNIASEGLEWPTVGRPRRAGVSSFGVSGTNAHVVLEQAPDPVAVPAPGPALRLVPAVSTLVVSGKTVQRVAATASVLADWMEGPGAAVPLTDVAHTLNHHRARHTKFGTVAAVDRGQAVAGLRALAAGQSTSGVVAPRDSVVGPGTVFVYSGRGSQWAGMGRQLMADEPAFAEAIAKLEHEFVVQAGFSLHEVIANGKELVGIEQIQLGLMGMQLALTELWRSYGVEPDAVIGHSMGEVAAAVVAGALTPTQGLRVTATRSRLMAPLSGQGTMALLELDAVATEALIADYPQVSLGIYASPRQTVIAGPTAMIDALIDKVRQQDGFATRVNIEVAPHNPAMDALQPQMRSELADLTPQQPTIPIISTTYEDFGSTPVFDVEHWATNMRNPVRFQQAITHASSGVGGDYHTFIEISAHPLLTHSISDILCSIAGTAEENAVGAGYLSIGTLQRDAHDTLEFHTNLNATHTSRPPRTPHPPEPHPVLPITPWQHTRHWISAMSAAYHRADTHPLLGVGVTDPTSGTRVWESQLGPDLLWLGDHVIDDLCVLPGAAYAEVALAAATDTFPNERVEGDQPWMIYELDLHQVLHVTEGTVLVTTLTGDQQRCRIEMRTRNGFSGWTTHATATVGPAESVQPSDREERTATPVDVVDELGPEDLYQRLCSAGQQHGPAFQGIVGLAVEESGAARAEVRLPSSARMGFRDFLLHPVMMDIALQTLGATRMATDLAGGPTARKTLVLPVRFAGVHVYGDVTRGVCAVGLLTATEGLDRLVGEVVLTDLDGQPLLVIDEVQMTVLGAGSDATELTDRLFTLEWEPTPLYKEVSRSSAQGGLLLIGDVAAGDPLLLALQSSLRARLSENGPPPVDCVSFSDEVKLQAAITRTDISWDGIVVVCPPRASDESLPDDAQLELAQTRTLQIAGVVQAVTQMGARKSPRLWIVTRGAQQLNAGESVTLAQTELRGIVRVLTFEHSELKATLLDIEADGTDSLDDLTEELLAGSNHDEVAYRDGQRYVNRLVPAPITPKGELAGETRRKVVELGGLGAVQLQIDQPGRLDALTVHQVKRGEPEGDQVEVRVVAAGLNFSDVLKAMGVYPGLDGGAPAIGGECVGYVTAIGDDVDSVEVGQRVIAFGPGTFGTYVGTIADLVVPIPDTLSDHEAATFGVAYLTAWHCLCEVGRLSPGERVLIHSATGGVGMAAVSIAKMLGARIYTTAGSDAKRQMLSELGVEYVGDSRSVDFADEILELTHGYGVDIILNSLADKAIQRGVQILAPGGRFIEIGKKDVYDDANLGLAALAKSASFSVVDLDLNLKLHPARYRQLLQHILAHVADGRLPVLPVTEFSLHNAADAFRLMASGKHTGKIVISIPYEGNIEAIASPPPVPLVSQDGGYLVVGGMGGLGFVFARWLAEQGAGLIVLNGRSSPSDDVTAAIADLTAAGHRIEVVTGDISEPGTADRLVHAVQSAGFRLAGVLHSAMVLADEIMLNMTDSAARRVFVPKVTGSWRLHQATAAFEVDWWLTFSSASSLLGTPGQGAYAAANAWVDGLVAYRRSLGLPAVGINWGPWAEVGRAQFFAGLGVSLLTAEQGLAAMQTVLAADRAQTGVFSLDARQWFQSFPAVAGSSLFANLRDTATLKSGERRGVGKIRAQLDVLDAAERPGHLASAIADEIRAVLRSSDPIDHDRPLEALGLDSLMGLELRNRLEASLGITLPVALVWAYPTTADLAAALCERMDYALPAEVQEATDTNAELSKAEMDLLSDLVEASELEAATRGES

SEQ ID NO: 20536 - protein, 2103 aa, Mycobacterium leprae
MTASVEGADQKSEKLISYLKKVVVELDETRARLREYEQRATEPVAVVGIGCRFPGGVDSPDRLWDVVSECRDVVSEFPTDRGWDVDGLFDPDPDAEGKTYTRWGAFLDDAAGFDAGFFGIAPSEVLAMDPQQRLMLEVSWEALEYAGIDPLSLRGSATGVFTGIFAPSYGSRDTGGLQGYGLTGTAVSVASGRVSYVLGLEGPAVSVDTACSSSLVAIHWAMSSLRSGECDLALAGGVTVMGLPSIFVGFSRQRGLAADGRCKAFARAADGTGWGEGAGVVVLERLSDAQRLGHTVLAVVRGSAVNQDGASNGLTAPNGLAQQRVIQAALTNAGLSSADVDVVEAHGTATTLGDPIEAQALLATYGQGRPADQPLWVGSIKSNMGHTQAAAGVAGVIKMVQAMRHHVMPATLHVDEPSPRVDWTTGAVSVLTEARDWSVEGRPRRAGVSSFGISGTNAHVILEEAPTPVEASYSTADQQRLSVVPWVVSGRSTAALMAQASRLAFYVQADPEVDPVDVGCALAARSVFEHRAVVVGESREQLIAGLAGLAVGESGAGVAIGQAAPLGKTVVVFPGQGAQRIGMGRELCSQLPVFAEEFDAVTGELDRHMRLPLRDVVWGADAGLLDSTEFAQPALFAVEVALFAVLQHWGLQPDFVMGHSIGELAAAYVAGVLAPADAAMLVVARGRLMQSMPAGGTMWAVAASEDEVVSLLGEGVGIAAINAPESVVISGPQAAVSAIADKFAAQGRRVHQLAVSHAFHSPLMEPMLEEFVRVAAQVEVRKPQIGLVSNVTGELAGPDFGSPQYWGEHVSRAVRFVDSARHLQTLGATHFIESGPSSGLMGAIEQSLAPAEAVVVSMMGKDRPELASVLGAAGQLFATGMPVEWPAVFAGSSRRRVTLPTYAFQRRRFWETPGTDGTASVSGLGLGSTEHALLGAVVERPDSGGVVLTGRLSLANQPWLADHVIGGVVLFPGAGFVELVIRAGDEVGCAGVEELVLAAPLVLHPGSGVQVQVVVAAADESSRRAVSVYSRGDQSHGGWLLNAEGLLEVDAAEATVDLSLWPPEGAESVDISDAYPQLAERGYAYGPAFQGLVAIWRRGSELFAEVVAPTGVVVDGMGMHPALLDAVLHALGLAIENTQATTEMRLPFCWRGVSLHAGGAGRVRARFTSAGADAIAVDIADSAGLPVLTVRSLVTRAMTAEQLRTAVTAAGGALEQGPMDLVWSPIPLSSDGHGGGLPSVVSWADYCAGRGNDTGVVVWEFGSASAGAQAPVDSVAAVYSATHAALQVLQFWFGQDRAGTLVVLTRGAVGLVGEGISDLAAAAVWGMVRSAQSEHSGKIVLIDTDSAVDVAVLADLGESQLLVRCNTVHAARLSPAPQLLALPVGESMWRLAADGGGTLEDLVIQPCPEVQAPLQAGHMRVAVAAVGVNFRDVVAALGMYPGQAPPLGAEGAGVVIEIGPEVTGVAVGDAVMGFLGGAGPLAVVHQQLITQMPQGWSLAEAAAVPVVFLTALFGLADLAGIRAGESVLIHAGTGGVGMAAVQFARHWGVEIFVTASRGKWDTLRDMGFDDDHIGDSRTLEFEEKFLAVTDGRGVDVVLDSLAGDFVDASLRLLVRGGRFLEMGKTDIRDAQEIAANYPGVQYRAFDLSEAGPVRMQEMLCEVRELFDTQVLHRLPVTSWDVRCAPAAFRFMSQARHIGKVVLTMPSALADGLAEGTVLITGASGAIGGVLARHMVSAYGVRHLVLASRRGDRAEGAVELAAELVGAGAKIQVVACDVADNDAVRGLFAQLSREFPPVRGVIHAAGVLDDGAITSLTPDRVDTVLRAKVDAAWNLHEATRDLDLLMFVLCSSIAATVGSPGQGNYSAANAFLDGLAAYRQAAGLAGTSLAWGLWEQPGGMNAHLSSRDLARISRSGLAPMNPAQALELFDAALVIDHPFMVTALLDRAALDAQAQAGALPPLFSRLVRRSRRRQIEDPGDATQSKLALVQRLQGLAANRQLELLVGVVCLQAAAVLGRPSPEDIDPNTKFQDLGFDSLTAVELRNRLKSATGLTLPPTVIFDHPTPTAVAEYVAQQMLKSRPAESGDETSQAVEPKVEEVSVHA

SEQ ID NO: 20537 - protein, 2116 aa, Mycobacterium leprae
METSVTPIAVIGMGCRLPGGINSPDKLWESLLRGDNLVTEVPPDRWDVDDFYDPEPGVPGRSVSRWGGFLDDVAGFDAEFFGISEREATSIDPQQRLLLETSWEAIEQGGLDPASLAGSSTAVFTGLTHEDYLVLTTAAGGLASPYVVTGLNNSVASGRISHTLGLHGPAMTFDTACSSGLMAVHLACRSLHDGESDLALAGGCAVLLEPHASVAASAQGMLSSTGRCKSFAADADGFVRSEGCAMVLLKRLPDALRDGNRIFAMILGTATNQDGGTETLMMPSEDAQVAVYQAALAVAGVEPETIGVVEAHGTGTPIGDPIEYRSLARVYGAGTPCALGSAKSNMGHSTASAGTVGLIKAILSLRNGLVPPLLHFDRLSDDLTEIETGLFVPQEVTPWPVGGYNTPKRVAVSSFGMSGTNVHVIVEEAPSEACAPDVPETSPGTGDATVGRQLFMLSSTSIAALRETARQLATWVEEHQDSVVLSDLAYTLARGRAHRPVRTAVVAADLPELVEGLCEIADGDALYDAVVGHGDRGPVWVFSGQGSQWASMGVQLLANEPVFAATITKLEPVIAAESSFSVTEAITAPETVTGIDKVQPSVFAVQVALATTMEQTYGVRPGAVIGHSMGESAAAVVAGALSLEDAARVICRRSKLMNRVAGSGAMGSVELPAKQVNSELMARGIDDVVISVVASPQSTVIGGATETVRDLIAQWEQRDVMAREVAVDVASHSSQVDPILDDLAAALADIAPMTPKVPYYSATLFDPRELPVCNGAYWVDNLRNTVQFAAAVQAAMEDGYRVFAELSPHPLLTHAVEQTARNLDMSVAALAGMRREQSMPYGLRGLLADLHSAGAALDFAALYPAGRLLDAPLPVWTHPRLFIDTDGQEQRAQGACTVTVHPLLGSHVRLLEEPERHIWQGDVGTAALSWLADHQVHNVAALPGAAYCEMALAAAVEVFGEAAEVRAIAFEQMLLLAAETPIDAIASVDAPGVINFVVQANQDGEKMRNATATLHAAEDDCPPPAYDIAALLEAHPNSVNGTDLRESFAERGVQLGAAFAGLATAHTAEAESGTVLAEVALPASIRFQQSSYQIHPALLDACFQSVGAGVDATKVGSRAGLLLPLGVRSLRVYRPTRNARYCYTRLTKIEPRGGEADLDVLDEHGAVLLAVRGLHMGTGTTERGELDRQLSERLLTIGWQQRTLPESVHVEPGSWLLIDTFNASAIPDMWASTLTDALKSYGTQGTECTNLSWLIQDDPVVSRERLGRQLRGRDGVVILCGPRAGAPDEQSLLAAREQVRHLVRIIRELAELEGELPRLFVVTRQAQIVQSGDAANLEQAGLRGLLRVISSEHPMLRTTLVDVDEHTDVERVAQQLLSGSEEDETAWRNGDWYVARLNPSPLSHEDRRTVVLNPEHDGLRVHVRKPGDLQSLELVASDRVPPGPGQLEVAVSMSSINFADVLIAFGRFPIIDDRDPQLGMDFVGVVTAVGEGVTGHQIGDRVGGFSEGGCWRTFLTCDANLAVTLPSGLTDEQAITAATAHATAWYGLNDLAGIKVGDKVLIHSATGGVGQAAISIARAKGAEIFATAGNPTKRAMLHDLGIEHVYDSRSVEFAEQIRRDTDGYGVDIVLNSLTGAAQRAGLELLTFGGRFVEIGKADVYGNTRLGLFPFRRGLTFYYLDLALMSVTQPDRVRELLATVFNLTADGVLTAPECTHYPLTDAANAIRAMSNAEHTGKLVLDIPRTGSRSVAVPPEQAPVYRRDGSYIITGGLGGLGLFFASKLAEAGCGRIVLTARSQPNPKARQTIERLCAAGADIVVECGNIAEPYTADRLVNAATATGLPLRGVLHSAAVVEDATLTNITDELIDRDWSPKVYGSWNLHCATIGQPLDWFCLFSSGAALLGSPGQGAYAAANSWVDLFAHWRRAQGLPVSAIAWGAWGEVGRATFLAEGGEIMITPDEGAYAFEMLVRYDRPYSGYIPILGAPWLPDLVRRSPWAEMFSSAGQGSRGPSKFRMELLALPQDEWSGRLRRLLVEQASVILRRTIDADRSFIEYGLDSLGMLEMRTHIESETGIRLTPKVIATNNTARALAQYLADTLAEEEGVAAPAAMVSPETP

SEQ ID NO: 20538 - protein, 2118 aa, Mycobacterium leprae
MRAANVTPVAVIGMACRLPGGIDSPQRLWEALLRGDDLVTEIPKERWDADLYYDPEPGVPGRSVSRWGAFLDDVGGFDCDFFGMTEREAIAIDPQHRLLLETSWDAIEHAGLDPATLAGSATGVFVGLTHGDYELLSADCGATEGPYGFTGTSNSFASGRVAYTLGLHGPAVTVDTACSSGLMAVHQARGSLDCGESDLALAGGVVVTLEPRKSVSGSLQGMLSPTGRCHAFDVAADGFVSGEGCVVLLLKRMPDAERDGDRILAVLRGTAANQDGHTVHIAAPSEQAQIAVYHKALAVGGVDPTTVGLIEAHGTGTPVGDPIEYASLAAVYGTAGRCALASTKTNFGHMQSTSGPLGMMKAILALQHGVVPKNLHFTRLPDQLAEITTELFVPQVNTPWPVDVQQPRRAAVSSYGMSGTNVHAILEQAPENSGKDSPAVSKVNGPLLFPLSATSVEQLRATAARMADWVDEHGSGTKHTGLWDLGYTLSRRRGYRPVRTMVLASSFAELSRGLREIAGSEIPYQSAVGQDDRGPVWVFSGQGSQWAGMGAELFAKEPVFAAAIAAMEPVIVEESGFSVTEALTVAEKVTGIDRVQPTIFAIQVALAATMKSYGVYPGAVIGHSLGEAAAAVAAGALSCEDGLRVICRRSQLMSRVAGSGAMASVELPGQQVLSELSIRGLSDVVLAVVASPTSTVVGGDTQAIRHLLAAWQAQDVMVREVAVDVASHTPQVEPILDDLVETLADLKPTEPKVPYYSATLWDPRERPSFTGEYWAENLRYTVRFAAAVQAALKDGFRVFGELAPHPLLTYAIEQNAASLDMPVSALAAMRREQELPFGLRGFIADVHSAGALVDFSVQYPNGCLVDAPLPTWTRRELMLSRESVDHPAHGAAVQAVHPLLGAHVHLFEEPERHVWQGRVGTEAHPWLGDHQIHDVAAFPGAAYCEMALTAARVTLGEASEVRDIKFEQTLLLDRETMASSAATVSAPGVLEFAVETYEEGERVRRASAVLRALEDRVNQQPASHSIDALIASHPLRTEGADLRATFDAIGIQYGLAFSGLTAVYTAAGTNEDVSTVLAEVALPGAIRSQQASYTSHPALLDACFQSVIVAPEVQKAGAGGLLLPVYVRRLLNYHSMRNAQYCLTRVKTSRAGECEVDLEVLDQSGAVLLLVEGLRLAGGASEHECANRVLDERLFTVEWEPRELPEVTQRERGSWLVLGASAEDPLVQQLGDALNADGGHCTAVSLPLGQIDTAQLCSLLSRDGVSSSIGHGALKGLTGVVVVTAPPATVAESPALRRGRDYVSHLITIVREISELPGERPRLFVVTRNAASIKTGDLANLEQVGLRGLIRVIDSEHPYLSVTQIDVEETNQATIATQVARQLRSGSDEDETGWRDGEWYTARLRPGPLRQAERRTVVVQNEHDGMRLEIRTPGDLDSLEFVAFDRVPPGPGEIEVAVTASTVNFADVLVAFGRYPTFEGYCQLLGIDFAGVVSAVGLNVTDHKVGDRVGGVSRNGCWTTFVICDARHAVTLSPEVPLEEAAAVPTVAATAWYGLHDLARISQTDKVLIHSGTGGVGQAAIAIARAAGCEIFATAGSPQRRQLLRDKGIEHVYDSRSLEFAEQIHRDTKGYGVDVVLNSLPGAAQRAGIELLAFGGRFVEIGKRDIYGDTRLGLFPFRRNLSLYAVDLALLTYTHPDTVRRLLTTVYQRTAEGVLPVPQTTHYPIHNTANAVRLVAGAGHTGKVLLDVPHTGSSVAVVPPEQVRTFRADGAYIVTGGLTGLGLFLGTEMAAAGCGRIVLNSRSAPNPQAQETIERLRAGGADIQVECGDIAEPRVADRLVVAATQSGLPVRGVLHAAGVVEDATLTNVTDDLIDRCWAPKVYGAWNLHQALQEGKTAQLLDWFCSFSTAAALVGSPGQGAYAAANSWLDGFSYWRRAQGLASTTIAWGAWGELGLATALAEMAGVAIAPTEGARVFQTLLRYNRPYSCYAPIMETPWLKSFAQHSRFAEAFRSISQGQKDKSKFLAELKVLPRDEWPSMIRRLVSEQISLLLRRTIDPDRLLSDYGLDSLGNLELRTRIETETGIRISPTKITTIRSLAEHLCEELAATEAESAVTAT

SEQ ID NO: 20539 - protein, 678 aa, Mycobacterium avium subsp. paratuberculosis
DQRLLTAVPPGLSLVAAAGVPVVFLTALYGLSVLAGLRPGERVLVHTATGGVGMAAVQLARHYGAEVFATASRGKWDTLRAMGFDDDHIGDSRSPDFEQKFLAATGGAGVDVVLNSLAGEFTDASLRLLAPGGRFIEMGKTDVRDPDVVAQRYRGARYRAFDLMEAGPDRTAAMLAEIVGLLQEGVLTPLPLKTFDVRCASAAYRYVSQARHIGKVVLTVPSGLGEVLSGCGGGLAQSTVLITGGTGMAGSALARHLVDRYRVGHVVLVSRTGAQAAGAAELVDELQRAGASASVLACDVADRDAVATMLAGLPAGYPLRGIVHAAGILDDGLLSSLIPDRVDAVLRAKVDGAWNLHELTKDLDLSAFVVFSSMAGIVGTPGQANYAAANSFLDGLVAHRRADGLAGLSLAWGLWEQASAMTAHLGDRDKARMSRIGLAPLSTEQALAAFDAAMLVETPVLVAARLDRAALSENIAALPPLLRELAAGPTRRVIDDADVTASMSGLAARLHGLSPEARRRELVDLVCGNAAMVLGVPNPADINAGRAFQDLGFDSLTAVELRNRLKNATGLTLSPTLIFDYPTPVVLAEHLDSRLAGSGGDDQPDLMGRFNDITRELQALLGAAHWNSDDKAVLRTRIHGLLGALPAGDGPDSAPLDEDLEAATESQLFAILDEELGR

SEQ ID NO: 20540 - protein, 331 aa, Pyrobaculum aerophilum str. IM2
MRAAAFSTPGLENLKLVEAETPRPGPGEVLIRVKYAGVNPLDYNVVAGAVKASPMPHIPGSEFAGVVEEAGPGVTGVSRGDPVVVYNRLYCGHCRQCLTGWTQMCEVTGGGIIGIVTQGGYAEYAVVPAKNAVATRADLKEAATLPIGALTAWNMAYRASISPGEKVAVVGATGNVGIYAVQFAKLLGGEVYAISRRKAKVESILKSAGADAVLTPDEAKSAAPFDVVLDPTGSASWDLSFGVLGRGGRYVTAGALTGAEVRLDLRRLYGMQILVIGATGGRRADFNTVVRLLEAGRIKAFLHNVYPLADVRKALEELRSPERVGKVLIAP

SEQ ID NO: 20541 - protein, 373 aa, Anopheles gambiae str. PEST
KEMRAVVLTGFGGFKNVKILKKPEPSPQAGEVLIRVKACGLNFQDLMVRLGAIDSPPKTPTILGFECAGEIEAVGEEVEGFKVGDRVVALPEFRAWSELVAVPTKYVYHIPDEMTFQDAAAIVMNYLVAYILIFDLVSLREGKSILLHSVGGGVGQAIVQLARTVPNVTIFGVCSKSKHEALEATGLIDHLIDRTDYVNEVRKITTEGVDIVMDCLCGEECNRGYGLLKPMGKYILYGSSNVVTGETKSFFSVARSWWQVDKVSPIKLFDENKSLGGFNLRHLLYQQDGSEYVRSTVDKIFGLWKDGKVRPVVDSAWALEDVAEAMQKMHDRKNIGKLVLDPSMEPKPKPATPAKSKSKKQASEDKGGKKDKE

SEQ ID NO: 20542 - protein, 398 aa, Anopheles gambiae str. PEST
GLNFQDLMVRLGAIDSPPKTPTILGFECAGEIEAVGEEVEGFKVGDRVVALPEFRAWSELVAVPTKYVYHIPDEMTFQDAAAIVMNYLVAYILIFDLVSLREGKSILLHSVGGGVGQAIVQLARTVPNVTIFGVCSKSKHEALEATGLIDHLIDRTDYVNEVRKITTEGVDIVMDCLCGEECNRGYGLLKPMGKYILYGSSNVVTGETKSFFSVARSWWQVDKVSPIKLFDENKSLGGFNLRHLLYQQDGSEYVRSTVDKIFGLWKDGKVRPVVDSAWALEDVAEAMQKMHDRKNIGKLVLDPSMEPKPKPATPAKSKSKKQASEDKGGKKDKEDDKKSAENGGGDEKKEGGEAADEAKTNGEEGGEAAHVNGDGGAAEQKEEPAAAAAATNGDATES

SEQ ID NO: 20543 - protein, 327 aa, Oceanobacillus iheyensis
MMRGLVHERNQVTIKDMDEPTPASNEVVVKLKAAGLNRRDLAIPKRRGDEQEALILGSDGAGVIDSIGDEVENVQVGDEVIINPSLRWKQNSDAPPKGFDILGMPDHGTIAEKIVIASDQVEPKPSYLSWEEAAVFSLAALTGYRAIFTKGKLQPGETVFIPGAGSGVASFLIHFAKNHGARVITTSRSKDKQEKAKDLGADVVLDTSDDWEAALQDETIDMVIDSVGKATFHRSLAVLKKGGRFVTFGATTEDVIDFDLRSFFYGQYQLIGTTMGCKEELEAALNHYIKYETRPVVDKVFNLEESLDALEYLKEGKQFGKVAIRIS

SEQ ID NO: 20544 - protein, 3816 aa, Streptomyces antibioticus
MTNDEKIVEYLKRATVDLRKARHRIWELEDEPIAITSMACHFPGGIESPEQLWELLSAGGEVLSEFPDDRGWDLDEIYHPDPEHSGTSYVRHGGFLDHATQFDTDFFGISPREALAMDPQQRLLLETSWQLFERAGVDPHTLKGSRTGVFVGAAHMGYADRVDTPPAEAEGYLLTGNASAVVSGRISYTFGLEGPAVTVDTACSSSLVALHLAVQALRRGECSLAVVGGVAVMSDPKVFVEFSRQRGLARDGRSKAFAASADGFGFAEGVSLLLLERLSDARRLGHRVLAVVRGSAVNQDGASNGLAAPNGPSQQRVIRAALADAGLAPADVDVVEAHGTGTRLGDPIEAQALLATYGQGRTSGRPVWLGSVKSNIGHTQAAAGVAGVMKMVLALERGVVPKTLHVDEPSPHVDWSTGAVELLTEERPWEPEAERLRRAGISAFGVSGTNAHVIVEEAPAEPEPEPEPGTRVVAAGDLVVPWVVSGRDAGALRAQAARLAAHVSSTGAGVVDVGWSLVATRSVFEHRAVMVGTDLDSMAGSLAGFAAGGVVPGVVSGVAPAEGRRVVFVFPGQGSQWVGMAAGLLDACPVFAEAVAECAAVLDPLTGWSLVEVLRGGEAVLGRVDVVQPALWAVMVSLARTWRYYGVEPAAVVGHSQGEIAAACVAGGLSLADGARVVVLRSRAIARIAGGGGMVSVSLPAGRVRTMLDTYGGRLSVAAVNGPSSTVVSGDAQALDELLAGCEREGVRARRVPVDYASHSAQMDQLRDELLEALADITPQHSSVPFFSTVTADWLDTTALDAGYWFTNLRETVRFQEAVEGLVAQGMGAFVECSPHPVLVPGIEQTLDTVEADAVALGSLRRDEGGLGRFLTSLAEAFVQGVPVDWSRTFEGASPRTVDLPTYPFQRQRFWLEGSPALSSNGVEGEADVAFWDAVEREDSAVVAEELGIDAKALHMTLPALSSWRRRERQRRKVQRWRYRVEWKRLPNSRAQESLQGGWLLVVPQGRAGDVRVTQSVAEVAAKGGEATVLEVDALHPDRAAYAEALTRWPGVRGVVSFLAWEEQALAEHPVLSAGLAASLALAQALIDVGGSGESAPRLWLVTEAAVVIGAADTGAVIDPVHAQLWGFGRVLALEHPELWGGLIDLPAVAGEPGSITDHAHADLLATVLATMVQAAARGEDQVAVRTTGTYVPRLVRSGGSAHSGARRWQPRDTVLVTGGMGPLTAHIVRWLADNGADQVVLLGGQGADGEAEALRAEFDGHTTKIELADVDTEDSDALRSLLDRTTGEHPLRAVIHAPTVVEFASVAESDLVRFARTISSKIAGVEQLDEVLSGIDTAHDVVFFSSVAGVWGSAGQSAYAAGNAFLDAVAQHRRLRGLPGTSVAWTPWDDDRSLASLGDSYLDRRGLRALSIPGALASLQEVLDQDEVHAVVADVDWERFYAGFSAVRRTSFFDDVHDAHRPALSTAATNDGQARDEDGGTELVRRLRPLTETEQQRELVSLVQSEVAAVLGHSSTDAVQPQRAFREIGFDSLTAVQLRNRLTATTGMRLPTTLVFDYPTTNGLAEYLRSELFGVSGAPADLSVVRNADEEDDPVVIVGMACRFPGGIDTPEAFWKLLEAGGDVISELPANRGWDMERLLNPDPEAKGTSATRYGGFLYDAGEFDAAFFGISPREALAMDPQQRLLLETVWELIESAGVAPDSLHRSRTGTFIGSNGQFYAPLLWNSGGDLEGYQGVGNAGSVMSGRVAYSLGLEGPAVTVDTACSSSLVALHLAVQALRRGECSLAIAGGVTVMSTPDSFVEFSRQQGLSEDGRCKAFASTADGFGLAEGVSALLVERLSDARRLGHRVLAVVRGSAVNQDGASNGLTAPNGPSQQRVIRAALADAGLAPADVDVVEAHGTGTRLGDPIEAQALLATYGQGRAGGRPVVLGSVKSNIGHTQAAAGVAGVMKMVLALERGVVPKTLHVDEPSPHVDWSAGEVELAVEAVPWSRGGRVRRAGVSSFGISGTNAHVIVEEAPAEPEPEPGTRVVAAGDLVVPWVVSGRDAGALREQAARLAAHVSSTGAGVVDVGWSLVATRSVFEHRAVMVGSELDSMAESLAGFAAGGVVPGVVSGVAPAEGRRVVFVFPGQGSQWVGMAAGLLDACPVFAEAVAECAAVLDPVTGWSLVEVLRGGGEAVLGRVDVVQPALWAVMVSLARTWRYYGVEPAAVVGHSQGEIAAACVAGGLSLADGARVVVLRSRAIARIAGGGGMVSVGLSAERVRTMLDTYGGRVSVAAVNGPSSTVVSGDVQALDELLAGCEREGVRARRVPVDYASHSAQMDQLRDELLEALADITPQHSSVPFFSTVTADWLDTTALDAGYWFTNLRETVRFQEAVEGLVAQGMGAFVECSPHPVLVPGIEQTLDALDQNAAVLGSLRRDEGGLDRLLTSLAEAFVQGVPVDWTHAFEGMTPRTVDLPTYPFQRQHYWPKPAPAPGANLGDVASVGLTAAGHPLLGAVVEMPDSDGLVLTGQISLRTHPWLADHEVLGSVLLPGTAFVELAVQAADRAGYDVLDELTLEAPLVLPDRGGIQVRLALGPSEADGRRSLQLHSRPEEAAGFHRWTRHASGFVVPGGTGAARPTEPAGVWPPAGAEPVALASDRYARLVERGYTYGPSFQGLHTAWRHGDDVYAEVALPEGTPADGYALHPALLDAAVQAVGLGSFVEDPGQVYLPFLWSDVTLHATGATSLRVRVSPAGPDTVALALADPAGAPVATVGALRLRTTSAAQLARARGSAEHAMFRVEWVEEGSAADRCRGGAGGTTYEGERAAEAGAAAGTWAVLGPRVPAAVRTMGVDVVTALDTPDHPADPQSLADLAALGDTVPDVVVVTSLLSLASGADSPLGNRPRPTAAEQDTAATVAGVHSALHAALDLVQAWLADERHTASRLVLVTRHAMTVAESDPEPDLLLAPVWGLVRSAQAENPGRFVLADIDGDEASWDALPRAVASAASEVAIRAGAVYVPRLARATDEGLVVADEAAGPWRLDVTEAGTLANLALVPCPDASRPLGPDEVRIAVRAAGVNFRDVLLALGMYPDEGLMGAEAAGVVTEVGGGVTTLAPGDRVMGLVTGGFGPVAVTHHRMLVRMPRGWSFAEAASVPVAFLTAYYALHDLAGLRGGESVLVHSAAGGVGMAAVQLARHWDAEVFGTASKGKWDVLAAQGLDEEHIGSSRTTEFEQRFRATSGGRGIDVVLNALSGDFVDASARLLREGGRFVEMGKTDIRTDLGVVGADGVPDIRYVAFDLAEAGAERIGQMLDEIMALFDAGVLRLPPLRAWPVRRAHEALRFVSQARHVGKVVLTVPAALDAEGTVLITGAGTLGALVARHLVTEHDVRRLLLVSRSGVAPDLAAELGALGAEVTVAACDVANRKALKALLEDIPPEHPVTGIVHTAGVLDDGVVSGLTPERVDTVLKPKVDAALTLESVIGELDLDPALFVIFSSAASMLGGPGQGSYAAANQFLDTLARHRARRGLTSVSLGWGLWHEASGLTGGLADIDRDRMSRAGIAPMPTDEALHLFDRATELGDPVLLPMRLNEAALEDRAADGTLPPLLSGLVRVRHRPSARAGTATAAPATGPEAFARELAAAPDPRRALRDLVRGHVALVLGHSGPEAIDAEQAFRDIGFDSLTAVELRNRLNAETGLRLPGTLVFDYPNPSALADHLLELLAPATQPTAAPLLAELERVEQLLSAAASPGGPASAVDEETRTLIATRLATLASQWTHLPVGSPGNADNRSGPGESGQAQESGATGEHTAAWTSDDDLFAFLDKRLET

SEQ ID NO: 20545 - protein, 337 aa, Leptospira interrogans serovar lai str. 56601
MKVYEIQNQFGLENLKISERPDPVPVQGEVLVRFRAASLNYRDYLMAIGRYNPKQKLPLIPLSDGAGEVVQVGPGVTRWKIGDKVCANFAQTWFDGAPEKDMLKNTLGGPLDGTLCEYRIFREEGLVLMPENLSFAEASTLPCAALTAYTAIVTHGNIQPGATVVVQGTGGVSIFALQFAKMMGCRVIATSSSEEKLAKVKELGADEVINYNEKTNWDREVRKITEMKGADLVIEVGGAGTLQKSISSTKPWGTIALIGVLAGGESNNLSLFPILMQGIRIQGIIVGSKRNFEDMNLAINTNKIKPVVDQVYSFEEVPKAFESLKAGKHFGKICIEI

SEQ ID NO: 20546 - protein, 4038 aa, Streptomyces cinnamonensis
MSSAEESSPDVSGTGVSGTGESATGTSSTEAKLRQYLKRVTVDLGQARRRLREVEERAQEPIAIVSMACRFPGDTRTPEALWDLVAEGGDAIDDFPTNRGWDLESLYHPDPDHPGTSYVRRGGFLYDAPAFDASFFGISPREALAMDPQQRVLMETAWQLLERAGIDPASLKLSATGVYIGAGVLGFGGAQPDKTVEGHLLTGSALSVLSGRISFTLGLEGPSVSVDTACSSSLVSMHLAAQALRQGECDLALAGGVTVMSTPGAFTEFSRQGALSPDGRSKAFAASADGTGFSEGAGLLLLERLSDARRNGHKVLAVIRGSAVNQDGASNGLTAPNGPSQERVIRAALANAGLGAAEVDAVEAHGTGTKLGDPIEAGALLATYGRDRDEDRPLWLGSVKSNIGHPQGAAGVAGVIKMVMALQRELLPATLYVDEPTPHVDWSSGSVRLLTEPVPWTRGERPRRAGVSAFGMSGTNAHVILEEAPPEEAAAAETPAEGTGAVVPWVVSGRGEEALRAQAAQLAEHVRDDDQRPASPLEVGWSLATTRSVFENRAVVVGDDRDALLDGLRSLAAGEASPDVVSGAVGPTGPGPVMVFPGQGGQWVGMGARLLDESPVFAARIAECEQALSAYVDWSLTDVLRGDGSELARIDVVQPVLWAVMVALAAVWADQGIEPAAVVGHSQGEIAAACVVGAISLDEAARIVAVRSVLLRQLSGRGGMASLGMGQEQAADLIDGHPGVVVAAVNGPSSTVISGPPEGIAAVVADAQERGLRARAVASDVAGHGPQLDAILDQLTEGLAGIRPAATDVAFYSTVTAGHLTDTTELDTAYWVRNVRRTVRFADTIDALLADGYRLFIEVSPHPVLNLALEGLIERAAVPATVVPTLRRDHGDTTQLARAAAHAFAAGADVDWRRWFPADPAPRTVDLPTYAFQRQDFWPAPAGGRSGDPAGLGLAASGHPLLGASVGLASGDVHLLSGRVSRQSAAWLDDHVVAGQALVPGAAQVEWVLRAGDDAGCSALEELTLQTPLVLPDTGGLRIQVVVEAADAHGRRDVRLFSRPDDDDAFASTHPWTCHATGVLAPAPTDGTNGTRDAADTLDGAWPPADAEPVPADDLYAQADRTGYGYGPAFRGVRALWRHGKDVLAEVTLPKEAGDPDGFGIHPALLDAVLQPAALLLPPTDAEQVWLPFAWNDVALHAVRATTVRVRLTPLGERIDQGLRITVADAVGAPVLTVRDLRSRPTDTGRLAAAATRDRHGLFDLEWIAPENAAENAAGPARDASEGWVTLGEDAASLADLLASVEAGAPAPQLVAAPVEPDRTDDGLALATHVLDLVQTWLASPLHDSRLVLVTRGAVTDADVDVAAAAVWGLVRSAQSEHPGRFTLIDLGPDDTLAAAMQAAHLEEPQLAVHGGEIRVPRLVRATTDPTAPNGTPEADRTADPSEGLHRNGTVLITGGTGVLGRLVAEHLVTEWGVRHLLLASRRGDQAPGSAELRARLSELGASVEIAPADVGDAEAVAALIASVDPAHPLTGVIHAAGVLDDAVITAQTPESLARVWATKATAARHLHEATRETPLDFFVVFSSAAASLGSPGQANYAAANAYCDALVQHRRAQGLAGLSIAWGLWQATSGMTGQLSETDLARMKRTGFAALTDEGGLALLDAARAHDRAYVVAADLDPRAVTDGLSPLLRALTAPATRRRVASEGLADGALATRLAGLDADGRLRLLTDVVREYVAAVLGHGSAARVGVDIAFKDLGFDSLTAVELRNRLSAACDVRLPATLIFDHPTPQALATHLVDRLAGSTSATTTVNATAPAAAHVAAGADVDADTDDPVAIVAMTCRFPGGVASPDDLWDLLDARKDAMGAFPTDRGWDLERLFHPDPDHPGTSYTDQGGFLPDAGDFDAAFFGINPREALAMDPQQRLLLEASWEVLERAGIDPTTLKGTPTGTYVGLMYHDYAKSFPTADAQLEGYSYLASTGSMVSGRVAYTLGLEGPAVTVDTACSSSLVSIHLATQALRHGECDLALAGGVTVMADPDMFAGFSRQRGLSPDGRCKAYAAAADGVGFSEGVGVLLLERLSDARRHGRRVLGVVRGSAVNQDGASNGLTAPNGPSQERVIRQALASGGLSSVDVDVVEGHGTGTTLGDPIEAQALLATYGQGRPEDRPLWLGSVKSNIGHTQAAAGVAGVIKMVMAMRHGVVPASLHVDVPSPHVEWDSGAVRLAVESVPWPQVEGRPRRAGVSSFGASGTNAHVIVESVPDGLEEDSVSVGGEALETETDGRLVPWVVSARSPQALRDQALRLRDFASDASFRAPLADVGWSLLKTRALHEHRAVVVGAERAELIAALEALATGEPHAALVGPACSQARVGGDDVVWLFSGQGSQLVGMGAGLYERFPVFAAAFDEVCGLLEGPLGVEAGGLREVVFRGPRERLDHTVWAQAGLFALQVGLARLWESVGVRPDVVLGHSIGEIAAAHVAGVFDLADACRVVGARARLMGGLPEGGAMCAVQATPAELAADVDGSAVSVAAVNTPDSTVISGPSDEVDRIAGVWRERGRKTKALSVSHAFHSALMEPMLAEFTEAIRGVKFRQPSIPLMSNVSGERAGEEITDPEYWARHVRNAVLFQPAIAQVADSAGVFVELGPAPVLTTAAQHTLDESDSQESVLVASLAGERPEESAFVEAMARLHTAGVAVDWSVLFAGDRVPGLVELPTYAFQRERFWLSGRSGGGDAATLGLVAAGHPLLGAAVEFADRGGCLLTGRLSRSGVSWLADHVVAGAVLVPGAALVEWALRAGDEVGCVTVEELMLQAPLVVPEASGLRVQVVVEEAGEDGRRGVQIYSRPDADAVGGDDSWICHATGVLSPESARLDTELGGVWPPAGAEPLDVDGFYAQAGEAGYGYGPAFRGLRAVWRHGQDLLAEVVLPEAAGAHDGYGIHPALLDATLHPLLAARFMDGSEDDQLYVPFGWAGVSLRAVGATTVRVRLRPVGESVDQGLSVTVTDATGGPVLSVDSLQTRPVKPSQLAAAQQPDVRGLFTVEWTPLPQTDADGEADWVVLSDGVGRLADVVSAAGGEAPWAVVAPVDASVGDGREGLDGRLVVERVLSLVQEFLALPELAESRLLVVTRGAVATGVDGDGDVDASAAAVWGLVRSAQSENPGRFILLDVDGDGDDQGPDLNGRHLPHATLRHAAEELDEPQLALREGTLYVPRLTQARQSAELVVPPGEPAWRLRMVHDGSLDALAAVACPEALEPLAPGQVRIAVHAAGINFRDVLVALGMVPAYGAMGGEGAGVVTEVGPEVTHVSVGDRVMGVFEGAFGPVVIAEARMVTPVPQGWDMREAAGIPAAFLTAWYGLVELAGLKAGERVLVHAATGGVGMAAVQIARHVGAEVFATASPGKHAVLEEMGIDAAHRASSRDLAFEGTFREATGGRGMDVVLNSLAGEFIDASLRLLGDGGRFLEMGKTDVRAAEEVAAEHADVSYTAYDLVGDAGPDRISNMLDKLVELFASERLKPLPVRSWPLDKAQEAFRFMSQAKHTGKLVLEIPPALDPEGTVLVTGGTGALGQVVAEHLVREWGVRHLLLASRRGPEAPGSDELASKLTGLGAEVTIVAADVSDPASVVELVGKTDPSHPLTGVVHAAGVLEDGVVTAQTPEGLARVWAAKAAAAANLHEATREMRLGLFVVFSSAAATLGSPGQANYAAANAYCDALMQHRRAVGQVGLSVGWGLWEAPDAKPGVAADAKASAATVGKASALSDGTNGSAPQDTTGTAPQGMTGGLTDTDVARMARIGVKGMSNAHGLALFDAAHRHGRPHLVGFNLDLRTLATHPLHTRPALLRGLATPTAGGASRPTATAGGQPADLAGRLAALSPSDRHHTLVRLIREQAATVLGHHPDSLTTGSTFKELGFDSLTAVELRNRLSAATGLRLPAGLVFDHPDADILAEHLGAQLAPDGDTPAGAEATDPVLRDLAKLENALSSTLVEHLDADAVTARLEALLSNWKAASAAPGSGSTKEQLQVATTDQVLDFIDKELGV

SEQ ID NO: 20547 - protein, 2238 aa, Streptomyces cinnamonensis
MASEEQLVEYLRRVTTELHDTRRRLVQEEDRRQEPVALVGMACRFPGGVASPEDLWDLVAAGKDAIEDFPTDRGWDLEALYDPDPAAYGTSYVRHGGFVDDAGSFDADFFGISPREALAMDPQQRLMLETSWELFERAGIEPVSLKGSRTGVYAGVSSEDYMSQLPRIPEGFEGHATTGSLTSVISGRVAYNYGLEGPAVTVDTACSASLVAIHLASQALRQRECDLALAGGVLVLSSPLMFTEFCRQRGLAPDGRCKPFAAAADGTGFSEGIGLLLLERLSDARRNGHKVLAVIRGSAVNQDGASNGLTAPNDAAQEQVIRAALDNARLTPSEVDAVEAHGTGTKLGDPIEAGALLATYGQHRARPLLLGSLKSNIGHTHATAGVAGVIKTVMAIRNGLLPATLHVEELSPHVDWDAGAVEVVTEPTPWPETGHPRRAGVSAFGISGTNAHLILEEAPPEEDVPAPVVVESGGVVPWVVSGRTPEALREQARRLGEFVAGDTDALPNEVGWSLATTRSVFEHRAVVVGRDRDALTAGLGALAAGEASAGVVAGVAGDVGPGPVLVFPGQGAQWVGMGAQLLDESAVFAARIAECERALSAHVDWSLSAVLRGDGSELSRVEVVQPVLWAVMVSLAAVWADYGVTPAAVIGHSQGEMAAACVAGALSLEDAARIVAVRSDALRQLQGHGDMASLSTGAEQAAELIGDRPGVVVAAVNGPSSTVISGPPEHVAAVVADAEARGLRARVIDVGYASHGPQIDQLHDLLTERLADIRPTNTDVAFYSTVTAERLTDTTALDTDYWVTNLRQPVRFADTIEALLADGYRLFIEASAHPVLGLGMEETIEQADMPATVVPTLRRDHGDTTQLTRAAAHAFTAGADVDWRRWFPADPAPRTIDLPTYAFQRRRYWLADTVKRDSGWDPAGSGHAQLPTAVALADGGVVLNGRVSAERGGWLGGHVVAGTVLVPGAALVEWVLRAGDEAGCPSLEELTLQAPLVLPESGGLQVQVVVGAADEQGGRRDVHVYSRSEQDASAVWQCHAVGELGRASVARPVRQAGQWPPAGAEPVEVGGFYEGVAAAGYEYGPAFRGLRAMWRHGDDLLAEVELPEEAGSPAGFGIHPALLDAALHPLLAQRSRDGAGAGAHGGQVLLPFSWSGVSLWASEATTVRVRLTGLGGGDDETVSLTVTDPAGGPVVDVAELRLRSTSARQVRGSAGPGADGLYELRWTPLPEPLPVPAPANGRDVAADLSGCAVLGELVAEPGPGIDLEGCPCYPGVGALADNASPPSMILAPVHSDTTGGDGLALTERVLRVIQDFLAAPSLEQKQTRLAFVTRGAADTGSTTGGSAAPAEAVDPAVAAVWGLVRSAQSENPGRFVLLDTDAPLDQASVAPLVDAVRSAVEADEPQVALRGGRLLVPRWARAGEPVELAGPAGARAWRLVGGDSGTLEAVVAEACDDIVLRPLAPGQVRVAVHTAGVNFRDVLIALGMYPDPDALPGTEAAGVVTEVGPGVTRLSVGDRVMGMMDGAFGPWAVADARMLAPVPPGWGTRQAAAAPAAFLTAWYGLVELAGLKAGERVLIHAATGGVGMAAVQIARHVGAEVFATASPGKHAVLEEMGIDAAHRASSRDLAFEDAFRQATDGRGVDVVLNSLTGELLDASLRLLGDGGRFVEMGKSDPRDPELVALEHPGVSYEAFDLVADAGPERLGLMLDRLGELFAGGSLVPLPVTAWPLGRAREALRHMSQARHTGKLVLDVPAPLDPDGTVLVTGGTGTIGAAVAEHLARTGESKHLLIVSRSGPAAHGAEELVSRIAEFGAEATFVAADVSEPDAVAALIEGIDPAHPLTGVVHAAGVLDNALIGSQTTESLTRVWAAKAAAAQQLHEATRESRLGLFVMFSSFASTMGTPGQANYSAANAYCDALAALRRAEGLAGLSVAWGLWEATSGLTGTLSAADRARIDRYGIRPTSAARGCALLAAARAHGRPDLLAMDLDARVPAASDAPVPAVLRTLAAAGAPATARPTAAAAADGATDWSGRLAGLTEEARLELLTELVCTHAAGVLGHADAGAVQVDAPFKELGFDSLTAVELRNRIAAATGLKLPAALVFDYPQARVLAAHLAERLVPEGAGAMGGVSGAEGVRDAYGAGGPGGDMTAQVLLEVARVEHTLSAAVPHGLDRAAVAARLEALLARCTATTAATGAAGAAVEGDGDSDGDGAVDQLETATAEQVLDFIDNELGV

SEQ ID NO: 20548 - protein, 4132 aa, Streptomyces cinnamonensis
MVSEEKLVDYLKRVSADLHATRQRLREAEERGQEPVAVVEAACRYPGGIRTPEDLWDLVAAGGNALGAFPDNRGWDLRRLFHPDPDHPGTTYAREGGFLHDADLFDPEFFGISPREAAVLDPQQRLLLECAWEALERAGIDPRSLQGSRTGVYAGAALPGFGTPHIDPAAEGHLVTGSAPSVLSGRLAYTFGLEGPAVTIDTACSSSLVAVHLAAHALRQRECDLALAGGVTVMTTPYVFTEFSRQRGLAADGRCKPFAAAADGTAFSEGAGLLVLERLSDARRAGHRVLAVIRGSAVNQDGASNGLTAPNGPAQQRVIRAALAGARLSPAEVDAVEAHGTGTRLGDPIEADALLATYGQERHGGRPLWLGSVKSNIGHTQGAAGAAGLIKMVQALRHETLPATLYADEPTPHADWESGAVRLLSAPVAWPRGEHGEHTRRAGISSFGISGTNAHLILEEAPAADAEGAGGDGDGDGGGVRPVVRVGATGPREEQGQGQGQEQHQQQRQQRQRSSMMPTPHLPWLLSARSPAALRAQADALANHVAHADHSIADIGGTLLRRTLFEHRAVVLGTDRDERAAALAALAAGRAHPALTRAAGPARNGGTAFLFTGQGSQRPGMGRQLYDTFDVFAESLDETCARLDPLLEQPLKPVLFAPADTAQAAVLHGTGMTQAALFALEVALYRQVTSFGIAPSHLTGHSVGEIAAAHVAGVFSLADACTLVAARGRLMQALPAGGAMLAVQAAEDDVLPLLAGQEERLSLAAVNGPTAVVVSGEAAAVGEVEKALRGRGLKTKRLNVSHAFHSPLIEPMLDDFREVARGLTFHAPTLPVVSNLTGRLADAELMADAEYWVRHVRRPVRFHDGLRALSEQGVVRYLELGPDPVLATMVQDGLPAPAEGEEPEPVVAAALRSKHDEGRTLLGAVAALHTDGQPADLTALFPADAGQVPLPTYRFQRRRYWRVAPDAAAPARAAGLQETGHPLLPAVIRQADGGILLAGRLSLRTHPWLADHTIAGGVPLPATAFVELALLAGRHAACDTIDDLTLETPLLLDDTGTGVGAAVGAGADALVDAIEVQLALGAPDGSGRRALTVHSRPADDAADDGDAADAADAAGRGGPGGSGDLGDPGDPGDLGDGGGSRGWRRHATGILSAGPAAEPAAPDAAPWPPADATALDVDALYARLDAQGYSYGPAFRAVHAAWRHGDDLYADVRLADEQRAEADAFALHPALLDAALHAVDELYRGSEGRGQEQGQGGQEPEQGRGDADAPVRLPFSFSDIRHHATGATRLWVRLSPQGDDRLRLSLTDGEGGQVATVDALQLRLIPADRWRAARPTTAAPLYHLDWHELPLPEPAETDPAAHSWAVLGAHDAGLAPAAHYPDLAALKAAVEAGEPVPDIVFAPFPAQGTETDVPAQVRAHARHALELLRDWLTTEAFAAARLVVLTTGAVTARPEDGPADLATAPVWGLVRAAQAEQPDHVVLVDIDKDIDKDTDEETDQATDAGTASRHALPAALAAAAAQAETQLALRAGTVLVPRLAVVPPRTDTPALHATAPESTTDTVDSTGIAGAAESGGTVLITGGTGGLGQAVARHLAAAHGARHLLLVSRRGDAAEGVAELRADLADDGVDVRVAACDITDRDALAGLLADIPAAHPLTAVVHTAGVIDDSLITAMTPERLDAVLAPKADAAWHLHELTRDKDLSAFVLFSSGASVLGNGGQANYAAANTFLNTLAEHRRAAGLAATSVAWGLWESASGGMAARLGDADRARIHRTGVTGLTDEQALALFDAALTAEHPTVLATRFDRAVLRGQAAARTLQPALRGLVRTPRPTASAGAIGSTAATGSATDENAPSSWAARLARLSAADRDRALNELIREQIATVLAHPSPDTIELGRAFQELGFDSLTALELRNRLSTATGIRLPATLVFDHPSPTALVRHLHSHLPDEAQHTSPTAPGASAEGTAATATGIDDDPIAIVGMACRYPGGVTSPEQLWQLVATGTDAIGPFPEDRGWDTAGLFDPDPDQVGHSYTREGGFLYDAARFDAGFFGISPREAAATDPQQRLLLETAWQAFEHAGIDPAALRGTPCGVITGIMYDDYGSRFLARKPDGFEGRIMTGSTPSVASGRVAYTFGLEGPAITVDTACSSSLVAMHLAAQALRQGECELALAGGVTVMATPNTFVEFSRQRGLAPDGRCKPFAAAADGTGWGEGAGLVVLERLSDARRKGHRVLALLRGSAVNQDGASNGMTAPNGPSQERVIRTALAGAGRGPEDIDVVEAHGTGTTLGDPIEAQALLATYGQGRPEDRPLWLGSVKSNIGHTQAAAGVAGVIKMVMALRHEQLPTTLHADEPTPHVQWDGGGVRLLTEPVPWSRGERTRRAGVSSFGISGTNAHLILEEPPEEDLPEPVAAEPGGVVPWVVSGRTPDALREQARRLGEFVVGAGDVSAAEVGWSLATTRSVFEHRAVVAGRDRDDLVAGMQALAAGETPTDVVSGAAASSGAGPVLVFPGQGSQWVGMGAQLLDESPVFAARIAECEQALSAYVDWSLSDVLRGDGSELSRVEVVQPVLWAVMVSLAAVWADYGVTPAAVVGHSQGEMAAACVAGALSLEDAARIVAVRSDALRQLQGHGDMASLGTGAEQAAELIGDRPGVVVAAVNGPSSTVISGPPEHVAAVVAEAEARGLRARVIDVGYASHGPQIDQLHDLLTEGLADIRPANTDVAFYSTVTAERLTDTTALDTDYWVTNLRQPVRFADTIEALLADGYRLFIEASAHPVLGLGMEETIEQADIPATVVPTLRRDHGDTTQLTRAAAHAFTAGADVDWRRWFPADPTPRTVDLPTYAFQHQHYWLEEPSGLTGDAADLGMVAAGHPLLGACVELAESDSYLFTGRLSRRAPSWLAEHVVAGTVLVPGAALVEWVLRAGDEAGCPTIEELTLQAPLVLPESGGLQVQVVVGATDEQSGRRDVHVYSRSEQDASAVWVCHAVGVVSSEMPEAAAELSGQWPPAGAEAVDVEDFYARAAEAGYAYGPAFQGLRALWRHGTELFAEVVLPEQAGGHDGFGIHPALLDAALHPLMLLDRPADGQMWLPFAWSGVSLNADRATHVRVRLSPRGEAAERDLRVVIADATGAPVLTVDALTLRAADPGRLGAAARGGVDGLYTVDWTPLPLPQPLPLPRTDAGGSADWVILSDNSSAALADAVSSATAAGGGAPWALLAPVGGGSADDGLPVVRRTLSLVQEFLAAPELTESRLVIVTRGAVATDADGDVAASAAAVWGLIRSAQSENPGRFVLLDVEEEHLHPDGGELPYAALRHAVEELDEPQLALRSGKFLVPRMTPAAAPEELVPPVGTSGWRLGTSGTATLENLSVIDAPEAFAPLEPGQVRISVRAAGMNFRDVLIALGMYPDKGTFAGSEGAGHVTEVGPGVTHLSVGDRVMGLFEGAFAPLAVADARMVVPIPEGWSFQEAAAVPVVFLTAWYGLVDLGRLRAGESLLIHAGTGGVGMAATQIARHLGAEVFATASPAKHGVLDGMGIDAAHRASSRDLDFEETLRAATGGRGMDVVLNSLAGEFTDASLRLLAEGGRMVDMGKTDKRDPDRVAAEHAGAWYRAFDLVPHAGPDRIGEMLAELGELFASGALAPLPVQTWPLGRAREAFRFMSQAKHTGKLVLEIPPALDPDGTVLITGGTGVLAAAVAEHLVREWGVRHLLLAGRRGSEAPGSSELAEELTELGAEVTFAAADVSDPDAVAELVGKTDPAHPLTGVIHAAGVLDDAVVTAQTPESLARVWAAKATAAHLLHEATREARLGLFLVFSSAAATLGSPGQANYAAANAYCDALVRQRRAEGLAGLSIGWGLWQTASGMTGHLGETDLARMKRTGFTPLTTEGGLALLDAARAHGRPHVVAVDLDARAVAAQPAPSRPALLRALAAGATPGARTARRTAAAGSVAPAGGLADRLAGLPHPERRRLLLDLVRGNVAGVLGHSDHDAVRPDTSFKELGFDSLTAVELRNRLAAATGLKLPAALVFDYPESATLVDHLLERLSPDGAPPPVKDAADPVLNDLGRIESSLDALALDADARSRVTRRLNTLLSKLNGAATAGSPADVTDLDALDALDDVSDDEMFEFIDREL

SEQ ID NO: 20549 - protein, 4106 aa, Streptomyces cinnamonensis
MASEEELVDYLKRVAAELHDTRQRLREVEDRRQEPVAVVGMACRFPGGIETPEGLWELVAAGDDAIEPFPTDRGWDLEGIYHPDPDHPGTCYVREGGFLAAPDRFDSDFFGFSPREALASSPQLRLLLETSWEALERAGINPASLKGSPTGVYVGAATTGNQTQGDPGGKATEGYAGTAPSVLSGRLSFTLGLEGPAVTVETACSSSLVAMHLAANALRQGECDLALAGGVTVMSTPEVFTGFSRQRGLAPDGRCKPFAAAADGTGWGEGAGLILLERLSDARRKGHKVLAVIRGSAINQDGASNGFTAPNGPSQRRVIRQALSSAHLSTSEIDVVEAHGTGTRLGDPIEAEALIATYGKEREDDRPLWLGSVKSNIGHTQAAAGVAGVIKMVMALQRELLPATLNVDEPTPHVQWEGGGVRLLTEPVPWSRGERPRRAGISSFGISGTNAHVVLEEAPPEEDVPGPVAAEPEGVVPWVVSARTEEALSEQARRLGEFVADTDPSTADVGWSLTTSRAILEHRAVVVGRDRDALTAGLAALAAGEESADVVAGVAGDVGPGPVLVFPGQGSQWVGMGAQLLDESPVFAARIAECEQALSAYVDWSLSAVLRGDGSELSRVEVVQPVLWAVMVSLAAVWADYGVTPAAVIGHSQGEMAAACVAGALSLEDAARVVAVRSDALRQLMGQGDMASLGASSEQAAELIGDRPGVCIAAVNGPSSTVISGPPEHVAAVVADAEERGLRARVIDVGYASHGPQIDQLHDLLTDRLADIRPATTDVAFYSTVTAERLTDTTALDTDYWVTNLRQPVRFADTIDALLADGYRLFIEASAHPVLGLGMEETIEQADIPATVVPTLRRDHGDTTQLTRAAAHAFTAGATVDWRRWFPADPTPRTIDLPTYAFQRRSYWLPVDGVGDVRSAGLRRVEHSLLPAALGLADGALVLTGRLAASGGGGGWLADHAVAGTTLVPGAALVEWALRAADEAGCPSLEELTLQAPLVLPGSGGLQVQVVVGPADGQGGRREVRVFSRVDSDDEAAGQDEGWSCHATGVLSPEPGAVPDGLSGQWPPTGAEPLEISDLYEQAASAGYEYGPSFRGLRSVWRHGHNLLAEVELPEQAGAHDDFGIHPVLLDAALHPALLLDQNAPGEEQEPAQPALRLPFVWNGVSLWATGAATVRVRLAPHGGGETDDSAGLRVTVADATGAPVLSVDSLALRPADPELLRTAGRAGSGTNGLFTVEWTALPPADVADHAAGDGWAVLGQDVPDWAGADMPRHPDMASLSAALDEGTQAPAAVFVETTATSHATPNTAADVTLDASGRAVAERTLHLLRDWLAEPRLAETRLVLITHHAVTTPADDDVNAAPLDVPAAALWGLIRSAQAEHPDRFVLLDTDAKANTDPGPDTSTDHSTASGTYRTVIARALATGEPQLAVRAGELLAPRLARAATPTPETPTPETQPDTGSGSEAGAGSGSGPGATLDPDGTVLIAGGTGMMGGLVAEHLVRAWSVRHLLLVSRQGPDAPDARDLADRLVGLGATVRIVAADLTDGRATADLVASVDPAHPLTGVIHAAGVLDDAVVTAQTSDQLARVWAAKASVAANLDAATSELPLGLFLMFSSAAGVLGNAGQAGYAAANAFVDALVGRRRATGLPGLSIAWGLWARGSAMTRHLDDADLARLRAGGVKPLLDEQGLALLDAARATAAHTSLVVAAGIDVRGLNRDDVPAILRDLAGRTRRRAAADSTVDQAALERRLTGLDEAERRAVVTDVVRECVAAVLGHRSAADVRTEANFKDLGFDSLTAVQLRNRLSAASGLRLPATLAFDHPTPQALAAYLGTRLSGRTATPVAPVAPSAAATDEPVAIVAMACKYPGGATSPEGLWDLVAEGVDAVGAFPTGRGWDLERLFHPDPDHPGTSYADEGAFLPDAGDFDAAFFGINPREALAMDPQQRLLLEASWEVLERAGIDPTTLKGTPTGTYVGVMYHDYAAGLAQDAQLEGYSMLAGSGSVVSGRVAYTLGLEGPAVTVDTACSSSLVSIHLAAQALRQGECTLALAGGVTVMATPEVFTGFSRQRGLAPDGRCKPFAAAADGTGWGEGVGVLLLERLSDARRHGRRVLGVVRGSAVNQDGASNGLTAPNGPSQERVIRQALASGGLSSVDVDVVEGHGTGTTLGDPIEAQALLATYGQGRPVDRPLWLGSVKSNIGHTQAAAGVAGVIKMVMAMRHGVVPASLHVDVPSPHVEWDSGAVRLAVESVPWPEVEGRPRRAGVSSFGASGTNAHVIVESVPDGLGEDSVSVSGEAPETETDGRLVPWVVSARSPQALRDQALRLRDAVAADSTVSVQDVGWSLLKTRALFEQRAVVVGRERAELLSGLAVLAAGEEHPAVTRSREDGVAASGAVVWLFSGQGSQLVGMGAGLYERFPVFAAAFDEVCGLLEGPLGVEAGGLREVVFRGPRERLDHTMWAQAGLFALQVGLARLWESVGVRPDVVLGHSIGEIAAAHVAGVFDLADACRVVGARARLMGGLPEGGAMCAVQATPAELAADVDDSGVSVAAVNTPDSTVISGPSGEVDRIAGVWRERGRKTKALSVSHAFHSALMEPMLAEFTEAIREVKFTRPKVSLISNVSGLEAGEEIASPEYWARHVRQTVLFQPGIAQVASTAGVFVELGPGPVLTTAAQHTLDDVTDRHGPEPVLVSSLAGERPEESAFVEAMARLHTAGVAVDWSVLFAGDRVPGLVELPTYAFQRERFWLSGRSGGGDAATLGLVAAGHPLLGAAVEFADRGGCLLTGRLSRSGVSWLADHVVAGAVLVPGAALVEWALRAGDEVGCVTVEELMLQAPLVVPEASGLRVQVVVEEAGEDGRRGVQIYSRPDADAVSGDDSWICHATGTLTPQHTDAPNDGLAGAWPAAGAVPVDLAGFYERVADAGYAYGPGFQGLRAVWRHGQDLLAEVVLPEAAGAHDGYGIHPALLDATLHPALLLDWPGEVQDDDGKVWLPFTWNQVSLRAAGAATVRVRLSPGEHDEAEREVQVLVADATGTDVLSVGSVTLRPADIRQLQAVPGHDDGLFSVDWTPLPLSRTDVSQTDADGDADWVVLSDGVGSLADVVSAAGGEAPWAVVAPVGASAGGGLAGFDRREGLDGRLVVERVLSLVQEFLAAPELAESRLLVLTRGAVATGGDGDGDVDASAAAVWGLVRSAQSENPGRFILLDVDMDVDVDVDMDVDVDVDVDVDVDGDGNGSDLDPDLNGRRLPHATLRHAAEELDEPQLALRDGQLLVPRLVRATGGGLVVAPTDRAWRLDKGSAETLESVAPVAYPGVMEPLGPGQVRLGIHAAGINFRDVLVSLGMVPGQVGLGGEGAGVVTETGPDVTHLSVGDRVMGVLHGSFGPTAVADTRMVAPVPQGWDMRQAAAMPVAYLTAWYGLVELAGLKAGERVLIHAATGGVGMAAVQIARHLGAEVFATASAAKHVVLEEMGIDAAHRASSRDLAFEDTFRQATDGRGMDVVLNSLTGEFIDASLRLLGDGGRFLEMGKTDVRTPEEVAAEYPGVTYTVYDLVTDAGPDRIAVMMSELGERFASGALDPLPVRSWPLDKAREAFRFMSQAKHTGKLVLDVPAPLDPDGTVLITGGTGALGQVVAEHLVREWGVRHLLLASRRGLDAPGSGELADRLSDLGAEVTVAAADVSDPASVVELVGKTDPSHPLTGVVHAAGVLEDGIVTAQTPEGLARVWAAKAAAAANLHEATREMRLGLFVVFSSAAATLGSPGQANYAAANAYCDALMQRRRAAGQVGLSVGWGLWEAPDAKPGVAADAKPDVAADAKTGVAADGTPQGMTGTLSGTDVARMARIGVKAMTSAHGLALLDAAHRHGRPHLVAVDLDTRVLAHKPAPALPALLRAFAGDQGGQGGGRGGGRGGGPARPAAATTRQNVDWAAKLSVLTAEEQHRTLLDLVRTHAAAVLGHAGTDAVRADAAFQDLGFDSLTAVELRNRLSASTGLRLPATFIFRHPTPSAIADELRAQLAPAGADPAAPLFGELDKLETVITGHAHDESTRTRLAARLQNLLWRLDDTSARSDHAAGASDADGDAVENRDLESASDDELFELIDRELPS

SEQ ID NO: 20550 - protein, 3729 aa, Streptomyces fradiae
MSTENSTNVPASEDKLRAYLRRAMADLHESRERLRATEARAQEPIAVVGMGCRFPGGVGSPEALWRLVVEGVDAVSPFPGDRGWDVEGLYDPEPGVAGKSYVREGGFLHDAAEFDAEFFGISPREAVAMDPQQRLLLETSWEAIERAGIDPHSLHGSRTGVYAGVMYHDYGTGQTSATDTSGYSGTGTSGSVVSGRVAYTLGLEGPAVTVDTACSSSLVALHLAVQALRGGECDMALAGGVTVMAGPGMFVEFSRQRGLAADGRCKAFADGADGTAWAEGAGVVLVERLSDARRLGHPVLAVVCGSAVNQDGASNGLTAPSGPSQERVIRQALANARLTVADVDVVEAHGTGTRLGDPIEAQALLGTYGRDRDGGRPVWLGSLKSNIGHAQAAAGVAGVIKMVLAMRYGWLPRTLHVDEPSRHVDWSAGGVWLLTEAREWPGVDRPRRAAVSAFGVSGTNAHLILEAPDTAEAESATTPVRSEVSESAAVFDARSGVVPVVVSGRSRVVVREAAGRLAEVVEAGGVGLADVAVTMAGRSRFGYRAVVLARGEAELAGRLRALAGGDPDAGVVTGAVVDPETGSGGGGVVLVFPGQGTQWVGMGAGLLGSSEVFAASMRECARALSVHVGWDLLEVVSGGAGLERVDVVQPVTWAVMVSLARYWQAMGVDVAAVVGHSQGEIAAATVAGALSLEDAAAVVALRAGLIGRYLAGRGAMAAVPLPAGEVEAGLAKWPGVEVAAVNGPASTVVSGDRRAVAGYVAVCQAEGVQARLIPVDYASHSRHVEDLKGELERVLSGIRPRSPRVPVCSTVAGEQPGEPVFDAGYWFRNLRNRVEFSAVVGGLLEEGHRRFIEVSAHPVLVHAIEQTAEAADRSVHATGTLRRQDDSPHRLLTSTAEAWAHGATLTWDPALPPGHLTTLPTYPFNHHHYWLDTTPTTPATTTQSPTDAQNPADALPYKVSWKRLRDQDSLTARLDGRWLLVVPEASADPSVAEGVARELTARGATVESLTVEPGADRSRLRGLLVDATERDEAGPLRGIVSLLALAGDHAGADGARPVVPAGLAASLALIQAAGDAGTEAGLWAVTRGAVAAVPGDVPAPSQALLWGFGRVAGIELPHCWGGLLDLPTGPGDSGFRQLAATLAGRPAEDQVALRASGAYGRRLVRASAAGGADGWRPRGTVLVVGDTAEVAGPLVRWLLGNGARRVTLSGLSGPLPEELADVAARVTVAPCDPADRPALRTLLAEQAPTAVLVAPPAVPPTPLAEMTAEALAIALSAKTGLVDRLDSLLDEPDPLLEDGELDAFVVFSSVAGVWGGAGQGGYAAGTAYLDALAECRRAGGLPVTSVAWTPWLGTPAADSLGEQMSRAGITPLDPAASLDALARAVGRRAGCVTVADIDWERFASAYTATRPTPMFDEVPEVRRIQAAWAEAEADAARSGAGGDSQLLRSLRGRPEEAQLAELLRLVRTHAAAVLGLGSPGAVEARRSFKDLGFNSVTAVELRNRLKEATGLRLEVSLVFDHPDPASLARHLLDLALGQEPEETPRAFALEPAPNGEPIAIVSMACRMPGGVSTPEELWRLLRDGKDAIGPFPANRGWDLENLYDPDPDADGRTYVREGGFLHEAPDFDPSFFGISPREALAMDPQQRLLLETSWEALERAGIDPARLRGSRTGVFVGTNGQHYMPLLQNGGDSFDGYLGTGNSASVMSGRLSYVFGLEGPAVTVDTACSASLVALHLAVQAMRRGECDMALVGGATVMSTPEMLVEFSRQRVISANGRSRAFAAGADGVALGEGVGVLLVERLSDAERNGHPVLAVVRGSAVNQDGASNGLTAPNGPSQQRVIRQALADAGLRPEDIDAVEAHGTGTELGDPIEAEALLATYGRTRTADRPLWLGSLKSNIGHTQAAAGVAGVIKMVLALGNETLPRTLHVDEPTPRVDWSSGAVSLLTEPVDWPAGPSAPRRAAVSSFGISGTNAHTILEQAPVPAESRPGTEPADGTGAWENVTVPLLLSGHTEAALREQSTRLLNDLLEHPDEHPADVGYTLITGRAHFGHRAAVIGESREELLDALKALAEGREHHTVVRGDGTAHPDRRVVFVFPGQGSQWPSMARDLLDRAPAFRETAKACDAALSVHLDWSVLDVLQEKPDAPPLSRVDVVQPVLFTMMLSLAACWRDLGVHPAAVVGHSQGEIAAACVAGALSLEDAARIVALRSRAWLTLAGKGGMAAVSLPEARLRERIERFGQRLSVAAVNSPGTAAVAGDVDALRELLAELTAEGIRAKPIPGVDTAGHSAQVDGLKEHLFEVLAPVSPRSSDIPFYSTVTGAPLDTERLDAGYWYRNMREPVEFEKAVRALIADGYDLFLECNPHPMLAMSLDETLTDSGGHGTVMHTLRRQKGSAKDFGMALCLAYVNGLEIDGEALFGPDSRRVNPPTYPFQRERYWYHPTSGRRGDITAAGVAEAEHPLLGAGVELPETGGTVYTARFGPDSRPWLADHALLGTVLLPGTAILDLVLWAGERSGCGRVGELALQAPLVLPDSGDVELRLLVGGPDEEKRRTVTVHARPAAAGAEAPWTRHAEAVVLPATGEEPTPAPRPVPEPAGTTDPAAFYAEFAERGYDYGPAFQGFTAGARHGEDVVAEVALPSGLVADARHHRLHPALLDAALQAMILGTFFADDGRARMPFAVRGVRLHTAGADRLRVLISPAGDETVRLLCTDLATGAPVLEIDELVVRPVSGEQLAAGAPGRNGGELYRVDWTVLPEPAEVPAPRWALLGEDHAGLADVLGGTGGGCERYDTLTGLLEATTRSAGGILPDIVALSLPTAPEPGPQAVREVLSQALDAAQAWLAAGAETASARLVFVTGGAVATTADETVRDIAAAAVWGLVRSAQSEEPDRMVLLDLDGERPTARTLAAALASGEPQLAVRGSTVAAPRLAPAGPGPEDLVPPAGTTAWRLTPGGGTLEELSLAPAPDAEEPLAPGQVRIAVRAAGVNFRDALIALGMYPGKGTMGAEGAGVVVETAPDVTGLSAGDRVLGMWNGGFGPLVVADHRMVAPIPHGWSYAEAASVPAVLLTSYYALTRLARARTGQTVLVHAAAGGVGMATLQLARHLGLEVYATASTGKWDALQKHGIPDDRIADSRTLDFAERFLSRTGGRGVDIVLNSLAGEFVDASLRLLPRGGHFLELGKADVRDPRRIAAAHPGTDYRAFDLVQAGPDTVGEMLGELLELFAAGALRPLPLTAYGIRDARTALRTLSQARHTGKLVLTVPAGFDTHRTVLLTGGTGTLGQTLARHLVNRHGVRHLLLAGRTGAAAEGVAELIGELGELGAEVRVAACDAADRQRLTELLAGIPVEHPLGAVVHAAGTLDDGTIPSLTGENIDNVLRPKADAVLNLHELTRDADLSAFVLYSSSSALLGSPGQGAYAAANAFLDGFARYRKGLGLPALSLAWGLWGSNSRMAGHLDQSGMQRRLNRSGIMALTDAEGLALFDAAQDGGDALLVPMRLNRTALRASGRITPFLSGLAGGGPAAGERRPEVAAVSGTLAERLTGLTAQEGHALVLAEIRAHAAAVLGHGSDDSIPEDRAFKDLGFDSLTAVEMRNRLSAATGLRLPATLVFDHPTPGELAGHLSAELSADDAPGSASPLTELDRFEALFTALAPGTTKDTPGGAGALMIDEAERQEIAGRLAALAGLWNRLHGTTTAPEDGDTVADALEAADDHEIFAFLDERF

SEQ ID NO: 20551 - protein, 230 aa, Streptomyces purpurascens
MQAWQVHENGEPSEVMRLEDASATPAKAGLLSARANITPDACCAALQSARCLIGVEICGETEDGRRVIANPALPHGFAEYAVADAAALLPAPDALDDAEAAALHIGYQTGWFGLHRRAGLEAGETLLVHAAAGGVGSAAVQLGKAAGATVIGVVGGPGKAAVARELGCDVVIDRRAEDVVAAVKEATGGRAPNVIYDPVGGEAYTQSAKVVAFEGRIIVVFAGGTIPARP

SEQ ID NO: 20552 - protein, 325 aa, Streptomyces sp. JP95
MRIVRHYEHGAPSVLRLEEVEKPQPGPGQVLIRAEAIGVTFAEVQRRQGIPIGGHAGLPGAPGGDVAGTVEALGEGVTGFAVGDRVVGDVDRDAYADYVVTGTDWLIKIPQDLDAAAATLLPSPAQTAYHAIKEAGRLRPGQSIVIDAASGGVGHLAVQIAKALGAGKVIATASTQAKLDFARELGADVTVNYTDEDWTDQVLAATDGRGADIVLETVGGDVLLKSLGITAQFGTLVFYGSASGDIPDLPTLALSRMKNVAGFSLYAMLYNKQDAVAEGQRHLLDLIASGEVKPVVHDRLPLDEAVKAHELLEARAQLGKIVLVP

SEQ ID NO: 20553 - protein, 318 aa, Corynebacterium efficiens YS-314
MKAIVQTEEKNTASLELQDVPVPTLKPGEVLVEVKAAGVNRADLLQTQGNYPVPPGASEILGLECAGIIADPGDTGRSKGEEVACLLTGGGYAEFVAVPEGQLMPIPEGFSFVEAASIVEVACTVWSNIGMLAGLKEGQTFLVHGGAGGIGTFAVQMGKAMGATVAVTTGSPEKLQTCQQLGADILINYREEDFAEVLKNRADVILDIIGAKYLGQNVKALAKDGHMVTIGLQGGVKGELNLGLLLAKRGTISATALRGRDDADKARIVAATVEAIWPMLADGRITPHIDHTLPLADAAKALKALEDGTVTGKLVLEV

SEQ ID NO: 20554 - protein, 335 aa, Staphylococcus aureus subsp. aureus MW2
MKMIGFEKPFKLEEGNLFKVYEQRKPTPENDDILVKVNSISVNPVDTKQRQMEVTQAPRVLGFDAIGTVEAIGPDVTLFSPGDVVFYAGSPNRQGSNATYQLVSEAIVAKAPHNISANEAVSLPLTGITAYETFFDTFKISHNPAENEGKSVLIINGAGGVGSIATQIAKRYGLTVITTASRQETTEWCEKMGADIVLNHKEDLVRQFKEKEIPLVDYIFCTYNTDLYYNTMIELIKPLGHITTIVAFNEDQDLNALKLKSITFTHEFMFARPIHRTPDMIKQHEYLEDITKNIESGHYQPTTTQVFEGLSPENLYQAHQLLEKQSMIGKLVINI

SEQ ID NO: 20555 - protein, 318 aa, Corynebacterium glutamicum ATCC 13032
MQAIVQTEEKVTASLELQEVPVPTLKPGEVLVEVKAAGVNRADLLQTQGNYPVPAGASEILGLECAGVIVDAGDTGQTVGQEVACLLTGGGYAQYVAVPEGQLMPIPEGYSFVEAASIVEVACTVWSNIGMLAGLQKEDTFLIHGGAGGIGTFAIQMGKALGVTVAVTAGSTEKLKTCKNLGADILINYKEEDFAEVLKNKADVILDIIGAKYLSQNVKAMAKDAHMVVIGMQGGVKGELNLGHLLAKRGTISATALRGRDEADKARIVSSTVENIWPLLQSKEITPHIDHTLPLAEAAAALQKIQDGTITGKLVLAV

SEQ ID NO: 20556 - protein, 326 aa, Corynebacterium glutamicum ATCC 13032
MTKTTRQTMQAIVQTEEKVTASLELQEVPVPTLKPGEVLVEVKAAGVNRADLLQTQGNYPVPAGASEILGLECAGVIVDAGDTGQTVGQEVACLLTGGGYAQYVAVPEGQLMPIPEGYSFVEAASIVEVACTVWSNIGMLAGLQKEDTFLIHGGAGGIGTFAIQMGKALGVTVAVTAGSTEKLKTCKNLGADILINYKEEDFAEVLKNKADVILDIIGAKYLSQNVKAMAKDAHMVVIGMQGGVKGELNLGHLLAKRGTISATALRGRDEADKARIVSSTVENIWPLLQSKEITPHIDHTLPLAEAAAALQKIQDGTITGKLVLAV

SEQ ID NO: 20557 - protein, 11096 aa, Streptomyces noursei
MSTNPDKYVEALRSSLKEIERLRRQNEQLVAAAVEPVAVVGIGCRFPGGVTSPEDLWELVAEGRDVIGPFPQDRGWDLEKLAGGGEGGSLAQVGGFVEDAAGFDPGFFGISPREAVAMDPQQRILLEITWEALERAGIDPSTLRGTPTGVFVGTTGQDYGEVIKASAEDVEVYSTTGHAASVISGRLSYTLGAEGPAVTVDTGCSSSLVALHWAVQALRGGECSMALAGGASIMATPGPFVAFTAQSGLAADGRCKPFSDRADGTGWGEGAGMLVLMRLSDAQREGRPVLAVLRGSAINQDGASNGLTAPNGPSQQRVIRAALDSAHLTAADIDAVEAHGTGTTLGDPIEAQALLATYGQDRPRPLWLGSVKSNIGHTQAASGAAGVIKMIMALQRGVLPRSLHATEPTTDVDWTAGSVDLLDETVAWPETGRARRAGVSSFGISGTNAHVILEQAPTAPEEPTTEPTVRPAVVPWALSARTAAALDAQRARLTGHLADTPDADPLDVGYALADGRATFEHRAVLLPDGTELAHGTAGEGPCAVLFSGQGSQRPGMGRELHARFPVFAAAFDEITALLDTHLDRPLREVVWGTDADLLNDTGWAQPALFAVEVALYRLVASLGVTPDFVGGHSIGELAAAHVAGVLSLEDACTLVAARARLMQALPRGGAMLAIRATEDEVTPHLTDDVSIAAVNGPTSVVVAGTEEAVAAIGARFTAQDRKTTRLRVSHAFHSPLMDPMLAEFRAVAAGLTYHEPRIPVLSNLTGTVAAVADLCSADYWVRHVREAVRFADGVTALTDRGVTTLVELGPDGVLSAMAQESLPDGAAAVPLLRKDRPEELSAVTGLARAHVRGVTVRWAGLFDGTGARRADLPTYPFQHQRFWPTAARAAQDVTAAGLGAADHPLLGATVELADGAGYLFTSRLSVRTHPWLADHGVQGRALLPGTAFVELAVRAGDEAGCDRVEELTLAAPLVLPERGGVQLQVRVGAPDAAGRRTLGIFSRVEDGFDLPWSQHATGVLTAGAGAPDPTFDATVWPPSGAEPVDLTGAYERLAALGFQYGPAFQGLRAAWRRDTEVYAEVALPDGADTDPAAFGLHPALLDAAQHAAAYADLGAISRGGLPFAWEGVSLAAAGATTVRARIAPAGEDTVTIAVYDAAGGTVLSVDSLVSREVPADAPGAAGTVHRDSLFHVEWTPLQGRPGPAPATVAVLGPDPDALADTLRATGIRTTAPRDLAALADAEGPVPDLVVTTLTTTPGAPVPDAAHATTAAVLALAQQWLADDRFADARLVLVTRGATDGTDPAAAAAGGLIRTARTENPGRFALLDLAPDTGRPDPETLATALAASHDEPDLAVRGTDVHAARLARVPLATEPTTWNPDGTVLITGGTGGLGAVLARHLVATHGVRHLLLASRRGPAADGADDLTAELTGLGATVHIAACDVADPAALADLLGTVPAGHPLTVVVHTAGVVDDGVLGSLTPQRLDTVLRPKADAAWHLHEATRHLDLDAFVLFSSVAATLGSPGQANYAAGNAFLDALAARRAATGLPATSLAWGPWTQSVGMTSSLSDLDVERIARSGMPPLTLEQGTALFDAALAAGPAALAPVRLDLPVLRTQGDIAPLLRGLIRTPVRRTAAQVSQTADGLAQRLAGLDAAARREALLELVRTQIAQVLGHADATEVETGRQFQDLGFDSLTAVELRNALNTATGLRLPATMVFDYPTPHALADHLRDELLGTEAESTTAVPVPTRTAGTDDPIVIVGMACRYPGGIASPEDLWRLVSQGADATGPFPTNRGWDLDNLYDPDPDRPGRTHVRAGGFLHDAGSFDADFFGMSPREAMATDSQQRLLLELSWEAVERAGIDPASLRDSGTGVFAGVMYNDYGTTLTGDEYEAFRGNGSAPSVASGRVSYTLGLEGPAVTVDTACSSSLVALHWAAQALRAGECSLALAGGVTVMSTPSTFVEFSRQRGLAPDGRSKAFAEAADGVAWSEGVGMLVLERQSDAVRNGHEILAVVRGSAVNQDGASNGLTAPNGPSQQRVIRQALASGGLSTADVDAVEAHGTGTTLGDPIEAQALLATYGRDRDPENPLLLGSIKSNIGHTQAAAGVAGVIKMVMAMRHGVLPQTLHVDAPSSHVDWSVGAVELLTEQTAWPETGRARRAGVSSFGISGTNAHVVIEQSPTAVPATPASADRSVEEPPAVPWALSGKTPDALRDQAARLLAHVEAHPALRPVDISYSLIATRTAFDHRAVVLGTDRAEALRALTALAAGETDPAALTGTVRTGRTAFLFSGQGSQRLGMGRVLYERFPAFAEALDTVLTALDAELGHPLRDIIWGEDAQLVDRTGYTQPALFAIEVALFRLLEAWGITPDFVAGHSIGEIAAAHVAGVLSLGDACRLVVARAVLMQSLPEGGAMIAVQATEDEVLPLLTDDVSIAAVNSPTSVVVSGYENATLAVARHFADQGRRTTRLRVSHAFHSPLMAPMLDDFRAVVESLTFTAPTTPVVSNLTGELAPAEALCSADYWVRHVREAVRFADGIRTLADRGVTTFVELGPDSVLSAMAQESAPEGAGTIPLLRRDRPEEQAVLAALCHLQVLGVEADWSATFRGLDPVRVDLPTYAFQHRWFWPAARPARPDDVRAAGLGAAEHPLLGAAVQLPDDDGALFTGRLSLRTHPWLADHTVLGTVLLPGTALVELAVRAGDETGSGHLEELTLAAPLTLPEDGATLLQVRVGSADDTGRRTVTVHARPDDTADRTWTLHATGVLATTPPAAAAFDTTVWPPADAEPLTTDDCYAHFTTHRFAYGPAFQGLRAAWRAGDVLYAEVALPESATDEAAAFGLHPALLDAGLHAALLADDRDTGLPFSWEGVTLHASGATALRVRLAPNGPNGLSVTAADPAGNPVATVTRLLARPLDAEQLTIHSALTRDALFHLDWTPVPLPDTANSAPPALLGPDTAVLADALGDPAVARHATLDDLLAGDTTPPATVLVPLGAPLDGDTAQHAHALTRSALTLVQQWLATDRLADSRLVFVTHGAVATDDAPPTDLAAAAVWGLIRSAQTENPGTFTLLDLDTEPDSTTALSRALTLDEPQLLLRAGRARAARLTRTPAPTTTTHTPWSADGTVLVTGGTGGLGGLVARHLVRSCGVRHLLLTSRSGVGAAGAAGLVAELESLGARVVVAACDVGDGSAVAELVAGVSESYPLSAVVHAAGVLDDGVVGSLTPERLAAVLRPKVDGAWNLHEATRGLDLDAFVVFSSVAGVFGGAGQANYAAGNAFLDALMVHRVAGGLPGVSLAWGAWDQGVGMTAGLTERDVRRAAESGMPLLTVDQGVALFDAALATGSAALVPVRLDLAALRTRGDIAPLLRGLVRAPLRRTAATGLATGADTGLVQRLGRLDHAQRHEALLDMVRSSAALVLGHADGNAIDAERAFRDLGFDSLTAVELRNRLRTATGLHLSATMVFDHPTLSALAEHLRDELFGAVESEVRVPVQALPPTADDPIVVVGMACRFPGGVTSPEDLWRLVDDGTDAITTFPTNRGWDLDNLYDPDPEHFGTSYTRSGGFLHEAGEFDPAFFGMSPREALATDSQQRLLLESSWEAIERAGIDPLTLRGSATGVFAGVMYSDYGSILGGKEFEGFQGQGSAGSVASGRVSYALGFEGPAVTVDTACSSSLVALHWAAQALRAGECSLALAGGVTVMSTPSTFVEFSRQRGLAPDGRSKAFAEAADGVGWSEGVGILVLERQSDAVRNGHEILAVIRGSAVNQDGASNGLTAPNGPSQQRVIRQALASGGLSTADVDAVEAHGTGTTLGDPIEAQALLATYGRDRDPENPLWLGSLKSNIGHTQAAAGVAGVIKMVMAMRHGVLPQTLHVDAPSSHVDWSVGAVELLTEQTAWPETGRVRRAGVSSFGISGTNAHVIVEQPALVESPAAEPSGREPGVVPLPLSGKSPEALRDQAARLLAGLAERPALRPLDLGYSLATTRSAFDHRAVVLATDRADAVRALTALAAADADLSAVVGDTRTGRHAVLFSGQGSQRLGMGRELYERFPVFAEALDVAIDHLDAALPAQASLREVMWGDDVELLDETGWTQPALFAVEVALFRLVESWGVRPDFVAGHSIGEIAAAHVVGVFSLEDACRLVAARATLMQALPTGGAMIAIQAAEDEVTQHLTDDVSIAAVNGPTSVVVSGAESAARTVADRLAENGRKTTRLRVSHAFHSPLMDPMLAEFRAVAEGLSYATPTLPVVSNLTGRLATADDLCSAEYWARHVREAVRFADGVSTLENEGVTTFLELGPDGVLSAMAQQSLTGDAATVPALRKDRDEETSALTALAHLHTAGLRVDWAAFFAGSGATRVDLPTYAFQHATYWPTGTLPTAHAAAVGLTAAEHPLLNGSVELAEGEGVLFTGRLSLQSHPWLADHAVMGQVLLPGTALLELAFRAGDEAGCDRVEELTLAAPLVLPERGAVQTQVRVGVADDTGRRTVTVHSRPEHATDVSWTQHATGTLTMGSAPADTGFDATAWPPADAEPLATDDCYARFTTLGFAYGPVFQGLRAAWRAGDVLYAEVALAESTGDEATAFGLHPALLDAALHASLVAHEGEESNGGLPFSWEGATLYATGATALRVRLTPTGTDGRSVAIAVADTAGRPVAAIDNLVSRRVSGDQLTGAAGLARDALFTLDWNPVPENLVPENPVPENTGGGHAQDQDGRPAAATVALVGADGTAIAADLTAAGIHTTLHPDLTTLATTDADVPKTVLIPLTGTGTGTGTGTESTDGIGTGAAESDASAPSPAEVAHTLSTAALALVQEWTAQERFAGSRLAFVTTGATAAGGTDVMDVAAAAVWGLVRSAQSEAPDTFVLIDRDPGPAGTHDRTAAAERGQLLLRALHTDEPQLALRDGGVLAARLARFDTAAALTPPADRAWRLDSTAKGSLNGLALTPYPAALAPLTGHEVRVEVRAAGLNFRDVLNALGMYPGDDVGSFGSEAAGVVVEVGPEVTGLAPGDQVMGMITGSFGSLAVDDARRLARLPEDWSWETGASVPLVFLTAYYALKELGGLRAGEKVLVHAGAGGVGMAAIQIARHVGAEVFATASEGKWDVLRSLGVADDHIASSRTLDFEAAFAEVAGDRGLDVVLNSLAGDFVDASMRLLGDGGRFLEMGKTDIRAADSVPDGLSYQSFDLAWVVPETIGTMLAELMDLFRTGALRPLPVRTWDVRHAKDAFRFMSMAKHIGKIVLTLPRSWKPEGTVLVTGGTGGLGGLVARHLVRSCGVRHLLLTSRSGVGAAGAAGLVAELESLGARVVVAACDVGDGSAVAELVAGVSESYPLSAVVHAAGVLDDGVVGSLTPERLAAVLRPKVDGAWNLHEATRGLDLDAFVVFSSVAGVFGGAGQANYAAGNAFLDALMVHRVAGGLPGVSLAWGAWDQGVGMTAGLTERDVRRAAESGMPLLTVDQGVALFDAALATGSAALVPVRLDLAALRTRGDIAPLLRGLVKAPIRRAAATTPGDTGLAEQLTRLQRAERRDTLLALVRDQAAMVLGHTSGDGVDPSRAFRDLGFDSLTAVELRNRIGAATGLRLPATAVFDYPTADALAAHLLTELLGPDAESDPDEPGDPTAGPTDDPIVIIGMSCRFPGDIGSPEDLWRLLGDGADVVTDFPTNRGWDLDNLYDPDPAHAGTSYARTGGFLHDAADFDADFFGMSPREAMATDSQQRLLLESSWEAIERAGIDPLTLRDSRTGVFAGVMYSGYGTRLDGAEFEGFQGQGSALSVASGRVSYTFGFEGPAMTVDTACSSSLVALHLAAQALRGGECTLALAGGVTVMSIPDTFIEFSRQRGLAPDGRSKPFSESADGVGWSEGVGMLLLERQSDAVRNGHQILAVVRGSAVNQDGASNGLTAPNGPSQQRVIRQALASGGLSTADVDAVEAHGTGTTLGDPIEAQALLATYGRDRDPENPLLLGSIKSNLGHTQAAAGVAGVIKMVMAMRHGVLPRSLNITEPSSHVDWSAGAVELLTEQTAWPETGRARRAGISSFGISGTNAHVILEQPEAARHSAPEEADTAEAAAKAPATAHLPVMPWALSGKTPEALRAQAARLLAHLQQRPELAPADIALSLATQRSQFTHRAVVLSTDRDEATRALSALATTAASDPSALTGTVTMGRCAVLFSGQGSQRLGMGRELYERFPVFAEALDVVIDHLDAALPAQAGLREVMWGDDVELLNETGWTQPALFAIEVALFRLVESWGVRPDFVAGHSIGEIAAAHVVGVFSLEDACRLVAARATLMQALPAGGAMIAVQATEDEVIPHLTDEVAIAAVNGPTSVVISGAEEATQTVAQHFADQGRRTTALRVSHAFHSPLMMLAEFRAVAEGLSYATPTLPVVSNLTGQVATADELCSAEYWVRHVREAVRFADGVTALEAEGVRTFLELGPDGVLAAMARETVADDTVTVPVLRRNMPEERTLLTALGRLHTTGTPIDWAALLAPTGARPVDLPTYAFQHRPFWPSGPRDTADAAAVGIAGASHPLLNGIVELADEEGLLFTGRLSLQSHPWLADHAVMGQVLLPGTALLELALRAGDEVGCDHVEELTLAAPLVLPERGAVQTQVRVGVADTTGRRTVTIHSRPARATTTDSDTHTGTDTPWTQHATGVLVAGLPATATVPFDATVWPPAHAEPVDLADFYASRAGEGFGYGPAFQGLRAAWRRDGEVFADVALPEAGRTEAEAYGLHPALLDAGLHAAWLVAPDGEPTRTGSVPFSWRGVFLAASGASSVRVRLGRDSDGTLSLAIADTTGAPVASVQALSMRTVSVTALSATAGLARDALFRLDWASAPEPACQPDDTVTVIPAVAVVGTETSELTSELTAALRAAGADVDVRTTLSTDEPAPALIALPLVASDQTGTAEAAPVPAAVHDLTRRALALVQTRLQEQHFADTKFVFVTRGATVGRDVAAAAVWGLVRSAQSENPGCFALVDLDPDGAVGAAALVAALVSGEPQLAVRGDVLRVARLVRRPLTEVGAGADGTGDGVGGGSGVSFSGEGAVLVTGGTGGLGAVLARHLVAEYGVRDLLLVSRSGERAVGAGELVAELAGVGARVRVVACDVTDRAAVVELVGGHAVSAVVHAAGVLDDGMVGALTGERLSAVLRPKVDAVWHLHEATRGLDLDAFVVFSSLAGVFGSPGQANYAAANAFLDALMTRRRAEGLPGLSLAWGPWSLTDGTSGMLADAEADRLTRSGVPPLTAEQGLALFDAALATGDATCVPVRLDLSALRAQGEVPPLLRSLIRGRSRRAAAAESATATGLRERLVGLNPVERQEVLLDLVRGQVALVLGHADADDVHPARAFRELGFDSLTSVELRNRLNTVTGLRLPATMVFDYPTVEVLVSYVLDELLGTDAEVATVQPAAVAVADDPIVIVGMACRYPGGVASPDDLWRLVTDGVDAVSPFPTNRGWDVESLYHPDPDHLGTSYTRSGGFLHEAGEFDPGFFGMSPREALATDSQQRLLLESSWEAIERAGIDPVSLRGSRTGVFAGVMYSDYSAMLASPEFEGFQGSGSSPSLASGRVAYTLGLEGPAVTVDTACSSSLVAMHWAMQALRSGECGLALAGGVTVMSTPAVFVDFARQRGLSPDGRCKAFADAADGVGWSEGVGVLVLERQSDAVRNGHEILAVVRGSAVNQDGASNGLTAPNGPSQQRVIRQALASGGLTAGDVDVVEAHGTGTTLGDPIEAQALLATYGRDREPERPLLLGSVKSNLGHTQAAAGVAGVIKMVLAMRHGVVPRTLHVDAPSSHVDWSEGAVELLSEQAAWPETGRVRRAGVSSFGISGTNAHVILERPEAARRPVMETNTVEPSTVPWVLSGKTPEALRAQAAKLLSSIEERPELRLVDVGMSLVTGRSTFEHRAVVLAADRADAARALSAIAADEADAAAATGRVGAGRHAVLFSGQGAQRLGMGRELYERFPVFAEALDVVVDHLDAALPAQAGLREVMWGDDAELLNETGWTQPALFAIEVALFRLVESWGVRPDFVAGHSIGEIAAAHVAGVFSLEDACRLVAARATLMQALPAGGAMIAVQATEDEVTPHLTDDVAIAAINGPNALVVSGVEDAAVEIGARFAAEGRRTTRLHVSHAFHSPLMDPMLAEFRVVAEGLSYAAPSLPVVSNLTGQVATADELCSAEYWVRHVREAVRFADGVTALEAEGVRTFLELGPDGVLAAMAGASLTESSLAVPLLRKDRPEEPAALAALAQLHIAGARVDWPVLFAGVGAGRVELPTYAFQRGWFWPVGRVGVGGDVGAVGLGSAGHPLLGAAVELAAGAGVVLTGRLSLSSHGWLADHAVMGRVFVPGTALLEMVMRAGDEVGCGRVEELTLAAPLVLPERGGVRVQVAVDAPDAAGRRGVGVYSCPDGVGQAVWSQHAVGVLASGVADQVGGFGDGGVWPPQGAVSVDAEGCYELFADAGFGYGPVFQGLRAVWRRGEELFAEVALSDEVAESADTATGFGLHPALLDASLHASLLSSLEGQSADGGPALPFAWEGVSLFASGATALRVRLAPAGEHAVSVTAVDPTGAPVISIDALRTRRLTLDEVNASHTQLSDALFGVQWTTVPSTPAADHPSVAIIGTDHLGLAEALSSSSAGATTTTTAAAYESLDALIAAGPEVSVPDVTLIGLTTEDAIAQYVNDHDATVAGQGTIGAGAAAVDAARRLTAEALRTIQAWLADERLAARRLVFVTRGAADGQDVAAAAVQGLVRSAQTENPGTFGLLDLDGTEASTAVLGEALTSDEPQLLLRDGHLHAARLTRLASPADTAVPTEWNADGTVLITGGTGGLGAQFARHLVDRYGVRNLLLVSRRGPDAPGTTELVAELTAHGAEVAVQACDVADGDAVAALVAGVPDEHPLRAVVHTAGVLDDGVIGSLTEERLATVLRPKADAAWHLHEATRGLDLDAFVVFSSVAGVFGGAGQANYAAANAFLDALMAQRRAAGLPGLSLAWGPWDQTGGMTGMLSDAEADRLARSGIPPLSAEQGLALFDAALALAGTSTPDRAAGSAAASTSGTGDTIAIPAAALVAPVRLDLAALAAQGEVPAILRGLVRTRTRRTAAGGSVTVAGLVNRLSGLTADERRQELLELVRTQAALVLGHADPASVDSTAQFRDLGFDSLTAVELRNRLSTATGLRLTATLVFDYPNTDALAEHLRDELFGAVESEVRVPVQALPPTADDPIVVVGMACRFPGGVTSPEDLWRLVDAGTDAITTFPTNRGWDLESLYDPDPAHLGTSYTRSGGFLHEAGEFDPAFFGMSPREALATDSQQRLLLESSWEAIERAGIDPLTLRGSATGVFAGVMYSDYGSILGGKEFEGFQGQGSAGSVASGRVSYTLGFEGPAVTVDTACSSSLVALHLAAQALRAGECTLALAGGVTVMSTPGTFVEFSRQRGLAPDGRSKAFAEAADGVGWSEGVGILVLERQSDAVRNGHEILAVIRGSAVNQDGASNGLTAPNGPSQQRVIRQALASGGLSTADVDAVEAHGTGTTLGDPIEAQALLATYGRDRDPENPLLLGSIKSNLGHTQAAAGVAGVIKMVMAMRHGVLPQTLHVDAPSSHVDWSVGAVELLTEQTVWPETGRVRRAGVSSFGISGTNAHVILEQPEAVQRLAPGAAETVEPVAIKPSAEPSLVPWALSGKSPEALRAQAARLRDFLAERPEPRSIDIGHSLAVTRSQFDHRAIVLVDDAKAPADSLAALAALASGVADPAVVSDAVSTGGSAVLFTGQGAQRLGMGRELYGRFPVFAEALDVVVDHLDAALPAQAGLREVMWGDDVELLNETGWTQPALFAVEVALFRLVERWGVRPDFVAGHSIGEIAAAHVAGVFSLEDACRLVAARATLMQALPTGGAMIAVQATEDEVTPHLTDEVAIAAVNGPTSVVISGAEEATQTVAQHFADQGRRTTALRVSHAFHSPLMDPMLAEFRAVAEGLSYATPSLPVVSNLTGWLATADELCSAEYWVRHVREAVRFADGITTLEAEGVRTFLELGPDGILSALAQQSLAGEAVTVPVLRKDRGEESTALTARAHLHTRGLIEDWQDFFAGVGAGRVELPTYAFQRGWFWPVGRVGVGGDVGAVGLGSAGHPLLGAAVELAAGAGVVLTGRLSLSSHGWLADHAVMGRVFAPGTALLEMVMRAGDEVGCGRVEELTLAAPLVLPERGGVRVQVAVDAPDAAGRRGVGVYSCPDGVGQAVWSQHAVGVLASGAADQVGGFGDGGVWPPQGAVSVDAEGCYELFADAGFGYGPVFQGLRAVWRRGEELFAEVALSDEVAESADTATGFGLHPALLDASLHASLLSSLEGQSADGGPALPFAWEGVSLFASGATALRVRLAPAGEHAVSVTAVDPTGAPVISIDALRTRRLTLDEVNASHTQLSDALFGVQWTTVPSTPAADHPSVAIIGTDPFGLADGLSDALPLVEERGDLAALAASEHPVPDLVLVPVAGTRRTGVPADAEGHTDAGTSDMLRSVREATAQVLEQIQQWLADDRFEAARLVFVTRGAVSVGEGGIADLAASAVWGLVRSAQSENPGCFGLLDLDLDLALDSDLAPEVDIERDRDRDPVGGTVQPALAAALHATADEPQLALRGGTVQAARLTRIPAPQTDRAETDPAETDRPEIDTRRPGTVLITGGTGGLGGLLARHLVAERGVRSLVLASRSGLAAEGAEKLVADLEALGAVVAVQTCDVADGDAVAALVAGVSDEYPLTAVVHTAGVLDDGVIGSLTEERLATVLRPKADAAWHLHEATRDLDLDAFVVFSSLAGVLGGAGQANYAAANTFLDALMAQRRAAGLPGVSLAWGPWDRAGGMTGTLSDAEADRLARSGVPPISAEQGLALYDAATAGERPLVVPVRLDLAALRGLGDVPALLRGLVRTPARRTAAAGAAPSADVLTRQLAGLGGAEQEEVLLRLVRGQAAVVLGHADGSAIGAGRQFQELGFDSLTAVEFRNRLNAATGLRLPATLLFDYPTPADVVGHLRGRLGTGEVSGAGSVLAALDNLEAVIAGLSLDDAGEHQLVAGRLEVLRAKWADMRSAEGAVDGGADVDIEEASDDDMFALLDDELGLN

SEQ ID NO: 20558 - protein, 5435 aa, Streptomyces noursei
MNAPENPETPENNVVAALRAAVKETDRLRRQNRMLVAAAKEPIAVVGMACRFPGAVDSPEALWEMVATGTDVISGFPDDRGWDLEALRNSGTDARDTDVSQRGGFLDCIADFDPGFFGISPREAVTMDPQQRLLLTTAWEAVERAGIDATTLRATRTGAFIGTNGQDYAYLLVRSLDDATGDVGTGIAASAASGRLSYTLGLEGPALTVDTACSSSLVALHLAVQALRNGECGMALAGGVNVMATPGSLVEFSRQGGLARDGRCKAFADAADGTGWSEGAGVLLLERLSDAQRNGHPVLAVVRGSAVNQDGASNGFTAPNGPSQQRVIRQALANAGLATGDIDAVEAHGTGTPLGDPIEAQSILATYGQDRAHPVLLGSIKSNMGHTQAASGVAGVIKMIMAMRHGVLPRTLHVDRPSTHVDWTTGSVELLTDAHPWPETGRPRRTGISSFGVSGTNAHVIVEQAPDTPAEAADDTPPRTPRTLPWLLSARTGAALRDQATALLDHLDRPDGDRGPTALDTAFSLATTRAALEHRLAVVTGTDGTAGRDALTAWLAHGTAPDAHEGHAAGRTRCAALFSGQGAQRLGMGRELHARFPVFARALDTAVDLLDAELGGTLREVIWGTDDAPLNETGFTQPALFAVEVALYRLIESWGVAPDFVAGHSIGEIAAAHVAGVFSLEDACTLVAARAGLMQALPRGGAMVAVEATEDEVSPLLTDGVAIAAINGPTSLVVSGDETATLAVAARLAEQGRRTTRLRVSHAFHSPLMDPMLAEFRAVAEGLSYGEPQIPVVSNLTGAVADGTLLGTADYWVRHVREAVRFADGIRALTDAGVGAFLELGPDGTLAALAQQSAPDAVSVPVLRKDRDEEPAAVAALARLHTAGVPVDWTAFYAGTGAHRTDLPTYAFQYERYWPKATYRPADATGLGLTAADHPLLGAAMSVAGSDELLLTGTLSLATHPWLADHVVGGMVFFPGTGFLELAVRAADQVGCDRVEELMLAAPLILPATGTVQMQIAVGAADDDGGRDLRFFTRPGDDPDAAWAQHATGRITEGERVLALDTTTWPPRDAEPVDIDGLYDRYRANGLDYGPVFRGLRAVWRRDTEIYAEVALPEGTADADAFGLHPALFDAVLHSTLFASADGDDRSLLPFAWNGVSLHAAGADALRVRITSCGPDAVEITAVDPQGRPVVSVESLTLRAAGPDAGTADHRADAGSLFRMDWTPRTVHAPATPATWAVLGTDPIGLTEALTAAGPDTVTGLRDGVDALGELTAGDDRPVPDVVAVPLRGATDHGPAGAHDLTRTVLALLQEWLAEERFARSRLLLVTRGAVADGERGPLDLAAAPVWGLVRSAQSENPGRLLLVDLDDTAESAAQLPLLPALLDADEPQAVVREGTVRVGRLARLDSGRGLVPPPGTPWRLGSRAKGSLDGLALLPHPEARRPLTGHEVRVGIRAAGLNFRDVLNALGMYPGDAGLFGSEAAGVVVEVGPEVTGLAPGDRVMGMLFGGFGPLGIADARLLTPVPADWSWETGASVPLVFLTAYYALKELGGLRAGEKVLVHAGAGGVGMAAIQIARHVGAEVFATASEGKWDVLRSLGVADDHIASSRTLDFEAAFAEVAGDRGLDVVLNALSGEFVDASMRLLGDGGRFLEMGKTDIRAADSVPDGLSYHSFDLGMVDPEHIQRMLLDLVELFDRGALAALPVRSWDVRRAGEAFRFMSLAQHIGKIVLTVPQPLDPDGTVLLTGGTGGLAGLLARHLVTEHGARHLLLAGRRGPDAPGAAALHAELTALGAEVTVAACDVADRTALAALLATVPAEHPLTAVVHTAGVLDDGTLTALNPDRLATVLRPKVDAAWHLHDLTRHLDLAAFVLYSSTAGVMGGPGQANYAAGNTFLDALAAHRHALGLPATSLAWGAWEQGAGMTGALTDHDLRRVSDAGGQPLLTAERGLALYDAATAADEPLIVPLGLTGGALPAGVGVPAVLRGLVRTAGRRARAGTAGVSRAGLAERLAALPEEERTPFLVELVRTEAATVLGHGSTDPVDARREFRQLGFDSLTAIELRNRLGKATGLTLPATLIFDYPTPDRLAVHLHDELLGADAPVTVTAAAQAADPEHDPVVIVGMSCRFPGGVSSPEELWDLVASGTDAITGFPADRAWDRHPQLAGAPGARTGQGGFLRDIADFDAAFFGISPREALAMDPQQRILLEVAWEAAERAGIDPQTLRGSDTGVFMGVSGQDYAGLVMRSRDDIAGHATTGLAVSVVSGRLAYALGLEGPALSVDTACSSSLVSLHLAAQALRAGECTMALAGGVTVMTTAANFTGFSRMGGLAQDGRCKAFSDSADGTGWSEGAAVLVLERLSDARRAGHRVLAVVRGSAVNQDGASNGLTAPNGPAQQRVIRQALANAGLTPVDVDAVEAHGTGTPLGDPIEAQALIAAYGTDRDPEHPLLLGSVKSNIGHTQSAAGAAGLVKMVMAMRHGILPQTLHLTEPSSHVDWSAGTVRLLTERTAWPRTDRPRRAGVSSFGISGTNAHVILEQPPAEPTPAADPGRPAPTVVAWPVSAQTPAALDAQLDRLRTAAALAPLDTAHTLATGRSLFEHRAVLLATVGDPATGAPDLPEVARGAATPHRTAFLFSGQGAQRSGMGRELHAAFPVFAAAFDEVVAVLDAELGSDADGGVSLREVMWGGGSELLDRTRFTQPALFAVEVALFRLVASWGVGPEFVAGHSVGEIAAAHVAGVFSLVDACRLVVARASLMDALPVGGVMVAVEAAEAEVVPLLVDGVAIAAVNGPVSVVVSGVEAAVGQVVDQLVERGRRVRRLAVSHAFHSPLMDPMLDAFRAVAEGLEYHQPRIPVVSNVTGEVAAAEELCAADYWVRHVRATVRFADGVRTLAERGATAFLEIGPDGVLSALARGVLPAEALVTPTLRKDRDEESALLAGLARLHVAGVTVDWSAALTGTGARGTDLPTYAFQRERYWPELAAEPAGGGADAADAEFWAAVERADATALAAHLDIDGDQLGAVLPALSAWRTRRRTTSATNALRHRESWEPLSLAGTPHTGGVLVLVPAAATTDPWVADVVAALGPDARRVDVPADGTDRAALAALLTEAADDTAPTAVVSLLALDETSGDDAVPAGTTATAALVQALADTGAPAPLWALTRGAVAALPDEQPTAPAQAAVWGLGRIAALELPRHWGGLVDLPADLDERTARRLPAALADAGDEDQLALRATGAYGRRITPAPAPDDAPGTGWQPTGTVLITGGTGALGRHTARWLAAHGAEHLLLLSRSGPDAPGAAELTTELTALGARVTLVACDAADREQLTRVLAEVPRDCPLTGVVHTAGVLDDGVLTGLTPDRFATVFRAKVASAVLLDELTRDTDLAVFALFSSVAGAVGNPGQAGYAAANAVLDALAARRRAQGLAGTSIAWGAWAGDGMAARHTRPGAEPVGLLDPDLAVPALARAVTEPQPTLVLADLQQPRLLESLLALRPSPLLSRLPAARTAARAVQEADRRRAGAAADLRDQLAGTAPADRHAVLLRLVRTTAAAVLGHTGADAIRADKPFRDLGFDSLTAVELSSALAAATGLALPPSLVFDHPSPRALADHLRAELTGDRPESAPAAPPAPVPAADDDPIVVVGMACRFPGGVTTPEEFWQLLAEGRDGIDAFPTDRGWDLDVLGRRRPGPQRPPRSAASSYDAAAFDPGFFDISPREALAMDPQQRLLLETAWEAVERTGTDPTRLRGSRTGVFVGTNGQDYAGLVLRAQEDVEGHAGTGLAASVISGRLAYAFGFEGPAVTVDTACSSSLVALHWAVQALRAGECSLALAGGVTVMTTSTSFAGFTRQGGLAPDGHCKAFSDSADGTGWSEGVGVLVVERRSDALRNGHEILAVVRGSAVNQDGASNGLTAPNGPAQQRVIRQALANAGLAPGDVDAVEAHGTGTVLGDPIEAQALLATYGQDRPADRPLWLGSVKSNIGHTQAAAGAAGLMKMVLALQHGTLPRTLHVTEPSTRVDWSAGAVRLLTERTVWPRTDRPRRAGVSSFGISGTNAHVILEQPPAEPTPTAPADRPTRTPAVLPWVVSARSATALDAQLARLRAFAAERPDLPPADVAHSLVTSRATFEHRAVLLAAPDGITAAARAEARERSTAFLFSGQGAQRSGMGRELHAAFPVFAAAFDEVVAVLDAELATGSGGGVSLREVMWGGGSELLDRTRFTQPALFAVEVALFRLVASWGVGPEFVAGHSVGEIAAAYVAGVFSLVDACRLVVARASLMDALPVGGVMVAVEAAEAEVVPLLVDGVAIAAVNGPVSVVVSGVEAAVGQVVDQLVERGRRVRRLAVSHAFHSPLMDPMLDAFRAVAEGLEYHQPRIPVVSNVTGEVAAAEELCAADYWVRHVRATVRFADGVRTLAERGATAFLEIGPDGVLSALAAACLFDTDAEVVPALRKGRPEEHTALTAAAQLHVAGVDIDWTAVLAGTGGRRIALPTYAFQRERYWPSLAAQAPGDAGGLGLEAGRHPLLGAATTVAGSAEILLTGRLSTTAQPWLAVYEADGRTVLPAAVLAELAVRAGDQADCPTVAELTVAAPLVLTGAAAQRLQVRVAAPDDTGRRALSVHARPDDSPDSPWTLHATAVLTHDTPQPPAPDTGWPPERAVPLDALPTATGPARIAAAWQWGDELCAEIELPEPGPAERAFALHPALLDTAVRAGGLLDGDATLDALGWRGLALHAASATALRVRLTPDGTDTWALEATDPQGAPVVSVTGLTLGTPTVDRSGAGAADDGATLLDLEWVPAPQAAPTGGDHLPYAVLGDQLAELDGQLRIAGDGPGRVASLAALLDGGAPLPRLVLAPVLGVPTGEGDLPAAVRGTTTAVLELLQRWTADARTADSHLVIVTRGAVAAGAEDVHDLAAAPVWGLVRSAQSEHPGSFLLLDLDPADPAGASRAAAPATLAALLDAGETQAAVRADTLTVARLTRAADGPEATAGHPVRDWDRDGTVLITGGTGGLGGLLARHLVTGHGIKHLLLAGRRGPDAPGARALRDELAALGAEVTVAACDVADRAALDRLLAQLPPEHPLTAVVHTAGVLDDATVGTLTPERLDTVLRAKADAAWHLHDATRDRDLAGFVLYSSVAGVTGGPGQGNYAAGNTFLDALAAHRAAQGLPGLSLAWGPWGQDAGMTGTLGAADLARLERSGMPPLTPEQGLALFDAAGARGDGFAVAVRLARGAAAPGADEVPAVLRALVRGRRRTAAAAGHAGVLARRLAALDAEQRHQALLDLVRTETAAVLGHSGADAVPAERDFNRLGFDSLMAVELRTRLATATGARLPATLVFDHPTPDAVARHLASTLPGGTAAGPDRSPLAELDRIAAELSPEGADDATRQGVVGRLRHLLAQWDGTRQDGGGTTVDDRIEAASAEEVLAFIDHELGRQADS

SEQ ID NO: 20559 - protein, 337 aa, Thermosynechococcus elongatus BP-1
MKAVAIAEFGEPDVLVLRQVPEPQIEAADEVKIQLRAASVNPIDTKLRQRGTFFPDRRPAILGCDGAGVVVAVGAAVRRFRVGDEVYFCYGGLGDRGGCYAEYAVVPEAAVAHKPKTLSFIQAAALPLAVITAWEALGDRGAVPPLNVLSTAKTVLIHAGAGGVGHLAIQLARRAGAQVATTISSPAKAQFTEALGATLAINYTTTDWVQAVLDWTGGKGVDLALDTVGGATFAETFKAVRPYGTLATLLEPAVDTPWKIARQRNLLIQLTLMLTPQLLGLREALAHQGQILEQVATLVDRGELRVVVDKTFPLGAAADAHRYLSQRLVQGKVVLIP

SEQ ID NO: 20560 - protein, 363 aa, Shigella flexneri 2a str. 301
MLKGLFPAIVNGVTEIKNGSKLYHMKQTLTIRSGGHMATRIEFHKHGGPEVLQAVEFTPADPAENEIQVENKAIGINFIDTYIRSGLYPPPSLPSGLGTEAAGIVSKVGSGVKHIKAGDHVVYAQSALGAYSSVHNINADKAAILPAAISFEQAAASFLKGLTVYYLLRKTYEIKPDEQFLFHAAAGGIGLIACQWAKALGAKLIGTVGTAQKAQSALKAGAWQVINYREENLVERLKEITGGKKVRVVYDSVGRDTWERSLDCLQRRGLMVSFGNSSGAVTGVNLGILNQKGSLYVTRPSLQGYITTREELTEASNELFSLIASGVIKVDVAEQQKYPLKDAQRAHEILESRATQGSSLLIP

SEQ ID NO: 20561 - protein, 327 aa, Shigella flexneri 2a str. 2457T
MATRIEFHKHGGPEVLQAVEFTPADPAENEIQVENKAIGINFIDTYIRSGLYPPPSLPSGLGTEAAGIVSKVGSGVKHIKAGDHVVYAQSALGAYSSVHNINADKAAILPAAISFEQAAASFLKGLTVYYLLRKTYEIKPDEQFLFHAAAGGIGLIACQWAKALGAKLIGTVGTAQKAQSALKAGAWQVINYREENLVERLKEITGGKKVRVVYDSVGRDTWERSLDCLQRRGLMVSFGNSSGAVTGVNLGILNQKGSLYVTRPSLQGYITTREELTEASNELFSLIASGVIKVDVAEQQKYPLKDAQRAHEILESRATQGSSLLIP

SEQ ID NO: 20562 - protein, 1352 aa, Escherichia coli CFT073
MRRNCWYNPRCLSNVGPGNTLSTFIQGHNQYSDQPTLLTLRKANAAIDDEHMLHRTLAALWVRGENIDWRRFNQTALGKHIPLPDYPFEQTYYYRYGAALSGYRQYPNPLRRPQDEWLQRVLWRMHDTSLREAFYAPGELIIIISADGDKLQQTLMSSGVDSITMPLPISSEDDVWDNDRILTHFHDICALLAHKTYRQLHCLYAPGAEAGSSLTQSLSGLYRVARWCMHSTTPLASLTVLTHGAFRVQEEDNPEPTLAALSGAVNVFAQELHPTEVRLIDIDAQSSDENLNLLTQRLAPKQETVMALRQGMLYLRRFIPTRLLAHLPPQTGCIPGNVLWIIGGEKGIGRMIGEALAQREGVRVVLSSRTGYHHEAVQQDALDVIHCDVTQAEAVRACLATLLERYGRLDGVIFAADATTTLTLHQLSESALRDTLTVKERGTANVLHALAQRNLLDERLLLLFCNSLAAVNAEIGQTGYATASAYLDALAQQLRTRYKVNALSIGLDALREQGMLLDAINGSEYDVLRGLRPLMTGTLLQAYKQQGADTSYYARLSPESDWLLDEHRISGIATLPGTGYLALAYEALRHYFVQDQICIDELVFLAPLTVMDNCSVDVFVDISPNGQGVSVEVKSMTERFSGTLTTHARGRATRLMVDDNVVCDLTGLMREMHTITPPTKELSSTHFHYGPRWHSVQQLYGNTAQTQVFATLALPTVAANDTIALHPALLDIASSVVEQLPGFHTDSVPFLYQDLRLYRPLPNTLHVALTVNRHDEEGDSYAFTLYDMAGEMVARCAAMVKRKVQLHIQDVDDDTRLRVPSADNYQLRLAAEGEGAGKLALCPTPRLALGDSQVEIEVLATGLNFKDVLFTTGLLRQQPGEAPLQLGLECAGRITRVGKNVTEFAPGEDVMAVLNGGFVQYARVESDCVVRKPAHCRIEQAAALPIAYLTAYYALVVRANLQPGERVLIHSAAGGVGLAALHIAKRCGAQIFATAGSEQKRDYLLSLGVHAVADSHDEQFAATLLTASDGQGMDVILNSLTGRLLDASLALLAPLGRFLELGSKDIVEDKALPMRFFAQGGTFIPINFHAAHGAFSRYLQQIVAWIDDNTLPLLPCKSVPLPEVARAFATLTTPQHIGKVVVTHRTAAGMDRLNAMIAERRLGGYALSMSNAEVMRQLWPILNTRSPWAQLLLSPRAIDRLARGNRVDRGVPSAANDTITQQTVKKRPRPEIGVPYSPATREVERVLCQILEEYLGLDRVGIDDNYAELGATSLDMVQLSGQMARHYPQVSVVSLYNHATVRQLATFCQPPEGESNAPSPQPAVQTNTRANQIAKRALQIAKNTARSHTSLH

SEQ ID NO: 20563 - protein, 312 aa, Leuconostoc mesenteroides subsp. mesenteroides ATCC 8293
MKAAVINHYGGREQLEVIDMPIPKIKSDEVLVENMATSINPIDYKAREGLLKRMFPWQFPVILGWDIAGIVASTGDDVTSFKVGDPVFARPDIDTKGVNGSYAEYTAVKADKLALKPNNISFVEAAAVPLAGLTALQMLRKLQLSSNQKILIQAGAGGVGIYAIQLAKMIGAYVVTTASQNNHEFVKSLGADSVIDYHKNNIQDVLSDFDTVLDTVGDVDNGIAILKSGGHLVTISNALTDQQKNTSDKTVTEGWLNPNGQDLAILASYIAKGELQIVVDSLYPLTTEGIQSAHERSETHHARGKVVVQIKE

SEQ ID NO: 20564 - protein, 356 aa, Leuconostoc mesenteroides subsp. mesenteroides ATCC 8293
MNLLDKIKNIWPFGQSHKMRAIGFERPLLIDQPDAFVEKVIPRPQPDKDELLVKVLASSVNPVDTKMRANYTHDGVFRILGFDAVGVVVEVGQNVQHFSVGDKVYYAGAQLKPGSNADLQVVHEALVGHAPTSLSDEEIAAMPLTSITAYEILHEALCYDLEENSALGHTILIVNGAGGVGSVLIQLAKYIGMTVITTASRTESVTWVKSLGADYILDYHQDLNEQMRKIQHDKVDNIAILQNTDYYWPLATAVIKPFGRIASIVETTEPIDMGPLKNIGAQFSWVFMFAKGNYGVNMQSQGNALNQVARLLDENKIKTTLSKTYHGLSVENIRAATKEVEAGRMIGKVVVKYDEQ

SEQ ID NO: 20565 - protein, 324 aa, Microbulbifer degradans 2-40
MKAILCKQYGAPSVLHVGEVPKPAPKPNEILIRVRAAEATKADCEMRAFKFAVKWFWLPLRLAMGITKPRNPVLGGYFAGEVEALGEQVTNFSVGDQIFGSTQMRFGAYGQYVCLPASYTLVKKPNNISFEQAAAVPLGGLNALHFLSKANIKPGDKVLINGSGGSIGSFALQIAKHWGAHVTAVDIGFKENFIRSLGADEFIDYTRTDFTRNAISYDVIFDMVPNSSFEGCIASLVPNGVYLIGNPRLTDLLKANIKRYGKGRAVHVAFARETLEELTTLKNMIEAEAIMPAVDKVYRMGQAAEAHMRVETERRLGSVVIVIS

SEQ ID NO: 20566 - protein, 322 aa, Microbulbifer degradans 2-40
MRAIVQTKYGSADELELREIETPSPAANQVLVRVQAVAINDYDWCMVSGKPLVYRLMFGLFKPKTPIPGMEIAGEVVECGVNVKNFKVGDTVFGDLSECGFGGFAEYVSADENALFLKPSQMKYEDAAAISHAACLALQGLVDVGNLACGEKVLINGAGGGVGAYGLNIAKFYDAHVTAVDAAHKLAMLKQNGFDEALDYQSIDFTRQPAQYDLILDTKTNRGVFRYLKVLAPNGRYVTVGGSVMRLIQLLLLKPWVALFTNKRVSIVALKTNKDLATICEWYLAKKLVPVVELRESLSAVPQAISYFGAGKHKGKLVVRLK

SEQ ID NO: 20567 - protein, 304 aa, Oenococcus oeni MCW
MKAIEINEFGDVDVFYATEKKLADPKPNQVLVKNFATAIDPYDVKYRSGFYGGSDKLPTVLGSSVAGIVQEIGSEVTKYSVGDRVVASTHLRSYAEQVLVSEKQLALIPDNLTFVQAAGVALGYQTGYQAIIKEIKLKKGQSILIHGGSGAVGFAAIQAAEKIGAGKIYTTAGTKGKAFLNGFNPAIAVYDYKKENFTNISEKIDAILDTVGGETQDKSLKLLKENGKLCSTVGLTDKAKKSPFDTDAIYLDSGSCLTELLKDMSQGLTVLKIAKISQFSLKNLRSMHKEFENDHPLGKLILEL

SEQ ID NO: 20568 - protein, 2551 aa, Trichodesmium erythraeum IMS101
MKQQQKRELVAIIGMACRFPGANDYGQFWKNMEAGVNSISEIPSQRWEAEKYYAPIPNQQNKTISKWAGLIEGIDEFDAEFFSISPREARKVDPQQRVILELSWSCIEDAGYSPSQLSGKDVGVFMGACNYDSILLMNRNQENIEGHSGTGTWTCMIPNRISSFFNWHGPSIPIDTACSSSLVAIHYALKSLKESECEMALVGGISVLFTSTTYIQMSQLGMLSPTGQCRTFSSDANGYVRGEGAGVVLLKPLTKAIVDGDHIYGVIQGSAINHGGKARTITSPNVYAQAKVIRSAYINANISPDTVSYIESHGTGTPLGDPIEINALKRAYKQLAQQYGVEKTEKPYCGIGAVKSNIGHLEGAAGIAGLIKVLLAMKYKKLPKILNFKELNPRIKIKDTPFYIIEENQEWKRLKNELGEEIPRRAGLSSFGIGGVNAHIVLEEPLEEVKINLSDTLERPQEILTLSAKTEKALRELATKYQTYLQLDSEASLSDICFSANKGQTHFTKRLAIVAESKRDLQQKLAGFLQDNATQGVFTGNSDTQTIAFLFTGQGSQYAEMGRQLYDTQPTFKKIIDQCSKILEKYLEVSLLDVLYPNLTIKKEEVSSLIDQTAYTQPAIFVIEYALAKLWESWGIKPDVVMGHSVGEYVAATVAGIFSLEDGLKLIAARGRLMQQLPAGGEMVAVMASEAKVKKLLRPYAEKVAIAAINGPKSVVISGEATAVREIVSSLESEKIKTKQLQVSHAFHSPLMEPMLAEWEAVAKELTYHQPEIPVISNVTGTIADKSITTAKYWVDHVRLPVRFTEGMDALQKQGVEIFLEVGPKPILLGMGRRCLPKDVGVWLPSLRLGVDEWQQMLSSLGELYVQGAKVDWSGFDSDYSRQKVALPTYPFQRERYWVEENGYGKKLLSKQQTVKELHPLLGYKINIAGQQQIFESFLGAEKPEYLKDHRVFDEPLFPTTGYLEIALAAGQNQYKTSWIEVEDLRIEKGLVLLEGEVETVQTILTPQENQTYQFQIFSQEQQGGTQQWVLHVAGKIQQAAQQVEEEKLDIEKYLGECDRSIEIKQHYQRCQSMGISYGSSFQGIKQLWKGENQALAKLAIPEALAGEMGEYNIHPVILDAALQVIFNALPEAENENQTTYLPVGVEKLTTYSSPEESMYAYGVVDGTGGGNWKANVILSTETGKIVGKISGLRVKAASKEALLGSKQETIKDLLYEIEWRSKGRLGRLLPPDYLLAPTKIEQQLQPTIRELIAQANLESYQEIPGKLEELSLEYVLQAIKELGWYYKVGDKLNSEQEIERLSIVPSQKQLFKRMLQMLGEAGIIEPVVGTDEWNVVQTLDNSEEQGPKKGEKFLSEYPQAAAELTLLNRCGTELSGVLQGATDPVELVFPSGDLTAATRVYQDSTLAKFMNSLVEKTIATAIEKLPKDQGIRLLEIGAGTGGTTSYILPTLPETNTEYVFTDLGVLFTTKAKERFQDYPYVEYRTLDIEVDPTTQGYNAHQYDVIIAANVLHATTNIKEILSNVRKLLAPGGILVLFEITSRQRWLDLVFGLLEGWWRFEDLDIRPDYPLLSRSQWQEVLMGTGFTEVATLPEVEGMPQVLSQQSVIIAQADSTASVPDAKGWLILADKQGIGQHLARQLESFGGVCTVVFAGEKYQQITPEEFTINPDRPEDYEQLMTAVVDKSPALSGVVQCWTTEFAATKEIKDLSRWGCGTTLFLVQALLKSRLQRLPQLWLVTSGSQPVPLNSPLIPGVSHSSLWGMGKVINLEHPELNCVRIDLDPEATVESNANLLFNEIWSEDKEDQVALRENSRYVARLVASHHQRVATGGLTIPSQPYKLGISEKSSLDKLILEPINRNAPAAGEVEIQVMATGLNFLDLVATLGLVPDEVDGVSQKHLVDINRFGVECSGYVVAVGEGVKGLEVGDMAIAMAQGSFSQYVTVNASYVVPKPENITFEEAASIPANFLTAYYALHHIAKITKGQRILIHAAAGGTGMAAVQIAQKAGAEVFATASPPKWETLRKMGVKYIMNSRTVEFADQVMEFTEGQGVDIVLNSLTSGDFVRKGLSVVSPQGRFIEIAKRGVWKSSQVAEVRPDISYSIVDLLRKSQEEPELINSMLQELTADFSNSLLKPTPLKVFPIEEVISAFRYMQQAKHIGKIVVTQPKQPDKPVSFRGDAAYLITGGMGGLGLLISRWMVSKGAKHLVLLGRRAPNEVVKEKLVELEAAGASVTVETLDVSDWEGMKGVIERINNSGTPLAGVMHSVGVLSDGVLENQTWSSFEQVMAPKVQGSWYLHQLTQNQSLDFFLVFSSVASLFGSSAQANHSAANAFLDGLAHYRRSLGLPGLSIHWSTISQVGEAAERGADVRLQKQGIAALTPTEVLESLEVLMSSNANTEVAVVDIDWSKWQERASQWRFLADWEGVVAGVIGTETRLLEQLKESSSEEQEKMLVDYLKGKVANIFGTTTGKIMDIEQPLTTMGLDSLMAVELRNLIQRELGFDIPMQTIIEGISISEIVDLVSEQLLLEQVSYSNTSPTEEIDEDMEEITL

SEQ ID NO: 20569 - protein, 331 aa, Trichodesmium erythraeum IMS101
MKAVVMISPGTPEVLQVQQVADPVIENDREVLIRLKAAGVNPIDTKLRTRGTLYPDKMPAILGCDGAGIVEAIGKNVQKFQVGDEVYFCNSGIGAAPGNYAELAVVDERFVENKPSSLSFVEAAAAPLVLITAWESLYDRGKLQAGRKVLIHGGAGGVGHVAIQLAKLQGAEVATTISSKEKSDFVKSLGTDLAIFKNEDFVKVVLDWTNGEGVDLAFDTIGGKVFYDTIPAVKVYGDLVTILEPDTSLGNLKVARQRNLRIGLELMLTPMTKGLMEAQEDQAKILQQCRRLFDQGKLKIHVNRTFALDDAIEAHRILEAGSMLGKIVLTI

SEQ ID NO: 20570 - protein, 354 aa, Bifidobacterium longum DJO10A
MGDSFAARCGTMNAVIPFDTKERAMKAVYASTVNHADPLAALAVGEQPEPQARPFWSTVSVRAVTVNHHDVWSLQGVGLAAEQTPMILGTDAVGILDEDIPGKHGLKAGSEVVLYTFVGTDGAGVAPGERRTILSEKYPGTMAEKTSVPSANVFAKPASLTTAEAAALGTSWLTAYSLLFDAAGIKPGDSVLIQGAGGGVSTAAIQLAHAAGLEVFVTSRDADKRAKALKLGANAALETGARLPRKVDAVIESVGAATWGHSVRSVRPGGTIAICGATTGDQPGAELTRLFFQDIRVQGCTMGSREDFARLLRFVEHADLHPVIDSVVSGLDAAPEAFARMIAGDMFGKIVIEL

SEQ ID NO: 20571 - protein, 320 aa, Pseudomonas syringae pv. syringae B728a
MKALQGVEGHVEWVEEPSPALDVGQVRIKVAAAGLNRADLLQREGKYPPPPGVTQTLGLECSGVIAEVGPGSPWVVGDRVCALLAGGAMAEEVVVDGRHVLPVPEGLSLHEAAAIPEVYATAWLNLFELAGLKPGEKVLLHAGASGVGSAGIQLCKAFGNPVWVSVGSAERLAYCVELGAQGGVVRSESLEGLNDFAPFNVILDPVGASYAELNVKLLALDGRWVLIGVMSGREAKVDLAHVLGKRIRLMGSTLRSRDDTFKADLLSDLGQHVWPLFTEGRLKPQLAKSFAIKDAEAAFEELATNTVSGKIVLVIDESLV

SEQ ID NO: 20572 - protein, 330 aa, Bifidobacterium longum NCC2705
MKAVYASTVNHADPLAALAVGEQPEPQARPFWSTVSVRAVTVNHHDVWSLQGVGLAAEQTPMILGTDAVGILDEDIPGKHGLKAGSEVVLYTFVGTDGAGVAPGERRTILSEKYPGTMAEKTSVPSANVFAKPASLTTAEAAALGTSWLTAYSLLFDAAGIKPGDSVLIQGAGGGVSTAAIQLAHAAGLEVFVTSRDADKRSKALKLGASAALEIGARLPRKVDAVIESVGAATWSHSMKSVRPGGTIAICGATTGDQPGAELTRLFFQDIRVQGCTMGSREDFARLLRFVEHANLHPAIDSVVSGLDAAPEAFAKMIAGDVFGKIVIEL

SEQ ID NO: 20573 - protein, 320 aa, Streptococcus mutans UA159
MKAVLVEQPGSSEQLKVVEREIPKIKEGWSLVKIKGFGINRSEIFTRKGYSPSVVFPRVLGIECVGIIEETSDKNHFFHGQKVVSIMGEMGRAFDGSYAEYVLLPNEQIYPIKTNLTWDKLAAAPESYYTAYGAYKNLKLKKQDLVLVRAGASGVALAFLNLLKASLPEIKVTASVRSLAKKQQLLDSGYDEVIIDRDSCLQTKQKFDKVLDLIGPACIDDTLNHVADGGIICLVGLLGGQWTLDNFDPIMALQNNIYLTTFYSGNINLNKLQELFDFIAKYAVPIKVEKIFTIDHIKEAHDYLESPQAFGKVIVLNGVA

SEQ ID NO: 20574 - protein, 332 aa, Shewanella oneidensis MR-1
MSDLPNDYAHIHIEQPGAPEVMQLSRSSLPVVGAGQVLIRVSAAGVNGPDLKQRAGAYPPPPGASLILGLEVAGEICALGEGVTQWQLGDKVCALVPGGGYGEYTLTYAAHCLPIPKGFSMVQAAALPETFFTVWGNLFMRAGLKAGETVLIHGGSGGIGSTAIALANRLGAKVIATTGQDEKRDYCLGLGADLVVNYNSQNFVEEVMSFTQGKGVNVVFDIAGGDFINLNLQSLALDGRMVSVSTQRSPKAEVNILQLMAKRIVWTGSTLRPQTVEAKAEIARQLRERVWPLLDSQQIVPHIFATYPLIDAPKAHRLMQSGEHRGKVVLTL

SEQ ID NO: 20575 - protein, 316 aa, Vibrio vulnificus CMCP6
MENKQIVITEFGGPDVLAIRSSQMPEPKPGQVLIKVYFSGINPIDVKTRAGLGWAAAQNKDKLPWVPGYDISGKVVSCGENAERFVIGDTVAGFVGFPLEGGGYSQYLCVDEDALSLVPGSVTLEGAAVLPLAGQTAAQALNKAQVKEGERVLILAGAGGVGHLAVQIAVAAKAEVYTTCSERNLDYMATLGAHAINYQFAPASERLSDVDVLIDLVGGDVALDALKCLKDNARVVTVPTLSAEMICEKAKLLGFEATGMLVEPDPQQLDTLLYMVGVGLLKTEIQRIYPMHEVSDAHKQIETGHTRGKVLLDMQC

SEQ ID NO: 20576 - protein, 258 aa, Methanosarcina barkeri
MELPLPMTMGSDVAGVVDAIGQGVDSFQPEDEVFGKASAGQGGYAEYIVVNSTQIAQKPKSIGFIESAAIPTAGLAAWQSLFDIAGLEKGQSVLIHGASGGVGTFAVQFAKWKGAYVIGTASSKNAEFLKSIGCDEVIDYRNQQFEEIVSNLDVVLDTIGGDTFERSWGVLKPGGFLVTTVASIPEGTPQKHGVRAERLITQADGKELAQIAAIIDERKIKPIVTTVLPLADAQKAHEMSESGHTRGKIVLRIAEDPK

SEQ ID NO: 20577 - protein, 311 aa, Oceanobacillus iheyensis HTE831
MKAIVIENYGHADELHEQDVPKPTINDNQILIEQYATSINPIDWKLREGYLKDGFNFEFPIILGWDSAGVVAEVGKNVSQFKVGDRVFSRPATTAQGTYAEFVAVEESRVAKIPENVSFEEAASVPLAGLTAWQCLVDFSAIKKGDKVLIHAGSGGVGSFAIQFAKHFGAYVATTASGKNESLVKELGADRFINYKEENFNEVLEDYDIVVDTLGGDILEQSFEVLKEGGKLVSIAGNPDEEKAKEKGIKAGFLWLEENGKQLSEVADLLENGKVKSVIGHTFPLTEQGLREAHQLSETHHARGKIVIKIK

SEQ ID NO: 20578 - protein, 326 aa, Oceanobacillus iheyensis HTE831
MRGLVHERNQVTIKDMDEPTPASNEVVVKLKAAGLNRRDLAIPKRRGDEQEALILGSDGAGVIDSIGDEVENVQVGDEVIINPSLRWKQNSDAPPKGFDILGMPDHGTIAEKIVIASDQVEPKPSYLSWEEAAVFSLAALTGYRAIFTKGKLQPGETVFIPGAGSGVASFLIHFAKNHGARVITTSRSKDKQEKAKDLGADVVLDTSDDWEAALQDETIDMVIDSVGKATFHRSLAVLKKGGRFVTFGATTEDVIDFDLRSFFYGQYQLIGTTMGCKEELEAALNHYIKYETRPVVDKVFNLEESLDALEYLKEGKQFGKVAIRIS

SEQ ID NO: 20579 - protein, 320 aa, Pseudomonas syringae pv. tomato str. DC3000
MKALQGVEGHVEWVEEPSPALDVGQVRIKVAAAGLNRADLLQRAGMYPPPPGVTATLGLECSGVIAEVGPGTSWLVGDRVCALLAGGAMAEEVVVDGRHVLPVPEGLTLHEAAAIPEVYATAWLNLFQLAGLKPGEKVLLHAGASGVGSAGIQLCKAFGNPVWVSVGSTERLAYCVELGAQGGVVRSESLEGLNDFAPFNVILDPVGANYAELNVKLLALDGRWVLIGIMSGREAKVDLAHVLGKRIQLMGSTLRSRDETFKADLISDLGQHVWPLFTEGRLKPQLAKSFAIKDAEAAFEELATNKVSGKIVLVIDESLV

SEQ ID NO: 20580 - protein, 316 aa, Vibrio parahaemolyticus RIMD 2210633
MEHKQIVITEFGDANVLAIQSAETPIPKSGEVLVKVHYAGVNPIDVKTRAGLGWAASQNKDKLPWVPGYDISGKVASCGTKTSRFAVGDEVAGFIGFPLQGGGYSQYVCVPESELSHVPSSVTLEAAAVLPLAGQTAAQALSKANVSECDRVLILAGAGGVGHLAVQIAVATKAEVFTTCSERNLDYLATLGAHAVNYQFAPVSERVEGVDVLIDLVGGDAALDALKCLKDNARVITVPTISAELICDKAKLLGFEASGMLVEPDPSQLDTLLYMVGVGLLKTEVQHIYPMAEVIAAHQQVESGRTRGKVLLDMTC

SEQ ID NO: 20581 - protein, 329 aa, Bacillus subtilis subsp. subtilis str. 168
MKAVIHNGKAGLLGLSVQDVPSTKPGYGEVKVKLKSAGLNHRDLFLMKNKSEQDPHMILGSDGAGIIEEIGEGVKNVTVQTEVVIFPTLNWDLTENVPPVPEILGGPSDGTLAEYVIIPSQNAIKKPAYLSWEEAGVLPLSALTAYRALFTKGQLKKGEHLLIPGIGSGVATYALFMAKAIGATVSVTSRSEEKRKKALKLGADYAFDSYSNWDEQLQGKKIDVVLDSIGPALFSEYFRHVKPNGRIVSFGASSGDNLSFPVRSLFFPQVNVLGTSMGSGEEFQAMLAFIDKHKLRPVIDRIYPLEKACEAYKRMQEGRQFGNIGIVME

SEQ ID NO: 20582 - protein, 343 aa, Aquifex aeolicus VF5
MKAVILTGFGGIENLKYVEDFPKPEPKEDEVLIRVKAVALNHLDIWVRMGALPVKPELPHILGSDVSGVVEKVGSLVKNVKEGEEVIIAPGLSCGVCWDCQSGRDNHCKDYDILGLKNKGGYAEYVAVPARNVIKKPKNLSFEEAASYPLTFLTVWNALVDKAQIKPYSRVFIWAGSSGVGVAGIQLAKAFNAFVITTAGNEEKAKKCKELGADLVFNHYKDDVVKKVREVFKEGVDVVVDHIGEATFWKSVQMLRKGGKLVFFGTTTGSKGEIDIRYVFVREIQLLGVYMGSRANLFKITELFERGVFKPVVDKVFPLKEVPQAHKYLEESKHFGKVVLKVE

SEQ ID NO: 20583 - protein, 347 aa, Sulfolobus solfataricus
MRAVRLVEIGKPLSLQEIGVPKPKGPQVLIKVEAAGVCHSDVHMRQGRFGNLRIVEDLGVKLPVTLGHEIAGKIEEVGDEVVGYSKGDLVAVNPWQGEGNCYYCRIGEEHLCDSPRWLGINFDGAYAEYVIVPHYKYMYKLRRLNAVEAAPLTCSGITTYRAVRKASLDPTKTLLVVGAGGGLGTMAVQIAKAVSGATIIGVDVREEAVEAAKRAGADYVINASMQDPLAEIRRITESKGVDAVIDLNNSEKTLSVYPKALAKQGKYVMVGLFGADLHYHAPLITLSEIQFVGSLVGNQSDFLGIMRLAEAGKVKPMITKTMKLEEANEAIDNLENFKAIGRQVLIP

SEQ ID NO: 20584 - protein, 344 aa, Sulfolobus solfataricus
MKAVRIHEYNKPLSLDEVNKPRVSGPYDIVVRIRGAGVCRTDLHIIEGVWKDVLNPKLPFTIGHENVGIIEEKGNAVDWLDVGDQVILHPYITCRHCRACRSGNDMHCPYGKFPGLDGTDGGYAEYLRTSAFSAIKIPKGIDIIPMAPLADAGITAYHAVKKISQYLYPGSIVGVIGVGGLGHIGIQALKAITPARVIAIDISEEKTKLAKELGADEVVIAGKDSGVSDVLKLTDNIGVDAIIDFVGEHSTPQNALRMIRKGGIYSIVGYGGEFKNSTLDFINREIMVVGNLVGTYNELSELVTLYVQNKVKLKVKTFPLEEANSALEELKAGRILGRAVLVPS

SEQ ID NO: 20585 - protein, 347 aa, Sulfolobus solfataricus
  unsure (1)..(347): unsure at all Xaa locations
XRAVRLVEIGKPLSLQEIGVPKPKGPQVLIKVEAAGVCHSDVHXRQGRFGNLRIVEDLGVKLPVTLGHEIAGKIEEVGDEVVGYSKGDLVAVNPWQGEGNCYYCRIGEEHLCDSPRWLGINFDGAYAEYVIVPHYKYXYKLRRLNAVEAAPLTCSGITTYRAVRKASLDPTKTLLVVGAGGGLGTXAVQIAKAVSGATIIGVDVREEAVEAAKRAGADYVINASMQDPLAEIRRITESKGVDAVIDLNNSEKTLSVYPKALAKQGKYVXVGLFGADLHYHAPLITLSEIQFVGSLVGNQSDFLGIXRLAEAGKVKPXITKTXKLEEANEAIDNLENFKAIGRQVLIP

SEQ ID NO: 20586 - protein, 328 aa, Thermoplasma acidophilum
MKAALVYEPLGNENLRIEDVDDPKVLDGQVLIEVRKAGLNPVDYNTINGKIVYKLNPLPHIPGTEVYGVVAQDSGNFKKGDRVVVYNRVFDGTCDQCISGNEHLCTAGGIWGVVSNGGYAQKVAVPEKNVFRLPKNVSDEMAASIGVAALTSFRALRLAGCAPGKSVLIFGASGNTGMFSVQMASMMGCDVYAVSRKDWIEEFGATEVFEADEIPDSMKFDIVVNPLGTLFWKESLKHLGIRGSLVTFGIFTGREGSIDIADLYTGERRILGSTGGTRSDLRDLLEFMKMHDLRVKISREFKLTEMQDALKFYNEDHDGRILISMRVS

SEQ ID NO: 20587 - protein, 302 aa, Thermus thermophilus
MKAWVLKRLGGPLELVDLPEPEAEEGEVVLRVEAVGLNFADHLMRLGAYLTRLHPPFIPGMEVVGVVEGRRYAALVPQGGLAERVAVPKGALLPLPEGLSPEEAAAFPVSFLTAYLALKRAQARPGEKVLVQAAAGALGTAAVQVARAMGLRVLAAASRPEKLALPLALGAEEAATYAEVPERAKAWGGLDLVLEVRGKEVEESLGLLAHGGRLVYIGAAEGEVAPIPPLRLMRRNLAVLGFWLTPLLREGALVEEALGFLLPRLGRELRPVVGPVFPFAEAEAAFRALLDRGHTGKVVVRL

SEQ ID NO: 20588 - protein, 3649 aa, Micromonospora griseorubida
MTANNEEKLREYLRRALADLHEARAQVHRLTEEAHEPVAIVGMGCRFPGGVETPEQLWELVASGTDAISPFPTDRHWDVDGIFDPEPGRAGRTYCREGGFLVDAPGFDAGFFGVSPREAVAMDPQQRLLLEVSWEALERAGFDPLALRGSRTGVYAGVMHHDYGLNHSFDEETGGFLGIGTAGSVVSGRVSYVLGLEGPAVTVDTACSSSLVALHLAVQALRSGECDVALAGGVTVMATPGIFVEFSRQGGLAVDGRCKAYSDSADGTGWSEGVGVLVVQRLSDAVAAGRRVLAVVRGSAVNQDGASNGLTAPSGPSQQRVIRAALASARLSVGDVDVVEGHGTGTRLGDPIEAQALLATYGCRGGGRSLLLGSVKSNIGHAQAAAGVAGVVKMVLAMERGVVPASLHVGVPSSHVDWSSGAVEVVGEACAWPETGRPRRAAVSSFGVSGTNAHVILEQAPVADAASFVVVPVSVASGADSSGGVAPVSDVSDAGSSSVAVPWVLSARSEWGLRAAAGRLEAALSGPLSGSGSGSGAVSGVDVGWSLGGRSVFGWRGVSLSGVGGLGVLAGGGVGSGVVVGSGRVASGGVVFVFPGQGAQWVGMARGLLAESEVFSEAFDEVGGVVQGLVDWPVRATACGESGGGHLGRVDVVQPLSFVVMVALAGLWRSWGVVPHGWVGHSQGEIAAAVVSGALSVEEGARVVVGRSRVIGARLAGGGAMVSVGASVGVVEGLLGGLGGGLEVAVVNGPGQVVVAGDVGGVEGLLVRCGEVGVRARLLPVGYGSHCGLVDVVRDELLSVLGEVRAGESVIPFYSSVDVGVVDGGVLDGGYWFRNLRLRVRFGEVVRRLVGDGFSSFVEVSAHPVLVGAIEDVWGEVGGGVGSCVVGSLRRGDGGLGRMVVSAAEGWVRGLPVQWRRVPVLGGGRQVGLPTYPFQHDRYWLAPTTPATDPRPQQDDLRYRVRWQPVRMERTARLTGRWVLLLPDRLPATDRDIADRVARTMANAGADVDEIVVDATTVSGESLEASLVGAAGVLSALALVEEEHPEFPILPVGLAATLTLLRSLAVAGAPLWTLTRNAVAALPGEVPHLAGAQVWALGRVAALELPSPWGGLIDLPTEPNQQVLKRLVGVLAQNAEDQVAVRNPAAYGRRLVPAPAVREESSWQPQGTVVVVGDTGAPEIERMIHRLRDEGVEVVDADRDTLGTVLAEHASITVVVAPPAVPVAPLAETTLAGFAATVEAKTGDARWLERLPDTPALQAVILFSSVSGVWGGVGQAGYAAGCAYLDALAERLRAGGVSATSIAWTPWEGTSGADVVSRGGVVPLDAERALDVLFRALRSGRSETVIADIDWDLFLPSFTMARPTVLFDEIPEVRQLREAGAERPETPRVDSAFSRSLIGLAPADQRRMVDDLLATHIAAVLGESSFAVDAERAFRDIGFTSVSAVDLRNRLGAATGLTLPASLVFDYPNPQALVDYLLAELTNQSAEQEDVRPTEKVDEPIAIVGMGCRFPGGVSSPEDLWDVVASGVDAVSPFPVDRGWDLESLFDGDPDRAGTTYCREGGFLDDVAGFDAGFFGVSPREAVAMDPQQRLLLEVSWEALERAGHDPRELRGSRTGVYMGTNGQHYLPLLRDSEEDFDGYFGTGNSASLMSGRISYVLGLEGPAVTVDTACSSSLVALHLAVQALRSGECDLALVGGATVMATPDVLTEFSRQRALSADGRCKAFSDAADGFGASEGVGVLVVQRLSDAVAAGRRVLAVVRGSAVNQDGASNGLTAPSGPSQQRVIRAALASARLSVGDVDVVEGHGTGTRLGDPIEAQALLATYGRRGGGWPLLLGSVKSNIGHAQAAAGVAGVVKMVLAMERGVVPASLHVGVPSSHVDWSSGAVEVVGEACAWPETGRPRRAAVSSFGMSGTNAHVILEHVATEQPAADPEPSVSVGDSDSVVPWVLSARSEWGLRAAAGRLEAALSGPLSGSGSGSGAVSGVDVGWSLGGRSVFGWRGVSLSGVGGLGVLAGGGVGSGVVVGSGRVASGGVVFVFPGQGAQWVGMARGLLAESEVFSEAFDEVGGVVQGLVDWPVRATACGESGGGDLGRVDVVQPLSFVVMVALAGLWRSWGVVPQAVVGHSQGEIAAAVVSGAWSVEEGARVVVGRSRVSGARLAGGGAMVSVGASVGVVEGLLGGLGGGLEVAVVNGPGQVVVAGDVGGVEGLLVRCGEVGVRARLLPVGYGSHCGLVDVVRDELLSVLGEVRAGESVIPFYSSVDVGVVDGGVLDGGYWFRNLRLRVRFGEVVRRLVGDGFSSFVEVSAHPVLVGAIEDVLGEVGGGVGSCVVGSLRRGDGGLGRMVVSAAEGWVRGLPVQWRRVPVLGGGRQVGLPTYPFQHDRYWYTGPSRRGDLTSAGLAEANHPLLAAAVDLPDDHGLVFTGRLSRASVPWLADHALLGVSVLPGTAFVEMALWAGRRAGFGQLEELTLTTPLPLPESGAQLLVRIDTVDGSGDRTITFHSRVPGDDGSERWTKHAQGTLVTPTGSARDQAEWKYPDGPDLSVEEFYTRLAERGYHYGPVFRGLRGVRRAGEDVFAEVALPQEADGSRFGLHPALLDAAVQAMGLGGFFPDDGQIRVPFSVRGVRLHTTGVERLRVRVSRSAEDAVRVDCVDEQGRPVCEIDSLVVRAIDTDQLVEDARTPVGELLYRVDWPLLTVGPAQPPKHCAVVGDDPYGLAAVLGDQGVTCDVHPDVAAFTIRSVTMPDVVVATLPASTDPDVPAVRDVANRALDLAQWWLSVATDAEAARLVVVTSGAVATQRGEPLRDPAAAAAWGLLRSAQAEDPGRLVLLDVAGQRPDGAALLAALASGKPQLALRDGNLRVPRLTRTETGDALLPPAGTSAWRLAVGENATLADLCLEPADTATVSLLPGQVRIAVRAAGLIFRDTLIALGVYPDQAAMGAEGAGVIVEVGPEVAGLAVGDRVFGLWDRALATHVVVDHRTVVAMPSGWSFAEAATVPAVFLSAYYALKHLARAVPGQSILVHAAAGGVGMAALQLARHLGLEVYGTASPGKWDVLRDQGFDDRHIANSRTLDFADRFLDASGGRGVDIVLNSLAGGFVDASLRLLPRGGRFLELGKTDVRDADRIAAEQPGVTYRAFELMEAGPDLLGEMLRELLVLFDTGVLRPLPLFAHDIRHARDAFRTLSQGRHVGKLVLTMPATIDPGGTVMITGGTGNVGGVLARHLVERVRRYGTCRSSSRQGPAAPGVDDLVAELADLGATVTVHAGDVADRAEVERLVAAVPAEHPLTAVVHAAGTLDDGMIPSLDQEQVGRVLRPKADGALYLHELTRGSALSAFVLFSSVAAVLGGPGQGSYAAANGFLDAFAQNRSAAGLPTVSLSWGLLAGAARMTAHVDQDALRRRMSRGGILPLSGRDLTALFDAALAGTEAHQVPVRIDPSAIPDDAGVSPLLRGLAAGRPARAVASEPVDVRSLVERLTGMPEEAQQTLLENLVRTHAAAVLGYDGPDAIQGDTAFMEIGVDSLAAVDVRNRLAAATGLRLAASTDFDHPTPVVLAGHLRAQLGLETRTVPLVGELERLTEALGSTSLVDIDPDDRREIAARFTALHARWLEMQQAEKPAKDTELTVDDIDAADDDAIFAYLDDRLSDS

SEQ ID NO: 20589 - protein, 190 aa, Klebsiella aerogenes
LQPGESILVHGGASGIGTTAVLLCHALGMTVYATVGQDEKIAALRPYATAINYKTDDFAEKIGQLTNDEGVDVILDIVGGPYFNRNLGLLKKDGRLVIIGFMGGRLAHEVDIQTLMLKRATVTGSTMRGRTAAEKQQIAEALRRHVWPLLEAGKCKPLIYASYPMAEIAEAHACLDSGQHLGKVVITMTS

SEQ ID NO: 20590 - protein, 325 aa, Pseudomonas aeruginosa
MAKRIQFAACGGPEVLEYRDYQPAEPGPREVRVRNRAIGLNFIDTYYRSGLYPAPGLPSGLGSEGAGEVEAVGSEVTRFKVGDRVAYATGPLGAYSELHVLAEEKLVHLPDGIDFEQAAAVMLKGLTTQYLLRQTYELRGGETILFHAAAGGVGLFACQWAKALGVQLIGTVSSPEKARLARQHGAWETIDYSHENVARRVLELTDGKKCPVVYDSVGKDTWETSLDCVAPRGLLVSFGNASGPVTGVNLGILSQKGSLYVTRPTLGSYADTPEKLQAMADELFGLIERGDIRIEINQRFALAEAARAHTELAARRTTGSTVLLP

SEQ ID NO: 20591 - protein, 1360 aa, Streptomyces verticillus
SARGEPSGAVTGRPVSGEPSGTLTGQSVPGEPSGTATDGPVPGEPSVTATGQLASGEPPMTATDIASAAASQVAALRADWRGHDYPRFVAALKMAASHCYAAALAAFLPRPDAPFTAADLLRVGTVPRHATFLSAVLPELRRHRLVGRDDSGGYRLLRTRFDDTKALRDLILRFPRYAPEGRLALHGLRVLRAAGDHRPVEHLLSDGGLADLEQLYDTGVIGRFHNRLAQALLRVVVERWPDDRPLRVLEVGAGTGGTTAALLPLLPPERTRYVFTDVSPAFLTRAEHRFAAYDFLTFRTLDLDADPAAQGLPEGGFDVVVAANALHTARSVEAAVRNVAALAAPNGLLLAVESHDPYVLAPLFGALDTFWDRTDHHERPHSPLLTADRWAALFTRCGFTDVVRTGDDTAPCRDDFSVLLATAPRRPTPHPYPYPHPSPPGPGRHWTVVAETRGELPLAREVAARLPGPGDGPAHSVEAVDDVPAHRPSTPSRGATGICLILGAHQLPEPAATVTLTTRRAALLRRITAACPRRPDGARTALTVVTRPSGALPPPERPLAPEDAAVWGVMRTLANEEPELDVRTISLDRTGRTETDARRLARELLTATGETEVALTRSGGRFAPRELPLPAGHITTTAEHATAYALEIRTPGLSYRPAWVECAPEPVGPGEVAIDVRAAALNYRDIMQAVGLLPAEADEGTFTEAGPGLECAGVVTAVGDGVTTVRPGDRVFALAPASLASRTRTVVQAVGRMPHTMSFAEAATLPVVYATVHYSLHDLARLRPGETVLVHGGAGGVGLAALRYAHLRGARVIATAGTPAKRELLRHLGADHVLDSRGLDFAAHVRDVTDGRGVDVVVNSLAGEAITRGLELLRPGGRFVELGKRDIYENQPLLLRPFRHNLAFFGVDLTSLAFDPDQGARLFAEVTRRVHDGSYRPLPHSAYPAARVAEAFRLLQHSRHVGKVVVTFDPLDEPAVVERPVTAPRFGSQGTYLVTGGTSGFGAAGARWLADRGVRRLALVSRRGPHAPEAAGLLADLAARGVTATAYAADAADPDGMRRVIRLIDATGHPVDGVLHCAMHLDDDPLADLTDERFAAVLTPKTTGAAVLERLLADRPLETFLLYSSDTTFLGNIRQAAYVAANLHLEALARQRRQRGLPAQTLAWGAIDETGYVARNDLARTLTAVGIEPLSPREALTTAGLLISQGATVAGVGRYNWARLRGVLPLLASPRCASLLPEDLQEADHTHEEILRILATMPYEEAARAVAATLARLMADVLHLDERNIDHDRRLDEYGLDSLMLAELLVSLRKRFDIDIPPLELLRSGGTITDISHLVLLRLGITADDPEPPARDAEQSVGER

SEQ ID NO: 20592 - protein, 340 aa, Pseudomonas fluorescens
MRALQLVDKQRLALRELVLPARPAPGHARVRMAFMTLNHLDLFGYRGMAFARRTLPVTVGAEGAGFVQDVGPGSDPELIGQAMAIYPSVFCGCCPACLAGRENLCADSPGVMGFHCDGVAAEYVDVPLRMLVPIPAGVPMDMAACAPVTFATVHHMLIDNARLMSGETLLVHAGGSGIGSIAIRLARHLGVTVFATVGRADKVERARALGAEYVIDYREERFLRVIREQTARRGVDVVFEHVGADTWEQSLLSLARGGRLVICGSTTGVEAPTNLMHLFNQQIHIHGSFGAPLSGLRDALALIQQGVLPVIDCVMPVAGFESGLQRLRERDVFGKIVLQF

SEQ ID NO: 20593 - protein, 340 aa, Pseudomonas putida
MSRMIRFHKFGAADVLRCEEQAEPSPAADEVQIRVEAVGVSWYDVLWRQNLAPSQARLPAGIGHEMAGVVTAVGEGVDDIAVGDRVASFPATSANDHPVYGDVIVLPRTAITRYPNVLTPIEASVHYTPLLIAYFAYVDLARAKAGQTALVTDASHCAGPAFVQLGRALGLKVFAATKDAAQRDYLLGLGADKVIVTEEQDLLLQIGKYTDGRGVDMVLDGMGGPQMSLLGDVLAPRGSLVLYGLQGGNQTPFPACAAFQKNIQFYVHCIGNFTGKPELGISQDQVALQRALRDINQFTADQLLTPQIIKVYPFEQVVEAHRYMDQCPCGGRVVLDMAQH

SEQ ID NO: 20594 - protein, 334 aa, Ralstonia solanacearum
MRAIEITQYGGPDVLKPAERPMPEPKAGEVLIRVRAAGVNRPDVFQRTGNYPVPPGASDIPGLEVAGEIVGGDLAHADNRYGLRAGDRVCALVQGGGYAEFCTAPLGQVLPVPAGLSDIEAAALPENYFTVWSNVFDRGQLGQGAHGKGETLLVQGGSSGIGTTAIQMASALGYRVFATAGSDEKCAACVALGAARAIRYRTEDFAEVVKAETGRGVDVVLDMVGGSYVAREIACTADDGRIVLIALLGGAKAEVPLGEILRRRITLTGSTLRPRPVAFKAAIAAHLHDTVWPLLASGRIRPVIHEVMPAEHAAQAHALMESSAHIGKIMLTWG

SEQ ID NO: 20595 - protein, 2532 aa, Aspergillus terreus
MTPLDAPGAPAPIAMVGMGCRFGGGATDPQKLWKLLEEGGSAWSKIPPSRFNVGGVYHPNGQRVGSMHVRGGHFLDEDPALFDASFFNMSTEVASCMDPQYRLILEVVYEALEAAGIPLEQVSGSKTGVFAGTMYHDYQGSFQRQPEALPRYFITGNAGTMLANRVSHFYDLRGPSVSIDTACSTTLTALHLAIQSLRAGESDMAIVAGANLLLNPDVFTTMSNLGFLSSDGISYSFDSRADGYGRGEGVAAIVLKTLPDAVRDGDPIRLIVRETAINQDGRTPAISTPSGEAQECLIQDCYQKAQLDPKQTSYVEAHGTGTRAGDPLELAVISAAFPGQQIQVGSVKANIGHTEAVSGLASLIKVALAVEKGVIPPNARFLQPSKKLLKDTHIQIPLCSQSWIPTDGVRRASINNFGFGGANAHAIVEQYGPFAETSICPPNGYSGNYDGNLGTDQAHIYVLSAKDENSCMRMVSRLCDYATHARPADDLQLLANIAYTLGSRRSNFRWKAVCTAHSLTGLAQNLAGEGMRPSKSADQVRLGWVFTGQGAQWFAMGRELIEMYPVFKEALLECDGYIKEMGSTWSIIEELSRPETESRVDQAEFSLPLSTALQIALVRLLWSWNIQPVAVTSHSSGEAAAAYAIGALTARSAIGISYIRGALTARDRLASVHKGGMLAVGLSRSEVGIYIRQVPLQSEECLVVGCVNSPSSVTVSGDLSAIAKLEELLHADRIFARRLKVTQAFHSSHMNSMTDAFRAGLTELFGADPSDAANASKDVIYASPRTGARLHDMNRLRDPIHWVECMLHPVEFESAFRRMCLDENDHMPKVDRVIEIGPHGALGGPIKQIMQLPELATCDIPYLSCLSRGKSSLSTLRLLASELIRAGFPVDLNAINFPRGCEAARVQVLSDLPPYPWNHETRYWKEPRISQSARQRKGPVHDLIGLQEPLNLPLARSWHNVLRVSDLPWLRDHVVGSHIVFPGAGFVCMAVMGISTLCSSDHESDDISYILRDVNFAQALILPADGEEGIDLRLTICAPDQSLGSQDWQRFLVHSITADKNDWTEHCTGLVRAEMDQPPSSLSNQQRIDPRPWSRKTAPQELWDSLHRVGIRHGPFFRNITCIESDGRGSWCTFAIADTASAMPHAYESQHIVHPTTLDSAVQAAYTTLPFAGSRIKSAMVPARVGCMKISSRLADLEARDMLRAQAKMHSQSPSALVTDVAVFDEADPVGGPVMELEGLVFQSLGASLGTSDRDSTDPGNTCSSWHWAPDISLVNPGWLEKTLGTGIQEHEISLILELRRCSVHFIQEAMESLSVGDVERLSGHLAKFYAWMQKQLACAQNGELGPESSSWTRDSEQARCSLRSRVVAGSTNGEMICRLGSVLPAILRREVDPLEVMMDGHLLSRYYVDALKWSRSNAQASELVRLCCHKNPRARILEIGGGTGGCTQLVVDSLGPNPPVGRYDFTDVSAGFFEAARKRFAGWQNVMDFRKLDIEDDPEAQGFVCGSYDVVLACQVLHATSNMQRTLTNVRKLLKPGGKLILVETTRDELDLFFTFGLLPGWWLSEEPERQSTPSLSPTMWRSMLHTTGFNGVEVEARDCDSHEFYMISTMMSTAVQATPMSCSVKLPEVLLVYVDSSTPMSWISDLQGEIRGRNCSVTSLQALRQVPPTEGQICVFLGEVEHSMLGSVTNDDFTLLTSMLQLAGGTLWVTQGATMKSDDPLKALHLGLLRTMRNESHGKRFVSLDLDPSRNPWTGDSRDAIVSVLDLISMSDEKEFDYAERDGVIHVPRAFSDSINGGEEDGYALEPFQDSQHLLRLDIQTPGLLDSLHFTKRNVDTYEPDKLPDDWVEIEPRAFGLNFRDIMVAMGQLESNVMGFECAGVVTSLSETARTIAPGLAVGDRVCALMNGHWASRVTTSRTNVVRIPETLSFPHAASIPLAFTTAYISLYTVARILPGETVLIHAGAGGVGQAAIILAQLTGAEVFTTAGSETKRNLLIDKFHLDPDHVFSSRDSSFVDGIKTRTRGKGVDVVLNSLAGPLLQKSFDCLARFGRFVEIGKKDLEQNSRLDMSTFVRNVSFSSVDILYWQQAKPAEIFQAMSEVILLWERTAIGLIHPISEYPMSALEKAFRTMQSGQHVGKIVVTVAPDDAVLVRQERMPLFLKPNVSYLVAGGLGGIGRRICEWLVDRGARYLIILSRTARVDPVVTSLQERGCTVSVQACDVADESQLEAALQQCRAEEMPPIRGVIQGAMVLKDALVSQMTADGFHAALRPKVQGSWNLHRIASDVDFFVMLSSLVGVMGGAGQANYAAAGAFQDALAEHRMAHNQPAVTIDLGMVQSIGYVAETDSAVAERLQRIGYQPLHEEEVLDVLEQAISPVCSPAAPTRPAVIVTGINTRPGPHWAHADWMQEARFAGIKYRDPLRDNHGALSLTPAEDDNLHARLNRAISQQESIAVIMEAMSCKLISMFGLTDSEMSATQTLAGIGVDSLVAIELRNWITAKFNVDISVFELMEGRTIAKVAEVVLQRYKA

SEQ ID NO: 20596 - protein, 288 aa, Lithospermum erythrorhizon
MAGKLMRAVWYEGYGGGAAKLKHVEIPIPKPSKDEVLIKFEAVSLNPIDCKIQEGMARPILPRKFPHIPGYDVTGEIVETGSGAKKFKAGDKVVAIISHTGGGGLAEYGVAKENMIVVRPPEVSPAQAAPLHVTALTAHQALTQAIGLKLDGSGSQKNLLITAASGGVGHYAVQLAKLGNAHVTATCGARNIDLVKSLGADEVLDYKSPDGVALKSPSGKKYDAILHCGPAIPFSVFEPNLSAKGKVIDITPSPKAIFTFVLKKITWSSKTLEPLFSSPQSRESGVCC

SEQ ID NO: 20597 - protein, 320 aa, Azotobacter vinelandii
MKALQGIEGSVEWVERPAPSCDVGQIRIRVAAAGLNRADLLQRAGLYPPPPGASDVLGLECAGVISEVGAGSHWQVGDRVCALLAGGGMAEEVVVDGRHALPAPEGLSLVEAAVLPEVYATAWLNLFKLGALKSGEKALIHAGASGVGSAGIQLCKAFGNPCWVSVGSAERLAYCESLGAQGGVLRTQDLEGLRDFAPFDVILDPIGARYAALDLDLLARDGRWVIIGLMGGREAQLDLAKLLGKRVQLIGSTLRNRDDAFKGELIDELRRHVWPLFAEGRLEPRLEHSFAAKDVDTAFETLASNNVSGKVALVIDDNLV

SEQ ID NO: 20598 - protein, 336 aa, Azotobacter vinelandii
MSIRTLRVQPGGGFERITLETGEPVEPKAGEIVVRIRASSLNYHDYLVVSGAWGPAEPRILLSDGAGEVLAVGSGVDEFKPGDRVVSTFFPTWLDGEPEVEGFTTVPGDGVDGFAREQATLPATAFTHAPQGWSHAEAATLTTAGLTAWRALMADGALKPGETVLVQGSGGVSVFALQFAKLAGATVIATSSSDDKLARLEALGADHLINYHKEPQWGDRVRRLTDGRGVDHVIEVGGPATLEQSMIAARIGGHIAVIGILSGLSAHLPLATALTRQLRLQGLIVGSRRQQKDMIRAIEATGMRPVIDRHFPLTEMVEAFRHEESGRHFGKICLDI

SEQ ID NO: 20599 - protein, 329 aa, Spinacia oleracea
MAAKLMHAIQYSGYGGGTDALKHVEVAVPDPKSDELLLKIEAATLNPIDWKIQKGVLRPLLPRKFPTIPGTDVAGEVVQAGSAVNRFKTGDKVVAVLSHATGGALAEYAVAKENLTVARPPEVSAAEGAALPVAALTAHQALTQFANIKLDGSGERKNILITAASGGVGHYAVQLAKLGNTHVTATCGARNLDFVKGLGADEVLDYKTPEGASLTSPSGKKYDYVVHGASGIPWSTFEPNLSEAGKVIDLTPGPTAMMTFAWKKLTFSKKQLVPLLLIPKIPNFEYVVNLVKEKKLKTVIDSKHPLSKGEDAWSRIMGGHATGKIIIEP

SEQ ID NO: 20600 - protein, 322 aa, Agrobacterium tumefaciens
MDKKVELIATGDVDKLRVSGCPPQEPGPGELRIRHDAIGVNYIDIYQRIGLYPLPLPAVLGVEGAGVIEAIGPDVDNIHVGDRVAYTGIPGAYSATRLLPAWRTIKLPDDISTRIAALSFLRGLTAHMLLTRTYSVKQGETLLIHAAAGGLGFVLTRWAKSLGCIVIGTTGSSEKADVARANGVDHVIVGREADVVSEIGRLTKGKGVDFAIDGIGGEMLRKTLGCVRRFGTVASIGQAAGPIPPVSVEELGPIRSLSLARPSVMAYAAEQETYHLAAKAVIAAIREGIMPEPGGEYPLSEAAQAQSDLESGRTAGSLMLVP

SEQ ID NO: 20601 - protein, 3654 aa, Streptomyces caelestis
MSATNEEKLREYLRRAMGDLHSARERLAELESARHEPVAVVGMACRYPGGVATPDDLWELVASGTDAISTFPTDRGWDLDGLYDPDPSTPGKSYVRHGGFLHDAAQFDAEFFGISPREATAMDPQQRLLLETSWEALEHAGIAPHTLRTTRTGVFTGVMHHDYGSHQVGSAADASGQLGLGTAGSVASGRVAYTLGLQGPALTVDTACSSSLVALHLAVQSLRRGECDLALAGGTTVMATPTVFVEFSRQRGLAPDGRCKPFADTADGTAWAEGVGMLLVERLSDAERLGHRVLAVVRGTAVNQDGASNGLTAPSGPAQQQVIRDALADAHLTPDDIDAVEAHGTGTPLGDPIEAGALLATYGHPKRQTPVWLGSLKSNIGHTQAAAGIAGIIKMVQALRHDTLPRTLHADHPSSKVDWEAGPLQLLAQARPWPADPDRPRRAGISAFGVSGTNAHAIIEEPPTLTEAPADTHTPPVIAWPLSAHTPTALRAQAARLRARLHRTSDALSLADSAGIGHGLAVGRAALPHRAVLLGDGAAPLDALAALASGEVSPDVVTGSAADVRRVAFVFPGQGAQWAGMGAELLDSSPVFAAELARCEAALEPFVDWSLTDVLRGAPGAPGLDRVDVVQPVTFAVVVALAAMWRWLGVEPAAVVGHSQGEIAAAHVAGVLSLEDAARVVALRSQLIARELAGRGSMASVALAAADVESRLAGAEAGGGVRDVEIAAVNGPETTVVCGAPGAVDSLLGVLQGEGVRVRRIDVDYASHSRHVEGIRDELAAVLAGLRPRAGRVPFYSTVEAEPLDGTALDAGYWYRNLRQRVRFESALRAMLADGVDAFVECSPHPVLTVPVRQTLEDAGAGAVAVGSLRRDDGGLRRFLTSAAEAQVAGVPVDWAALCPRAGWVDLPTYAFQRERYWVAPAEPGPAAGAGSAAATGPAAATAARSGSGQEDAASAYGDRLAYHVAWQGLLPGADAWRPGPRLLIVPAGEREAEVADSVEQAIASFGGTVRRVTADPLSTGRDGLRALLAPVVAGEEPLTGAVSLLGLCTDGHPEHPGVPAGVTGTLALVQALADLGVAVPLWTVTRGTVLVVGDSTTVPARLLRSLLDDGAERVVLAGADAGTATDAGTAELAPDAAVVRIPCDVTDRSVLAGLLAKYRPAVVVHAPPLVPLAPLVETAPGDIAEAVAAKTAVAGHLVDLAAGADLQALVLFSSVSGVWGGAAQGAYAAATAHLDALAERARAAGLPAVSVAWSPWAGGAHAEGADEEFLSRRGLVPLDPDAAVRSLRRLLAGDSACGVVADVVWDRFVASYTSVRPTALFDDVPDVRELHAARRAADADDPATAELVRELSARSGDQRRAALLRLVRTHAAAVLGKASGDAVDSTRAFRELGFESLTAVELRGRLAEATGLTLPASLVFDHPTPAALARHLGERLFGDEDGTAAAAKAPVVRKADAGEPIAIIGMACRLPGGVRSPEDLWELLSDGADAITAFPTDRGWDNDALYDPDPAASRRTYARAGGFLHDAAEFDPGFFGISPREALAMDPQQRLSLETAWESFERAGLDPTRLRGSRTGVFVGTNGQHYVPLLQSGGADGESFDGYISTGNSASVMSGRLSYVFGLEGPAVTVDTACSASLTALHLSVQSLRRGECDLALVSGATVMATPEMLVDFARQRAISPDGRCKAFAEAADGVGLAEGAVALLVERLSDAERLGHRVLAVVRGTAVNQDGASNGLTAPSGPAQQNVIRDALADAGLTAADIDAVEAHGTGTHLGDPIEAGALLATYGQAEDRGPLWLGSLKSNIGHTQAAAGVAGVIKMVQALRHDTLPRTLHVDRPTSKVDWETGRVRLLTDARPWPAGPDRPRRAGISAFGISGTNAHVVIEEPPPTAVPESPEPSPAEAPPRQEQDRDRWEGVTVPLMLSAHSEAALREQARRLCAQLLARPEQRPADVGHALLSTRARFPRRAAVVGESMTELAEALDAVAEGGPHPLAATGTAGTADRVVFVFPGQGSQWAGMAEGLLERSGAFRSAADSCDAALRPYLGWSVLSVLRGEPDAPSLDRVDVVQPVLFTMMVSLAAVWRALGVEPAAVVGHSQGEIAAAHVAGALSLDDSARIVALRSRAWLGLAGKGGMVAVPMPAEELRPRLVTWGDRLAVAAVNSPGSCAVAGDPEALAELVALLTGEGVHARPIPGVDTAGHSPQVDALRAHLLEVLAPVAPRPADIPFYSTVTGGLLDGTELDATYWYRNMREPVEFERATRALIADGHDVFLETSPHPMLAVALEQTVTDAGTDAAVLGTLRRRHGGPRALALAVCRAFAHGVEVDPEAVFGPGARPVELPTYPFQRERYWCHPGVRGGDPASLGMDGADHPLLGGGVELPDSGGHVYTARIGVDEFPWMADHTLLGAVLLPGAAFADLALWAGRQSGAGRIEELTLSSPLTVPADGGVRLRLSVAGRGPGGDRRFTVHARPEDAADWSLHAEGLLSPDEGAGEDAGAGAAAVAPGAEPLDVSDFYDRFAERGYGYGPVFRGLVAAYRHGADIHAEVALPGSAQGDASRFGLHPALLDAALQTMSLGTFFPEDGRVRMPFALRGIRLHRSGADRLWVRISPVAEDAVRVQCADAEGRPVAEIDSIVMRPVDPGHLAHAGLSQVPDSLFALTWDAVPPPGAAANGAGAPLRWVVAGPDALSLAEAADAHLPDLSDLPVPGPSAEGAPRPWGGRSAPDAGVFGVVGGDGCLDLEARALPAGCWSWCSGGSRRPAGAEGPRLVVATRGAVAVQDDDEVTDPAAAAAWGLLRSAQAEEPGRFLLVDVDDDPVSVRALPAAVASALASGEPQTAVRAGTAYLPRLDRAGAALIPPAGGGAWRLSRSADGTLDGLALLPAPDADAPLEPGQVRVAVRAAGVNFRDALLALGMYPGEAELGTEGAGVVTETGPGVTRFRPGDRVLGLWNGGFGPVCIADERLLAPVPEGWSFVRAASVPAVFLSAYYGLVALAGLRRGETVLVHAAAGGVGMAAVQIARHLGAQVLATASPTKWDALRGLGVADEHIASSRTLDFATAFSRESRPVGVDVVLNSLAYEYTDASLTLLGPGGRFLDLGRTDVRDPLRVAAEHPGVQYRAFGLDEVDSGELGRMLTELMELFERGVLRPLPVATYDVRRAADALRTISQARHVGKLVLTMPPAFGPYGTVLITGGTGTIGSRIARHLVTRHGVRHLLLASRGGPDGDGAAGLVAELADAGASATVVACDVADADAVRRLLDEVPEQQPLTAVVHSAGVLDDGMLPSLTPERLERVLRPKVDAAVHLDRLTRDLDLSAFVLFSSSAALLGSPAQGNYAAANAVLDALAARRRSLGLPAVSVAWGLWTDSSRMHTLDQESLGRRFARSGFPPMPASLATALFDATLGVDEAVQYPMRLDLAALRATGTVPPLLSRLVTRAADGAAAGQGRTDAVGGNGQVSGEAFAERLSALSDEERLDTLLELVRELVAAVLGHGSAASVASDRAFREAGFDSLTAVELRNRLAAATGLRLPATLVFDHPTPTALAGRLDELLAPRRPAGTDPVLAGLDRIEEALAALDPDGPAATVPAPRTPGEIASHLAALAGRWRALHNGTLNTGDTAQGTGDRIDDVLDAAADDEIFAYIDERFGTS

SEQ ID NO: 20602 - protein, 325 aa, Arabidopsis thaliana
MKAIVISEPGKPEVLQLRDVADPEVKDDEVLIRVLATALNRADTLQRLGLYNPPPGSSPYLGLECSGTIESVGKGVSRWKVGDQVCALLSGGGYAEKVSVPAGQIFPIPAGISLKDAAAFPEVACTVWSTVFMMGRLSVGESFLIHGGSSGIGTFAIQIAKHLGVRVFVTAGSDEKLAACKELGADVCINYKTEDFVAKVKAETDGKGVDVILDCIGAPYLQKNLDSLNFDGRLCIIGLMGGANAEIKLSSLLPKRLTVLGAALRPRSPENKAVVVREVEKNVWPAIEAGKVKPVIYKYLPLSQAAEGHSLMESSNHIGKILLET

SEQ ID NO: 20603 - protein, 322 aa, Fragaria x ananassa
MAAAPSESIPSVNKAWVYSEYGKTSDVLKFDPSVAVPEVKEDQVLIKVVAASLNPVDFKRALGYFKDTDSPLPTVPGYDVAGVVVKVGSQVTKFKVGDEVYGDLNEAALVNPTRFGSLAEYTAADERVLAHKPKDLSFIEAASLPLAIETAYEGLERAELSAGKSILVLGGAGGVGTHIIQLAKHVFGASKVAATASTKKLDFLRTLGVDLAIDYTKENIEDLPEKFDVVYDAVGETDKAVKAVKEGGKVVTIVGPATPPAIHFVLTSKGSVLEKLKPYLESGKVKPVLDPTSPYPFTKLVEAFGYLESSRATGKVVVYPIP

SEQ ID NO: 20604 - protein, 339 aa, Fragaria x ananassa
RNLCPLNFTFAIHRLTMAAAPSESIPSVNKAWVYSEYGKTSDVLKFDPSVAVPEIKEDQVLIKVVAASLNPVDFKRALGYFKDTDSPLPTIPGYDVAGVVVKVGSQVTKFKVGDEVYGDLNETALVNPTRFGSLAEYTAAYERVLAHKPKNLSFIEAASLPLAIETAHEGLERAELSAGKSVLVLGGAGGVGTHIIQLAKHVFGASKVAATASTKKLDLLRTLGAADLAIDYTKENFEDLPEKFDVVYDAVGETDKAVKAVKEGGKVVTIVGPATPPAILFVLTSKGSVLEKLKPYLESGKVKPVLDPTSPYPFTKVVEAFGYLESSRATGKVVVYPIP

SEQ ID NO: 20605 - protein, 470 aa, Cicer arietinum
LDPIYSGSKGGVIMFSRALRLYKRQGIRVNVLCPEFVETDMGTMIGPKFLSMMGGFVPMEMVVKGAFELITDENKAGDCLWITNRRGLEYWPTPSEEAKYLLRSTRSRRRTEYKAPPIKLPESFEKIVVQTLTHNFRNATSVVRAPLRLPIKPNYVLVKIIYAGVNASDVNFSSGRYFGGNNSDTASRLPFDAGFEAVGVIAAVGDSVTDLKVGMPCAFMTFGGYAEFTMIPSKYALPMPRPEPEGVAMLTSGLTASIALEKAGQMESGKVVLVTAAAGGTGQFAVQLAKLAGNTVVATCGGGAKAKLLKELGVDRVIDYHSEDIKTVLRKEFPKGIDIIYESVGGDMLKLCLDALAVHGRLIVIGMISQYQGENGWTPSKYPGLCEKLLSKSQTVAGFFLVQYSHMYQEHLNKLFDLYSSGKLKVAVDPKRFIGLHSVADAVEYLHSGKSVGKVVVCVDPTFGHQVAKL

SEQ ID NO: 20606 - protein, 10917 aa, Streptomyces nodosus
MSTSTNKYVEALRSSLKEIERLRKQNEQLVASAAEPIAVVGIGCRFPGGVVSPEDLWELVAEGRDVIGPFPTDRGWDLDRLAGGGEGSSLAQVGGFLDDAAGFDPGFFGISPREAVAMDPQQRILLEIAWEALERAGIDPSALRGSRTGVFMGTTGQDYGEVIKASDEDAEVYSTTGHAASVISGRLSYFLGAEGPAVTVDTGCSSSLVSLHLAAQALRGGECSLALAGGASVMATPHPFIAFTSQSGLAADGRCKPFSDDADGTGWAEGAGLFILMRLSDAQREGRKVLAVLRGSALNQDGASNGLTAPNGPSQQRVIRQALAHAGLQASDVDAVEAHGTGTPLGDPIEAQALLATYGQNRERPLLLGSVKSNIGHAQAASGAAGVIKMIMAIQHGVLPRSLHAERPTSNVDWTAGAVELLDRAVDWPETGRARRAGVSSFGISGTNAHLILEQAPTAPERPAPDPAARPALVPWTLSGRTAAALDAQRERLAAHLESHPGADPLDIGFALADGRATFEHRAVLLCAGTDASAATEIAHGSVDDGASAVLFSGQGSQRLGMGRELHARFPVFAEAFDEIAALLDRHTDRPLREVVWGSDAELLNETGWTQPALFAVEVALYRLVSSLGVTPDYVGGHSIGEIAAAHVAGVLSLEDACALVAARARLMQELPRGGAMLAVRATEEEVAPHLTERVSIASVNGPSSVVVAGDEDEVAAIAAHFEAQDRKTTRLRVSHAFHSPLMDPMLEEFRRVARGLTYHEPRIPVVSNLTGAIADPADLCTADYWVRHVREAVRFADGVTTLAGRGVTTLLEVGPDGVLSAMAQESLPEGTTGVPLLRKDRPEEESALTGLARVHVRGLTVRWARLFDSAGAGRADLPTYPFQNQRVWPAAGRSARTSPAAGLGSADHPLLGAAVELADGEGFLFTSRLSVHSHPWLADHGVQAAPCVPGTAFVELAIRAGDEAGCDRVEELTLAAPLVLPERGAVQLQVRVGAPDPAGRRTLGIFSRVEDGFDLPWSQHATGVLTTGAGAPDAAFDATVWPPAGAEQVDLDGCYERLAGLGFDYGPAFRALRAAWRRGTEVFAEVALSENAGTDPADFGLHPALLDAAQHAAAYNDLGAISRGGLPFAWEGVHLAASGATTVRARITSVGEDTVSIAVYDTAGGTVLSVDSLVSRAVPKDIPGTARAVHRDSLFQVDWTPLRSQSGQLPETVALVGADPAGLADTLRTGGVQVTVHPDLAALAADPAPVPGTVLTALPGDQDTPAADAAHTTAAAVLGLAQHWLTEDRFADARLVLVTRDATAGGDLAAAAAGGLIRTARTENPGRFVLLDLATGTPAAPAALVAALAAAYDEPDLAVRGSDVLTARLARVPAPDAGADWNPDGTVLITGGTGGLGGVLARHLVTERGVRRLLLASRRGPAADGAPALVDELTALGASVDVAACDVTDREALAALLARVPAAHPLSAVVHTAGVVDDGVIGSLTAERLDTVLRPKADAAWHLHELTRDLDLDAFVLFSSVAATLGSPGQGNYAAGNAFLDALAAHRHALGLPATSLAWGPWTQSVGMTGTLSDIDVERIARSGMPPLTVEQGVALFDAALATGGPALLPVRLDLAVLRTQGEIAPLLRGLIRTTVRRAAAQVSVTADGLAQQLAGLDAAARREALLGLVRTQIAQVLGHADAGQVEAARQFQDLGFDSLTAVELRNGLNSATGLRLPATMVFDYPTPNALADHLSDELLGTGDNIPLPTPAGALPATTDDPIVIVGMACRYPGGVTSPEDLWRLVSEGADATGPFPVNRGWDVDNLYDPDPDRPGHTYVRAGGFLHDAGSFDADFFGMSPREALSTDSQQRLLLELSWEAVERAGIDPHSLRGSRTGVFAGVMYNDYGTILTGEEYEAFRGNGSAPSVASGRVSYTLGLEGPAVTVDTACSSSLVGMHLAAQALRTGECTLALAGGVTVMSTPSTFVDFSRQRGLAADGRSKAFAEAADGVAWSEGVGMLLLERRSDAIRNGHEILAVLRGSAVNQDGASNGLTAPNGPSQQRVIRQALASGGLSPEDVDVVEAHGTGTTLGDPIEAQALIATYGRDRDPERPLWLGSVKSNIGHTQAAAGVAGVIKMIMSMRHGLLPQTLHVDAPSSHVDWDAGAVELLTEQTEWPENDRVRRAAVSSFGISGTNAHVIIEQPAAGPAPAAPSGPAEELPAAPWPLSAKTPEALRDQAARLLAHVEAHPETRPADIAYSLLTSRSVFDHRAAVLGADRTEALRALAALAAGTDDSALLTGTARGGRTAFLFSGQGSQRLGMGRELYGRVPVFTEALDAVLAVLDGELEGSLREVMWGEDADLLNETGWTQPALFAVEVALYRLVESWGVKPDFVAGHSIGEIAAAHIAGVLTLADACRLVAARAALMQALPEGGAMIAVEATEDEVLPLLTGDVSIAAVNGPSSVVVSGAEAAALAVAGHFTEQGRRTSRLRVSHAFHSPLMDPMLDEFRSVAEGLSYSAPAIPVVSNLTGTLADPADLCSADYWVRHVRDAVRFADCVGTLGEHGVTTFVELGPDGVLSAMAQQSVTEGAVTVPVLRKDRSEEQALVTALCRLYVLGIDADWTSALTVGGAARVDLPTYAFQHRWFWPAARAAHPHDMRAAGLGSASHPLLGAAVELPGGEGVLLTGRLSLQSHPWLADHAVHGTVLLPGTALLDLAIRAGDEAGCGHLEDLTLAAPLTLPQDGAVLLQVRVGAADDAGRRTVTVHARPEDATDGVWTLHATGTLSDTAATGTALDTTVWPPAGAQALDTEGCYQRFAAHGFAYGPLFQGLTAAWKAGEALYAEIALPEEGHDDAAGFAVHPALLDAALHPALLTDDDGGLPFSWENVSLHASGATALRVRLAPAGANALSVTAADPAGRPVVSIARLLARPVEADQLTGDAGHLRDALFRLEWTPVPLPDGTPTESLALLGPDTDDLAEALGEGAVRYATLADLLAADAPVPGAVLVPLTAGSDTDDTPGAVHTRTAAALTLLQEWLAEDRFNGSRLVLVTRGAVATDDAPVTDLAAAALVGLVRSAQTENPGVFGFMDLDADGASDSALTRALGLDEPQLALRGGRALAARLTRATADSTARVAWSSEGTVLVTGGTGGLGGLVARHLVMERGVRRLLLTSRSGLGAAGAGDLVAELEGLGAEVSVAACDVADRDAVTALVAAVPAEHPLVAVVHTAGVLDDGVLDSLTEERLATVLRPKVDGAWNLHEATRHLDLDAFVVFSSVAGVFGGAGQANYAAANAFLDALTAHRHALGLPAVSLAWGPWQQGAGMTAGLDERDIRRAAESGMPLITVEQGLALFDAALTTDEAALVTSRLDLAAFRGRPEIPALLRGLIRTPVRRAAATGAADGADAGLVQRLAGLDREQRHEVLLDLVRTSAALVLGHAAGSDIDADRAFRDLGFDSLTAVELRNRLRTATGLRLSATMVFDHPTLSALADHLLTELFGAEAETLTPVTLLPPTDDDPIVIVGMACRFPGDVTSPEDLWRLVSEGTDAISDFPANRGWDVDSLYHPDPEHSGTSYTRSGGFLHDAGDFDPDFFGMSPREALATDSQQRLLLETSWEAIERAGIDPLSLRDSRTGVFAGVMYHDYGSLLGGKEFEGFQGQGSAGSVASGRVSYTFGFEGPAVTVDTACSSSLVALHWAAQALRSGECSLALAGGVTVMSTPSTFIEFSRQQGLSADGRSKAFAESADGVGWSEGVGMLLLERQSDAIRNGHEILAVVRGSAVNQDGASNGLTAPNGPSQQRVIRQALASGGLSTGDVDAVEAHGTGTTLGDPIEAQALIATYGQNRTDEQPLWLGSLKSNIGHTQAAAGVAGVIKMVMSMRHGVLPCTLHVDAPSSHVDWTEGAVELLTEQTEWPETDRVRRAAVSSFGISGTNAHVILEQPVVAPAPATADVDGAEPAVVPLILSGKSPEALRDQAARLLDTVREHTALRPLDLGHSLATSRSAFDHRAVVLATGREDALRALTALADDEANSAAVTGRTRSGRRAALFSGQGSQRLGMGRELYGRFPVFAEALDAVLAVLDGELEGSLREVMWGEDAGLLNETGWTQPALFAVEVALYRLVESWGVRPDFVAGHSIGEIAAAHIAGVFSLEDAARLVAARGRLMQALPAGGAMVAVQATEDEVIPYLSDEVSIAALNGPASVVVSGAEGAVLEVAARFEAEGRKATMLRVSHAFHSPLMDLMLDEFRAVAETLSFAAPVIPVVSNLTGSLATAEELCSPEYWVRHVREAVRFADGVSALEAQGVTTFLELGPDGVLSAMAQESLTGDEAVTVALLRKDRDEETAALTALAALHTAGVRLDWNAFFAGTGATRVDLPTYAFQHTTYWPSGTHSAADAAAVGLTAAGHPLLNGSVQLAEGEGVLFTGRLSLQSHPWLADHAVHGTVLLPGTALLDLAFRAGDEVGCDRVEELTLAAPLVLPERGAVQTQVRVGVADDTGRRTVTVHSRPEDATDVSWTQHATGTLMPGGTARDTGFDATVWPPTGAEALDTEGCYERFTALGFGYGPVFQGLKAAWRSGDVLYAEVVLQEAGAADDEAGFGLHPALLDAALHASLVAHEGEEGNGGLPFAWEGAVLHATGATALRVRLTPTDEARQSVAIAVCDTAGQPVASIDRLLVRAVTGDQLNEAAGIARDALFALGWTPLPQDGDIPAAVALVGPDTTGLAADLTAAGAAVTAHQDLAALAADGTDIPGTVVVTVDGTAAPVAEAAHTVAAEALALAQRWTAEDRFAGARLVFATCGAVEAGGSQVTDVAAAAVWGLVRSAQSESPDTFVLVDREAADAAGDAAERGSLFLAALGSGEPQLALRDDVVLAGRLARFDAAGAMTLPAERAWHLDSTTPGSINGLALTPHPEALEPLTGHQARIEVRAAGLNFRDVLKALGMYPGDAGRYGHEAAGVVVEVGPDVTHIAPGDRVMGMVSGSFASFAVTDARRLTHLPEQCTWEIGASLPLVFLTAYHALKELGGLTAGEKVLIHAGAGGVGMAAIQIARHFGAEVFATASEAKMDVLRSLGVADDHIASSRTLDFEAAFAAVAGENGLDVVLNSLAGEFVDASMRLLGTGGRFLEMGKTDIREDDSVPDGITYQSFDLAFVDPEVIGAMGRELTELFAAGDLHPLPVRAWDIRHATDAFRHMSMARHIGKIVLTVPRAWSSEGTVLVTGGTGGLGGLVARHLVMERGVRRLLLTSRSGLDAAGARELVAELENLGAEVSVAACDVADRDAVDTLIAGIPAEHPLRAVVHTAGVLDDGVLGSLTEERLATVLRPKVDGAWNLHEATRRLDLDAFVVFSSVAGVFGGAGQANYAAGNAFLDALTAHRQSLGLPGLSLAWGAWAQGAGMTAGLDERDIRRAAESGMPLITVEQGLALLDTALTTGSAALVPVRLDLAVLRARGTVAPLMRGLVRAPARRAAATAATGDTALVDRLTRLQRTERRDALLTLVREQAALVLGHSGGGGIDPSRAFRDLGFDSLTAVELRNRLGAATGVRLSATAVFDYPTVVALVDHLLTELLGPDAESDAEEAAPAEALLDDDPIVIVGMACRFPGGITSPEDLWRLLGEGSDVISDFPVNRGWDVDSLYDPDPAHTGTSYTRSGGFLHNAADFDADFFGMSPREAMATDSQQRLLLESTWEAIERAGIDPVTLRGSRTGVFAGVMYSGYGTALDGDEFEGFQGQGSALSVASGRVSYTFGFEGPAMTIDTACSSALVAMHLAAQALRSGECSLALAGGVTVMSIPDTFVEFSRQRGLSPDGRCKPFSESADGVGWSEGVGMLLLERQSDAIRNGHRVLAVVRGSAVNQDGASNGLTAPNGPSQQRVIRQALASGGLSTGDVDAVEAHGTGTTLGDPIEAQALLATYGQNRPEDRPLLLGSVKSNIGHTQAAAGAAGVIKMVMAMQHGVLPRSLNISEPSSHVDWSAGAVELLTEQTEWPETDRVRRAGVSSFGISGTNAHVILEQPAKVIQGTVVAASAAPGPDVVEPAVVPWVLSGKTPEALRDQAARLLATVTEEPAPRPVDVALSLATQRSQFAHRGVVLAGEHEETVRALAALADGEPHSSVTTGTVSSGRRAALFSGQGSQRLGMGRELYGRFPVFAEALDAVLAVLDGELGGSLREVMWGEDAGLLNETGWTQPALFAVEVALYRLVESWGVRPDFVAGHSIGEIAAAHIAGVFSLEDAARLVAARGRLMQALPAGGAMVAVQATEDEVVPHLSDGVSIAALNGPTSVVVSGVEDAVLEVAARFEAEGRKTTRLRVSHAFHSPLMDPMLDEFRAVAEGLSFAAPVIPVVSNLTGSLATAEELCSPEYWVRHVREAVRFADGVAALEAQGVTTFLELGPDGVLSAMAQESLTGDETVTIPLLRKDRDEETAALTALGRLHATGTRVDWAGFLAPAGARTVDLPTYAFQHRPFWPSGKRGATDVNSVGITAAAHPLLNAVVELAEGEGLVFTGRLSLNSHTWLADHAVMGTVLLPGTALLELALRAGDEVGCDHVEELTLAAPLVLTEQGAVRTQVRVGAEDAAGRRTVTIHSRPERSTDAPWTQHATGVLATGLPTAAAPFDATVWPPADAEPVDLTGFYEAREAEGFAYGQAFQGLKAAWRRGDEVFAEITLPDGTQKEAESFGLHPALLDAGLHAAWLAAPTGDGTTGSVPFSWNGVSLVASGASSVRVRLGRDTDGTLTLAVADTTGAPVAAVQALTMRAVSAEALSSAAALVRDSLFRLDWTPVTPAGSAEPTAALVGEDPFGLVRSLREAGTEIGRRASLTDDAELPDLLLLPVTAEEHEEAADTPAVTHALTRQVLELVRARLEDERHAATRFVFVTRGATTGHDLAAAAVWGLVRSAQSENPGCFGLIDLDPETTRPLPLTALLGDEPQLRLQDDDLRAARLVRRPAPATDAVSAFGGEGAVLVTGGTGGLGAVLARHLVAEHGVRELVLVSRRGGAAAGAAELVAELAESGARATVVACDVTDRAAVAELVAAHPVSAVVHSAGVLDDGLIASLTPERLSGVLRPKVDAAWNLHEATRDLDLDAFVVFSSVAGVFGNAGQANYAAGNAFLDALMEHRRAAGLPGLSLAWGPWEQTGTGGMTGTLSDAELERLASSGVPPLAVEQGLALFDAALSTEDAALVPVRLDLPALRGQGEVPPLLRSLIRARSRRAAVAGSATATGLRDRLAVLDAVERREVLVDLVRGQVALVLGHADATAVHPTRAFRDLGFDSLTSVELRNRLNAVTGLRLPATMVFDYPTVEVLVDFILDELLGTEVEAEVVQRGTAAVADDPIVIVGMACRYPGGVASPEDLWRLVTEGTDAVSAFPVNRGWDVENLYHPDPDNIGTSYTRSGGFLHEAGEFDPGFFGMSPREALSTDSQQRLLLETSWEAIERAGIDPVGLRGSATGVFAGVMYSDYSAMLASPEFEGFQGSGSSPSVASGRVSYTFGFEGPAVTVDTACSSSLVAMHWAMQALRSGEISLALAGGVTVMSTPGVFVDFARQRGLSPDGRCKAFSDSADGVGWSEGVGMLVLERQSDAIRNGHEILAVVRGSAVNQDGASNGLTAPNGPSQQRVIRQALASGGLSAQEIDVVEAHGTGTTLGDPIEAQALLATYGRDRDPEQPLWLGSVKSNIGHTQAAAGVAGVIKMVMSMRHGVLPRTLHVDAPSSHVDWTEGAVELLTEQTEWPETEHVRRAGVSSFGISGTNAHVILEQPAKVIQGTVIGGSTPESGVVEPSVVPWVLSGKTPEALRSQAAKLLASVEAELDRPLVDVGSSLVAARSLFEHRAVVLATDADTAARALAALAVGEPDPAAVSGPARTGRSAALFSGQGSQRLGMGRELYGRFPVFAEALDAVLAVLDGELDGSLREVMWGEDAGLLNETGWTQPALFAVEVALHRLVESFGVTPDFVAGHSIGEIAAAHIAGVFSLEDAARLVAARGRLMQALPAGGAMVAVQATEDEVIPYLSDEVSIAALNGPASVVVSGAEGAVLEVAARFEAEGRKATMLRVSHAFHSPLMDPMLDEFRAVAEGLSFAAPVIPVVSNLTGSLATAEELCSPEYWVRHVREAVRFADGVTTLEEQGVTTFLELGPDGVLSAMAQESLTGDEAVTVPLLRKNTAEEAATVAALARLHIGGLRIDWSALFAGTGARRVELPTYAFQHQWFWPAAPLGGGDVRAAGLGSAEHPLLGAAVELAAGEGVLFTGRLALHSHPWLADHTVDGTVLLPGTALLELAIRAGDEVGSDQVEELTITAPLVLPERGAVQVQVAVEAPDAAGRRVVGVYARPEGTGDTAWSQHAAGVLAPAGSRPAPAAFDTAVWPPEGAQAVDADGCYEEFAAAGFGYGPLFQGLRAAWRRGDEWFAEVALPEGTENTAAGFGLHPALFDSALHALLLTPAADGGTAGLPFSWTDVSLHASGATVLRVRLTPTGDRTLSLSAVDPSGTPVVSVGSLVTRSVDGLGTTGTEALLRDAFFGVEWTPAQGSEAAPATVALLGTDGDPLGLAAALTGAGTTVRTYPDVAALVAATVAADGPVPEVVVHGVASHDGEPASDAAHRLTADALDTVQSRLSEDRLAGARLVFVTRGAVDTRDLGAAAVQGLVRSAQTENPGALGLVDLDGTPESAAALAAALGSAEPQLALRDGRPHAARLARLARPADTAAPTAWQSDGTVLVTGGTGGLGAQFARHLVDAYGVRNLLLVSRRGGDAPGTTELVAELIAHGAEVTVQACDVADPDAVTALVAGIPAEHPLTAVVHTAGVLDDGVIGSLTGERLARVLRPKADAAWNLHQATRGLDLDAFIVFSSVAGVFGGAGQANYAAGNAFLDALMEHRRAAGLPGLSLAWGPWDQAGGMTETLSDAEAERLARAGMPPLAAEQGFALFDAALAAGNGTGTGSEDTTGTALVVPVRLDLAALAAQGEVPAVLRGLVRTRTRRTVAGGTVTADGLVARLTALTAEERREALLGLVRTQAALVLGHADAASVDAAAQFRDVGFDSLTAVELRNRLSAATGLRLTATLVFDYPNAATLASHLHDELFGAETESALALPVKQLPATTDDPIVIVGMACRYPGGVASPEDLWRLLLEGTDAITEFPVNRGWDIESVYHPDPEHLGTSYTRSGGFLHEAGEFDPGFFGMSPREALATDSQQRLLLESSWEAIERAGIDPVGLRGSATGVFAGVMYSDYGSILGGKEFEGLQGQGSAGSVASGRVSYTFGFEGPAVTVDTACSSSLVAMHLAAQALRTGECSLALAGGVTVISTPGTFVEFSRQRGLSPDGRCKAFSDSADGVGWSEGVGMLVLERQSDAIRNGHEILAVLRGSAINQDGASNGLTAPNGPSQQRVIRQALASGGLSTGDVDVVEAHGTGTTLGDPIEAQALLATYGRDRDPEQPLLLGSVKSNIGHTQAAAGVAGVIKMVMSMRHGVLPRTLHVDAPSSHVDWTEGAVELLTEQTEWPETEHVRRAGVSSFGISGTNAHVILEQPAKVIQGTVVAASAAPESDVVEPSVVPWVLSAKTPEALRDQAARLLAAVTEEPAPRPADVAHSLLVTRSLFAHRAVVLAGEHQETVRALTVLAAGATDPTAVSGTVASGRSAALFSGQGSQRLGMGRELYGRFPVFAEVLDAVLAVLDGELGGSLREVMWGEDAGLLNETGWTQPALFAVEVALYRLVESWGVRPDFVAGHSIGEIAAAHIAGVFSLEDAARLVAARGRLMQALPAGGAMVAVQATEDEVVPHLSDGVSIAALNGPTSVVLSGVESAVLELAARFEAEGRKTTRLRVSHAFHSPLMDPMLDEFRAVAEGLSYAAPVIPVVSNLTGSLATAEELCSPEYWVRHVREAVRFADGVAVLEAQGVTTFLELGPDGVLSAMAQESLTGDETVTIPLLRKDRDEETTALLARAGLYTRGIGGGWQDLLAGTGARRVNLPTYAFQHQWFWPTGRAAAGGDVRAAGLGSAEHPLLGAAVELAAGEGVLFTGRLSLSSHPWLADHVVMGTVLLPGTALLEMAVRAGDEVGCGRVEELTLAAPLVLPERGALQVQVAVAAPDDSGRRTVGVYSRLEGADESVWAQHAAGVLAPGAGAPETGLGTEVWPPRDAESLDTEDCYQAFAEAGFAYGPLFQGLRAVWRRGEELFAEVALPEEGTGEAAEFGLHPALLDSALHATMLAATGGEEGDGGGALPFSWEGVALHASGASALRVRLAPAGDNALSVHAVDPAGAPVVTVGRLLTRTVTGDQLKAAGEDQNTLFGVDWTPVADTRAARPASVAIVGADPFGLADAFAGAGLTAVTAADLTALTASSEAAVPDTVLVPVAGAPADGADLPGAVREVTGRVLALLQQWPVEEALAASRLVFVTRGAVAVDDGGTADLAASAVWGLVRSAQTENPGCFGLLDLDPAAAVPSARLVEALTAGAEEPQLALRGIEVVAARLARYDAAQPEPASGAMADGTSGTFRTTGTVLVTGGTGGLGRLLARHLVTTHGVRSLLLASRRGLQADGAGKLVAELEEMGAEVTVRACDVADPEAVAALVAAAPKGRPLSAVVHTAGVLDDGVVGSLTPERLDTVLRPKADAVWHLHRATRGLDLDAFVVYSSVAGVFGGAGQANYAAANTFLDALMARRRADGLPGVSLAWGPWEQDSGMTGTLTDAEAERLARSGMPPLTVEQGHALFDAVVAGERALALPVRLDLAVLRAGGEVPALLRGLIRVPARRAAAQSAVPSADTLTRQLAGLGAQEQEEALLTLVRGQAATVLGHRDGSAIGRERQFQELGFDSLTAVEFRNRLNTATGLRLPATLLFDYPTPADVVRYLRGQLVTDDPSGAGSVLAALEGLEKAIAALSLDDAEEHRRVAGRIEVLRTKWAALGRTDTADEDASSDDLDGASDEDMFALLDDELGLS

SEQ ID NO: 20607 - protein, 432 aa, Methylobacterium extorquens
MAASAAPAWTGQTAEAKDLYELGEIPPLGHVPAKMYAWAIRRERHGPPEQSHQLEVLPVWEIGDDEVLVYVMAAGVNYNGVWAGLGEPISPFDVHKGEYHIAGSDASGIVWKVGAKVKRWKVGDEVIVHCNQDDGDDEECNGGDPMFSPTQRIWGYETGDGSFAQFCRVQSRQLMARPKHLTWEEAACYTLTLATAYRMLFGHAPHTVRPGQNVLIWGASGGLGVFGVQLCAASGANAIAVISDESKRDYVMSLGAKGVINRKDFDCWGQLPTVNSPEYNTWLKEARKFGKAIWDITGKGNDVDIVFEHPGEATFPVSTLVAKRGGMIVFCAGTTGFNITFDARYVWMRQKRIQGSHFAHLKQASAANQFVMDRRVDPCMSEVFPWDKIPAAHTKMWKNQHPPGNMAVLVNSTRAGLRTVEDVIEAGPLKAM

SEQ ID NO: 20608 - protein, 2218 aa, Stigmatella aurantiaca
MSSFLERVAELSPEKRAALAELLRLAPEPIAIVGMACRYPGGVKDSDSYWDLLKRGGDAVTEIPAARWDINAFYDPNQDSPGKTTTRWGGFLDDVEGFDPHLFGISPREAASMDPHQRLFLEVAWEALENAGQQTDRLAGSKTGVFVGLYTSDYSPVVLSDLNAINVYTGTGTANNVAAGRLSYLLDLQGPSFVVDTACSSSLVAVHLACQSLLNRECRMAVVGGVTLLLTPLTLVMASKMQLMAADGRCKTFDSRADGIAMGEGCGVVILKRLSDAQADGDRILAVIKASAINQDGRTNGLTAPSGASQQVLLRQALTRAGISPSQVTYVEAHGTGTPLGDPIEVEALAEVIGQPRPSGPPCVLGSVKANLGHTGAAAGVAGLIKVVLSMQNEAIPPQLHYRELNSNISLENTSLVIPKELHPWPAGKGPRIAGISAFGWSGTNAHVLVEEAPAAPKARAAVERPVHLLTLSARTEAALREFAERVKTYVSAHADLPIADLCYSANTGWSKFEHHLAVPAGTTAQLSERLSAFLEGQPQAGTSYGQVTGRRGPGVAFLFTGQGSQYAGMGRQLYQTQPTFRRALDRCDELLRPLLGRSILSVIYPEAGQASPIDETAFTQPALFAFEWALAELWRSWGVVPTVVMGHSVGEYVAACVAGVFTLEEGLALIVERARLMQSLPPGGEMAAVFTDGARTAQAIAPYASQVSIAAFNGPSETVISGDGKAVEAILGALSAEGVKVRRLGVSHAFHSPLMDPMLDAFERAAAKTRFMPPKITLISNLTGGPSEEFSARALRRHAREPVRFSDGMAALKARGVSVAVEIGPNATLLGIGSRCLPEGSVAWLPSLRKDKDEWEVLLATLGALSVRGVPVNWAGFDSDYPRRRVSLPNYPFQHERFALKQMDGRGVAPSGQVVGHPLLGSRLRVATVDGTLFESKFRADEPSFFSEHRVYGMSTVPATAYLEGALAAAEEIFGAGEHALESVDIQEALVLSDAPRTVQYLIGSREEGGTARFQVFSLASSGSGSEGVWTTHSSGQIRIASGAEPLSGTPLTPEQALEAIRTRCPRGLEPRAFYDWLEGQGLEYGPRFRGVQQVWRGDGEALGLVELPESAVDEAKAFKVHPGLMDACVQLFGVIEYREGAQDDTEVYLPVSIDRYRLKGRLGSKVWSHARIRPSEGTARETLKADIRLYDEAGRIVAEVEGMCIKRAPREMLARFGQAQFSNWLHEVEWKEEVRSAAAGAARPGSCRWVVFADRSGVAEALIDRLTARGEPVVRVLADDHYSREGDLVRLHPEQPEHVRSLMESAASSGGAVTRYLYLWGLDSSGPVSRGEASRVDTRAIGSNPLLHLVQELAGQQGSHQLFLVTRGAQATTREHAPIDAFQASLWGFARTIAFEHPELRPVRIDLEPSRKGGSPRETEILLGEVTRSDAASAEDAIAFRGSLRLVSRLMRQAKRASSNRKLRIPPAPAFRLEISQRGTLEDLTVRPVERRPPGPGEVEIRVRATGLNFRDVLNALGMYPGDPGLLGGECAGVISAIGPGVEGFKVGDPVVAVISLGSFATYCTVLADFVAHKPAALSFAQAAAIPIAFLTAQYGLQQLGRMAAGSRVLIHAAAGGVGMAAVQLAKRAGAEVFATASSGKWDVLEAMGVEHRMNSRTLDFADEVMARTEGQGIDIVLNSLADDFIPKSLSVLRSGGRFLEIGKRGVWTSAQVAERYPGVSYAIYDLGEVGTKDPSIIRSMFRALMAEFEQGTLVPPPLRVFALQDAVEAFRHMALAKHVGKVVITVNDGAPESAETTARAGAAVPIRGDSTYLITGGLSGLGLKTAQWMARRGARHLVLVARSEPGPEALGVIGELELSEVQVVVARGDVSRIDEVRGILDRVRDSLPPLRGIVHSAGVLDDGVLRQQTAGRFDRVLAPKAGGAWNLHLLTRDLPLDFFVLYSSIASMFGSASQGNYAAANAFLDALAHHRRALGLAGLSINWGAWSEAGMAARLSQRDMNRLSGQGIGTIAPDQGTQVLEMLLGQDAAQVGVLPIDWGTFFQRNPASKTSPFFSSLEGGTSVKKAAPTQVPSDILPRLREAAVGRREQLLSAHIREQAIKVLGLNPSHPLNPLQPLNEIGLDSLTAVELKNALGRTLGSSLHATLLFDYPTIDALTRYLAKEVMGWSAPALAPEAAEGAEDAEKARRVAEIQQLSDDEVAASINEELAALRQES

SEQ ID NO: 20609 - protein, 309 aa, Helianthus annuus
MKAWKYDEYGSVDVLKLATDVAVPEIKDDQVLVKVVAAAVNPVDYKRRLGYFKAIDSPLPIIPGFDVLGVVLKVGSQVKDLKEGDEVYGDINDKGLEGPTQFGTLAEYTAVEERLLALKPKNLDFIQAAALPLAIETAYEGLERAKFSEGKTILVLNGAGGVGSFIIQLAKHVYGASKVAATSSTGKLELLKSLGADVAIDYTKENFEDLPDKYDVVYDAIGQPEKALKAVNETGVAVSITGPIPPPGFSFILTSDGSILTKLNPYLESGKIKSDNDPKSPFPFDKLNEAYAYLESTGPTGKVVIYPIP

SEQ ID NO: 20610 - protein, 335 aa, Dictyostelium discoideum
MSMRSILVKQFGGIENLIIGTAPKPTPKNNEILVHVKSFALNRADILQRMGRYPPPPGDSDILGLEMSGVVVEADKQDKRFKIGDKVFGLVGGGAYGEFCTIASNQAFHMPSHLTFESASAIPEAWLTAFQALHPLANFKSGNSVLIHAAASGVGTALIQLCKVDGATKIIGTVGSDEKAKFIEKLGATHSVNYKTNENFLDVINDVTSKKGVNNVFDYVGAKYWNQNLKSLSMDGVMIIQGFLSGSHIKDTAADITPILGKRLTIKGSTLRNRDNDYKADLVAQFSKRYLTLFESGELKPIVDKVFNVSEIKEAHEYLEANKNMGKVVVKGFTD

SEQ ID NO: 20611 - protein, 360 aa, Novosphingobium aromaticivorans
MCARPPCCQRLAWLATPELVFDATRRWMNGIPATMTAMGWDAPGGPEVLRPENVRVPQPGPGQVLVKVAFAGVNRPDVIQRQGFYPPPPDASPLPGLEIAGQVVAMGQGVTWPFIGTAVCALVAGGGYAEYCIAEADQCLQVPTGLPMAQAAAMPETLFTVWHNVFERGMVAEGETILVHGGTSGIGSMAILLGKLFGVKVIATCGGPEKCEQALAIGAAHAIDYKAADFVEETLRLTEGRGVHMVLDMVAGDYVARNLKCLADDGRHVTIAVQGGVRAEINMAEVMRRRLTLTGSTLRPRSRAFKGALASEIRDTVWPLVVEGALRPIMDQTFPLAEAAAAHVRMEQGAHIGKIVLAVG

SEQ ID NO: 20612 - protein, 334 aa, Saccharomyces cerevisiae [sequence omitted]

SEQ ID NO: 20613 - protein, 376 aa, Saccharomyces cerevisiae
MSASIPETMKAVVIENGKAVVKQDIPIPELEEGFVLIKTVAVAGNPTDWKHIDFKIGPQGALLGCDAAGQIVKLGPNVDAARFAIGDYIYGVIHGASVRFPSNGAFAEYSAISSETAYKPAREFRLCGKDKLPEGPVKSLEGAVSLPVSLTTAGMILTHSFGLDMTWKPSKAQRDQPILFWGGATAVGQMLIQLAKKLNGFSKIIVVASRKHEKLLKEYGADELFDYHDADVIEQIKKKYNNIPYLVDCVSNTETIQQVYKCAADDLDATVVQLTVLTEKDIKEEDRRQNVSIEGTLLYLIGGNDVPFGTFTLPADPEYKEAAIKFIKFINPKINDGEIHHIPVKVYKNGLDDIPQLLDDIKHGRNSGEKLVAVLK

SEQ ID NO: 20614 - protein, 280 aa, Desulfitobacterium hafniense
MLRFVSSRRQVMASQRNGMPANDSPPPSPRVKAVVFDRYGAAEVLRAIDLPMPQAGPGEIRVRVRAAGVRPSDIALRSGLSAGAHGGARARFPHRLGNEFAGVVDQIGAGVADFAVGDEVMGWAAAMSYAEALTVPATQAVHKPHTMTWAVAGALPSTGQTAHAALRQLGVGAGQTVLIHGAAGALGCVAVQLAVAWGARVIGTAAAADHDYLRSLGAQPVSDDHAGVEQVRALAPHGVDALFDACGQDDFAPWLALAAPQRALSLSRRYGLAELRSARS

SEQ ID NO: 20615 - protein, 2530 aa, Cochliobolus heterostrophus
MTVRDSKTGGITPIAVVGMSFRGPGDATNVEKLLNMISEGRESRAEVQAKKWDPEGFYHPDSSRHGTHNVEYGHWFQQDVYNFDAPFFNVSPAEAAALDPQQRMLLECSYEAFENSGTPMSKIVGTDTSVFVSSFATDYTDMLWRDPESVPMYQCTNSGFSRSNLANRISYSFDLKGPSVLVDTACSGGLTALHLACQSLLVGDVRQALAAGSSLILGPEMMVTMSMMKFLSPDGRCYAFDERANGYARGEGVAVLLLKRLEDALADNDTIRAVIRGTGCNQDGKTPGITMPNSVSQEALIRSVYKKAALDPLDTTYVECHGTGTQAGDTTEASALSKVFSPGRRLPLLIGSVKTNIGHLEGASGLAGVVKSILMLEQGVILPNRNFEETKHENPAGKMELAYKVPTTLECWNNVKTRRVSINSFGYGGANVHAILESATDFLRDNSMGTDSTRFASRRSVVVGNVGQTKPAVSLVQDMSSNDRSHEDPTPLLFALSAFDSSAGDAWARSLSIYLSQRQGSDEKTILSSLAYTLSDRRTWHPWKAALSATTIQELITKLEKVRFVNMAPRHNIGFVFTGQGAQWCGMGRELISIFPRFRQSLIACDIALQSFGADFHVIDELEADVESSRINKALYSQPLCTALQIALVDLLVSWGIYAQSVTGHSSGEIAAAYAAGALSLSDAMLVAYARGCATANLAKKGAKGAMAAVSMETQELSHILSALENGKVGIACFNSPTSCTVSGDKSALDELQDVLRQKGVYNRRLIVDVAYHSHHMELIADSYRSAISSIQPLPGSDVKFFSSVTGELLDKNKLGVDYWVSNLVGQVKFAQSLSSLVSSHHGTGTPQIQALIEIGPHAALGGAISQVIDSEPLANPTGYFSALVRKKNAVTTILSLAADLFLSGYPIQLSAVNQNCNSRHTPLVDLPSYSWNHSKAYTAESRISKTYRQRRYPRLDLIGVFDVHSSVLEPRWRQVIRLSELPWLQDHKIQSSILYPVAGYIAMAIEAATQRNQMREMGNDILGYQFRDVAISSALTIPDMPGQVEVFITLRSFSESVRSPSNLWDEFSISSVNDENRWTEHCRGLISVLKSSKLSNLVNGKMQDASTIACQHDLREVFATCCKTEWDVKDMYEHFWETGMQYGPTFANLCDVRCTSNKCIGKVKVPDTAAVMPMKHEAPFIIHPGTLDSIIQTYLPALVQAGHLKSATIPVAIESMFISRNVTRQAGDLLTSYASSTRKDYRYFSTSMSVFADGPSSENQLVITIDDMTLVALDRPNSSEESGEALPLAFNLHWKPDVDMLTEEQLVEMINASTKVKDHIAAKKMKQTAAQLGKEILARVPFEQAQVVGESSRHLWKLLHASLESLSTPDHRGALDEISSLKNVDSTLAQAADRLSNVLTGRVAPSDVASMYDLMEAVRIPELYDNNLPTATYLHLLGHKKPSLRVLTVGPQSGPTSLNLLMLLAELGGGEIPFAVLHHSDAELNIDQTVRSRFPSWADSVGFRDVFNESGASQQNPPIVNETYDIVVAFNVLGSSPGFSKTLSAAAPLLNARGKILLVDNSHKSPMAALVWGPLPSFLSTWVDEKSADSPDVDCAVQSMGYDIYARLCPNVTVIQRAAQVQKAEKTIGLDVLVVTDGEPAGVDLQQLQTLCEDQYAEVHVASLEHARPRPGQACIVLSELSRPVLAAPTAAEWEAVKRITDTCSGIVWVTRGAADNVCSNPQVSLIQGFARTVRAEAGDKPITTLDLDNDKVLSAQAAAAYIAAVFQRMMQGGEDIDVELQERRGILHVARLIEDGDAAKQLQGEATAMELRLDQAGPCRLFAGTPGLLDSLHFTVDDRVQESLETGQIEVQVHATGINFKDVMMAMGQIAVEDLGCECSGVVSAVGDGVVGLRVGDRVACMGPGSFCTQLRVDARLAHRIPHHMELETAAALPITYVTAYHSIHNIAHLRHGETILIHAAAGGLGQALVELSQLVGARVLVTVGSTEKKRLIMQRFRLSEEDILFSRDTSFVHDVMRLTNGRGVDVIMNSLAGESLRQSWTCIAPNGRFVELGQRDITVNSRLDMAPFARNVSFTAYNLAYMLRHDPQAAHEVLAEVLALYDQGKLRGPEPLEKCTFSQLGNAFRKIQTGRHMGKMVAVANPDDMVWYKPPPASRRTLFRPDASYLLVGGVGGLGSATALWMSTRGARHLLLLNRSGADTEAARTTLATLRANGCTATVLACDVADKAQLSSVLAEARSNWPPIRGVIQGAMVLRDSMLANMTLEDYMAVVRPKVQGTWNLQTHLPADLDFFILESSISGIIGNPGQAAYAAANTFLDAFARWRRARCQPATVIDIGAVHGIGYLERNVDVKLSMERQGFAFTDEQLLMRLLEFAISHSSREPHRAQIVTGLGPWHPDTSLPGLNAPLFSRYRMLSCQNSTGSTDVDTLRGILAQSSSFDSAVTIVLSALVDQVVSRTEIPIENVHTTKSLQDYGIDSLVAVELRNWLIKDMDSVVPMLELLGAESLSALAVKIAARSQLISTNNRG

SEQ ID NO: 20616 - protein, 335 aa, Thermoplasma volcanium
MKAAILKKINEPVSIDDVDIPDPAENEVLIKQEYAGVCYRDLLAATGFFPRIALPMIQGHEIGGTVVKVGDKVEAFRPGDKVSSLIYIPCGKCEFCRSGNENLCPYKKSLGEEVQGGFRQYVNIPEISLVKAPNNVDGASLSLAACVTGMLYHALKRMGKAGEGKKVLITGAGGGVGIHAVEMAKAFGATVIAETTSPEKLDLLEKIGADYIVDGNSKFNEDVKKLGGADIVLECVGIYTFERSLRSLNNGGKMVIIGNVKPDPVSLPLGLIILKGNTIRGSISSTKKDVEEALNMVSKGMIKPIVGKEIDISQINEAYKLMKDKKSSGRIMIKF

SEQ ID NO: 20617 - protein, 2563 aa, Penicillium citrinum
MNNTPAVTATATATATATAMAGSACSNTSTPIAIVGMGCRFAGDATSPQKLWEMVERGGSAWSKVPSSRFNVRGVYHPNGERVGSTHVKGGHFIDEDPALFDAAFFNMTTEVASCMDPQYRLMLEVVYESLESAGITIDGMAGSNTSVFGGVMYHDYQDSLNRDPETVPRYFITGNSGTMLSNRISHFYDLRGPSVTVDTACSTTLTALHLACQSLRTGESDTAIVIGANLLLNPDVFVTMSNLGFLSPDGISYSFDPRANGYGRGEGIAALVIKALPNALRDQDPIRAVIRETALNQDGKTPAITAPSDVAQKSLIQECYDKAGLDMSLTSYVEAHGTGTPTGDPLEISAISAAFKGHPLHLGSVKANIGHTEAASGLASIIKVALALEKGLIPPNARFLQKNSKLMLDQKNIKIPMSAQDWPVKDGTRRASVNNFGFGGSNAHVILESYDRASLALPEDQVHVNGNSEHGRVEDGSKQSRIYVVRAKDEQACRRTIASLRDYIKSVADIDGEPFLASLAYTLGSRRSILPWTSVYVADSLGGLVSALSDESNQPKRANEKVRLGFVFTGQGAQWHAMGRELVNTFPVFKQAILECDGYIKQLGASWNFMEELHRDELTTRVNDAEYSLPLSTAIQIALVRLLWSWGIRPTGITSHSSGEAAAAYAAGALSARSAIGITYIRGVLTTKPKPALAAKGGMMAVGLGRSETNVYISRLNQEDGCVVVGCINSQCSVTVSGDLGAIEKLEKLLHADGIFTRKLKVTEAFHSSHMRPMADAFGASLRDLFNSDNNNDNPNADTSKGVLYSSPKTGSRMTDLKLLLDPTHWMDSMLQPVEFESSLREMCFDPNTKEKAVDVIIEIGPHGALGGPINQVMQDLGLKGTDINYLSCLSRGRSSLETMYRAATELISKGYGLKMDAINFPHGRKEPRVKVLSDLPAYPWNHQTRYWREPRGSRESKQRTHPPHTLIGSRESLSPQFAPKWKHVLRLSDIPWIRDHVVGSSIIFPGAGFISMAIEGFSQVCPPVAGASINYNLRDVELAQALIIPADAEAEVDLRLTIRSCEERSLGTKNWHQFSVHSISGENNTWTEHCTGLIRSESERSHLDCSTVEASRRLNLGSDNRSIDPNDLWESLHANGICHGPIFQNIQRIQNNGQGSFCRFSIADTASAMPHSYENRHIVHPTTLDSVIQAAYTVLPYAGTRMKTAMVPRRLRNVKISSSLADLEAGDALDAQASIKDRNSQSFSTDLAVFDDYDSGSSPSDGIPVIEIEGLVFQSVGSSFSDQKSDSNDTENACSSWVWAPDISLGDSTWLKEKLSTEAETKETELMMDLRRCTINFIQEAVTDLTNSDIQHLDGHLQKYFDWMNVQLDLARQNKLSPASCDWLSDDAEQKKCLQARVAGESVNGEMISRLGPQLIAMLRRETEPLELMMQDQLLSRYYVNAIKWSRSNAQASELIRLCAHKNPRSRILEIGGGTGGCTKLIVNALGNTKPIDRYDFTDVSAGFFESAREQFADWQDVMTFKKLDIESDPEQQGFECATYDVVVACQVLHATRCMKRTLSNVRKLLKPGGNLILVETTRDQLDLFFTFGLLPGWWLSEEPERKSTPSLTTDLWNTMLDTSGFNGVELEVRDCEDDEFYMISTMLSTARKENTTPDTVAESEVLLLHGALRPPSSWLESLQAAICEKTSSSPSINALGEVDTTGRTCIFLGEMESSLLGEVGSETFKSITAMLNNCNALLWVSRGAAMSSEDPWKALHIGLLRTIRNENNGKEYVSLDLDPSRNAYTHESLYAICNIFNGRLGDLSEDKEFEFAERNGVIHVPRLFNDPHWKDQEAVEVTLQPFEQPGRRLRMEVETPGLLDSLQFRDDEGREGKDLPDDWVEIEPKAFGLNFRDVMVAMGQLEANRVMGFECAGVITKLGGAAAASQGLRLGDRVCALLKGHWATRTQTPYTNVVRIPDEMGFPEAASVPLAFTTAYIALYTTAKLRRGERVLIHSGAGGVGQAAIILSQLAGAEVFVTAGTQAKRDFVGDKFGINPDHIFSSRNDLFVDGIKAYTGGLGVHVVLNSLAGQLLQASFDCMAEFGRFVEIGKKDLEQNSRLDMLPFTRDVSFTSIDLLSWQRAKSEEVSEALNHVTKLLETKAIGLIGPIQQHSLSNIEKAFRTMQSGQHVGKVVVNVSGDELVPVGDGGFSLKLKPDSSYLVAGGLGGIGKQICQWLVDHGAKHLIILSRSAKASPFITSLQNQQCAVYLHACDISDQDQVTKVLRLCEEAHAPPIRGIIQGAMVLKDALLSRMTLDEFNAATRPKVQGSWYLHKIAQDVDFFVMLSSLVGVMGGAGQANYAAAGAFQDALAHHRRAHGMPAVTIDLGMVKSVGYVAETGRGVADRLARIGYKPMHEKDVMDVLEKAILCSSPQFPSPPAAVVTGINTSPGAHWTEANWIQEQRFVGLKYRQVLHADQSFVSSHKKGPDGVRAQLSRVTSHDEAISIVLKAMTEKLMRMFGLAEDDMSSSKNLAGVGVDSLVAIELRNWITSEIHVDVSIFELMNGNTIAGLVELVVAKCS

SEQ ID NO: 20618 - protein, 338 aa, Neurospora crassa
MAPKTMKAVDIKNGKGSADNLFINPDTPLPQAQPGQALVKVKAFGLNRMDLIQREGHYPLPPQAPSTLGVEFSGTIESFGDGDHGDFNVGDEVFGLAYGGAYAEYIAVSSKMLLHKPAHLSFEQAAGVPETWITATQALHFVLGGIGEQGKTILWHAGASGVSIAGIQLSKLAGAKQIFATAGSADKCKFIENELGATAAFNYKEQDWVEEIMKKTDGRGVDLVVDFIGASYFQKNLDVVARDGRICMLGLMGGAVADKVDISKLLYKRARVEGSTLRSRDENYQGQLRDKLSEYLPKFESGELKIFIDTVLPFEEIVKAHKQLEANTTMGKIICTVS

SEQ ID NO: 20619 - protein, 3739 aa, Streptomyces venezuelae
MSTVNEEKYLDYLRRATADLHEARGRLRELEAKAGEPVAIVGMACRLPGGVASPEDLWRLVAGGEDAISEFPQDRGWDVEGLYDPNPEATGKSYAREAGFLYEAGEFDADFFGISPREALAMDPQQRLLLEASWEAFEHAGIPAATARGTSVGVFTGVMYHDYATRLTDVPEGIEGYLGTGNSGSVASGRVAYTLGLEGPAVTVDTACSSSLVALHLAVQALRKGEVDMALAGGVTVMSTPSTFVEFSRQRGLAPDGRSKSFSSTADGTSWSEGVGVLLVERLSDARRKGHRILAVVRGTAVNQDGASSGLTAPNGPSQQRVIRRALADARLTTSDVDVVEAHGTGTRLGDPIEAQAVIATYGQGRDGEQPLRLGSLKSNIGHTQAAAGVSGVIKMVQAMRHGVLPKTLHVEKPTDQVDWSAGAVELLTEAMDWPDKGDGGLRRAAVSSFGVSGTNAHVVLEEAPAAEETPASEATPAVEPSVGAGLVPWLVSAKTPAALDAQIGRLAAFASQGRTDAADPGAVARVLAGGRAEFEHRAVVLGTGQDDFAQALTAPEGLIRGTPSDVGRVAFVFPGQGTQWAGMGAELLDVSKEFAAAMAECESALSRYVDWSLEAVVRQAPGAPTLERVDVVQPVTFAVMVSLAKVWQHHGVTPQAVVGHSQGEIAAAYVAGALTLDDAARVVTLRSKSIAAHLAGKGGMISLALSEEATRQRIENLHGLSIAAVNGPTATVVSGDPTQIQELAQACEADGVRARIIPVDYASHSAHVETIESELAEVLAGLSPRTPEVPFFSTLEGAWITEPVLDGTYWYRNLRHRVGFAPAVETLATDEGFTHFIEVSAHPVLTMTLPETVTGLGTLRREQGGQERLVTSLAEAWTNGLTIDWAPVLPTATGHHPELPTYAFQRRHYWLHDSPAVQGSVQDSWRYRIDWKRLAVADASERAGLSGRWLVVVPEDRSAEAAPVLAALSGAGADPVQLDVSPLGDRQRLAATLGEALAAAGGAVDGVLSLLAWDESAHPGHPAPFTRGTGATLTLVQALEDAGVAAPLWCVTHGAVSVGRADHVTSPAQAMVWGMGRVAALEHPERWGGLIDLPSDADRAALDRMTTVLAGGTGEDQVAVRASGLLARRLVRASLPAHGTASPWWQADGTVLVTGAEEPAAAEAARRLARDGAGHLLLHTTPSGSEGAEGTSGAAEDSGLAGLVAELADLGATATVVTCDLTDAEAAARLLAGVSDAHPLSAVLHLPPTVDSEPLAATDADALARVVTAKATAALHLDRLLREAAAAGGRPPVLVLFSSVAAIWGGAGQGAYAAGTAFLDALAGQHRADGPTVTSVAWSPWEGSRVTEGATGERLRRLGLRPLAPATALTALDTALGHGDTAVTIADVDWSSFAPGFTTARPGTLLADLPEARRALDEQQSTTAADDTVLSRELGALTGAEQQRRMQELVREHLAVVLNHPSPEAVDTGRAFRDLGFDSLTAVELRNRLKNATGLALPATLVFDYPTPRTLAEFLLAEILGEQAGAGEQLPVDGGVDDEPVAIVGMACRLPGGVASPEDLWRLVAGGEDAISGFPQDRGWDVEGLYDPDPDASGRTYCRAGGFLDEAGEFDADFFGISPREALAMDPQQRLLLETSWEAVEDAGIDPTSLQGQQVGVFAGTNGPHYEPLLRNTAEDLEGYVGTGNAASIMSGRVSYTLGLEGPAVTVDTACSSSLVALHLAVQALRKGECGLALAGGVTVMSTPTTFVEFSRQRGLAEDGRSKAFAASADGFGPAEGVGMLLVERLSDARRNGHRVLAVVRGSAVNQDGASNGLTAPNGPSQQRVIRRALADARLTTADVDVVEAHGTGTRLGDPIEAQALIATYGQGRDTEQPLRLGSLKSNIGHTQAAAGVSGIIKMVQAMRHGVLPKTLHVDRPSDQIDWSAGTVELLTEAMDWPRKQEGGLRRAAVSSFGISGTNAHIVLEEAPVDEDAPADEPSVGGVVPWLVSAKTPAALDAQIGRLAAFASQGRTDAADPGAVARVLAGGRAQFEHRAVALGTGQDDLAAALAAPEGLVRGVASGVGRVAFVFPGQGTQWAGMGAELLDVSKEFAAAMAECEAALAPYVDWSLEAVVRQAPGAPTLERVDVVQPVTFAVMVSLAKVWQHHGVTPQAVVGHSQGEIAAAYVAGALSLDDAARVVTLRSKSIGAHLAGQGGMLSLALSEAAVVERLAGFDGLSVAAVNGPTATVVSGDPTQIQELAQACEADGVRARIIPVDYASHSAHVETIESELADVLAGLSPQTPQVPFFSTLEGAWITEPALDGGYWYRNLRHRVGFAPAVETLATDEGFTHFVEVSAHPVLTMALPETVTGLGTLRRDNGGQHRLTTSLAEAWANGLTVDWASLLPTTTTHPDLPTYAFQTERYWPQPDLSAAGDITSAGLGAAEHPLLGAAVALADSDGCLLTGSLSLRTHPWLADHAVAGTVLLPGTAFVELAFRAGDQVGCDLVEELTLDAPLVLPRRGAVRVQLSVGASDESGRRTFGLYAHPEDAPGEAEWTRHATGVLAARADRTAPVADPEAWPPPGAEPVDVDGLYERFAANGYGYGPLFQGVRGVWRRGDEVFADVALPAEVAGAEGARFGLHPALLDAAVQAAGAGRGVRRGHAAAVRLERDLLYAVGATALRVRLAPAGPDTVSVSAADSSGQPVFAADSLTVLPVDPAQLAAFSDPTLDALHLLEWTAWDGAAQALPGAVVLGGDADGLAAALRAGGTEVLSFPDLTDLVEAVDRGETPAPATVLVACPAAGPDGPEHVREALHGSLALMQAWLADERFTDGRLVLVTRDAVAARSGDGLRSTGQAAVWGLGRSAQTESPGRFVLLDLAGEARTAGDATAGDGLTTGDATVGGTSGDAALGSALATALGSGEPQLALRDGALLVPRLARAAAPAAADGLAAADGLAALPLPAAPALWRLEPGTDGSLESLTAAPGDAETLAPEPLGPGQVRIAIRATGLNFRDVLIALGMYPDPALMGTEGAGVVTATGPGVTHLAPGDRVMGLLSGAYAPVVVADARTVARMPEGWTFAQGASVPVVFLTAVYALRDLADVKPGERLLVHSAAGGVGMAAVQLARHWGVEVHGTASHGKWDALRALGLDDAHIASSRTLDFESAFRAASGGAGMDVVLNSLAREFVDASLRLLGPGGRFVEMGKTDVRDAERVAADHPGVGYRAFDLGEAGPERIGEMLAEVIALFEDGVLRHLPVTTWDVRRARDAFRHVSQARHTGKVVLTMPSGLDPEGTVLLTGGTGALGGIVARHVVGEWGVRRLLLVSRRGTDAPGAGELVHELEALGADVSVAACDVADREALTAVLDSIPAEHPLTAVVHTAGVLSDGTLPSMTAEDVEHVLRPKVDAAFLLDELTSTPGYDLAAFVMFSSAAAVFGGAGQGAYAAANATLDALAWRRRTAGLPALSLGWGLWAETSGMTGGLSDTDRSRLARSGATPMDSELTLSLLDAAMRRDDPALVPIALDVAALRAQQRDGMLAPLLSGLTRGSRVGGAPVNQRRAAAGGAGEADTDLGGRLAAMTPDDRVAHLRDLVRTHVATVLGHGTPSRVDLERAFRDTGFDSLTAVELRNRLNAATGLRLPATLVFDHPTPGELAGHLLDELATAAGGSWAEGTGSGDTASATDRQTTAALAELDRLEGVLASLAPAAGGRPELAARLRALAAALGDDGDDATDLDEASDDDLFSFIDKELGDSDF

SEQ ID NO: 20620 - protein, 7257 aa, Polyangium cellulosum
MTTRGPTAQQNPLKQAAIIIQRLEERLAGLAQAELERTEPIAIVGIGCRFPGGADAPEAFWELLDAERDAVQPLDMRWALVGVAPVEAVPHWAGLLTEPIDCFDAAFFGISPREARSLDPQHRLLLEVAWEGLEDAGIPPRSIDGSRTGVFVGAFTADYARTVARLPREERDAYSATGNMLSIAAGRLSYTLGLQGPCLTVDTACSSSLVAIHLACRSLRAGESDLALAGGVSALLSPDMMEAAARTQALSPDGRCRTFDASANGFVRGEGCGLVVLKRLSDAQRDGDRIWALIRGSAINHDGRSTGLTAPNVLAQETVLREALRSAHVEAGAVDYVETHGTGTSLGDPIEVEALRATVGPARSDGTRCVLGAVKTNIGHLEAAAGVAGLIKAALSLTHERIPRNLNFRTLNPRIRLEGSALALATEPVPWPRTDRPRFAGVSSFGMSGTNAHVVLEEAPAVELWPAAPERSAELLVLSGKSEGALDAQAARLREHLDMHPELGLGDVAFSLATTRSAMSHRLAVAVTSREGLLAALSAVAQGQTPAGAARCIASSSRGKLAFLFTGQGAQTPGMGRGLCAAWPAFREAFDRCVALFDRELDRPLREVMWAEAGSAESLLLDQTAFTQPALFAVEYALTALWRSWGVEPELLVGHSIGELVAACVAGVFSLEDGVRLVAARGRLMQGLSAGGAMVSLGAPEAEVAAAVAPHAASVSIAAVNGPEQVVIAGVEQAVQAIAAGFAARGARTKRLHVSHAFHSPLMEPMLEEFGRVAASVTYRRPSVSLVSNLSGKVVTDELSAPGYWVRHVREAVRFADGVKALHEAGAGTFVEVGPKPTLLGLLPACLPEAEPTLLASLRAGREEAAGVLEALGRLWAAGGSVSWPGVFPTAGRRVPLPTYPWQRQRYWIEAPAEGLGATAADALAQWFYRVDWPEMPRSSVDSRRARSGGWLVLADRGGVGEAAAAALSSQGCSCAVLHAPAEASAVAEQVTQALGGRNDWQGVLYLWGLDAVVEAGASAEEVAKVTHLAAAPVLALIQALGTGPRSPRLWIVTRGACTVGGEPDAAPCQAALWGMGRVAALEHPGSWGGLVDLDPEESPTEVEALVAELLSPDAEDQLAFRQGRRRAARLVAAPPEGNAAPVSLSAEGSYLVTGGLGALGLLVARWLVERGAGHLVLISRHGLPDREEWGRDQPPEVRARIAAIEALEAQGARVTVAAVDVADAEGMAALLAAVEPPLRGVVHAAGLLDDGLLAHQDAGRLARVLRPKVEGAWVLHTLTREQPLDLFVLFSSASGVFGSIGQGSYAAGNAFLDALADLRRTQGLAALSIAWGLWAEGGMGSQAQRREHEASGIWAMPTSRALAAMEWLLGTRATQRVVIQMDWAHAGAAPRDASRGRFWDRLVTATKEASSSAVPAVERWRNASVVETRSALYELVRGVVAGVMGFTDQGTLDVRRGFAEQGLDSLMAVEIRKRLQGELGMPLSATLAFDHPTVERLVEYLLSQALELQDRTDVRSVRLPATEDPIAIVGAACRFPGGVEDLESYWQLLTEGVVVSTEVPADRWNGADGRVPGSGEAQRQTYVPRGGFLREVETFDAAFFHISPREAMSLDPQQRLLLEVSWEAIERAGQDPSALRESPTGVFVGAGPNEYAERVQELADEAAGLYSGTGNMLSVAAGRLSFFLGLHGPTLAVDTACSSSLVALHLGCQSLRRGECDQALVGGVNMLLSPKTFALLSRMHALSPGGRCKTFSADADGYARAEGCAVVVLKRLSDAQRDRDPILAVIRGTAINHDGPSSGLTVPSGPAQEALLRQALAHAGVVPADVDFVECHGTGTALGDPIEVRALSDVYGQARPADRPLILGAAKANLGHMEPAAGLAGLLKAVLALGQEQIPAQPELGELNPLLPWEALPVAVARAAVPWPRTDRPRFAGVSSFGMSGTNAHVVLEEAPAVELWPAAPERSAELLVLSGKSEGALDAQAARLREHLDMHPELGLGDVAFSLATTRSAMNHRLAVAVTSREGLLAALSAVAQGQTPPGAARCIASSSRGKLAFLFTGQGAQTPGMGRGLCAAWPAFREAFDRCVALFDRELDRPLREVMWAEPGSAESLLLDQTAFTQPALFTVEYALTALWRSWGVEPELVAGHSAGELVAACVAGVFSLEDGVRLVAARGRLMQGLSAGGAMVSLGAPEAEVAAAVAPHAASVSIAAVNGPEQVVIAGVEQAVQAIAAGFAARGARTKRLHVSHASHSPLMEPMLEEFGRVAASVTYRRPSVSLVSNLSGKVVADELSAPGYWVRHVREAVRFADGVKALHEAGAGTFVEVGPKPTLLGLLPACLPEAEPTLLASLRAGREEAAGVLEALGRLWAAGGSVSWPGVFPTAGRRVPLPTYPWQRQRYWPDIEPDSRRHAAADPTQGWFYRVDWPEIPRSLQKSEEASRGSWLVLADKGGVGEAVAAALSTRGLPCVVLHAPAETSATAELVTEAAGGRSDWQVVLYLWGLDAVVGAEASIDEIGDATRRATAPVLGLARFLSTVSCSPRLWVVTRGACIVGDEPAIAPCQAALWGMGRVAALEHPGAWGGLVDLDPRASPPQASPIDGEMLVTELLSQETEDQLAFRHGRRHAARLVAAPPQGQAAPVSLSAEASYLVTGGLGGLGLIVAQWLVELGARHLVLTSRRGLPDRQAWCEQQPPEIRARIAAVEALEARGARVTVAAVDVADVEPMTALVSSVEPPLRGVVHAAGVSVMRPLAETDETLLESVLRPKVAGSWLLHRLLHGRPLDLFVLFSSGAAVWGSHSQGAYAAANAFLDGLAHLRRSQSLPALSVAWGLWAEGGMADAEAHARLSDIGVLPMSTSAALSALQRLVETGAAQRTVTRMDWARFAPVYTARGRRNLLSALVAGRDIIAPSPPAAATRNWRGLSVAEARVALHEIVHGAVARVLGFLDPSALDPGMGFNEQGLDSLMAVEIRNLLQAELDVRLSTTLAFDHPTVQRLVEHLLVDVLKLEDRSDTQHVRSLASDEPIAIVGAACRFPGGVEDLESYWQLLAEGVVVSAEVPADRWDAADWYDPDPEIPGRTYVTKGAFLRDLQRLDATFFRISPREAMSLDPQQRLLLEVSWEALESAGIAPDTLRDSPTGVFVGAGPNEYYTQRLRGFTDGAAGLYGGTGNMLSVTAGRLSFFLGLHGPTLAMDTACSSSLVALHLACQSLRLGECDQALVGGVNVLLAPETFVLLSRMRALSPDGRCKTFSADADGYARGEGCAVVVLKRLRDAQRAGDSILALIRGSAVNHDGPSSGLTVPNGPAQQALLRQALSQAGVSPVDVDFVECHGTGTALGDPIEVQALSEVYGPGRSGDRPLVLGAAKANVAHLEAASGLASLLKAVLALRHEQIPAQPELGELNPHLPWNTLPVAVPRKAVPWGRGARPRRAGVSAFGLSGTNVHVVLEEAPEVEPAPAAPARPVELVVLSAKSAAALDAAAARLSAHLSAHPELSLGDVAFSLATTRSPMEHRLAIATTSREALRGALDAAAQQKTPQGAVRGKAVSSRGKLAFLFTGQGAQMPGMGRGLYETWPAFREAFDRCVALFDREIDQPLREVMWAAPGLAQAARLDQTAYAQPALFALEYALAALWRSWGVEPHVLLGHSIGELVAACVAGVFSLEDAVRLVAARGRLMQALPAGGAMVAIAASEAEVAASVAPHAATVSIAAVNGPDAVVIAGAEVQVLALGATFAARGIRTKRLAVSHAFHSPLMDPMLEDFQRVAATIAYRAPDRPVVSNVTGHVAGPEIATPEYWVRHVRSAVRFGDGAKALHAAGAATFVEVGPKPVLLGLLPACLGEADAVLVPSLRADRSECEVVLAALGAWYAWGGALDWKGVFPDGARRVALPMYPWQRERHWMDLTPRSAAPAGIAGRWPLAGVGLCMPGAVLHHVLSIGPRHQPFLGDHLVFGKVVVPGAFHVAVILSIAAERWPERAIELTGVEFLKAIAMEPDQEVELHAVLTPEAAGDGYLFELATLAAPETERRWTTHARGRVQPTDGAPGALPRLEVLEDRAIQPLDFAGFLDRLSAVRIGWGPLWRWLQDGRVGDEASLATLVPTYPNAHDVAPLHPILLDNGFAVSLLSTRSEPEDDGTPPLPFAVERVRWWRAPVGRVRCGGVPRSQAFGVSSFVLVDETGEVVAEVEGFVCRRAPREVFLRQESGASTAALYRLDWPEAPLPDAPAERIEESWVVVAAPGSEMAAALATRLNRCVLAEPKGLEAALAGVSPAGVICLWEAGAHEEAPAAAQRVATEGLSVVQALRDRAVRLWWVTMGAVAVEAGERVQVATAPVWGLGRTVMQERPELSCTLVDLEPEADAARSADVLLRELGRADDETQVAFRSGKRRVARLVKATTPEGLLVPDAESYRLEAGQKGTLDQLRLAPAQRRAPGPGEVEIKVTASGLNFRTVLAVLGMYPGDAGPMGGDCAGVATAVGQGVRHVAVGDAVMTLGTLHRFVTVDARLVVRQPAGLTPAQAATVPVAFLTAWLALHDLGNLRRGERVLIHAAAGGVGMAAVQIARWIGAEVFATASPSKWAAVQAMGVPRTHIASSRTLEFAETFRQVTGGRGVDVVLNALAGEFVDASLSLLSTGGRFLEMGKTDIRDRAAVAAAHPGVRYRVFDILELAPDRTREILERVVEGFAAGHLRALPVHAFAITKAEAAFRFMAQARHQGKVVLLPAPSAAPLAPTGTVLLTGGLGALGLHVARWLAQQGVPHMVLTGRRGLDTPGAAKAVAEIEALGARVTIAASDVADRNALEAVLQAIPAEWPLQGVIHAAGALDDGVLDEQTTDRFSRVLAPKVTGAWNLHELTAGNDLAFFVLFSSMSGLLGSAGQSNYAAANTFLDALAAHRRAEGLAAQSLAWGPWSDGGMAAGLSAALQARLARHGMGALSPAQGTALLGQALARPETQLGAMSLDVRAASQASGAAVPPVWRALVRAEARHTAAGAQGALAARLGALPEARRADEVRKVVQAEIARVLSWSAASAVPVDRPLSDLGLDSLTAVELRNVLGQRVGATLPATLAFDHPTVDALTRWLLDKVLAVAEPSVSSAKSSPQVALDEPIAIIGIGCRFPGGVADPESFWRLLEEGSDAVVEVPHERWDIDAFYDPDPDVRGKMTTRFGGFLSDIDRFDPAFFGISPREATTMDPQQRLLLETSWEAFERAGILPERLMGSDTGVFVGLFYQEYAALAGGIEAFDGYLGTGTTASVASGRISYVLGLKGPSLTVDTACSSSLVAVHLACQALRRGECSVALAGGVALMLTPATFVEFSRLRGLAPDGRCKSFSAAADGVGWSEGCAMLLLKPLRDAQRDGDPILAVIRGTAVNQDGRSNGLTAPNGSSQQEVIRRALEQAGLAPADVSYVECHGTGTTLGDPIEVQALGAVLAQGRPSDRPLVIGSVKSNIGHTQAAAGVAGVIKVALALERGLIPRSLHFDAPNPHIPWSELAVQVAAKPVEWTRNGVPRRAGVSSFGVSGTNAHVVLEEAPAAAFAPAAARSAELFVLSAKSAAALDAQAARLSAHVVAHPELGLGDLAFSLATTRSPMTYRLAVAATSREALSAALDTAAQGQAPPAAARGHASTGSAPKVVFVFPGQGSQWLGMGQKLLSEEPVFRDALSACDRAIQAEAGWSLLAELAADETTSQLGRIDVVQPALFAIEVALSALWRSWGVEPDAVVGHSMGEVAAAHVAGALSLEDAVAIICRRSLLLRRISGQGEMAVVELSLAEAEAALLGYEDRLSVAVSNSPRSTVLAGEPAALAEVLAILAAKGVFCRRVKVDVASHSPQIDPLRDELLAALGELEPRQATVSMRSTVTSTIMAGPELVASYWADNVRQPVRFAEAVQSLMEDGHGLFVEMSPHPILTTSVEEIRRATKREGVAVGSLRRGQDERLSMLEALGALWVHGQAVGWERLFSAGGAGLRRVPLPTYPWQRERYWVDAPTGGAAGGSRFAHAGSHPLLGEMQTLSTQRSTRVWETTLDLKRLPWLGDHRVQGAVVFPGAAYLEMALSSGAEALGDGPLQVSDVVLAEALAFADDTPAAVQVMATEERPGRLQFHVASRVPGHGGAAFRSHARGVLRQIERAEVPARLDLAALRARLQASAPAAATYAALAEMGLEYGPAFQGLVELWRGEGEALGRVRLPEAAGSPAACRLHPALLDACFHVSSAFADRGEATPWVPVEIGSLRWFQRPSGELWCHARSVSHGKPTPDRRSTDFWVVDSTGAIVAEISGLVAQRLAGGVRRREEDDWFMEPAWEPTAVPGSEVMAGRWLLIGSGGGLGAALHSALTEAGHSVVHATGRGTSAAGLQALLTASFDGQAPTSVVHLGSLDERGVLDADAPFDADALEESLVRGCDSVLWTVQAVAGAGFRDPPRLWLVTRGAQAIGAGDVSVAQAPLLGLGRVIALEHAELRCARIDLDPARRDGEVDELLAELLADDAEEEVAFRGGERRVARLVRRLPETDCREKIEPAEGRPFRLEIDGSGVLDDLVLRATERRPPGPGEVEIAVEAAGLNFLDVMRAMGIYPGPGDGPVALGAECSGRIVAMGEGVESLRIGQDVVAVAPFSFGTHVTIDARMLAPRPAALTAAQAAALPVAFMTAWYGLVHLGRLRAGERVLIHSATGGTGLAAVQIARHLGAEIFATAGTPEKRAWLREQGIAHVMDSRSLDFAEQVLAATKGEGVDVVLNSLSGAAIDASLSTLVPDGRFIELGKTDIYADRSLGLAHFRKSLSYSAVDLAGLAVRRPERVAALLAEVVDLLARGALQPLPVEIFPLSRAADAFRKMAQAQHLGKLVLALEDPDVRIRVPGESGVAIRADGAYLVTGGLGGLGLSVAGWLAEQGAGHLVLVGRSGAVSAEQQTAVAALEAHGARVTVARADVADRAQMERILREVTASGMPLRGVVHAAGILDDGLLMQQTPARFRAVMAPKVRGALHLHALTREAPLSFFVLYASGAGLLGSPGQGNYAAANTFLDALAHHRRAQGLPALSIDWGLFADVGLAAGQQNRGARLVTRGTRSLTPDEGLWALERLLDGDRTQAGVMPFDVRQWVEFYPAAASSRRLSRLMTARRVASGRLAGDRDLLERLATAEAGARAGMLQEVVRAQVSQVLRLSEGKLDVDAPLTSLGMDSLMGLELRNRIEAVLGITMPATLLWTYPTVAALSAHLASHVVSTGDGESARPPDTGSVAPTTHEVASLDEDGLFALIDESLARAGKR

SEQ ID NO: 20621 - protein, 7257 aa, Polyangium cellulosum
MTTRGPTAQQNPLKQAAIIIQRLEERLAGLAQAELERTEPIAIVGIGCRFPGGADAPEAFWELLDAERDAVQPLDRRWALVGVAPVEAVPHWAGLLTEPIDCFDAAFFGISPREARSLDPQHRLLLEVAWEGLEDAGIPPRSIDGSRTGVFVGAFTADYARTVARLPREERDAYSATGNMLSIAAGRLSYTLGLQGPCLTVDTACSSSLVAIHLACRSLRAGESDLALAGGVSTLLSPDMMEAAARTQALSPDGRCRTFDASANGFVRGEGCGLVVLKRLSDAQRDGDRIWALIRGSAINHDGRSTGLTAPNVLAQETVLREALRSAHVEAGAVDYVETHGTGTSLGDPIEVEALRATVGPARSDGTRCVLGAVKTNIGHLEAAAGVAGLIKAALSLTHERIPRNLNFRTLNPRIRLEGSALALATEPVPWPRTDRPRFAGVSSFGMSGTNAHVVLEEAPAVELWPAAPERSAELLVLSGKSEGALDAQAARLREHLDMHPELGLGDVAFSLATTRSAMTHRLAVAVTSREGLLAALSAVAQGQTPAGAARCIASSSRGKLALLFTGQGAQTPGMGRGLCAAWPAFREAFDRCVTLFDRELDRPLREVMWAEAGSAESLLLDQTAFTQPALFAVEYALTALWRSWGVEPELLVGHSIGELVAACVAGVFSLEDGVRLVAARGRLMQGLSAGGAMVSLGAPEAEVAAAVAPHAAWVSIAAVNGPEQVVIAGVEQAVQAIAAGFAARGVRTKRLHVSHAFHSPLMEPMLEEFGRVAASVTYRRPSVSLVSNLSGKVVTDELSAPGYWVRHVREAVRFADGVKALHEAGAGTFLEVGPKPTLLGLLPACLPEAEPTLLASLRAGREEAAGVLEALGRLWAAGGSVSWPGVFPTAGRRVPLPTYPWQRQRYWIEAPAEGLGATAADALAQWFYRVDWPEMPRSSVDSRRARSGGWLVLADRGGVGEAAAAALSSQGCSCAVLHAPAEASAVAEQVTQALGGRNDWQGVLYLWGLDAVVEAGASAEEVGKVTHLATAPVLALIQAVGTGPRSPRLWIVTRGACTVGGEPDAAPCQAALWGMGRVAALEHPGSWGGLVDLDPEESPTEVEALVAELLSPDAEDQLAFRQGRRRAARLVAAPPEGNAAPVSLSAEGSYLVTGGLGALGLLVARWLVERGAGHLVLISRHGLPDREEWGRDQPPEVRARIAAIEALEAQGARVTVAAVDVADAEGMAALLAAVEPPLRGVVHAAGLLDDGLLAHQDAGRLARVLRPKVEGAWVLHTLTREQPLDLFVLFSSASGVFGSIGQGSYAAGNAFLDALADLRRTQGLAALSIAWGLWAEGGMGSQAQRREHEASGIWAMPTSRALAAMEWLLGTRATQRVVIQMDWAHAGAAPRDASRGRFWDRLVTVTKAASSSAVPAVERWRNASVVETRSALYELVRGVVAGVMGFTDQGTLDVRRGFAEQGLDSLMAVEIRKRLQGELGMPLSATLAFDHPTVERLVEYLLSQALELQDRTDVRSVRLPATEDPIAIVGAACRFPGGVEDLESYWQLLTEGVVVSTEVPADRWNGADGRGPGSGEAPRQTYVPRGGFLREVETFDAAFFHISPREAMSLDPQQRLLLEVSWEAIERAGQDPSALRESPTGVFVGAGPNEYAERVQDLADEAAGLYSGTGNMLSVAAGRLSFFLGLHGPTLAVDTACSSSLVALHLGCQSLRRGECDQALVGGVNMLLSPKTFALLSRMHALSPGGRCKTFSADADGYARAEGCAVVVLKRLSDAQRDRDPILAVIRGTAINHDGPSSGLTVPSGPAQEALLRQALAHAGVVPADVDFVECHGTGTALGDPIEVRALSDVYGQARPADRPLILGAAKANLGHMEPAAGLAGLLKAVLALGQEQIPAQPELGELNPLLPWEALPVAVARAAVPWPRTDRPRFAGVSSFGMSGTNAHVVLEEAPAVELWPAAPERSAELLVLSGKSEGALDAQAARLREHLDMHPELGLGDVAFSLATTRSAMNHRLAVAVTSREGLLAALSAVAQGQTPPGAARCIASSSRGKLAFLFTGQGAQTPGMGRGLCAAWPAFREAFDRCVALFDRELDRPLCEVMWAEPGSAESLLLDQTAFTQPALFTVEYALTALWRSWGVEPELVAGHSAGELVAACVAGVFSLEDGVRLVAARGRLMQGLSAGGAMVSLGAPEAEVAAAVAPHAAWVSIAAVNGPEQVVIAGVEQAVQAIAAGFAARGVRTKRLHVSHASHSPLMEPMLEEFGRVAASVTYRRPSVSLVSNLSGKVVTDELSAPGYWVRHVREAVRFADGVKALHEAGAGTFLEVGPKPTLLGLLPACLPEAEPTLLASLRAGREEAAGVLEALGRLWAAGGSVSWPGVFPTAGRRVPLPTYPWQRQRYWPDIEPDSRRHAAADPTQGWFYRVDWPEIPRSLQKSEEASRGSWLVLADKGGVGEAVAAALSTRGLPCVVLHAPAETSATAELVTEAAGGRSDWQVVLYLWGLDAVVGAEASIDEIGDATRRATAPVLGLARFLSTVSCSPRLWVVTRGACIVGDEPAIAPCQAALWGMGRVAALEHPGAWGGLVDLDPRASPPQASPIDGEMLVTELLSQETEDQLAFRHGRRHAARLVAAPPRGEAAPASLSAEASYLVTGGLGGLGLIVAQWLVELGARHLVLTSRRGLPDRQAWREQQPPEIRARIAAVEALEARGARVTVAAVDVADVEPMTALVSSVEPPLRGVVHAAGVSVMRPLAETDETLLESVLRPKVAGSWLLHRLLHGRPLDLFVLFSSGAAVWGSHSQGAYAAANAFLDGLAHLRRSQSLPALSVAWGLWAEGGMADAEAHARLSDIGVLPMSTSAALSALQRLVETGAAQRTVTRMDWARFAPVYTARGRRNLLSALVAGRDIIAPSPPAAATRNWRGLSVAEARMALHEVVHGAVARVLGFLDPSALDPGMGFNEQGLDSLMAVEIRNLLQAELDVRLSTTLAFDHPTVQRLVEHLLVDVLKLEDRSDTQHVRSLASDEPIAIVGAACRFPGGVEDLESYWQLLAEGVVVSAEVPADRWDAADWYDPDPEIPGRTYVTKGAFLRDLQRLDATFFRISPREAMSLDPQQRLLLEVSWEALESAGIAPDTLRDSPTGVFVGAGPNEYYTQRLRGFTDGAAGLYGGTGNMLSVAAGRLSFFLGLHGPTLAMDTACSSSLVALHLACQSLRLGECDQALVGGVNVLLAPETFVLLSRMRALSPDGRCKTFSADADGYARGEGCAVVVLKRLRDAQRAGDSILALIRGSAVNHDGPSSGLTVPNGPAQQALLRQALSQAGVSPVDVDFVECHGTGTALGDPIEVQALSEVYGPGRSEDRPLVLGAVKANVAHLEAASGLASLLKAVLALRHEQIPAQPELGELNPHLPWNTLPVAVPRKAVPWGRGARPRRAGVSAFGLSGTNVHVVLEEAPEVELVPAAPARPVELVVLSAKSAAALDAAAERLSAHLSAHPELSLGDVAFSLATTRSPMEHRLAIATTSREALRGALDAAAQRQTPQGAVRGKAVSSRGKLAFLFTGQGAQMPGMGRGLYEAWPAFREAFDRCVALFDRELDQPLREVMWAAPGLAQAARLDQTAYAQPALFALEYALAALWRSWGVEPHVLLGHSIGELVAACVAGVFSLEDAVRLVAARGRLMQALPAGGAMVAIAASEAEVAASVAPHAATVSIAAVNGPDAVVIAGAEVQVLALGATFAARGIRTKRLAVSHAFHSPLMDPMLEDFQRVAATIAYRAPDRPVVSNVTGHVAGPEIATPEYWVRHVRSAVRFGDGAKALHAAGAATFVEIGPKPVLLGLLPACLGEADAVLVPSLRADRSECEVVLAALGTWYAWGGALDWKGVFPDGARRVALPMYPWQRERHWMDLTPRSAAPAGIAGRWPLAGVGLCMPGAVLHHVLSIGPRHQPFLGDHLVFGKVVVPGAFHVAVILSIAAERWPERAIELTGVEFLKAIAMEPDQEVELHAVLTPEAAGDGYLFELATLAAPETERRWTTHARGRVQPTDGAPGALPRLEVLEDRAIQPLDFAGFLDRLSAVRIGWGPLWRWLQDGRVGDEASLATLVPTYPNAHDVAPLHPILLDNGFAVSLLATRSEPEDDGTPPLPFAVERVRWWRAPVGRVRCGGVPRSQAFGVSSFVLVDETGEVVAEVEGFVCRRAPREVFLRQESGASTAALYRLDWPEAPLPDAPAERMEESWVVVAAPGSEMAAALATRLNRCVLAEPKGLEAALAGVSPAGVICLWEPGAHEEAPAAAQRVATEGLSVVQALRDRAVRLWWVTTGAVAVEAGERVQVATAPVWGLGRTVMQERPELSCTLVDLEPEVDAARSADVLLRELGRADDETQVVFRSGERRVARLVKATTPEGLLVPDAESYRLEAGQKGTLDQLRLAPAQRRAPGPGEVEIKVTASGLNFRTVLAVLGMYPGDAGPMGGDCAGIVTAVGQGVHHLSVGDAVMTLGTLHRFVTVDARLVVRQPAGLTPAQAATVPVAFLTAWLALHDLGNLRRGERVLIHAAAGGVGMAAVQIARWIGAEVFATASPSKWAAVQAMGVPRTHIASSRTLEFAETFRQVTGGRGVDVVLNALAGEFVDASLSLLTTGGRFLEMGKTDIRDRAAVAAAHPGVRYRVFDILELAPDRTREILERVVEGFAAGHLRALPVHAFAITKAEAAFRFMAQARHQGKVVLLPAPSAAPLAPTGTVLLTGGLGALGLHVARWLAQQGAPHMVLTGRRGLDTPGAAKAVAEIEALGARVTIAASDVADRNALEAVLQAIPAEWPLQGVIHAAGALDDGVLDEQTTDRFSRVLAPKVTGAWNLHELTAGNDLAFFVLFSSMSGLLGSAGQSNYAAANTFLDALAAHRRAEGLAAQSLAWGPWSDGGMAAGLSAALQARLARHGMGALSPAQGTALLGQALARPETQLGAMSLDVRAASQASGAAVPPVWRALVRAEARHAAAGAQGALAARLGALPEARRADEVRKVVQAEIARVLSWGAASAVPVDRPLSDLGLDSLTAVELRNVLGQRVGATLPATLAFDHPTVDALTRWLLDKVLAVAEPSVSPAKSSPQVALDEPIAVIGIGCRFPGGVTDPESFWRLLEEGSDAVVEVPHERWDIDAFYDPDPDVRGKMTTRFGGFLSDIDRFEPAFFGISPREATTMDPQQRLLLETSWEAFERAGILPERLMGSDTGVFVGLFYQEYAALAGGIEAFDGYLGTGTTASVASGRISYVLGLKGPSLTVDTACSSSLVAVHLACQALRRGECSVALAGGVALMLTPATFVEFSRLRGLAPDGRCKSFSAAADGVGWSEGCAMLLLKPLRDAQRDGDPILAVIRGTAVNQDGRSNGLTAPNGSSQQEVIRRALEQAGLAPADVSYVECHGTGTTLGDPIEVQALGAVLAQGRPSDRPLVIGSVKSNIGHTQAAAGVAGVIKVALALERGLIPRSLHFDAPNPHIPWSELAVQVAAKPVEWTRNGAPRRAGVSSFGVSGTNAHVVLEEAPAAAFAPAAARSAELFVLSAKSAAALDAQAARLSAHVVAHPELGLGDLAFSLATTRSPMTYRLAVAATSREALSAALDTAAQGQAPPAAARGHASTGSAPKVVFVFPGQGSQWLGMGQKLLSEEPVFRDALSACDRAIQAEAGWSLLAELAADETTSQLGRIDVVQPALFAIEVALSALWRSWGVEPDAVVGHSMGEVAAAHVAGALSLEDAVAIICRRSLLLRRISGQGEMAVVELSLAEAEAALLGYEDRLSVAVSNSPRSTVLAGEPAALAEVLAILAAKGVFCRRVKVDVASHSPQIDPLRDELLAALGELEPRQATVSMRSTVTSTIVAGPELVASYWADNVRQPVRFAEAVQSLMEGGHGLFVEMSPHPILTTSVEEIRRATKREGVAVGSLRRGQDERLSMLEALGALWVHGQAVGWERLFSAGGAGLRRVPLPTYPWQRERYWVEAPTGGAASGSRFAHAGSHPLLGEMQTLSTQRSTRVWETTLDLKRLPWLGDHRVQGAVVFPGAAYLEMALSSGAEALGDGPLQVSDVVLAEALAFADDTPVAVQVMATEERPGRLQFHVASRVPGHGRAAFRSHARGVLRQTERAEVPARLDLAALRARLQASAPAAATYAALAEMGLEYGPAFQGLVELWRGEGEALGRVRLPEAAGSPAACRLHPALLDACFHVSSAFADRGEATPWVPVEIGSLRWFQRPSGELWCHARSVSHGKPTPDRRSTDFWVVDSTGAIVAEISGLVAQRLAGGVRRREEDDWFMEPAWEPTAVPGSEVTAGRWLLIGSGGGLGAALYSALTEAGHSVVHATGHGTSAAGLQALLTASFDGQAPTSVVHLGSLDERGVLDADAPFDADALEESLVRGCDSVLWTVQAVAGAGFRDPPRLWLVTRGAQAIGAGDVSVAQAPLLGLGRVIALEHAELRCARIDLDPARRDGEVDELLAELLADDAEEEVAFRGGERRVARLVRRLPETDCREKIEPAEGRPFRLEIDGSGVLDDLVLRATERRPPGPGEVEIAVEAAGLNFLDVMRAMGIYPGPGDGPVALGAECSGRIVAMGEGVESLRIGQDVVAVAPFSFGTHVTIDARMVAPRPAALTAAQAAALPVAFMTAWYGLVHLGRLRAGERVLIHSATGGTGLAAVQIARHLGAEIFATAGTPEKRAWLREQGIAHVMDSRSLDFAEQVLAATKGEGVDVVLNSLSGAAIDASLATLVPDGRFIELGKTDIYADRSLGLAHFRKSLSYSAVDLAGLAVRRPERVAALLAEVVDLLARGALQPLPVEIFPLSRAADAFRKMAQAQHLGKLVLALEDPDVRIRVPGESGVAIRADGTYLVTGGLGGLGLSVAGWLAEQGAGHLVLVGRSGAVSAEQQTAVAALEAHGARVTVARADVADRAQIERILREVTASGMPLRGVVHAAGILDDGLLMQQTPARFRAVMAPKVRGALHLHALTREAPLSFFVLYASGAGLLGSPGQGNYAAANTFLDALAHHRRAQGLPALSIDWGLFADVGLAAGQQNRGARLVTRGTRSLTPDEGLWALERLLDGDRTQAGVMPFDVRQWVEFYPAAASSRRLSRLVTARRVASGRLAGDRDLLERLATAEAGARAGMLQEVVRAQVSQVLRLPEGKLDVDAPLTSLGMDSLMGLELRNRIEAVLGITMPATLLWTYPTVAALSAHLASHVVSTGDGESARPPDTGNVAPMTHEVASLDEDGLFALIDESLARAGKR

SEQ ID NO: 20622 - protein, 1421 aa, Polyangium cellulosum
MADRPIERAAEDPIAIVGASCRLPGGVIDLSGFWTLLEGSRDTVGRVPAERWDAAAWFDPDPDAPGKTPVTRASFLSDVACFDASFFGISPREALRMDPAHRLLLEVCWEALENAAIAPSALVGTETGVFIGIGPSEYEAALPQATASAEIDAHGGLGTMPSVGAGRISYALGLRGPCVAVDTAYSSSLVAVHLACQSLRSGECSTALAGGVSLMLSPSTLVWLSKTRALARDGRCKAFSAEADGFGRGEGCAVVVLKRLSGARADGDRILAVIRGSAINHDGASSGLTVPNGSSQEIVLKRALADAGCAASSVGYVEAHGTGTTLGDPIEIQALNAVYGLGRDVATPLLIGSVKTNLGHPEYASGITGLLKVVLSLQHGQIPAHLHAQALNPRISWGDLRLTVTRARTPWPDWNTPRRAGVSSFGMSGTNAHVVLEEAPAATCTPPAPERPAELLVLSARTASALDAQAARLRDHLETYPSQCLGDVAFSLATTRSAMEHRLAVAATSREGLRAALDAAAQGQTSPGAVRSIADSSRGKLAFLFTGQGAQTLGMGRGLYDVWSAFREAFDLCVRLFNQELDRPLREVMWAEPASVDAALLDQTAFTQPALFTFEYALAALWRSWGVEPELVAGHSIGELVAACVAGVFSLEDAVFLVAARGRLMQALPAGGAMVSIEAPEADVAAAVAPHAASVSIAAVNAPDQVVIAGAGQPVHAIAAAMAARGARTKALHVSHAFHSPLMAPMLEAFGRVAESVSYRRPSIVLVSNLSGKACTDEVSSPGYWVRHAREVVRFADGVKALHAAGAGTFVEVGPKSTLLGLVPACMPDARPALLASSRAGRDEPATVLEALGGLWAVGGLVSWAGLFPSGGRRVPLPTYPWQRERYWIDTKADDAARGDRRAPGAGHDEVEEGGAVRGGDRRSARLDHPPPESGRREKVEAAGDRPFRLEIDEPGVLDHLVLRVTERRAPGLGEVEIAVDAAGLSFNDVQLALGMVPDDLPGKPNPPLLLGGECAGRIVAVGEGVNGLVVGQPVIALSAGAFATHVTTSAALVLPRPQALSAIEAAAMPVAYLTAWYALDRIARLQPGERVLIHAATGGVGLAAVQWAQHVGAEVHATAGTPEKRAYLESLGVRYVSDSRSDRFVADVRAWTGGEGVDVVLNSLSGELIDKSFNLLRSHGRFVELGKRDCYADNQLGLRPFLRNLSFSLVDLRGMMLERPARVRALLEELLGLIAAGVFTPPPIATLPIARVADAFRSMAQAQHLGKLVLTLGDPEVQIRIPTHAGAGPSTGDRDLLDRLASAAPAARAAALEAFLRTQVSQVLRTPEIKVGAEALFTRLGMDSLMAVELRNRIEASLKLKLSTTFLSTSPNIALLAQNLLDALATALSLERVAAENLRAGVQNDFVSSGADQDWEIIAL

SEQ ID NO: 20623 - protein, 1421 aa, Polyangium cellulosum
MADRPIERAAEDPIAIVGAGCRLPGGVIDLSGFWTLLEGSRDTVGQVPAERWDAAAWFDPDLDAPGKTPVTRASFLSDVACFDASFFGISPREALRMDPAHRLLLEVCWEALENAAIAPSALVGTETGVFIGIGPSEYEAALPRATASAEIDAHGGLGTMPSVGAGRISYVLGLRGPCVAVDTAYSSSLVAVHLACQSLRSGECSTALAGGVSLMLSPSTLVWLSKTRALATDGRCKAFSAEADGFGRGEGCAVVVLKRLSGARADGDRILAVIRGSAINHDGASSGLTVPNGSSQEIVLKRALADAGCAASSVGYVEAHGTGTTLGDPIEIQALNAVYGLGRDVATPLLIGSVKTNLGHPEYASGITGLLKVVLSLQHGQIPAHLHAQALNPRISWGDLRLTVTRARTPWPDWNTPRRAGVSSFGMSGTNAHVVLEEAPAATCTPPAPERPAELLVLSARTAAALDAHAARLRDHLETYPSQCLGDVAFSLATTRSAMEHRLAVAATSSEGLRAALDAAAQGQTPPGVVRGIADSSRGKLAFLFTGQGAQTLGMGRGLYDVWPAFREAFDLCVRLFNQELDRPLREVMWAEPASVDAALLDQTAFTQPALFTFEYALAALWRSWGVEPELVAGHSIGELVAACVAGVFSLEDAVFLVAARGRLMQALPAGGAMVSIAAPEADVAAAVAPHAASVSIAAVNGPDQVVIAGAGQPVHAIAAAMAARGARTKALHVSHAFHSPLMAPMLEAFGRVAESVSYRRPSIVLVSNLSGKAGTDEVSSPGYWVRHAREVVRFADGVKALHAAGAGTFVEVGPKSTLLGLVPACLPDARPALLASSRAGRDEPATVLEALGGLWAVGGLVSWAGLFPSGGRRVPLPTYPWQRERYWIDTKADDAARGDRRAPGAGHDEVEKGGAVRGGDRRSARLDHPPPESGRREKVEAAGDRPFRLEIDEPGVLDRLVLRVTERRAPGLGEVEIAVDAAGLSFNDVQLALGMVPDDLPGKPNPPLLLGGECAGRIVAVGEGVNGLVVGQPVIALSAGAFATHVTTSAALVLPRPQALSATEAAAMPVAYLTAWYALDGIARLQPGERVLIHAATGGVGLAAVQWAQHVGAEVHATAGTPEKRAYLESLGVRYVSDSRSDRFVADVRAWTGGEGVDVVLNSLSGELIDKSFNLLRSHGRFVELGKRDCYADNQLGLRPFLRNLSFSLVDLRGMMLERPARVRALFEELLGLIAAGVFTPPPIATLPIARVADAFRSMAQAQHLGKLVLTLGDPEVQIRIPTHAGAGPSTGDRDLLDRLASAAPAARAAALEAFLRTQVSQVLRTPEIKVGAEALFTRLGMDSLMAVELRNRIEASLKLKLSTTFLSTSPNIALLTQNLLDALATALSLERVAAENLRAGVQSDFVSSGADQDWEIIAL

SEQ ID NO: 20624 - protein, 2518 aa, Polyangium cellulosum
ILGSDARLASALEAAGAHVTRHRDPGAWIDAIRGGGAPEVVAVLACTTRPDAPSGALAATHGAAADALAALQAWLAEERLASCALVVLTERAVATRPDEDVLDLVHAPVWGLVRAAQVENPDRALILVDVDADDASLPALPALVAAAVARAADASEPQLALREGRRLVPRLGRLGGDDALVPPSAAAYRLHVAAKGTLESLALVPHEEATRPLAEGQIRVAVRAAGLNFRDALDALGMYPGDPGPLGAEGAGVVLEVGPGVTELAPGDRVMGLLSAAFGPIALADHRMVSRIPAGLSFVEAASIPVVFLTAYYGLVDLGRLRPGERVLVHAAAGGVGIAAVQLARHLGAEVFATASPPKWATLRALGLDDDHIASSRSGDFEAHFRRTSGGRGVDVVLDSLARELVDASLRLVALAPDGRFVEMGKSDVRDPLAVAASHPSVAYRAFDLAEAGPERIQAMLAELVALFERGVLRVPPITPCDLRRAPQAFRALAQARLVGKVVLTIPRALDPRGSVLVTGGTGTLGALVARHLVQRHGVRSLVLSSRRGPAAPGADDLRRELEAAGASVAIVACDAGDRLALERLLAGIPADRPLTAVVHAAGTLDDGVLTSLTPERLRSVMSAKVDAAAHLDELTRPLDLSAFVLFASLSGVLGSPGQANYAAANTFLDALAHQRRSRGLPAVSLDWGYWAERTGLTAHLGDTDLQRMARGGLRPLTTDDGLALFDAALAHVDAALVAAPFDPVALRAHAVAPILRGLVRAGAARRKLANNAASAAPLAQRLAGLAPKERERAMIDVVRPEIGVVLGLPPSRHLDGDRPLKELGLDSLMAVELRNRLAAIVGTRLPATLLFDYPTPTALARFLATALVGRGDAAAAPSAARAASAGASDDAIAIVAMACRFPGGVLTPEDLFRLLREGGDAISAFPENRGWDLDALSDGAARQGGFLHDADLFDAEFFGISPRETLALDPQQRLLLEMTWEALERAGIIPASLHGSKSGVFVGVFGSDYVARLLHGPSGAQAMESLRGYIGTGSASSVASGRIAYALGLEGPAISVDTACSSSLVALHLACHAIRRGECSLALAGGVTVMATPGIFGEFSAQHAGAPDGRCKSFSADANGAGWSEGAGIVLLERLSDARKNGHPVLAIVRGSAVNQDGKSQGLTAPNGPAQERVIRDALASAGLAPADVDAVEAHGTGTTLGDPIEARALFATYGAAHAKERPLWLGSLKSNLGHTQAAAGIGGVIKMVLALQSGVLPRTLHAASPSQHIDWSSGAIRLLTEEVPWKPGGSPRRAAVSSFGISGTNAHVVLEEAPRAAAGDDQAAEPARAPLAPPVPVLLSAKSDAALRAQAGKLHAHLAEHEDVALVDVAASLATTRSHFERRAAVVADDRAALLSALAALAEGRAGAGTVAGEALPPGKVAFVFPGQGSQWPSMARALLASSPAFRAEIEACERALAPHVDWSLLAVLGGDEAHAAPMLERVDVVQPVLFAVMIALAATWRAAGVTPDAVVGHSQGEIAAAYVAGALSLEDAARVVALRSRAITKLAGRGAMAAVELTTADLEARLAPFGGRLAIAAINSPHAALVSGDPDAIDELVAELSGAQLFARKVRVDYASHSAHVEAIERTLLEALDGIAPRPATVPLYSAVTGERLDGEALGAAHWYRNLRHTVRFEHATRALLDDGHRFFVEVSPHPVLTVALRDTIDASGHDAVACASLRRDEGDLARFNLSLAELHTRGLAVDWRAFFAPFAPRTVALPTYAFQRERFWLDAPKASGVIPAAASPAEARFWSAVEDGDVATVTDALDVGDDERRAALATLLPTLATWRRARRAQSTIDAWRYRVAWRALTAPPKGDIAGTWLVVAPEVAGALADGVARALEARGARGVLVPVDAEDAARTPLAGRLRAVAGGQAIRGVISFAALDERPAPLEPSVPLGLAVSLGLVQALGDAAIDAPLWLVTRGAVAVGASERVTRPLQAMTWGLGRVVALEHPERWGGLVDLGEESAPDANGARDANVHDRLANLVARRDDEDQLALRAAGTYVRRLVRAPHDGARPPAFAPRGAALVTGGTGALGAHVARWLARIGAEHIVLASRRGAAAPGAAALAEELSALGARVTLAACDVADREAVAALVRDVEAGGATVRAVFHAGGAMHEAPVAAMRVEELADAIAAKARGAQHLHDVFAQRPLDAFVLFSSGAGVWGGGRQGAYAAANAFLDALAEARRADGLAATSIAWGAWAGGGMLATDAERRLKHRGVAPMDPELAVAALAHALDHAETCLAVADVDWARFAPSFASARPRPLLDELAEARSALDALREPPDDARTAAGPEPASTLRTTLAALPEGERHRHLLALVRTETAAVLGHADASRVEPNRGFFDLGLDSLMSVELRRRVQRATGIKLPATLAFDHPTPSALASKVLAAIVLHDATPRASPAAELERLEGMLSAIYADEALRDDLTARLRAFLDKRAVRTERPDDAAFAEKLGSASADELIRLIDQKLGDRIDVDRY

SEQ ID NO: 20625 - protein, 2439 aa, Polyangium cellulosum
MATTNAGKLEHALLLMDKLAKKNASLEQERTEPIAIIGIGCRFPGGADTPEAFWELLDSGRDAVQPLDRRWALVGVHPSEEVPRWAGLLTEAVDGFDAAFFGTSPREARSLDPQQRLLLEVTWEGLEDAGIAPQSLDGSRTGVFLGACSSDYSHTVAQQRREEQDAYDITGNTLSVAAGRLSYTLGLQGPCLTVDTACSSSLVAIHLACRSLRARESDLALAGGVNMLLSSKTMIMLGRIQALSPDGHCRTFDASANGFVRGEGCGMVVLKRLSDAQRHGDRIWALIRGSAMNQDGRSTGLMAPNVLAQEALLRQALQSARVDAGAIDYVETHGTGTSLGDPIEVDALRAVMGPARADGSRCVLGAVKTNLGHLEGAAGVAGLIKAALALHHESIPRNLHFHTLNPRIRIEGTALALATEPVPWPRAGRPRFAGVSAFGLSGTNVHVVLEEAPATVLAPATPGRSAELLVLSAKSTAALDAQAARLSAHIAAYPEQGLGDVAFSLVATRSPMEHRLAVAATSREALRSALEAAAQGQTPAGAARGRAASSPGKLAFLFAGQGAQVPGMGRGLWEAWPAFRETFDRCVTLFDRELHQPLCEVMWAEPGSSRSSLLDQTAFTQPALFALEYALAALFRSWGVEPELIAGHSLGELVAACVAGVFSLEDAVRLVVARGRLMQALPAGGAMVSIAAPEADVAAAVAPHAASVSIAAVNGPEQVVIAGAEKFVQQIAAAFAARGARTKPLHVSHAFHSPLMDPMLEAFRRVTESVTYRRPSMALVSNLSGKPCTDEVCAPGYWVRHAREAVRFADGVKALHAAGAGIFVEVGPKPALLGLLPACLPDARPVLLPASRAGRDEAASALEALGGFWVVGGSVTWSGVFPSGGRRVPLPTYPWQRERYWIEAPVDGEADGIGRAQAGDHPLLGEAFSVSTHAGLRLWETTLDRKRLPWLGEHRAQGEVVFPGAGYLEMALSSGAEILGDGPIQVTDVVLIETLTFAGDTAVPVQVVTTEERPGRLRFQVASREPGARRASFRIHARGVLRRVGRAETPARLNLAALRARLHAAVPAAAIYGALAEMGLQYGPALRGLAELWRGEGEALGRVRLPESAGSATAYQLHPVLLDACVQMIVGAFADRDEATPWAPVEVGSVRLFQRSPGELWCHARVVSDGQQAPSRWSADFELMDGTGAVVAEISRLVVERLASGVRRRDADDWFLELDWEPAALEGPKITAGRWLLLGEGGGLGRSLCSALKAAGHVVVHAAGDDTSAAGMRALLANAFDGQAPTAVVHLSSLDGGGQLDPGLGAQGALDAPRSPDVDADALESALMRGCDSVLSLVQALVGMDLRNAPRLWLLTRGAQAAAAGDVSVVQAPLLGLGRTIALEHAELRCISVDLDPAQPEGEADALLAELLADDAEEEVALRGGERFVARLVHRLPEAQRREKIAPAGDRPFRLEIDEPGVLDQLVLRATGRRAPGPGEVEIAVEAAGLDSIDIQLAVGVAPNDLPGGEIEPSVLGSECAGRIVAVGEGVNGLVVGQPVIALAAGVFATHVTTSATLVLPRPLGLSATEAAAMPLAYLTAWYALDKVAHLQAGERVLIRAEAGGIGLCAVRWAQRVGAEVYATADTPEKRAYLESLGVRYVSDSRSGRFAADVHAWTDGEGVDVVLDSLSGEHIDKSLMVLRACGRLVKLGRRDDCADTQPGLPPLLRNFSFSQVDLRGMMLDQPARIRALLDELFGLVAAGAISPLGSGLRVGGSLTPPPVETFPISRAAEAFRRMAQGQHLGKLVLTLDDPEVRIRAPAESSVAVRADGTYLVTGGLGGLGLRVAGWLAERGAGQLVLVGRSGAASAEQRAAVAALEAHGARVTVAKADVADRSQIERVLREVTASGMPLRGVVHAAGLVDDGLLMQQTPARLRTVMGPKVQGALHLHTLTREAPLSFFVLYASAAGLFGSPGQGNYAAANAFLDALSHHRRAHGLPALSIDWGMFTEVGMAVAQENRGARLISRGMRGITPDEGLSALARLLEGDRVQTGVIPITPRQWVEFYPATAASRRLSRLVTTQRAVADRTAGDRDLLEQLASAEPSARAGLLQDVVRVQVSHVLRLPEDKIEVDAPLSSMGMDSLMSLELRNRIEAALGVAAPAALGWTYPTVAAITRWLLDDALAVRLGGGSDTDESTASAGSFVHVLRFRPVVKPRARLFCFHGSGGSPEGFRSWSEKSEWSDLEIVAMWHDRSLASEDAPGKKYVQEAASLIQHYADAPFALVGFSLGVRFVMGTAVELASRSGAPAPLAVFALGGSLISSSEITPEMETDIIAKLFFRNAAGFVRSTQQVQADARADKVITDTMVAPAPGDSKEPPSKIAVPIVAIAGSDDVIVPPSDVQDLQSRTTERFYMHLLPGDHEFLVDRGREIMHIVDSHLNPLLAARTTSSGPAFEAK

SEQ ID NO: 20626 - protein, 8817 aa, Polyangium cellulosum
MNNDEKLVSYLQQAMNELQRAHQRLRAVEEKEHEPIAIVAMSCRFPGDVRTPEDLWKLLLDGKDAISDLPPNRGWKLDALDVHGRSPVREGGFFYDADAFDPAFFGISPREALAIDPQQRLLLEISWEAFERAGIDPASLQGSQSGVFVGVIHNDYDALLENAAGEHKGFVATGSTASVASGRIAYTFGFQGPAISVDTACSSSLVAVHLACQALRRGECSLALAGGVTVMATPAVFVAFDSESAGAPDGRCKSFSVEANGSGWAEGAGMLLLERLSDAVQNGHPVLAVLRGSAVNQDGRSQGLTAPNGPAQERVIRQALDSARLTPKDVDVVEAHGTGTTLGDPIEAQAILATYGEAHSQDRPLWLGSLKSNLGHAQAAAGVGSVIKMVLALQQGLLPKTLHAQNPSPHIDWSPGTVKLLNEPVVWTTNGHPRHAGVSAFGISGTNAHVILEEAPAIARVEPAASQPASEPLPAAWPVLLSAKSEAAVRAQAKRLRDHLLAKSELALADVAYSLATTRAHFEQRAALLVKGRDELLSALDALAQGHSAAVLGRSGAPGKLAVLFTGQGSQRPTMGRGLYDVFPVFRDALDTVGAHLDRELDRPLRDVLFAPDGSEQAARLEQTAFTQPALFALEVALFQLLQSFGLKPALLLGHSIGELVAAHVAGVLSLQDGCTLVAARAKLMQALPQGGAMVTLRASEEEVRDLLQPYEGRASLAALNGPLSTVVAGDEDAVVEIARQAEALGRKTTRLRVSHAFHSPHMDGMLDDFRRVAQSLTYHPARIPIISNVTGARATDHELASPDYWVRHVRHTVRFLDGVRALHAEGARVFLELGPHAVLSALAQDALGQDEGTSPCAFLPTLRKGRDDAEAFTAALGALHSAGITPDWSAFFAPFAPRKVSLPTYAFQRERFWPDASKAPGADVSHLAPLEGGLWQAIERGDLDALSGQLHVDGDERRAALALLLPTLSSFRHERQEQSTVDAWRYRITWKPLTTAETPADLAGTWLVVVPAALDDDALPSALTEALTRRGARVLALRLSQAHLDREALAEHLRQACAETAPIRGVLSLLALDERPLADRPALPAGLALSLSLAQALGDLDLEAPLWFFTRGAVSIGHSDPLAHPAQAMTWGLGRVIGLEHPDRWGGLVDVCAGVDESAVGRLLPALAERHDEDQLALRPAGLYARRIVRAPLGDAPPARDFTPGGTILITGGTGAIGAHVARWLARRGAQHLVLISRRGAEAPGASELHDELSALGARTTLAACDVADRNAVATLLEQLDAEGSQVRAVFHASGIEHHAPLDATSFRDLAEVVSGKVEGAKHLHDLLGSRPLDAFVLFSSGAAVWGGGQQGGYAAANAFLDALAEHRRSAGLTATSVAWGAWGGGGMATDQAAAHLQQRGLSRMAPSLALAALALALEHDETTVTVADIDWARFAPSFSAARPRPLLRDLPEAQRALETSEGASSEHGPAPDLLDKLRSRSESEQLRLLVSLVRHETALVLGHEGASHVDPDKGFLDLGLDSLMAVELRRRLQQATGIKLPATLAFDHPSPHRVALFLRDSLAHALGTRLSVEPDAAALPALRAASDEPIAIVGMALRLPGGVGDVDALWEFLAQGRDGVEPIPKARWDAAALYDPDPDAKTKSYVRHAAMLDQVDLFDPAFFGISPREAKHLDPQHRLLLESAWQALEDAGIVPPTLKDSPTGVFVGIGASEYALREASTEDSDAYALQGTAGSFAAGRLAYTLGLQGPALSVDTACSSSLVALHLACQALRQGECNLALAAGVSVMASPEGFVLLSRLRALAPDGRSKTFSANADGYGRGEGVIVLALERLGDALARGHRVLALVRGTAINHDGASSGITAPNGTSQQKVLRAALHDARITPADVDVVECHGTGTSLGDPIEVQALAAVYADGRPAEKPLLLGALKTNIGHLEAASGLAGVAKIVASLRHDALPPTLHTGPRNPLIDWDTLAIDVVDTPRSWARHEDSSPRRAGVSAFGLSGTNAHVILEEAPAALSGEPATSQTASRPLPAACAVLLSARSEAAVRAQAKRLRDHLLAHDDLALIDVAYSQATTRAHFEHRAALLARDRDELLSALDSLAQDKPAPSTVLGRSGSHGKVVFVFPGQGSQWEGMALSLLDSSPVFRAQLEACERALAPHVEWSLLAVLRRDEGAPSLDRVDVVQPALFAVMVSLAALWRSLGVEPAAVVGHSQGEIAAAFVAGALSLEDAARIAALRRKALTTVGGNGGMAAVELGASDLQTYLAPWGDRLSTAAVNSPRATLVSGEPAAVDALLDVLTATKVFARKIRVDYASHSAQMDAVQDELAAGLANIAPRTCELPLYSTVTGTRLDGSELDGAYWYRNLRQTVLFSSATERLLDDGHRFSVEVSPHPVLTLALRETCERSPLDPVVVGSIRREEGHLARLLLSWAELSTRGLALDWKDFFAPYAPRKVSLPTYPFQRERFWLDVSTDERFRRRLRRPDLGRPIPLLGAAVAFADRGGFLFTGRLSLAEHPWLEGHAVFGTPILPGTGFLELALHVAHRVGLDTVEELTLEAPLALPSQDTVLLQISVGPVDDAGRRALSFHSRQEDALQDGPWTRHASGSLSPATPSLSADLHEWPPSSAIPVDLEGLYATLANLGLAYGPEFQGLRSVYKRGDELFAEAKLPEAAEKDAARFALHPALLDSALHALAFEDEQRGTVALPFSWSGVSLRSVGATTLRVRFHRPKGESSVSIVLADAAGDPLASVQALAMRTTSAAQLRTPAASHHDALFRVDWSELQSPTSPPAAPSGVLLGTGGHDLALDAPLARYADLAALRSALDQGASPPGLVVAPFIDRPAGDLVPSAHEATALALALLQAWLADERLASSRLVLVTRRAVATHTEDDVKDLAHAPLWGLARSAQSEHPDLPLFLVDIDLSEASQQALLGALDTGERQLALRNGKPLIPRLAQPRSTDALIPPQAPTWRLHIPTKGTFDALALVDAPEAQAPLAHGQVRIAVHAAGLNFRDVVDTLGMYPGDAPPLGGEGAGIVTEVGPGVSRYTVGDRVMGVFGAAFGPTAIADARMICPIPHAWSFAQAASVPIIYLTAYYGLVDLGHLKPNQRVLIHAAAGGVGTAAVQLARHLGAEVFATASPGKWSALRALGFDDAHLASSRDLGFEQHFLRSTHGRGMDVVLDCLAREFVDASLRLMPSGGRFIEMGKTDIREPDAIGLAYPGVVYRAFDVTEAGPDRIGQMLAELLSLFERGVLRLPPITSWDIRHAPQAFRALAQARHVGKFVLTIPRPIDPEGTVLITGGTGTLGVLVARHLVAKHSAKHLLLTSRKGARAPGAEALRSELEALGASVTLVACDVADPRALRTLLDSIPRDHPITAVVHAAGALDDGPLGSMSAERIARVFDPKLDAAWYLHELTQDEPVAAFVLFSAASGVLGGPGQSNYAAANAFLDALAHHRRAQGLPAASLAWGYWAERSGMTRHLSAADAARMRRAGVRPLDTDEALSLFDVALLRPEPALVPAPFDYNVLSTSADGVPPLFQRLVRARIARKAASNTALASSLAEHLSSLPPAERERVLLDLVRTEAASVLGLASFESLDPHRPLQELGLDSLMALELRNRLAAAAGLRLQATLLFDYPTPTALSRFFTTHLFGGTTHRPGVPLTPGGSEDPIAIVAMSCRFPGDVRTPEDLWKLLLDGQDAISGFPQNRGWSLDALDAPGRFPVREGGFVYDADAFDPAFFGISPREALAVDPQQRILLEITWEAFERAGIDPASLQGSQSGVFVGVWQSDYHASLVNATGEYKGLVATGSAASVASGRIAYTFGLQGPAISVDTACSSSLVAVHLACQALRHGECSLALAGGVTIMATPGIFIAFDSESAGAPDGRCKAFSAEADGSGWAEGAGMLLLERLSDAVQNGHPVLAVLRGSAVNQDGRSQGLTAPNGPAQERVIRQALDSARLTPKDVDVVEAHGTGTTLGDPIEAQAVFATYGEAHSQDRPLWLGSLKSNLGHTQAAAGVGGIIKMVLALQHGLLPKTLHAQNPSPHIDWSPGIVKLLNEAVAWTTSGHPRRAGVSSFGVSGTNAHVILEEAPAATRAESGASQPASQPLPAAWPVVLSARSEAAVRAQAQRLREHLLAQGDLTLADVAYSLATTRAHFEHRAALVAHDRDELLSALDSLAQDKPAPSTVLGRSGSHGKVVFVFPGQGSQWEGMALSLLDSSPVFRTQLEACERALRPHVEWSLLAVLRRDEGAPSLDRVDVVQPALFAVMVSLAALWRSLGVEPAAVVGHSQGEIAAAFVAGALSLEDAARIAALRSKASPPSPATGMAAVELGASDLQTYLAPWGDRLSIAAVNSPRATLVSGEPAAVDALIDSLTAAQVFARRVRVDYASHSAQMDAVQDELAAGLANIAPRTCELPLYSTVTGTRLDGSELDGAYWYRNLRQTVLFSSATERLLDDGHRFFVEVSPHPVLTLALRETCERSPLDPVVVGSIRRDEGHLPRLLALLGRALWPGLTPEWKAFFAPFAPRKVSLPTYAFQRERFWLDAPNAHPEGVAPAAPIDGRFWQAIERGDLDALSGQLHADGDEQRAALALLLPTLSSFHHQRQEQSTVDTWRYRITWRPLTTAATPADLAGTWLLVVPSALGDDALPATLTDALTRRGARVLALRLSQVHIGRAALTEHLREAVAETAPIRGVLSLLALDERPLADHAALPAGLALSLALVQALGDLALEAPLWLFTRGAVSIGHSDPLAHPTQAMIWGLGRVVGLEHPERWGGLVDLGAALDASAAGRLLPALAQRHDEDQLALRPAGLYARRFVRAPLGDAPAARGFMPRGTILITGGTGAIGAHVARWLARKGAEHLVLISRRGAQAEGAVELHAELTALGARVTFAACDVADRSAVATLLEQLDAGGPQVSAVFHAGGIEPHAPLAATSMEDLAEVVSGKVQGARHLHDLLGSRPLDAFVLFSSGAVVWGGGQQGGYAAANAFLDALAEQRRSLGLTATSVAWGVWGGGGMATGLLAAQLEQRGLSPMAPSLAVATLALALEHDETTLTVADIDWARFAPSFSAARSRPLLRDLPEAQRALEASADASSEQDGATGLLDKLRNRSESEQIHLLSSLVRHEAALVLGHTDASQVDPHKGFMDLGLDSLMTVELRRRLQQATGIKLPATLAFDHPSPHRVALFLRDSLAHALGARLSVERDAAALPALRSASDEPIAIVGMALRLPGGIGDVDALWEFLAQGRDAVEPIPHARWDAGALYDPDPDAKAKSYVRHAAMLDQVDLFDPAFFGISPREAKYLDPQHRLLLESAWLALEDAGIVPSTLKDSPTGVFVGIGASEYALRNTSSEEVEAYALQGTAGSFAAGRLAYTLGLQGPALSVDTACSSSLVALHLACQALRQGECNLALAAGVSVMASPGLFVVLSRMRALAPDGRSKTFSTNADGYGRGEGVVVLALERLGDALARGHRVLALVRGTAMNHDGASSGITAPNGTSHQKVLRAALHDAHIGPADVDVVECHGTGTSLGDPIEVQALAAVYADGRPAEKPLLLGALKTNIGHLEAASGLAGVAKIVASLRHDALPPTLHTTPRNPLIEWDALAIDVVDATRAWARHEDGSPRRAGVSAFGLSGTNAHVILEEAPAIPQAEPTAAQLASQPLPAAWPVLLSARSEPAVRAQAQRLRDHLLAHDDLALADVAYSLATTRATFEHRAALVVHDREELLSALDSLAQGRPAPSTVVERSGSHGKVVFVFPGQGSQWEGMALSLLDTSPVFRAQLEACERALAPHVDWSLLAVLRGEEGAPPLDRVDVVQPALFSMMVSLAALWRSMGVEPDAVVGHSQGEIAAACVAGALSLEDAAKLVALRSRALVELAGQGAMAAVELPEAEVARRLQRYGDRLSIGAINSPRFTTISGEPPAVAALLRDLESEGVFALKLSYDFASHSAQVESIRDELLDLLSWLEPRSTAVPFYSTVSGAAIDGSELDAAYWYRNLRQPVRFADAVQGLLAGEHRFFVEVSPSPVLTLALHELLEASERSAAVVGSLWSDEGDLRRFLVSLSELYVNGFALDWTTILPPGKRVPLPTYPFQRERFWLDASTAPAAGVNHLAPLEGRFWQAIESGNIDALSGQLHVDGDEQRAALALLLPTLASFRHERQEQGTVDAWRYRITWKPLTTATTPADLAGTWLLVVPAALDDDALPSALTEALARRGARVLAVRLSQAHLDREALAEHLRQACAETAPPRGVLSLLALDESPLADHAAVPAGLAFSLTLVQALGDIALDAPLWLFTRGAVSVGHSDPIAHPTQAMTWGLGRVVGLEHPERWGGLVDVGAAIDASAVGRLLPVLALRNDEDQLALRPAGFYARRLVRAPLGDAPPARTFKPRGTLLITGGTGAAGAHVARWLAREGAEHLVLISRRGAQAEGASELHAELTALGARVTFAACDVADRSAVATLLEQLDAEGSQVRAVFHAGGIGRHAPLAATSLMELADVVSAKVLGAGNLHDLLGPRPLDAFVLFSSIAGVWGGGQQAGYAAGNAFLDALADQRRSLGQPDTSVVWGAWGGGGGIFTGPLAAQLEQRRLSPMAPSLAVAALAQALEHDETTVTVADIDWARFAPSISVARSRRSCATCPSSAPSKTEKARPPPSTARPPDLLDKLRSRSESEQLRLLAALVCDETALVLGHEGRFPARPRQGFFDLGLDSIMTVELRRRLQQATGIKLPATLAFDHPSPHRVALFMRDSLAHALGTRLSAEATPPRSGRASSDEPIAIVGMALRLPGGVGDVDALWEFLHQGRDAVEPIPQSRWDAGALYDPDPDADAKSYVRHAAMLDQIDLFDPAFFGISPREAKHLDPQHRLLLESAWLALEDAGIVPTSLKDSLTGVFVGICAGEYAMQEASSEGSEVYFIQGTSASFGAGGLAYTLGLQGPRSSVDTACSSSLVSLHLACQALRQGECNLALAAGVSLMVSPQTFVILSRLRALAPDGRSKTFSDNADGYGRGEGVVVLALERIGDALARRHRVLVLVRGTAINHDGASSGITAPNGTSQQKVLRAALHDARITPADVDVVECHGTGTSLGDPIEVQALAAVYADGRPAEKPLLLGALKTNIGHLEAASGLAGVAKMVASLRHDALPPTLHATPRNPLIEWEALAIDVVDTPRPWPRHEDGSPRRAGISAFGFSGTNAHVILEEAPAALPAEPATSQPASQAAPAAWPVLLSARSEAAVRAQAKRLRDHLVAHDDLTLADVAYSLATTRAHFEHRAALVAHNRDELLSALDSLAQDKPAPSTVLGRSGSHGKLVFVFPGQGSQWEGMALSLLDSSPVFRAQLEACERALAPHVEWSLLAVLRRDEGAPSLDRVDVVQPALFAVMVSLAALWRSLGVEPAAVVGHSQGEIAAAFVAGALSLEDAARIAALRSKALTTVAGNGAMAAVELGASDLQTYLAPWGDRLSIAAVNSPRATLVSGEPAAIDALIDSLTAAQVFARKVRVDYASHSAQMDAVQDELAAGLANIAPRTCELPLYSTVTGTRLDGSELDGAYWYRNLRQTVLFSSATERLLDDGHRFFVEVSPHPVLTLALRETCERSPLDPVVVGSIRRDEGHLARLLLSWAELSTRGLALDWNAFFAPFAPRKVSLPTYPFQRERFWLDASTAHAADVASAGLTSADHPLLGAAVALADRDGFVFTGRLSLAEHPWLEDHVVFGIPCPARRRLLELALHVAHLVGLDTVEDVTLDPPLALPSQGAVLLQISVGPADGAGRRALSVHSRRHDALQDGPWTRHASGSLAQASPSHCLRCSANGPPSGATQVDTQGFYAALESAGLAYGPEFQGLRRRLQARRRALRRSQAPGRRRRGRRSFCPPPRPARQRLAGARLCRRPGKGLQDALLVERSIAALRSEPPPCACVSTVLRANPRARSSSPTPEANPSPRCKRSPCAPRPPSSSADPGASHLDALFRIDWSELQSPTSPPIAPSGALLGTEGLDLGTRVPLDRYTDLAALRSALDQGASPPSLVIAPFIALPEGDLIASARETTAHALALLQAWLADERLASSRLALVTRRAVATHAEEDVKGLAHAPLWGLARSAQSEHPERPLVLVDLDDSEASQHALLGALDAREPEIALRNGKPLVPRLSRLPQAPTDTASPAGLGGTVLITGGTGTLGALVARRLVVNHDAKHLLLTSRQGASAPGADVLRSELEALGASVTLAACDVADPRALKDLLDNIPSAHPVAAVVHAASVLDGDLLGAMSLERIDRVFAPKIDAAWHLHQLTQDKPLAAFILFSSVAGVLGSSGHSNYAAASAFLDALAHHRRAQGLPASSLAWSHWAERSAMTEHVSAAGAPRMERAGLPSTSEERLALFDAALFRTETALVPARFDLSALRANAGSVPPLFQRLVRARTVRKAASNTAQASSLTERLSALPPAERERALLDLIRTEAAAVLGLASFESLDPDRLLQELGLDSIIALDLRNRLAAATGVRLPATLLFEHPTPAALAALLLARLEPGMRRGPAKDGASPTDTESDGALLGMVQPANEIGAIEEARNLIAAALKVRLAVEDASKRSAVAIAEEPPTRLARGQATPQLICFPAFVVPSAPIQYARFASHLRDRRDIWFIPHPGYRHKTPLTRSLDELVSSHARTTLACARNSPFVLFGHSSGGNIAHMVAEHLESIGHGPAGVVLLDSYDYASPAVEAGLKIFHVEQLQTWGASDAGLTAEAWYYEHIGLETWKPRQLAAPTLHVRATEPMKQFVGSEGAPAEWRASWKLPHVAIDAPGDHATVVDHPFLAQAVDDWLSSLSNEPSNQ

SEQ ID NO: 20627 - protein, 2439 aa, Polyangium cellulosum
MATTNAGKLEHALLLMDKLAKKNASLEQERTEPIAIVGIGCRFPGGADTPEAFWELLDSGRDAVQPLDRRWALVGVHPSEEVPRWAGLLTEAVDGFDAAFFGTSPREARSLDPQQRLLLEVTWEGLEDAGIAPQSLDGSRTGVFLGACSSDYSHTVAQQRREEQDAYDITGNTLSVAAGRLSYTLGLQGPCLTVDTACSSSLVAIHLACRSLRARESDLALAGGVNMLLSSKTMIMLGRIQALSPDGHCRTFDASANGFVRGEGCGMVVLKRLSDAQRHGDRIWALIRGSAMNQDGRSTGLMAPNVLAQEALLREALQSARVDAGAIGYVETHGTGTSLGDPIEVEALRAVLGPARADGSRCVLGAVKTNLGHLEGAAGVAGLIKAALALHHELIPRNLHFHTLNPRIRIEGTALALATEPVPWPRAGRPRFAGVSAFGLSGTNVHVVLEEAPATVLAPATPGRSAELLVLSAKSAAALDAQAARLSAHIAAYPEQGLGDVAFSLVSTRSPMEHRLAVAATSREALRSALEVAAQGQTPAGAARGRAASSPGKLAFLFAGQGAQVPGMGRGLWEAWPAFRETFDRCVTLFDRELHQPLCEVMWAEPGSSRSSLLDQTAFTQPALFALEYALAALFRSWGVEPELVAGHSLGELVAACVAGVFSLEDAVRLVVARGRLMQALPAGGAMVSIAAPEADVAAAVAPHAALVSIAAVNGPEQVVIAGAEKFVQQIAAAFAARGARTKPLHVSHAFHSPLMDPMLEAFRRVTESVTYRRPSIALVSNLSGKPCTDEVSAPGYWVRHAREAVRFADGVKALHAAGAGLFVEVGPKPTLLGLVPACLPDARPVLLPASRAGRDEAASALEALGGFWVVGGSVTWSGVFPSGGRRVPLPTYPWQRERYWIEAPVDREADGTGRARAGGHPLLGEVFSVSTHAGLRLWETTLDRKRLPWLGEHRAQGEVVFPGAGYLEMALSSGAEILGDGPIQVTDVVLIETLTFAGDTAVPVQVVTTEERPGRLRFQVASREPGERRAPFRIHARGVLRRIGRVETPARSNLAALRARLHAAVPAAAIYGALAEMGLQYGPALRGLAELWRGEGEALGRVRLPEAAGSATAYQLHPVLLDACVQMIVGAFADRDEATPWAPVEVGSVRLFQRSPGELWCHARVVSDGQQASSRWSADFELMDGTGAVVAEISRLVVERLASGVRRRDADDWFLELDWEPAALGGPKITAGRWLLLGEGGGLGRSLCSALKAAGHVVVHAAGDDTSTAGMRALLANAFDGQAPTAVVHLSSLDGGGQLGPGLGAQGALDAPRSPDVDADALESALMRGCDSVLSLVQALVGMDLRNAPRLWLLTRGAQAAAAGDVSVVQAPLLGLGRTIALEHAELRCISVDLDPAEPEGEADALLAELLADDAEEEVALRGGDRLVARLVHRLPDAQRREKVEPAGDRPFRLEIDEPGALDQLVLRATGRRAPGPGEVEISVEAAGLDSIDIQLALGVAPNDLPGEEIEPLVLGSECAGRIVAVGEGVNGLVVGQPVIALAAGVFATHVTTSATLVLPRPLGLSATEAAAMPLAYLTAWYALDKVAHLQAGERVLIHAEAGGVGLCAVRWAQRVGAEVYATADTPENRAYLESLGVRYVSDSRSGRFVTDVHAWTDGEGVDVVLDSLSGERIDKSLMVLRACGRLVKLGRRDDCADTQPGLPPLLRNFSFSQVDLRGMMLDQPARIRALLDELFGLVAAGAISPLGSGLRVGGSLTPPPVETFPISRAAEAFRRMAQGQHLGKLVLTLDDPEVRIRAPAESSVAVRADGTYLVTGGLGGLGLRVAGWLAERGAGQLVLVGRSGAASAEQRAAVAALEAHGARVTVAKADVADRSQIERVLREVTASGMPLRGVVHAAGLVDDGLLMQQTPARFRTVMGPKVQGALHLHTLTREAPLSFFVLYASAAGLFGSPGQGNYAAANAFLDALSHHRRAQGLPALSIDWGMFTEVGMAVAQENRGARQISRGMRGITPDEGLSALARLLEGDRVQTGVIPITPRQWVEFYPATAASRRLSRLVTTQRAVADRTAGDRDLLEQLASAEPSARAGLLQDVVRVQVSHVLRLPEDKIEVDAPLSSMGMDSLMSLELRNRIEAALGVAAPAALGWTYPTVAAITRWLLDDALVVRLGGGSDTDESTASAGSFVHVLRFRPVVKPRARLFCFHGSGGSPEGFRSWSEKSEWSDLEIVAMWHDRSLASEDAPGKKYVQEAASLIQHYADAPFALVGFSLGVRFVMGTAVELASRSGAPAPLAVFTLGGSLISSSEITPEMETDIIAKLFFRNAAGFVRSTQQVQADARADKVITDTMVAPAPGDSKEPPVKIAVPIVAIAGSDDVIVPPSDVQDLQSRTTERFYMHLLPGDHEFLVDRGREIMHIVDSHLNPLLAARTTSSGPAFEAK

SEQ ID NO: 20628 - protein, 6315 aa, Polyangium cellulosum
MTKEYTRPQSAPLTEGDLLTLIVAHLAERLRMDARFIDVHEPFSRHGLDSRGAVDLVVDLRTALGRPLSPVVVWQHPTPDALARHLAGGADAREGQARADSAYERPGAPNEPIAIVGMACRFPGAPDVDSYWRLLSGGVDAVTEVPAGRWDMDAFYDRDPRSLGDVSTLRGGFIDDVDRFDAMFFGISPREAVSMDPQQRLMLELAWEALEDAGIVAERLKESLTGVFFGCIWDDYVTLIHQRGRGAIAQHTVTGNHRSIIANRVSYTLDLRGPSMTVDSACSSALVTIHMACESLRSGESTLALAGGVNLNIAPESTIGVHKFGGLSPDGRCFTFDARANGYVRGEGGGVVVLKRLSSAIADGDPIICVIRGSAVNNDGASNGLTGPNPLAQEAVLRTAYERAGVNPADVQYVELHGTGTQLGDPVEASALGAVLGKRRPAERPLLVGSAKTNVGHLEGAAGIVGLLKAALCLKHKQLAPNLNFETPNPHIPFAELNLKVQGALGPWPDMDRPLVCGVSSFGLGGTNAHVVLSEWASLEAELHPLAAESPEALREEVQRRLLTMTSLVGRAPLSFLCGRSAAQRSAKEHRLAVTARSFEELKQRLLGFLEHEKHVSVSAGRVDLGAAPKVVFVFAGQGAQWFGMGRALLQREPVFRTTIEQCSSFIQQNLGWSLLDELMTDRESSRLDEIDVSLPAIISIEIALAAQWRAWGVEPAFVVGHSTGEIAAAHVAGVLSIEDAMRTICAYGRIIRKLRGKGGMGLVALSWEDAGKELTGYEGRLFRAIEHSADSTVLAGEPDALDALLQALERKNVFCRRVAMDVAPHCPQVDCLRDELFDALREVRPNKAQIPIVSEVTGTALDGERFDASHWVRNFGDPALFSTAIDHLLQEGFDIFLELTPHPLALPAIESNLRRSGRRGVVLPSLRRNEDERGVMLDTLGVLYVRGAPVRWDNVYPAAFESMPLPSTAGGGKPLPPMPLLISARTDAALAAQAARLRAHLDSHLDLELVDVAYSLAATRTHFERRAVVVARDRAGILDGLDALAHGGSAALLGRSAAHGKLAILFTGQGSQRPTMGRALYDAFPVFRGALDAAAAHLDRDLDRPLRDVLFAPDGSEQAARLDQTAFTQPALFALEVALFELLQSFGLKPALLLGHSIGELVAAHVAGVLSLQDACTLVAARAKLMQALPQGGAMVTLQASEQEARDLLQAAEGRVSLAAVNGHLSTVVAGDEDAVLKIARQVEALGRKATRLRVSHAFHSPHMDGMLDDFRRVAQGLTFHPARIPIISNVTGARATDQELASPETWVRHVRDTVRFLDGVRTLHAEGARAFLELGPHPVLSALAQDALGHDEGPSPCAFLPTLRKGRDDAEAFTAALGALHAAGLTPDWNAFFAPFAPCKVPLPTYTFQRERFWLDASTAHAASATPAAALEGRFWQAVESGDIDTLSSELHVDGDEQRAALALVLPTLSSFRHKRQEQSTVDAWRYRVTWKPLTTAATPADLAGTWLLVVPSALGDDALLATLTEALTRRGARVLALRVSDIHIGRSALVEHLREALAETAPLRGVLSLLALDEHRLADRSALPAGLALSLALVQGLDDLAIEAPLWLFTRGAVSIGHSDPITHPTQAMIWGLGRVVGLEHPERWGGLVDVSAGVDESAVGRLLPALAQRHDEDQLALRPAGLYARRIVRAPLGDAPPAREFRPRGTILITGGTGALGAHVARWLARQGAEHLILISRRGAEAPGASELHAELNALGVRTTLAACDVADRSALQALLDSIPSDCPLTAVFHTAGARDDGLIGDMTPERIERVLAPKLDSALHLHELTKNSALDAFVLYASLSGVLGNPGQANYAAANAFLDALAEHRRSLGLTATSVAWGGWGGGGMATERVAAQLQQRGLLQMAPSLALAALAQALQQDETTITVADIDWSRFAPAFSVARQRPLLRDLPEAQRALQASEGASSEHGPATGLLDELRSRSESEQLDLLATLVRGETATVLGHAEASHVDPDKGFMDLGLDSLMTVELRRRLQKATGVKLPPTLAFDHPSPHRVAFFLRDSLARAFGTRLSAERDGAALPAPGATSDSDEPIAIVGMALRLPGGIGDVDALWDFLHQGRDAVEPIPPTRWDAGALYDPDPDAKAKSYVRHAAMLDQVDLFDPGFFGISPREAKHIDPQHRLLLEAAWQALEEAGIVPSTLKDSPTGVFVGIGASEYAPREPGAEDSEAYIVQGTYASFAAGRLAFTLGLQGPALSVDTACSSSLVALHLACQALRRDECNLALAAGASVMVSPETFVLLSRLRALAPDGRSKTFSASADGYGRGEGVIVLALERLRDALAQGRRVLAVVRGTAVNHDGASSGITAPNGTSQKKVLRAALHDARIAPADVDVVECHGTGTSLGDPIEVQALAAVYGEGRSAEKPLFLGAVKTNVGHLEAAAGLAGVAKIVASLLHNALPPTLHTTPRNPLIAWDALAVAVVDATRPWVRHADGRPRRAGVSAFGLSGTNAHVILEEAPAIARVEPAASQPASEPLPAAWPVLLSAKSEAAVRAQAKRLRDHLLAKSELALADVAYSLATTRAHFEQRAALLVKGRDELLSALDSLAQGHSAAVLGRSGAPGKLAVLFTGQGSQRPTMGRALYDAFPVFRDALDTVAAHLDRDLDRPLRDVLFAPDGSEQAARLDQTAFTQPALFALEVALFQLLQSFGLKPALLLGHSIGELVAAHVAGVLSLQDACTLVAARAKLMQALPQGGAMVTLRASEEEVRDLLQPYDGRASLAALNGPLSTVVAGDEDAVVEIARQAEALGRKTTRLRVSHAFHSPHMDGMLDDFRRVAQSLTYHPARIPIISNVTGARATDHELASPDYWVRHVRHTVRFLDGVRALHAEGARVFLELGPHAVLSALAQDALGQDEGTSPCAFLPTLRKGRDDAEAFTAALGALHAAGLTPDWSAFFAPFAPRKVSLPTYAFQRERFWLDASKAHAADVASAGLTSTDHPLLGAGVPLADRDGFLFTGRLSLSEHPWLADHVVFGTPILPGTAFLELALFVAGRVGLDTVEELTLETPLALPSEGALLVQVSVGPLDDAGRRPLSLHSRPQGAPQDAPWTRHASGSLAPATPSPSFDLHDWPPSGATQVDTQGLYATLESAGLAYGPQFQGLRSVWRRGDELFAEAQLPDAAKKDAARFALHPALLDSALHALALDDERAPGVALPFSWGGVSLRAVGATTLRVRFHRPKGETAGSLVLADAAGGPIASVQALATRITSAEQLRTPGASHHDALFRVDWSELPSPTSPSGAPSAVLLGIGGLDLAPEVPLARVADLAALQSALDQGASPPGLVVVPFMARTADDLIQSAHSITARALALLQAWLADERLASSRLVLLTRRAIAARADEDVKDLAHAPLWGLARSAQSEHPELPLFLVDLDLSEASQHTLLAALETGERHSRLRNGKPFIPRLANARSKDELIAPDASNWRLHIPTKGNFDALTLVDAPLARAPLAHGQVRVAVHAAAFNFRDVLDTLGLYPGDAGPLGGEGAGIVTEVGPGVSRYTVGDRVMGIFGAACGPTAIADARMICPIPHAWSFAQAASVPIIYLTAYYGLVDLGHLKPNQRVLIHAAAGGVGTAAVQLARHLGAEVFATASAGKWSALRALGFDDAHLASSRDLDFEQHFLRSTHGRGVDVVLDCLAREFVDASLRLMPSGGRFVEMGKTDIREPDAVGVAYPGVVYRAFDLIEAGPDRIEQMLAELLSLFERGALRPPPITSWDIRHAPQAFRALAQARHVGKFVLTIPRPIDPEGTVLITGGTGTLGALVARHLVARHGAKHLLLTSRQGAHAPGAEASRTELEALGASVTLRACDAADPRALQALLDSIPSAHPLTAVVHAAGALDDGLLGAMSPERIDRVFAPKLDAAWHLHELTQDKPLAAFVLFSSAAGVLGSPGQSNYAAANAFLDALAHHRRAHGLPASSLAWGYWAERSRMTEHLSAADVSRMRRAGVRPLATDEALSLFDAALLRPEPALVPARFDVNALGANADEVPPLFQRLVRARVARKAASNTALASSLSQRLSSLPPAESERFLLDLVRTEAATVLGLASFESLDPHRPLQELGLDSLIALELRGRLAAATGLRLQPTLLFDYPTPAALSRFFTTQFFGETTDRPAAPLTPAGSEDPIAIVSMSCRFPGDVRTPEDLWKLLLDGKDAISSFPQNRGWSLDALDAPGRFPVREGGFVYDADAFDPAFFGISPREALAIDPQQRLLLEISWEALERAGIDPASLQGSQSGVFVGIIHNDYGAWLMNGTDEHKGFAATGSTASVASGRIAYTFGFQGPAISVDTACSSSLVAVHLACQALRHGECSLALAGGVTVLATPAVFVAFDSESAGAPDGRCKAFSAEANGAGWAEGAGMLLLERLSDAVRNGHPVLAVLRGSAVNQDGRSQGLTAPNGPAQERVIRQALDSARLTPKDIDAVEAHGTGTTLGDPIEAQAILATYGESHSQDSPLWLGSLKSNMGHTQAAAGVGSVIKMVLALQHGLLPKTLHAKNPSPHIDWSPGTVKLLDEPVVWKTNGHPRRAGVSSFGFSGTNAHVILEEAPAIARAESAAAQPASEPLPAAWPVLLSAKSEAALRAQAARLRDHLQAHPDLELADVAYSLATTRAHFERRAVVVAKDRDEATFALDAFEQGSPAHHVAHGEARVAGKLVFVFPGQGSQWPGMAQQLLTTSDAFRAQVEACARAFAPHLGWSLLAVLRGDEGAPSLERIEVVQPALFTVMVSLAALWRSRGIEPDAVVGHSQGELAAAYVAGALSLDDAAKVVARRSRLLSTLSGQGAMAAVERPPAALEPYLARFGRRLSIAAINSPSATTVSGEPDAIDHLLRLLKAEQIFALKLRVDVASHGAQIEGMREQLLEELREIEPRESRIPFYSTVRGEKLAGTELGAAYWYDNLLRPVRFADATQLLLDDAHRFFVEVSPHPVLMLPLEETLEASGLPTAVLGSLWQDEGDLSRFLASLGELYARGYAVDWRAFFEPLRPRRVALPTYAFQRERFWLDAPTAHADVASAGLTSADHPLLGAAVRLADTDAFLFTGRLSLQSHPWLAEHAAFGIPILPGTAFLELALLAADRVGLDTVEEVTLEAPLALPSQGTILIQISVGPMDEAGRRSLSLHGRTEDAPQDAPWTRHASGSLAKAAPSLSFDLHEWAPPGGTPVDTQGSYAGLESGGLAYGPQFQGLRSVWKRGDELFAEAKLPDAGAKDAARFALHPALFDSALHALVLEDERTPGVALPFSWRGVSLRSVGATTLRVRFHRPNGKSSVSLLLGDAAGEPLASVQALATRITSQEQLRTQGASLHDALFRVVWRDLPSPTSLSEAPKGVLLETGGLDLALQASLARYDGLAALRSALDQGASPPGLVVVPFIDSPSGDLIESAHNSTARALALLQAWLDDERLASSRLVLLTRQAIATHPDEDVLDLPHAPLWGLVRTAQSEHPELPLFLVDLDLGQASERALLGALDTGERQLALRHGKCLVPRLVNARSTEALIAPNVSTWSLHIPTKGTFDSLALVDAPLARAPLAQGQVRVAVHAAGLNFRDVLNTLGMLPDNAGPLGGEGAGIVTEVGPGVSRYTVGDRVMGIFRGGFGPTVVADARMICPIPDAWSFVQAASVPVVFLTAYYGLVDVGHLKPNQRVLIHAAAGGVGTAAVQLARHLGAEVFATASPGKWDALRALGFDDAHLASSRDLEFEQHFLRSTRGRGMDVVLNALAREFVDASLRLLPSGGSFVEMGKTDIREPDAVGLAYPGVVYRAFDLLEAGPDRIQEMLAELLDLFERGVLRPPPITSWDIRHAPQAFRALAQARHIGKFVLTVPRPIDPEGTILVTGGTGTLGALIARHLVANRGAKHLLLTSRKGASAPGAEALRSELEALGAAVTLARCDAADPRALQALLDSIPSAHPLTAVVHAAGALDDGLISAMSPERIDRVFAPKLDAAWHLHQLTQDKPLAAFVLFSSASGVLGGMGQSNYAAANAFLDALAHHRRVHGLPASSLAWGHWAERSGMTRHLSGVDTARMRRAGLRSIASDEGLALFDMALGRPEPALVPARFDMNALGAKADGLPSMFQGLVRARVARKVASNNALAASLTQRLASLPPTDRERMLLDLVRAEAAIVLGLASFESLDPRRPLQELGLDSLMAIELRNRLAAATGLRLQATLLFDHPTPAALATLLLGKLLQHEAADPRPLAAELDRLEATLSAIAVDAQARPKIILRLQSWLSKWSDAQAADAGPILGKDFKSATKEELFAAFDEAFGGLGK

SEQ ID NO: 20629 - protein, 359 aa, Aeropyrum pernix
MRIEQDFSQSLGVERLKAARLHEYNKPLRIEDVDYPRLEGRFDVIVRIAGAGVCHTDLHLVQGMWHELLQPKLPYTLGHENVGYIEEVAEGVEGLEKGDPVILHPAVTDGTCLACRAGEDMHCENLEFPGLNIDGGFAEFMRTSHRSVIKLPKDISREKLVEMAPLADAGITAYRAVKKAARTLYPGAYVAIVGVGGLGHIAVQLLKVMTPATVIALDVKEEKLKLAERLGADHVVDARRDPVKQVMELTRGRGVNVAMDFVGSQATVDYTPYLLGRMGRLIIVGYGGELRFPTIRVISSEVSFEGSLVGNYVELHELVTLALQGKVRVEVDIHKLDEINDVLERLEKGEVLGRAVLIP

SEQ ID NO: 20630 - protein, 266 aa, Leishmania major
MMRAVTLKGLGGIDTMSISEVPKAVVKKGTDVLIKVIAAGVNRAGVSQRLDNYAPPDGANELLGLEVAGIVEQVGSDAVGRVKEGDRVMALLRGGGYADYAVAHMGCVMAMPQGYTFTEAAAIPEAFIRAWQILHRHGKVKRGQNVLIHAGASDIGSALAQITEKYFKATAITTSSEEKLDMCRAHASVTLSRTPDELGLAFAPKLKRLFGEESVNVIVDPVFGGTYLSENAQVLAPNGHLIVIAFMGGALVHMNALPLFREEAKI

SEQ ID NO: 20631 - protein, 337 aa, Fragaria vesca
  unsure (1)..(337): unsure at all Xaa locations
NLCPLNFTFAIHRLTMAAAPSESIPSVNKAWVXSEYGKTSDVLKFDPSVAVPEIKEDQVLIKVVAASLNPVDFKRALGYFKDTDSPLPTIPGYYVAGVVVKVGSQVTKFKVGDEVYGDLNETALVNPTRFGSLAEYTAADERVLAHKPKNLSFIEAASLPLAIETAHEGLERAELSAGKSVLVLGGAGGVGTHIIQLAKHVFGASKVAATASTKKLDLLRTLGADLAIDYTKENFEDLPEKFDVVYDAVGETDKAVKAVKEGGKVVTIVGPATPPAILFVLTSKGSVLEKLKPYLESGKVKPVLDPTSPYPFTKVVEAFGYLESSRATGKVVVYPIP

SEQ ID NO: 20632 - protein, 2152 aa, Saccharopolyspora spinosa
MTVTTSYEEVVEALRASLKENERLRRGRDRFSAEKDDPIAIVAMSCRYPGQVSSPEDLWQLAAGGVDAISEVPGDRGWDLDGVFVPDSDRPGTSYACAGGFLQGVSEFDAGFFGISPREALAMDPQQRLLLEVAWEVFERAGLEQRSTRGSRVGVFVGTNGQDYASWLRTPPPAVAGHVLTGGAAAVLSGRVAYSFGFEGPAVTVDTACSSSLVALHLAGQALRAGECDLALAGGVTVMSTPKVFLEFSRQRGLAPDGRCKSFAAGADGTGWGEGAGLLLLERLSDARRNGHEVLAVVRGSAVNQDGASNGLTAPNGSSQQRVITQALASAGLSVSDVDAVEAHGTGTRLGDPIEAQALIATYGRDRDPGRPLWLGSVKSNIGHTQAAAGVAGVIKMVMAMRHGQLPRTLHVESPSPEVDWSAGTVQLLTENTPWPRSGRVRRVGVSSFGISGTNAHVILEQPPGVPSQSAGPGSGSVVDVPVVPWMVSGKTPEALSAQATALMTYLDERPDVSSLDVGYSLALTRSALDERAVVLGSDRETLLCGVKALSAGHEASGLVTGSVGAGGRIGFVFSGQGGQWLGMGRGLYRAFPVFAAAFDEACAELDAHLGQEIGVREVVSGSDAQLLDRTLWAQSGLFALQVGLLKLLDSWGVRPSVVLGHSVGELAAAFAAGVVSLSGAARLVAGRARLMQALPSGGGMLAVPAGEELLWSLLADQGDRVGIAAVNAAGSVVLSGDRDVLDDLAGRLDGQGIRSRWLRVSHAFHSYRMDPMLAEFAELARTVDYRRCEVPIVSTLTGDLDDAGRMSGPDYWVRQVREPVRFADGVQALVEHDVATVVELGPDGALSALIQECVAASDHAGRLSAVPAMRRNQDEAQKVMTALAHVHVRGGAVDWRSFFAGTGAKQIELPTYAFQRQRYWLVPSDSGDVTGAGLAGAEHPLLGAVVPVAGGDEVLLTGRISVRTHPWLAEHRVLGEVIVAGTALLEIALHAGERLGCERVEELTLEAPLVLPERGAIQVQLRVGAPENSGRRPMALYSRPEGAAEHDWTRHATGRLAPGRGEAAGDLADWPAPGALPVDLDEFYRDLAELGLEYGPIFQGLKAAWRQGDEVYAEAALPGTEDSGFGVHPALLDAALHATAVRDMDDARLPFQWEGVSLHAKAAPALRVRVVPAGDDAKSLLVCDGTGRPVISVDRLVLRSAAARRTGARRQAHQARLYRLSWPTVQLPTSAQPPSCVLLGTSEVSADIQVYPDLRSLTAALDAGAEPPGVVIAPTPPGGGRTADVRETTRHALDLVQGWLSDQRLNESRLLLVTQGAVAVEPGEPVTDLAQAALWGLLRSTQTEHPDRFVLVDVPEPAQLLPALPGVLACGEPQLALRRGGAHAPRLAGLGSDDVLPVPDGTGWRLEATRPGSLDGLALVDEPTATAPLGDGEVRIAMRAAGVNFRDALIALGMYPGVASLGSEGAGVVVETGPGVTGLAPGDRVMGMIPKAFGPLAVADHRMVTRIPAGWSFARAASVPIVFLTAYYALVDLAGLRPGESLLVHSAAGGVGMAAIQLARHLGAEVYATASEDKWQAVELSREHLASSRTCDFEQQFLGATGGRGVDVVLNSLAGEFADASLRMLPRGGRFLELGKTDVRDPVEVADAHPGVSYQAFDTVEAGPQRIGEMLHELVELFEGRVLEPLPVTAWDVRQAPEALRHLSQARHVGKLVLTMPPVWDAAGTVLVTGGTGALGAEVARHLVIERGVRNLVLVSRRGPAASGAAELVAQLTAYGAEVSLQACDVADRETLAKVLASIPDEHPLTAVVHAAGVLDDGVSESLTVERLDQVLRPKVDGARNLLELIDPDVALVLFSSVSGVLGSGGQGNYAAANSFLDALAQQRQSRGLPTRSLAWGPWAEHGMASTLREAEQDRLARSGLLPISTEEGLSQFDAACGGAHTVVAPVRFSRLSDGNAIKFSVLQGLVGPHRVNKAATADDAESLRKRLGRLPDAEQHRILLDLVRMHVAAVLGFAGSQEITADGTFKVLGFDSLTVVELRNRINGATGLRLPATLVFNYPTPDALAAHLVTALSADRLAGTFEELDRWAANLPTLARDEATRAQITTRLQAILQSLADVSGGTGGGSVPDRLRSATDDELFQLLDNDLELP

SEQ ID NO: 20633 - protein, 2586 aa, Caenorhabditis elegans
MDPTQWWQKQDDIVISGVSGRFPRCDNVKMFGDMLLAGEDLVTEDSLRWTPGFCDLPKRHGKLKVLNKFDAGFFQVTPKQANFMDPQVRLLLEASWEAMVDAGINPTDLRGSKTGVFVGCSASETSGMLTQDPDTVTGYTLTGCVRSMFSNRISYTFDLQGPSFSVDTACSSSLLALQLAVDSIRQGQCDAAIVAGAHLTLTPTAALQFLRLGMLTDKGSCRSFDESGDGYCRTEGVAAIFIQRKKKAQRLYATVVHAKSNTDGHKEHGITFPSGERQAQLLQEVYSEAGIDPNSVYYVEAHGTGTKVGDPQEANAICEVFCSKRTDSLLIGSVKSNMGHAEPASGVCSLTKILLSIERQLIPPNLHYNTPNQYIPGLTDGRLKVVTEPTALPGGLIGINSFGFGGSNTHVILKAADHIAPPITPHPFTKLVTYCGRTQEAVENIFTEIESNKDDLYLQALLANQANMPANLLPFRGYMLLDRENNVETLKSITKVPITEARPIYFIYSGMGSQWPGMAIKLMKIPMFDDSLRASSKTLEEFGLDVYGMLCNPDPEQYSNNTMNCMLAITAIQIALTDVLTALGVSPDGIIGHSTGEMGCGYADGGITREQTMRLAYHRGTTIMKHTEIKGAMAAVGLTWEQVKEQAPPGVVAACHNGADSVTISGDAEGVATFCAQLKEKDIFAKVVDTSGIPFHSPAMLAVQDEMIECMRTAVPEPKPRSSKWISTSIPEDDWESDLAATCSAEYHVHNACSPVLFYEAIQKIPANAVTIEMAPHSLMQAILRRSLQKTVTNVGLMNRPKSENDDELESFLGSLGKIYQAGVNIQITELYPGGQYKGVVPKGTPMIGPMWKWDHTQDWLTIDGRQVLAGGSGSVASSATYNIDPFATDSKETYLLDHVIDGRVLYPFTGHMVLAWRTLCKLKGLDYTKTPVVFENINVFSATILTKPIKLDVVLSPGNGYFEIISDDQVAASGRIYIPEDNQPFYYGKLEDIRTSEIADRIELDTEDAYKEFLLRGYEYGQAFRGIYKTCNSGERGFLYWTGNWVTFLDSLLQTALLAERSDTLRLPTRVRHLRIDPNKHLEHVVEKDGIQVIELRNDHSTNGCIAGGVECCDLNAHSVARRIQVSGQLYHEKIFFVPHFDHNCLSGHKKTSTILKDYSAVIKQQLYTGFSKWQSAGLLKKLKNGAQIVKALAVLKASQSDVVLDDTVTRFTHDGKCTVLHHIADMFKIEDCEDFEDRVAAKLKSVRGIFELDRLWAGAVLNDRIVKSLQDICIENSAGHHATMAAVDLVSTDQIRHCIEANSSHPLLETDYTCIGANVDHLDESTLEIIGGKKQKIDLENNFTGHGEVKNLDYVLLDKVISKKADPIAFIEACKHLIRETGFLLVVEVTSQYEIALAIEGLLGNEMVGDASRKYNQFFTHEQLLDMFKSTGFLICNFQSDPALMTTTYAVRRVSPIPRDPVFIDVDDVKEFNWIEPLQKVSEERLNEPDSKTIWLVSNKCRNNGIVGLGLCFVEENLKINRFRSAFDMSANKEIRDGPPVWNIGDEETKKIVELDLHANDYMDGQWGSMRHIVVKDEDVHVYKDCEHAFINTLTRGDVSSLTWFESPNQYFDSMVKSKATQELCSVYYAPINFRDIMLAYGRLPPDAIPGNFADRECLLGMEFSGRLKDGTRLMGILPAQALATTVMVDRDYAWEVPRDWTLAEASTVPVVYTTAYYALVRRGLMKKGDKILIHGGAGGVGQAAIAIALAAGCEVFTTVGSAEKREFLKNLFPQLQEHHFANSRSADFELHIRQHTKGRGVNIVLNSLANEMLQASLRCLARHGRFLEIGKVDLSQNSSLGMAKLLDNVSVHGILLDSIMDPTVGDLDEWKEIARLLEQGIKSGVVKPLHSHSFPADKAEEAFRFMSAGKHIGKVIMEIRPDEGTKVCPPSKISVRAICRTLCHPQHTYLITGGLGGFGLELAQWLINRGARKLVLTSRTGIRTGYQARCVHFWRRTGVSVLVSTLNIAKKSDAVELINQCTAMGPIGGIFHLAMVLRDCLFENQNVQNFKDAAEAKYYGTINLDYASREHCDKNILKWFVVFSSITSGRGNAGQTNYGWSNSCMERMIDQRRADGFPGIAIQWGAIGDVGVILENMGDNNTVVGGTLPQRMPSCLSSLDNFLSWNHPIVSSFIKAELGSKKNVGGGDLMATIAHILGVNDISQLNADANLSDLGLDSLMGVEIKQALERDHDIVLSMKEIRTLTLNKLQQLADQGGTGRTALQVNELEMKKDGERDAELNTAEMLEQQMNQLFKMRVDVNDLDPQDIIVKANKVEEGPITFFVHSIEGIATPLKKVMNKCEFPAYCFQSTKNVPQTSIEDVAKCYIREMKKIQPSGPYRLVGYSYGACIGFEMANMLQESDGRDAVERLILLDGSHLYMQTYRNVYRMAFGVTGDSLVNNPLFESEIMCAMTLRFANVDYKKFRFELLQQPGFKARVQKVVDQVMLTGLFKSPETVAFACEAMHSKFLMADKYKPRRNFGGHITLIRAEQGAAREEDVGEDYGVAAVSEDCEVLKVKGDHDTFVQGKSSSVTVEHINRIILQ

SEQ ID NO: 20634 - protein, 328 aa, Caenorhabditis elegans
MSKSICKSSMRAAVVRRFGAPDVIEAVESDMPRLEKNQVLVRNYAAGVNPVDTYIRAGQYGKLPNLPYVPGKDGAGFVELVGESVKNVKVGDRVWYGSEADSTAEYVAVNRPFELPEGVSFEEGASLGVPYLTAYRALFHLAGAKTGDVILVHGASGGVGSALMQLAAWRNIEAVGTAGSADGIRFVKSLGARNVYNHSDKQYVSKMKNDYPGGFNHIFEMAAHTNLNTDLGLLAPRGRVAVIGNRAETTINARQLMVTEGAVYGVALGMSSEAELLDFGINIVSFLKETEFRPLINKLYRLEQLGLAHEEIMNNKGAKGNLVVQIEH

SEQ ID NO: 20635 - protein, 335 aa, Nostoc punctiforme
MKAVLMTAAGSPEVLQVQEVPNPAVPVGNTELLVRLVAAGINPIDTKLRSRGTFYPDRTPTILGCDGAGVVEAAGAGVQRFRPGDEVYFCYGGLGAHQGNYAEYSVVDERFVARKPASISFTEAAAAPLVLITAWEALYERGRLLPGERVFIHAGAGGVGHVAIQLAKLKGATVATTVSSEEKANFVKELGADHVIFYKQTDFVQAVLDWTGGEGVDLAFDTVGGETFHKTFPAVRVYGDIVTILEPDANTVWKTARLRNLRIGLELMLTPALLGLEDILQHHAEILEQCATWIDEGKLKIHVSHEFPLKEAAKAHQLIESGSVTGKIVLLISDK

SEQ ID NO: 20636 - protein, 337 aa, Nostoc punctiforme
MKAYEIKSNAGIDALALVDRAEPKPTAGQVLIQVKATSLNYRDLLVAEGAYGAGQKYPLIPLSDGAGEVVAVGEGVTRVKIGDRVAGIFFQDWIYGSLTKEKMKSDLGGGIDGMLAEYVVLHQDALVILPDYLSYIEGATLPCAAVTAWHGLVTKGNIGAGDNVLLLGTGGVSIFALQFAKIHGARAIITSSSDDKLARAKQLGADETINYKTTPDWEKQVYQLTNRTGVDHVVEVGGAGTLPKSLQAVRIGGRISLIGVLSGRGSEIDPMPILFKSLTVQGIYVGSREMFEAMNQAMQQHQIKPIIDRVFPFAEAREAYHYLKSAAHFGKIVIRNS

SEQ ID NO: 20637 - protein, 2210 aa, Nostoc punctiforme
MNNISKKVDKDKLEQLNSSQRILLALDEAVKKLKDVERAKTEAIAIVGLSCRFPGGVTNPEEFWQLLIDGVDAITEIPSQRWHLEDYYHPNPDTPGKMYSRYGGFLQQVDQFDAQFFGISPREAIKLDPQQRLLLEVTWEALENAGIIPQEQVNGQTGVFIGITTNDYARLITPGGDLSQIDPYYLTGNPLNAVAGRLSYTLGLHGPCMAVDTACSSSLVAVHLACQSLRNQECDRALAGGVNLILSPENNIGLSKAKVLSADGRCKTFDSEADGITRGEGCGVLVLKRLSDAVADGDRILALIRGSAVNQDGASSGFTVPNRNAQENLIRQTLTRANVKPEEVDYVEAHGTGTSLGDPIEVRALAAVLGAGRTAENPLKIGAVKTNIGHLESAAGIAGMIKVILSLQHQQIPPHLHLKQLNTHINWDELPVSVTTQATPWPVGNKQRLAGVSSFGASGTNAHVILAEAPTNNSLSKPQNAKFIERPQHLLNLSAKTEKALRELVQRYINYLQSNPEKSLADICFTANTGRSHWKYRLSILADSTMSALAQLTTWALGQDLPGVVLGEAESTSKKIAFLFTGQGSQYAGMGQKLYQTQAKFRQIIDQCDQILQPYLDKPLLEVLYPQPDTNSPIDNTAYTQVALFALEYALYQLWQSWGIKPDVVMGHSVGEYVAACVAGVFSLQDGLKLIAARGQLMQALPENGAMVAVMTTAEQLQPLLAAYKEKVAIAAVNAPQSLVISGEKSAISAITSQLETAGIKTKPLQVSHAFHSPLMQPMLADFLQVASQIKFSPPQLKLISNVTGELATTEIATAEYWCRHILNPVEFAASMVTLQQQKVAICVEIGPKPILLGMGRQCNPTVEGLWLPSLRSRQDDWQVMLLSLAQLHCHGVAVDWLLFDADYSRVRLHLPTYPFQRQRFWIETVDGQRDQPALISRNGKGRKIIHPLLGQRLPLATSQSIHFESQISAASPTFLQDHCIYDATILPATAYIEMALSAGAIVFKTDRVQLEAVSIQQALVFSGDEPKTLQVVLTPENTRVYSWQVLSYLEDESNVDNWTLHASGKVGLGNAETHSAAVDLAGLLSEDSTEISVKEYYQSLHDRGFDYGEQFQAIARLWQGETQAVGSVRLPLPLTADASKYLLHPVLLDACFQILGTNFPDNGQQDVYLPVGVEQLQVYQRAGNSLWSRVEKIEFQDVKQQHLQADLSLVNDAGELVAKITGLSFRRITQKAFQRILAKVLPAPQTTDNWLYQIAWQRQNLEPASSNKQPSSWLIFADQGGLGQKLAQLLTAAGDRCIMVSAGAVYQQLQADRYQINLAHPEDFGRLIQDNPCQGIVHLWSCDATTEPQLTSCGSVLFLLQAIYNAKLPALPSLYLVTKGTQTVGGQLTPLQVQSATLWGLGRVIALEHPELHCVRLDINPDAPEDHIPSVAQELLVPSREDQIAYRQGLRYVARLVRSDVAREADVNSQAFQLQISEYGVFENLTLAAMQRRQPGPGEVEIAVRAVGLNFRDVLNALGMLREYTEQMGITDAKELPFGGECSGIVVAVGENVSHLQVGDAVIAAQTIGSFASFVIVRSEFVVRKPENLTFEEAATIPTAFLTAYYGLYQQAQLKSGERILIHAAAGGVGQAAVQLAQRVGAEVLATASPRKWEHLRATGVKQVMNSRSLEFADQIREITSGQGIDVVLNSLNGEYIPKSLEVLSDRGRFIEIGKIGIWDAEQVKDSRPDVGYIPFDLLDISLENPSLIGEMLGELMAEFQQGSLKPLPVSVFSIQDVANAFRYMAQSKHIGKVVVSIPQRQMPKETTIQADSSYLITGGLGALGLQVAQWLVEQGAQNLVLMGRRGVSPENQPAIEQLEQAGARVLVVTADVSQQEDVSQMLATLNASMPPLRGIIHAAGLLADGMLLRQTWENFELVMAPKVAGAWNLHTLTKELDLDFFVCFSSVSALLGSPGQGNYAAANAFMDALAHHRQALGLPGSSINWGPWADAGMAAALSSREQARWAAQGVQPIPLEPGLQILAKVVQQNLAQVGVLPVDWSKFTAQFPSDVELPFLAEFTNAISKVTPQVAELRQQLEAAAPKQRPILLMNYVRSQIAKVLNLTSTEEIDPKEGFLQLGMDSLMAVELRNRLQSSLGCSVPASLIFDYPTVDALVSYLIQELWTDRPPEPSTENSPPPAQGIAESELEELSDSEAEALLLSKLDNLKY

SEQ ID NO: 20638 - protein, 347 aa, Halobacterium sp. NRC-1
MQAVTFDGHGGTGVIDYRTVPEPDLGADDVLVDVRAGALNHLDVWTRRGMPGIDLSMPHVPGSDAAGVVSAVGASVTRFEPGDRVAVLAGVSCGQCEFCRHGEPALCASFRVLGEHVPGVHSERAAVPADNLIAVPEHVDWETAAAAPLVFQTAWRMLNTRADVSPGESVLVLGASGGVGHAAVQIAAHAGAEVFATASTEQKLQYAAELGADHVVNYTETNFADEIRARTGKRGVDVVVDHVGEATWDDSLRSLAKGGRLVTCGATTGGRPETNVQRVFWNQLDILGSTMATPGEADAALEHVWDGTFDVRIRDVLPMRETARAHELLENREGFGKVVVKPDNELD

SEQ ID NO: 20639 - protein, 329 aa, Triphysaria versicolor
MAGKLMRAVQYDGYGGGAAGLKHVEVPIPSPGKGEVLIKLEAISLNQLDWKLQNGMVRPFLPRKFPFIPATDVAGEVVRIGQDVKNFKPGDKVVAMLGSFGGGGLAEYGVASEKLTVHRPPEVSAAESSGLPIAGLTAHMALTQHIGLNLDKSGPHKNILITAASGGVGQYAVQLAKLGNTHVTATCGSRNFDLVKSLGADEVIDYKTPEGAALKSPSGKKYDAVIHCASPLPWSVFKPNLSKHGKVIDITPGPRVMLTSAMTKLTCSKKRLVTLLVVIKGEHLSYLVELMREGKLKTVIDSKFSLSKAEEAWAKSIDGHATGKIVVEP

SEQ ID NO: 20640 - protein, 337 aa, Vibrio cholerae
MVYIQRDASASLFIRAIGIVEMENKRIVITQFGTPDVLAMQSAPIPTPKAGEVLVKVAFASVNPIDVKTRAGLGWAAAQNKDKLPWTPGYDISGRVVALGEGVSRLKERDNVAGFIGFPLRGGGYSQYVCVPEQELSLVPDAVTLEAAAALPLAGQTAAQALSKAQVQEGERVLILAGAGGVGHIAVQIALAAKTEVFTTCSEANLDYLATLGAHAINYQFAPVSQRLEEVDVLIDLVGGEAALDALKCLKDNARVITVPTLTAELICEKAKLLGFEATGMLVDPNPEQLDTMLYMVSVGLLKIEIQHIYSLLDAAQAHEQIESGHTRGKLLLDMKC

SEQ ID NO: 20641 - protein, 2422 aa, Bombyx mori
MAPTTVVEDRLTSGHRLSHPPSGDEVYVTGVSGYFPDSDSVKHLQENLFNKVDLISSDDRRWKLAHPEIPQRTGKINNVNKFDASFFGVHYKQAHTMDPMCRILLEKAYEAIVDAGLNPKELRDTKTGVFIGACFSESEKTWFYEKMQVNGFGITGCSRAMLANRISYWLGVTGPSYTVDSACSSSLYALEHAFRAIRDGHCDAAIVGGSNLCLHPFVSLQFSRLGVLSPDGKCKSFDNSANGYARSEAIVVCFLQKAKDSRRVYAQLLHAKTNCDGYKEQGITYPAGHIQKLLLREFYEECSIPPSELEFVEAHGTGTRVGDPEELLAIDEIFCTGRSGPLLLGSIKSNLGHSEPASGLCSIAKMCIAYTTGYIPPNLNYSIPREGVSALVDGRMNVITDKQAWNRGMSGINSFGFGGANAHVLLKNVARDKVNNGIPKDDLPRLVCASGRTESAVARIFDDLESRTVDAELVRLLHSIHDQDIAGHVVRGFTLLGSTPTKSESLARDIQYYSGVRRPVWFVYSGMGSQWPGMGAQLMRIPVFAAAIEKCNNVLKPKGINVVKIITDSDPKMFDDVLNSFVGIAAIQIGLTDVLKSVGIEPDHIIGHSVGELGCAYADGCFTAEQMILSAYSRGLASVETTLIKGSMAAVGLGYSQVKSMCPPEIVVACHNGPDSSTVAGPADAMKAFVAKLTAQGIFAKEVPSSNIAYHSKYVAEAGPKLLKYLSQVIPSPKPRTERWVSTSIPQSQWKESKARLSSAEYHTNNLLSPVLFEEASSLIHNNAITIEIAPHGLLQAILRRSLKKDVINIPLTQRGHSDNVQVLLTALGNLYQSGLNPHLANIYPHIPFPVSQGTPMLAHLVEWEHSEDWYVTSYKAQDKMKSGERTVRMSIVDEDSEYMAGHVVDGRNLYPATGYLVLVWETLGMMMGELYTEVSVVFENVRFQRATNIPKEGNLEFIIMIQKGSGNFEIVESGASIVTGRIYAKKNVGQDYRVLPFPKEETGPNIKHLLTKDFYKELRLRGYQYSGLFRGVLGCNVEGSRGRLAWVNNWVTFMDCMLQLKIIGQDTRGLFVPTRIEKLSIDAKMHYYAISKMNPDANRQSFEVRVYNEVDVIRAGGVEIRGLNATPITKRLPLGVPVLEKNEFIPFSSNTKMTVEDTLRSDIQLILENIQTYKVKTIELVDEEYKSNALEPLIEKVGELLGDLPLVQAELLLISEDPIEMPSNVTVENKKLTGETNTVIFIGANLLERPDVLRQAISTLRDKCFIISREKDRPDSKTYADKYDIITIQDTGSEYLVLFRKRVGARPAKFVRIVTADDTFAWIDKVKEELKEGQKIVLYSQDEHINGLLGLVNCLRKEPGGEIVYGLLINDPSAPPFNPDLEFYEEQLDKDLAINVYQDGQWGTYRHLLLGDLDTVKAKHAYVNTITIGDLSSLRWLEGPLRPNHVFKNPDEILINVYCTALNFRDIMTATGRVTVDAVASGRLAQECVQGFEVVGRTANGSRVMGMIRNKGLSNLAAGDKALLWSIPDEWTFEEAATIPVAYGTVYYAMVMVAQIKRGESILIHAGSGGVGQAAISVALHYGCEVFTTVGTAEKRAFIKKLFPALKDSHIGNSRDITFEDMVRRETNGKGVDIVLNSLSDEKLQASVRCLTYRGRFLEIGKFDISNNTPIGMYFFLKETSFHGIMLDYIFDQSDEFRRGLQDLLLSGIMNGAVRPLTYCTFEKNEVETAFRYMAAGKHIGKVIVKIRDEEPREEGPVRPTIIPVDALPRYICNENNVYVVVGGLGGFGLELADWLILRGARKLVLNSRRGLSNGYQSSRLRAWTSYGAEIHISTHDITTYTGCEEMIKMANALGHVDAIFNLAVVLKDSIFQNQTPETFKTSFGPKAIATMHLDKVTQKLCPGLKDFVIFSSVSCGRGNAGQTNYGMSNSVMERICESRKKIGLPALAVQWGAVGDVGLVADMQDEDVQLEIGGTLQQRISSCLLALDKFMKQDAPIVSSIVVAEKKAGGTGCGNIVDAVAQIMGIKDLKTVSQQVSLAELGMDSMMAVEIKQTLEREFEIFLTAQDIRTLTFARLVELTAQREAAASTSAARPITVEGAAGFRVLLRNFGDENLASEPLIYMPTLLSDGVEGEEVIQATERVMFMVPGLEGCAAVLEPLCRRLKTKVCVLQLGVEHKNENLEQMVDRLYQTAISKITPGTPFWLLGYSFGSLLTLELAARLEREGYHGVVFCLDGAPEFLHAILTMTISFKNDFQLQNSLICHTIDIVAPNNTIGKELMEKLNEYESYEERVEVAIKMSPIQTKYSDKFIGAIAAASYDRLKVVLNYNTKTVNKLKSPIVLMRPKENPPNVTCEDNYSLDKFSDNLTVHFLEGNHVSIIENKDCANIINRMLAERDEKTGKVSDNVVTNMLENQREVKV

SEQ ID NO: 20642 - protein, 2176 aa, Drosophila melanogaster
MVDDDERRWRHFNPEIPKRSGKICDLEKFDATFFGVHFKQAHTMDPQTRILIETAYEAVIDSGVNPKSLRGSKTGVYIGSCISESEKTWFYEKVSSGGFGITGCSRAMMANRISYCLGLEGPSFLLDTACSSSMYALDNAFSAIRNGEIDAAIIDGFCRPFDKNASGYTRSETINCLFLQKKKHAKRVYASIVYSKTNCDGYKPEGITYPSGIVQEKLLDQFYKDIDHKPSDLGYLEAHSTGTVVGDPEECKAIDNVLCSQREEPLLVGSVKSNVGHSEAASGICSLVKACFAFETGLIAPNINFTEVKQIIAPLAEGRLIVVKDVVPLPKPYIGINSFGFGGANAHALLKGYPKSKNNFGIPADDVPRLLTWAGRTEEAVEEIFNAVEKNPLDAEFIGLLQNIQEEDVSGMVFRGYAIFAKQGTGPCKLLAKDVQHYTGLQRPIVWVYSGMGSQWNQMGNSLMIIPRFRESVEICHQILLAKGLNLIHILTSNDPEVYQNILNSFVGIAAVQIGLTDVLRSLNIQPDYIIGHSVGELGCAYADGGLTAQQMILAAYYRGRVSVDLEKIRGSMAAVGLGYKTVLHMLPKSIETACHNGPDSCTISGPVDDVAQFVADLKTKGIFAKEVPCSNIAYHSKYISHMGPPLLNYMNEIIPHPKPRTKKWLSTSVPKIDWNKDKAKFCSAEYHTNNLLNSVLFDETFSLIPKNSLTIEVAPHGLLGAILKRSMPSGVHIPLTNRGNQNNASFFLSALGKIYLNGVLLPAANLYERIQFPVSRTTPSVSSLIRWDHSEDWFVTKYENMKTKSSGERVFSVNLASDNEEFLSGHIIDGKILVPATCYLQYVWETFSLMYHGPSYMDVPVEFEDIRFIRATSMPVDGKVDLTVMIHYGTGHFEVYNFQSKSKFPMIAKKDFYKELKLRGYHYNGAFQAVNLARSDGLFGRVQWNYNWVTFMDAMLQIQILGTDSRNLLLPTKIRKLKINGVHHFDLMTKMDPENRVFDVYVDPMYDRIIAGGIEIFGLHASLVQRRRPPGIPVLEEYVFLPFFSSSILSLKNAARVCVQIAIENNPTLKLKLVEVGADGKNHMLTEFIEAIQDLPVITGDYILLTSQNLEDLPGVHIENGSLSTQTNCHIIIIGGYEEDEVHEKITSAYNVLVDNGYIVFRQKCAKNVSCKIAEKFRTISKIPINNTEENLVLLQKISKKLTVPPVLVKVSQHDKTFEWILELQSAIITKAPVVVYSFNEKLNGQIGLVNCLRKEPDGNLIRCFFIDDDSAPDFDLSHPFYSTQYSLGLAFNIYRNPSKRLDHIYGNVIQRGDLSSLQWLKGPFNSQNCHIKIAFSSLNFRDVMLATGRLAVELYGSSRIDQNCVLGFEYSGINMLTGRRIMSMVVKGGVASYVEKPSKLIWDIPDDWSLEEAATVPVVYITVYYAFFMATDIRKGKSILIHAGTGGIGLAAIRVALAYNLEVFTTCSTANKKEFLLKTFPKLKESHIGNSRNTSFELMVHRETNGKGVDFVLNSLSEEKLLASLRCLGKSGHFLEIGKYDMANDNKIGLGCFLKEITFHAVLADSLLVAPDEDIWHLKSLIDMDISNGIIQPLPVKVFLAHEIEQAFRHLIGGKHIGKVVIQVREQPHDPSTLPVRVLNQVYFKHNHTYVIPGGLGGFGMELADWMAIRGARKLLLSSSRGITKDYQLYRIALWKTYGCEVAISTADITSKKGCAQLLSEANGMGPVGGIFNLAVVLKDCIFSNQNVNQFLECFAPKAIATTYLDDLSRIYCPELEHFVVFSSVSCGRGNAGQSNYGMANSVMERIIEHRNREGFPGKAIQWGAIGEVGLVADMAEDKIDMEIGGTLQQRISSCIQELDHLLCADASIVSSMVVAEKRTMRSGQGNVIDAVMNIMGIRDLKSVSLSTTLSEMGMDSLMAVEIKQTLERDFELILTPQDLRHLTFQKLQEFIDAKEKENTDGIQIIFASDNKLLGMELLIRNLGDEANCDQIIIPLQTSAAPSKQNLQPNIIIPGLEGTAGRACIVNHIFPEASKESMSTVFHQVDCLSDKMSLFMNYVEKQNMYSKKYSSTMVKAMFNRVKMAASFDLDGIIKIKSPITLVRPAEASLQDIDEDYCISLLTSGVVTLKVIEGNHTTMLDNPSLSQIIDDFDPVLLEDKHFEEYIRNDKPVSVV

SEQ ID NO: 20643 - protein, 1529 aa, Drosophila melanogaster
LSVELDLGKEENVYLAGHTIDGRVLFPATGYMTLAWMSLAQQQGLDYLRTPVLFEDVVFHRATILSVGTVVKLTLNFFPGSSSFEICEGTSLVTSGKIRLVSNVQQEQLQLSSLPGIAGSNKLSTKDIYKELRLRGYDYTGVFQGILESDISAVTGQLQWADNWISFMDTMLQFRILSNDIRELYVPTGIERALIDPLKHLELAKKHQQKLTVNWHRNISVVKCGGVEIHKMKTAQTQRRSGGQSPPSLERYRFWPHSQHLGQREEQEKSRSTALAVAIQLIIENSGGAVKLKGVELAGSRSTLDALSAVQLLELIEREPILVGDMAVVTSSSNESELGEQLKEHGIRVIVKDIKAGAVEQQCHFVYSVNMLAQNSVKDLQHCLDSLKSDSGFLLLEEAASRYNIIGKEKLNKLKLVSVLEQFFGTDRVLVLVRKLSKVQSSQALTLHLTNKQFKWVNELKNSIAKAQAEEKNLYLVAQGEPNSGALGLMNCLKREAGGHFLRLYLILDEGVPQFSLDDPFYAAQLAKDLVVNVYRNGSWGSYRHLKMESRPPMLPVEQAYVNTLVKGDLSSLRWIESPRSSPIQSQLEPCTVYYAPLNFRDVMLASGKLGVDALPGDLAYQDCVLGLEFAGRDSCGRRVMAMVTAKSLATNCLANRNLLWEVPSKWTMEQASTVPCVYATVYYALVVRGQMKEGERILIHAGSGGVGQAAISVALAHGLTVFTTVGSKEKREFLLKRFPKLKAKNIGNSRDTSFEQLIMSETHGNGVELVLNSLSEEKLQASIRCLALNGRFLEIGKFDLSNNTPLGMSVFLKNTSFHGILLDSVMEGEEEMQLMVAKLVAEGIKSGAVQPLPTTVFAEQEIEKAFRFMASGKHIGKVVIKVRLEEEQQAALPRLRQIQAIPRSYMHPEKSYILVGGLGGFGLELANWLVSRGARFLVLSSRSGVKSGYQALMIRRWHDRGVQVQIDTNDVTTAVGCQRLLEVSNKLALVGGIFNLAAVLRDGLIEDQSPKNFEKVSAPKLLATIHLDKISREICPALEYFVCFSSLSCGRGNMGQTNYGLANSTMERICEQRQEYGYPGTAIQWGAIGDTGLIIEHMGNNETVVGGTLPQRMISCLETLDLFLQQPHPVMASMVVAEKRKTEQANRLSLIATIANIMGLRDVKSVSDKTTLFDLGMDSLMSTEIKQTLERHFDLVLSAQEIRQLTFSALRQIDAQEPPSASVSSPSASSTLSRIKEEACVEVQPQSDETRKVFAKEVLPQEVMVRLRSKAPVASEDPAVFFLAPIEGFTIAVEALAASLTCPAYGLQCTEQVPLDSIEACAAYYLRQIQKLQPLGPYHIVGYSYGCLLAHAIAVALEQRRFGVKVIMLDGAPTMASGYVQEAKKQTDDLNRQQSMTLAYFGALLADVDYNQLLQLLDGVQTWPSKLDKLADTLAGYTQQTREVIKKAACMFKQKLLLSESYKGAKQLHSDVVLIKSAEHNAIMAQDYGLKEICSAQIDMHVVEGTHRTFLKEPHTLQIIERVLRKRP

SEQ ID NO: 20644 - protein, 384 aa, Plasmodium yoelii yoelii
MKGVILKGINELVFSESLTKPTLEKCKIQNQGNDLLLKVLSVGINRIDLLIKENKYPKFPIGKSLGLEISGIVEESNSNKFKKNDIVCSLLKYNGYNEYVLANSKHTMKIDSDKISMFEAASIPESFLTAYKLIYYTARFPLINNNDNKIVENKEGDKNNTTFTYTPISENCYYYYKQFSNQIYGNYFGKNEVNVLVYGALSSVGINLLQLLNYEKKRNIMNINKIIAITSNQTKAKVAMEFGATDYAFHNDENFVENILNISKNINLIFDCVGGGKIFENNLKICTNDTVWILYGLLGGPKVPSFNLAHLLTKRIILLTSTLYDRTDNYKEELIHSFQHHILPLIYNNTLKFCIHKVLPIEQIEEAHHIIKNNLNIGKVVCKF

SEQ ID NO: 20645 - protein, 236 aa, Pasteurella multocida
MSLFLLRWNGAMLKLDLGLRSSNLKKFYHLKIFLKILLLVVEICQRTITVQKGDFVVLGGATSSVGIATIQIAKMQGANVIALSRTHAKGDVLLQKGADFVIATKEDDVTAKLLEITNGKGVNLVFDPVGGKEAAKIINAMTQDGKYIIYGALSHDDIAVPVFPILGKHLTVRGYELFEITTVPEKLAQAKKFVFDGLASGQLKPEIDKVFAFDEMAEAHRYMESNAQIGKILVKV

SEQ ID NO: 20646 - protein, 379 aa, Torpedo californica
MTGEEVKEPKEQQEITEVKEQEPEISYNAIVLNGVGGYDKVKVEVKKGVPTLKSDEILVRVQACGLNFSDLLVRQGAFGKHHSLGTECAGVVEAIGDLVIDRKVGDKIIMLNIDGGLWTELVVTTVNRTFLMPDGMSFQEAAAISVNYTAAYVMIYDFANLRPSQSILIHMAAGGVGIAATQLCKLVHDVTIFGTASPSKHETIKENGVTYPIDYTTLDYAEEVRKIAPKGVDIVLDPLGGADDSKGFGLLKPLGKLVLYGSANQVTAPKRSSLAAAKVWWHKFNIDALQLINSNKAVCGFHLGRTDPDHVAEVIRKLISLYKEGKIKPKVDSVWSFEQVGDAMRHMRNTRTLEKSSWSLKSRQLMPQLEIKSVSKRQG

SEQ ID NO: 20647 - protein, 484 aa, Danio rerio
MSGEDAPAQQQNAEEQKQQETKTPAESPKTESKPDPPPTSASTEAAATAAAAADTPAPAAEKAPEEDTFTYRALVLTGYGGYDKVKLQVKKGKPALKSGEVMVRVKMCGLNFADLMARQGLYDRLPSPPVTPGMECSGVIEAVGEEVTDRKVGDKVLVLNRSGMWQEVVVVASTHTFLMPEGMSFEEAAALPVNYITAYMMLFDFGHLRPNQSVLVHMAAGGVGIAATQLCKTVNDVTVFGTASASKHEVISQGGVTHPIDYRTRDYVEEVRKISPKGLDIVLDPLGGSDTHKGYNLLKPMGKLISYGAANMLAGQKKNLFAVAKTWYQQFSVHTLSLIQGNRSVCGFHLGYLDSETELIDQAMTAVMDLYRQGKVKPRIDSTYHLEQVGDAMRRMQERNNIGKIILTTEPMKEEEKKEEAKKDEEKKDDKKKDDKKKDDKKKEDKKKDEAKKEEKKDEKKKEEAKKDDKKAEEKKEEVKKEEN

SEQ ID NO: 20648 - protein, 345 aa, Pseudomonas sp. W7
MKAIGYLEPQAIDQADALIDIELDTPTATGRDLLVKVHAISVNPVDTQVRRAAKPEAGQHKVLGWDAVGEVVATGLKTQLFKVGDLVWYAGDITRTGSNAEFQLVDERIVGAKPSSLSNVEAAAMPLTGITAWELLFDRLDFTPLLEGQAGATSAAPQARILIMGAAGVGSILTQLAAKLTNAVVIGTASREQTQRWVKELGADHVINHHQPLVPQLNALGIENVSHVISLTHTEQHYEQLVEALAPQGKLALIDDPQGGLDVMKLKQKSLSLHWELMFTRSMFNTWDMQKQHELLTQLAQLIDNGVIRTTLGENYGTINAENLKRAHAHIESNRAVGKIVLEGF

SEQ ID NO: 20649 - protein, 328 aa, Mycobacterium tuberculosis CDC1551
MTIMRAVVAESSDRLVWQEVPDVSAGPGEVLIKVAASGVNRADVLQAAGKYPPPPGVSDIIGLEVSGIVAAVGPGVTEWSAGQEVCALLAGGGYAEYVAVPADQVLPIPPSVNLVDSAALPEVACTVWSNLVMTAHLRPGQLVLIHGGASGIGSHAIQVARALAARVAITAGSPEKLELCRDLGAQITINYRDEDFVARLKQETDGSGADIILDIMGASYLDRNIDALATDGQLIVIGMQGGVKAELNLGKLLTKRARVIGTTLRARPVSGPHGKAAIAQAVAASVWPMIAANRVRPVIGTRLPIQQAAQAHELMLSGKTFGKILLTV

SEQ ID NO: 20650 - protein, 328 aa, Mycobacterium tuberculosis H37Rv
MTIMRAVVAESSDRLVWQEVPDVSAGPGEVLIKVAASGVNRADVLQAAGKYPPPPGVSDIIGLEVSGIVAAVGPGVTEWSAGQEVCALLAGGGYAEYVAVPADQVLPIPPSVNLVDSAALPEVACTVWSNLVMTAHLRPGQLVLIHGGASGIGSHAIQVVRALAARVAITAGSPEKLELCRDLGAQITINYRDEDFVARLKQETDGSGADIILDIMGASYLDRNIDALATDGQLIVIGMQGGVKAELNLGKLLTKRARVIGTTLRARPVSGPHGKAAIAQAVAASVWPMIAANRVRPVIGTRLPIQQAAQAHELMLSGKTFGKILLTV

SEQ ID NO: 20651 - protein, 327 aa, Escherichia coli K12
MATRIEFHKHGGPEVLQAVEFTPADPAENEIQVENKAIGINFIDTYIRSGLYPPPSLPSGLGTEAAGIVSKVGSGVKHIKAGDRVVYAQSALGAYSSVHNIIADKAAILPAAISFEQAAASFLKGLTVYYLLRKTYEIKPDEQFLFHAAAGGVGLIACQWAKALGAKLIGTVGTAQKAQSALKAGAWQVINYREEDLVERLKEITGGKKVRVVYDSVGRDTWERSLDCLQRRGLMVSFGNSSGAVTGVNLGILNQKGSLYVTRPSLQGYITTREELTEASNELFSLIASGVIKVDVAEQQKYPLKDAQRAHEILESRATQGSSLLIP

SEQ ID NO: 20652 - protein, 2603 aa, Phoma sp. C2932
MVPYYQPASSCGSNTMAAMDEHQHNEDATIPIAIIGMSCRFPGNATSPEKLWELCAQGRSAWSSIPKSRFRQEGFYNPNAERVGTSHVVGGHFLEEDPSLFDASFFNLSAEAAKTMDPQFRLQLESVYEAMESAGITLEHIAGSDTSVYAGACFRDYHDSLVRDPDLVPRFLLTGNGAAMSSNRVSHFYDLRGASMTVDTGCSTTLTALHLACQGLRNRESKTSIVTGANVILNPDMFVTMSSLGLLGPEGKSHTFDARANGYGRGEGIATVIIKRLDDALRAQDPIRCIIRGTALNQDGRTATLTSPSQTAQSDLIRACYRAAALDPNDTAFLAAHGTGTRTGDAVEIAAAADVFGEKRSPERPLWIGSVKTNIGHSEATSGLASVIQAALALEKGLIPPNINFKEPNEKLGQVSAAVRVPSNLQKWPSVSGVRRASVNNFGYGGANAHVILESGIPGHTPIANGSGRSNGTGNGHNGANGTTNGHNGTNGTTNGHFDATQATNGHYGTDETPDYAPLDSFVISISAKEEASARSMVTNLADYLRTLQVQDETKHFKSIAHTLGSHRSMFKWTAAKSITGPEELIAAAEGGQFQASRALERTRLGFVFTGQGAQWFAMGRELINTYPVFRQSLDRADRYLKEFGCEWSIIDELSRDAENSNVNDMTLSPPLCTAVQISLVQLLESWGIVPTAVTGHSSGEIAAAYAAGALDFKSAMAVTYFRGEVGLACQDKIVGKGGMIAVGLGPEDAEDRIARVQSGKIVVACINSQSSVTVSGDLSGIVELEDLLKAEGVFARRVKVQAAYHSHHMQVIANGYLTSLKDMLKPTKKFGKIIYSSPTTGRRETNAKLMASAQHWVNNMLSPVRFAESFQNMCFSNRNSSQSEEIFQDVDIVLEVGPHGMLQGPIQQMMSLPIFERARLPYISCLLRGQSAVHTMQTVAAGLMGWGYRVDMVAVNFPQGTYGVKILHDLPSYPWNHDNSHWWEPRLNKAHRQRVHPPHDLLGSLIVGRDLREPTWRHFIRVQDIPWIRDHVVQSALVYPGAGFICMAMEAMVQLHELRDSQSRKVAGYRLAEVDILRAMLIPDTSEGLEAHISLRPCSTKLLLTNEWYDFCVSSVGDDDKFVDHCRGRITIEFDTSGSADTPRTSLRERSRSTGLMRSVDPSNLYSFLRAQGIYHGPIFQNLKTISSRKDHSESSFVVANTASVMPNGFQSPHVIHPTTLDSIFQGAYTALPGAGLDQNTAMIPRSIQELYLSSALTSDVGQCLVSDTSLIRYDGQSFTVNVDVSSKADSEHTPVLEIKGLRNQSVGQMAPQPGDSSNNDLCFKLDWAPDISSVKQERLKEKFGFPLDPTEADIIMGLRQACIHFIHRSLQSLTAPDRDQLDWHQKRFYDWMVLQIQLAEEDRLAPNSSAWLQCSSSDEQKLLENVRASSVNGQMVVHVGKSMLAILRHEIAPLELMLQDKLLYRYYTDAIKWDRSYQQIDQLVKLHAHKCPTAKIIEIGAGTGGCTRAVLDALSNQGIARCAQYDFTDVSSGFFEAAQQKFAAFDDVIRFQKLDIEKDIEMQGFECGSYDLVIASQVLHATGKMEHTMANVRKLLKPGGKLLLVETTRDEMDLQLVFGLLPGWWLSSEEERQMSPSLSTNSWEKVLKKTGFDGLDIELRDCDSDEFYSFSVMMATASSTIASSSMAFAIVYGEVPLPDQFLDDMKTAISSSAVSDPVVGHLDSIDATGKFCIFIEDPETDILSSPDEKSYASIQKLVTRCKGLIWVSRGGAMHGTRPNSSLKTGLLRTLRLEYTEKRFISLDLDSARPQWNHDSITTINEVLCGALAQNADSSIKDSEFAEQDGQLFVPRISCDIARNEDLSSDSNSPAQMEPFHQPGKLLQMGIKTPGLIDTLQFSKTDATDNLPNDYIEIEPKAFGLNFRDVMVAMGQLEESIMGFECAGVVRRVGPSSAGHNIKVGDRVCALLGGQWTNTVRVHWHSVAPIPQAMDWETAASIPIVFVTAYISLVKIARMQAGETVLIHAASGGVGQAAIILAKHVGAEIFATVGTDEKRDLLIKEYKIPDDHIFSSRNALFAKSIRQRTNGKGVDVVLNCLAGGLLQESFDCLADFGRFIEIGKRDIELNHCLNMGMFARSATFTAVDLIAIGRDRSYMFAEALPKIMTLLQEKAIRPVTPISIYKIGDIETAFRLMQAGKHMGKIVITAPEDAMVPVITRPPKLQLRPDASYLIVGGLGGIGRSLCKNFVENGARSLVLLSRNANVSQQSGEFLDELRSTGCIVGVVDCDISSKTQVEATMLRLKKDMLPIRGIVHAGMVLQDSVFERMSLDDYNTAIRPKVQGSWNLHSGLSDCDLDFFIMLSSLAGVSGSASQANYTAGGAYQDALAKYRRAQGLSAVSIDLGMVQSVGYVAETKGVAERLVRMGYSPISEMEVLKIVEHAITNPPPEASSAQIITGISTKPGRHWTESSWLQDARFATLRERARDVKELSNSQGGAQDKQLAAGQELSMATSLVEAIDVVGRAITAKLATMFLIAAESIIASKSLSEYGVDSLVAVELRNWLAAQLSSDVSVFDVTQSQSLTALATTVATKSSRIDKSLLVA

SEQ ID NO: 20653 - protein, 327 aa, Salmonella enterica subsp. enterica serovar Typhi
MATRIEFHKHGGPEVLQTVEFTPTEPAEHEIQVENKAIGINFIDTYIRSGLYPPPSLPAGLGTEAAGVVSKVGSGVEHIRVGDRVVYAQSTLGAYSSVHNVPADKAAILPDAISFEQAAASFLKGLTVFYLLRKTYEVKPDEPFLFHAAAGGVGLIACQWAKALGAKLIGTVGSAQKAQRALDAGAWQVINYREESIVERVKEITGGKKVRVVYDSVGKDTWEASLDCLQRRGLMVSFGNASGPVTGVNLGILNQKGSLYATRPSLQGYITTREELTEASNELFSLIASGVIKVDVAENQRYALKDARRAHEVLESRATQGSSLLIP

SEQ ID NO: 20654 - protein, 2544 aa, Nitrosomonas europaea
MGRSINKHATDDSRSESLNTGTQESGTDKSSSSPVAIVGFAFRFPGDVSDETDFWNALKQKRDLVTQIPADRWAVDELQHDKRSEHGRSITFSAGVLSHIEEFDASFFGISPREAAVLDPQQRLLLELTWETMENAGIPPSSMAGSDCAVYVGISGFDYGMCEVDDLAVITSHSMTGNTLSIAANRISYAFDLHGPSLAVDTACSSSLVALHHACNCLRNGEASTALVGGVNLLLHPYPFVGFTKASMLSAKGRCKPFDASGDGYVRSEGAAVLLLKPLEKALADGDDVHAVILSSGVNADGARKTGITIPSSDGQAELMRAVLSRSGLSSKEVDFIEAHGTGTVVGDPVETRAIGMVYGQERTRPLPIGSVKANLGHLEPASGMAGLIKTILALKHRALPPAIHLHTPNPHIDFQALNLELIRKYKPFSRKRKKPLVAGVNSFGFGGANAHVLLKEFVPQDSKADTSSTMESLPPLFLSARTEAALRATAEHYVELLKGKSPQEFYDIAHAAAYRREQMEKRLALHTGKVDSTVDLLDRYAKGDMVSRVFVEDELPQSGGVAFVYSGNGTQWAGMGRALLAESPRFKEILSEIDEIMLPQAGFSLITELEAEDTNSRLDDTRVAQPLLFAIQVGVTTLLREQGIEPSAVTGHSVGEIAAAWASGALDLQQAIHVICVRSQAQGLTRGKGRMAAVGLSVEAIQEIITTLGVDAEVEIAGINSPGNVTLSGPLEDLQQIQSVAESRGIFFRLLDLDYAFHSRQMDAIEEPLIRQLGELAPAYTERATFVSTVTGNEIDGRLLDAGYWWRNVRQPVQFAAAINRIAGLGCRILIEIGPHAILQRYMGECLAAAEVQGRVIPTLRRDDNGLQRITETVLRTQLLAERPSLQTYFSVPGRRVRLPNYPWQRERHWIPWTNEGLHSLDRRRVHPLLGWRIPGVDTLWENTLDPVTLPWLADHKVGGAIVYPGAAYAEMSLAAAREWLGGKHFTVEQLDIISPMVFDGEHARTTHLILNPRDGGFQIKSRQRLSDDEWTLHASGRILEAVNRIPVARIDAPAVSAEHVGHEIHYQRASQLGLDYGPGFQGVSNINIAAERLEATLSCPELQHFDDYLLHPAILDLCFQSLIDFFGEAIDAGQGIALLPVKMGKLNFCGNGKVAFLRARLCRHGTRSALADFELLDNQNNLIASASACRFRAAHLKRHVQQNISNWRIVPWLKPHPLDGMTTAMPPVAGLIEQVRAQFDRVKHDRHTLFKEILPLTEALTLSFAWQAVRQIQQYRPLDWQQIFDGSHATAHARWLANLLITEGLLNKDDAGQWFVTIDADLPSPETVWQTLLNDFPVYLPQLMLMGRVGQQLPALLCGETDALKLLNELKHSPVAEMRYHDDPVYLGMRLALEEIFRNLAGSWPVSRRLRILEITAGSSELPKILTGSLPEDRFDYVLALPDEAMQARQQIEYQEDASIVVARYEPATLKLSADRRLPDAFDVIVLHHALHRTNSPHTALAQIRHLLAAGGILLLAEQHSDWSTNFLEGIDPGWWRQRNKTPDLPVSPLLSPATWQQLLKDAGFTDTETFFEPAAEGLAEGAYLLLARCPARDSAIIPEPVTASWLLVADESSATLARHLSNRLQSSGQQVTITSRIDDDLLQNTDHIVHLPGWNDTPDQAADTVTRLMEDVKLLAARIGKTPQFWLVTRGGTLISGCPAESESSPAQSALWGFGRVVMNEYPQLACTLIDLVCNPATVNLADRLVNELLVPDGSNEIVLSAAARYCLVMQEATNQQIRTTEQSEKKDERFHLDFHVPGQLRNLVWLPDVKRQLGDDEVEVCTRATGLNFRDVMYLMGLLPDEAVENGFAGASLGLEFSGIISRVGARVKGLLPGDAVMGFGSSCFASHVITRADAVAPMPENWSFEAAATVPTVFLTVYYALKQLAALQPGERVLIHGAAGGVGIAAIQLARYLGAEIYATAGSDEKRDFVKLLGADHVFDSRSLAFADDILDATAGEGVDVVLNSLAGEAMRRSIDVLKPFGRFLELGKRDFFENTPVGLRPFKNNISYFGIDADQLLTARPRLAVQLFHEVMALFREQALAPLPYRVFSANRITDAFRVMQQARHIGKIVVSLADARPDIEQPLQPVPAIRFERNSTWLVTGGLSGFGLESARWLAERGVDHLVLAGRRGMDTPGAKEIIETFAVQGVKVIAQACDITHAAAVDTLIERIGKTLPPLKGVLHAAAVFDDQLISSLDQKRISNVMDAKLLGAWHLHQATLGTPLDYFILYSSVTTAIGNPGQANYVAANAGLEGLAAMRRHMGLPATCIAWGPVSDTGYLARNQAVRDSLEQRLGKPPLPAAEALTQLDVALNDETGFVIPADFDWNTLSHLLPSASGNRFAILNRNRRSTSQTTESIDIRTFIIGKTRAEVTEIVRGFVVEEVAQILSISPDRIESGRSLHDHGMDSLMAVELALGLERRFGIQLPVMMLNDAPTIHTVTARIVEKLTNKGDMPEGEQSVSQVTEFIRQHGEELMPEEIDILSEDVRHFAQQGTSLIA

SEQ ID NO: 20655 - protein, 336 aa, Ferroplasma acidarmanus
MQAGFLNKLNSEIILEDYEPPEPGDNEVTIEQKYTGVCFRDILTQQGFFPRVSLPVIPGHEIGGTIIKKGKNVKDFNIGDRVSSLIYVPCGKCEFCLSGNENLCPNKVAYGEGRNGGYSRYVNADERSLVKVPPEVPEETVPIAACVIAMLYHAIGRVGKIKKGDYVLITGAGGGVGVHAVQMVKALGGHPIAETGSKWKEEELYKLGAEYVVSPEREYNKDVKEITGQGADIVLEDVGIATFSKSLRSLKTGGRLVVIGNLKPEPVELPLGLIILKGNSIKGSISSTRDDLKKALELSKSQISPVIGNKIELQDINDGYANMLDRKVLGRLLIKF

SEQ ID NO: 20656 - protein, 337 aa, Cytophaga hutchinsonii
MKAIGFKRSLPITDTNSFILFETDKPVASGRNLLVKIQAISVNPVDFKVRQNSAKEAELETPKIIGWDAVGIVEEIGNEVSLFKKGDTVFYAGELTKPGTNAEYQLVDERIVGLAPESLSLAEAAALPLTALTAWEILFDRIRIQPDKDKGKSILIIGGAGGVGSIAIQLAKKVAGLTVIATASRPETKQWCKDLGADHVVNHADLLTEMQSIGFKQVDFILDFVDANAYWDVMAELIKPQGHIASITGSATPVALNKLKNKSVSFSWELMFTRAMFNTDDMIEQHEILTKVAALIDKKEIRTTLKQVLKGFTVENLKQAHVLLESGKTIGKVVIEF

SEQ ID NO: 20657 - protein, 327 aa, Salmonella typhimurium LT2
MATRIEFHKHGGPEVLQTVEFTPAEPAEHEIQVENKAIGINFIDTYIRSGLYPPPSLPAGLGTEAAGVVSKVGNGVEHIRVGDRVVYAQSTLGAYSSVHNVTADKAAILPDAISFEQAAASFLKGLTVFYLLRKTYEVKPDEPFLFHAAAGGVGLIACQWAKALGAKLIGTVGSAQKAQRALDAGAWQVINYREESIVERVKEITGGKKVRVVYDSVGKDTWEASLDCLQRRGLMVSFGNASGPVTGVNLGILNQKGSLYATRPSLQGYITTREELTEASNELFSLIASGVIKVDVAENQRYALKDARRAHEVLESRATQGSSLLIP

SEQ ID NO: 20658 - protein, 210 aa, Ovis aries
PDAIPGKWASRNCMLGMESSGRDASGKRVMGLVPAEGLATSTLVPQSFLWDVPSNWTLEEAASVPVVYSTAYYALIVRGRMQPGETVLIHSGSGGVGQAAIAIALSLGCRVFTIVGSAEKRAYLQSRFPQLNETSFANSRDTSFEQHVLWHTAGKGVDLVLNSLAEEKLQASVRCLAQHGRFLEIGKFDLSNNHPLGMAIFLGNVTGHGI

SEQ ID NO: 20659 - protein, 400 aa, Rhodopseudomonas palustris
MMNIHSVKGQKIAAGERTQEVDHPHSLVAQFGADQPLPLDCGIELSPFQIAYQTYGTLNADKSNAILVCHALTMDQHIANVHPITGKPGGWLTLVGPGKPIDTDRYFVICSNVIGGCMGSTGPASINPATGKAWGLDFPVITIPDMVRAQAMLIDRFGIDKLFCVVGGSMGGMQVLQWSVAFPERVFSALAIACATRHSAQNIAFHELGRQAVMADPDWQHGRYFEHGCFPHRGLAVARMAAHITYLSDAALHRKFGRKMQDRELPTFSFDADFQVESYLRYQGSSFVERFDANSYLYLTRAMDYFDIAADHDGVLAAAFRGTQTRFCVVSFTSDWLFPTSESRAIVHALNAGGARVSFAEIVTDKGHDAFLLDEPEFIDIARAFLQSAGTARGLGKAEH

SEQ ID NO: 20660 - protein, 391 aa, Rhodospirillum rubrum
MNVLPAASQPLNQSVTLCVDAPMRLDSGLELGPLTVAYQTIGRLNAERTNAILICHALTGDQHVIGPHPVTGRPGWWETLVGPGKTIDTDRYFIICSNVLGGCLGTTGPKEINPATGKPWGLGFPVITIGDMVRAQALLLDHLGIERLFCAIGGSMGAMQVLQWAVSYPERVRAVVPIAGSWRHSAQNIAFHEVGRQAIMADPDWNGGDYLNQGTVPRRGLAVARMTAHITYLSEPALQSKFGRKLQDRASITYGFDADFQVESYLRHQGANFVKRFDANSYLYITRAMDYFDLAAEHDGVLARAFQGTKVRFCVVSFTSDWLFPTAESRAVVRAMNAAAADVSFVEVTTDKGHDAFLLDEPEFHDTLQGFLDGAADMFGLPRGLFSGIRP

SEQ ID NO: 20661 - protein, 132 aa, Rhodospirillum rubrum
VPRRGLAVARMTAHITYLSEPALQSKFGRKLQDRASITYGFDADFQVESYLRHQGANFVKRFDANSYLYITRAMDYFDLAAEHDGVLARAFQGTKVRFCVVSFTSDWLFPTAESRAVVRAMNAAAADVSFVE

SEQ ID NO: 20662 - protein, 407 aa, Chloroflexus aurantiacus
MEAIVQAPTPEGVGIVRTQRMHWTTPLTLTSGATLGPITLAYETYGELAPDRSNAILILHALSGDAHAAGFHSPTDRKPGWWDAMIGPGRPFDTNRYFVICSNVIGGCRGSTGPSSPHPSDGRPYGSRFPLITIEDMVHAQQRLIDALGIDTLLAVAGGSMGGFQALAWTVEYPQRVRGAILLATSARSSPQTVAWNYIGRRAIMADPRWRGGDYYDSDAPRDGLAVARMLGHITYLCEEKLEQRFGRRVDGDALDLGPRFAIEHYLEHQAARFNDRFDANSYLVITRAMDNWDLTARYGSLTAAFDLTRARFLALAYSSDWLYPPAETYQMAAAAQAAGRSFTTHLITTDAGHDAFLTDVACAERADPRFSEQTDDRIVWRMGCFFNSFFMTHTGCACTDLLHKCM

SEQ ID NO: 20663 - protein, 390 aa, Ralstonia metallidurans
MTDVAPPAGVLDVPTDSVGVVTPQRMHFSEPLQLRNGSQIADYDLMVETYGTLNAARTNAVLVCHALNASHHVAGIAADNPRDIGWWDNMVGPGKPLDTNRFFVIGVNNLGSCFGSTGPMSTNPSTGAPYGALFPVVTVEDWVNAQARVADIFGIQQFAAVMGGSLGGMQALAWSLMYPERLRHCIVVASTPKLSAQNIAFNEVARSSILSDPDFHGGNYYAHNVKPKRGLRVARMIGHITYLSDEDMAEKFGRSLKAEDIRFSFDVEFQVESYLRYQGDKFAEYFDANTYLLITRALDYFDPALAHGGDLTRAMAQTQAGFLVVSFTTDWRFAPNRSREIVKALLDNKRPVSYAEIDAPHGHDAFLLDDARYHNLMRAYYDRIAEEIGA

SEQ ID NO: 20664 - protein, 379 aa, Neisseria meningitidis MC58
MSQNASVGIVMPQKIPFEMPLVLENGKTLPRFDLMIETYGELNAEKNNAVLICHALSGNHHVAGRHSAEDKYTGWWDNMVGPGKPIDTERFFVVGLNNLGGCDGSSGPLSINPETGREYGADFPVVTVKDWVKSQAALADYLGIEQWAAIVGGSLGGMQALQWTISYPERVRHALVIASAPKLSTQNIAFNDVARQAILTDPDFNEGHYRSHNTVPARGLRIARMMGHITYLAEDGLGKKFGRDLRSNGYQYGFGVEFEVESYLRYQGDKFVGRFDANTYLLMTKALDYFDPAADFGDSLTRALQNVKAKFFVASFSTDWRFAPERSHELVKALIAAQKSVQYIEVKSAHGHDAFLMEDEAYMRAVAAYMNNVYKECQQ

SEQ ID NO: 20665 - protein, 379 aa, Neisseria meningitidis Z2491
MSQNASVGIVTPQKIPFEMPLVLENGKTLPRFDLMIETYGELNAEKNNAVLICHALSGNHHVAGRHSAEDKYTGWWDNMVGPGKPIDTERFFVVGLNNLGGCDGSSGPLSINPETGREYGADFPVVTVKDWVKSQAALTDYLGIGQWAAVVGGSLGGMQALQWTISYPERVRHALVIASAPKLSTQNIAFNDVARQAILTDPDFNEGHYRSRNTVPARGLRIARMMGHITYLAEDGLGKKFGRDLRSNGYQYGYGVEFEVESYLRYQGDKFVGRFDANTYLLMTKALDYFDPAADFGNSLTRAVQDVQAKFFVASFSTDWRFAPERSHELVKALIAAQKSVQYIEVKSAHGHDAFLMEDEAYMRAVAAYMNNVYKECQQ

SEQ ID NO: 20666 - protein, 334 aa, Deinococcus radiodurans
MTAVLAGHASALLLTEEPDCSGPQTVVLFRREPLLLDCGRALSDVRVAFHTYGTPRADATLVLHALTGDSAVHEWWPDFLGAGRPLDPADDYVVCANVLGGCAGTTSAAELAATCSGPVPLSLRDMARVGRALLDSLGVRRVRVIGASMGGMLAYAWLLECPDLVEKAVIIGAPARHSPWAIGLNTAARSAIALAPGGEGLKVARQIAMLSYRSPESLSRTQAGQRVPGVPAVTSYLHYQGEKLAARFDEQTYCALTWAMDAFQPSSADLKAVRAPVLVVGISSDLLYPAAEVRACAAELPHADYWELGSIHGHDAFLMDPQDLPERVGAFLRS

SEQ ID NO: 20667 - protein, 381 aa, Burkholderia fungorum
MESIGIVAPQKMHFTEPLPLQNGSSLAGYDLMVETYGTLNAARSNAVLVCHALNASHHVAGVYADNPRDIGWWDNMVGPGKPLDTDKFFVIGVNNLGSCFGSTGPMSIDPSTGNPYGATFPVVTVEDWVNAQARVADQFGITRFAAVMGGSLGGMQALAWSMMYPERVAHCIVVASTPKLSAQNIAFNEVARSAILSDPDFHGGNYYAHNVKPKRGLRVARMIGHITYLSDDDMAEKFGRSLRRAEGALDAYNFNFDVEFEVESYLRYQGDKFADYFDANTYLLITRALDYFDPAKAFAGDLTAAVAHTTAKYLIASFTTDWRFAPARSRELVKALLDHKRTVTYAEIDAPHGHDAFLLDDARYHNLMRAYYERIANEVNA

SEQ ID NO: 20668 - protein, 384 aa, Burkholderia fungorum
MSPTASFSWMAARSSSKGHRSRSSTTRLTSAPENSLTSSPIKYEAHMTDFETFNLGRVALQSGATMPDMLLSYKTYGRLNAARDNAIVYPTFYSGSHADNEWLIGEHMGLDPREYFIIVPNMFGNGVSSSPSNNPPPYDRGRFPHVTLYDNVAMQHRLVTEKFGIESLRLVTGWSMGAMQAFHWAAMYPQMVERILPFCGAARCSRHNFVFIEGLKAPLLLDPEFKDGFYDAPPTRGMRAAARVFAGWGFSQAFLRQRLDMEAMGYGSLEDFITQFWEGDFLKKDANNILSMMWSWQYGDISANPLYQGDFDRALGSITAKAIVMPGRTDLYFPPEDSEYEVSKMPNAQLRPIESVWGHFAGGPAANAVDIRFIDSAVREILAG

SEQ ID NO: 20669 - protein, 230 aa, Bacillus cereus
MQIVKKEKFVLKEFTFENGREIPVQMGYETYGTLNRERSNVILVCHYFSATSHAAGKYTVHDEESGWWDGLIGPGKAIDTNKYFVICTDNLCNVQVRNPYVITTGPKSINPETGEEYAMEFPVFTFLDVARMQYELIKGMGISRLHAVIGPSAGGMIAQQWAVHYPHMVERMIGVITNPQNPIITSVNVAQNAIEAIQLDPSWKEGKYGEQQPIKGLHLANRMMFMNAFD

SEQ ID NO: 20670 - protein, 370 aa, Xylella fastidiosa Dixon
MTEFIPPGSLFHALSSPFAMKRGGQLHHARIAYETWGRLNASATNAILIMPGLSPNAHAAHHDSNAEPGWWESMLGPGKPIDTDRWFVICVNSLGSCKGSTGPASYNPITQAMYRLDFPALSIEDGANSAIEVVHALGIKQLASLIGNSMGGMTALAILLLHPDIARSHINISGSAQALPFSIAIRSLQREAIRLDPHWRQGDYDDTHYPESGLRIARKLGVITYRSALEWDGRFGRVRLDSDQTNDTPFGLEFQIENYLESHAHRFVHTFDPNCYLYLSRSMDWFDVAEYANGDILAGLARIRIQRALAIGSHTDILFPIQQQQQIAEGLRRGGTHATFLGLDSPQGHDAFLVDIARFGPPVKEFLDEL

SEQ ID NO: 20671 - protein, 340 aa, Xylella fastidiosa Dixon
MRSVNPSFTFCLDMPTPDDDGQIAVRGEIMVPLSMCHAGWVDLRLRYELIGCAAGPVVFVLGGISAHRHIAATARFPEKGWLEGLVGTERALNPERFRLLSFDFLGADGQLDVPIDTADQADAIALLLERLGIATLYGFVGYSYGALVGLQFAIRHSERVRRMIVVSGAHRAHPYAAAWRALQRRAVALGQLQCAEHQGLALARQLAMLSYRTPEEFEERFDAAAQVINGRVRVAAEDYLDAVGAQYVACTPVNAYLRLSESIDLHRVDPTQVVVPTVVVAVEGDRLVPLSDLVALIEGLGPCGSLRVLRSPYGHDAFLKEINRIDAILTTALRPIGESI

SEQ ID NO: 20672 - protein, 370 aa, Xylella fastidiosa Ann-1
MTEFIPPGSLFHALSSPFAMKRGGQLHHARIAYETWGRLNASATNAILIMPGLSPNAHAAHHDSNAEPGWWESMLGPGKPIDTDRWFVICVNSLGSCKGSTGPASYNPITQAMYRLDFPALSIEDGANAAIEVVHALGIKQLASLIGNSMGGMTTLAILLLHPDIARSHINISGSAQALPFSIAIRSLQREAIRLDPHWKQGDYDDTHYPESGLRIARKLGVITYRSALEWDGRFGRVRLDSDQTNDTPFGLEFQIENYLESHAHRFVHTFDPNCYLYLSRSMDWFDVAEYANGDILAGLARIRIQRALAIGSHTDILFPIQQQQQIAEGLRRGGTHATFLGLDSPQGHDAFLVDIAGFGPPVKEFLGEL

SEQ ID NO: 20673 - protein, 340 aa, Xylella fastidiosa Ann-1
MRSVNPSFTFCLDMPTPDDDGQIAVRGEIMVPLSMCHAGWVDLRLRYELIGCAAGPVVFVLGGISAHRHIAATARFPEKGWLEGLVGTERALNPERFRLLSFDFLGADGQLDVPIDTADQADAIALLLERLGIATLYGFVGYSYGALVGLQFAIRHSERVRRMIVVSGAHRAHPYAAAWRALQRRAVALGQLQCAEHQGLALARQLAMLSYRTPEEFEERFDVAAQVINGRVRVAAEDYLDAVGAQYVACTPVNAYMRLSESIDLHRVDPTQVVVPTVVVAVEGDRLVPLSDLVALIEGLGPCGSLRVLRSPYGHDAFLKETNRIDAILTTALRPIGESI

SEQ ID NO: 20674 - protein, 394 aa, Magnetococcus sp. MC-1
MTHEPLTASVGIVTPQHVRLFGASTPLQLDGGTLLHSVDVSYETYGTLNQERSNAVLICHALSGNAHAAGYHSKDDKRPGWWDHYIGPGKPFDTNRYFVIASNNLGGCDGTTGPSSIDPATGMPYGLNFPMITIGDIVRVQHALVRQLGIERLMAVVGGSMGGMQALQWALDYPHMVPASVIIAAAPRLTAQNIAFNAVARQAIMADPHFNGGDYYTLPGDPTTKARPESGLALARMMAHITYLSEQGLHERFGRRLQDRDALSYGFETDFAVESYLSYQGSSFVKRFDANSYLYITKAMDYFDPFPDAETTVQRLTGVESHFLVMSFDTDWRFDTSRSKELVRILHRSLKDCTFQEFSSPAGHDAFLLPHPSYEKSLGSFLLRTWQSITGGQA

SEQ ID NO: 20675 - protein, 329 aa, Staphylococcus aureus subsp. aureus Mu50
MFKEERTMTNYTVDTLNLGKFITESGEVIDNLRLRYEHVGYHGQPLVVVCHALTGNHLTYGTDDYPGWWREIIDGGYIPIHDYQFLTFDVIGSPFGSSSPLNDPHFPKKLTLRDIVRANERGIQALGYDKINILIGGSLGGMQAMELLYNQQFEVDKAIILAATSRTSSYSRAFNEIARQAIHLGGKEGLSIARQLGFLTYRSSKSYDERFTPDEVVAYQQHQGNKFKEHFDLNCYLTLLDVLDSHNIDRGRTDVTHIFKNLETKVLTMGFIDDLLYPDDQVRALGERFKYHRHFFVPDNVGHDGFLLNFSTWAPNLYHFLNLKHFKRK

SEQ ID NO: 20676 - protein, 379 aa, Pseudomonas putida KT2440
MSTVFPEDSVGLVVPQTARFDEPLALACGRSLASYELVYETYGTLNASASNAVLICHALSGHHHAAGYHAATDRKPGWWDSCIGPGKPIDTNRFFVVSLNNLGGCNGSTGPSSVNPATGKPYGADFPVLTVEDWVHSQVRLGERLGIQQWAAVVGGSLGGMQALQWTISYPERVRHCVDIASAPKLSAQNIAFNEVARQAILTDPEFHGGSFQDQGVIPKRGLMLARMVGHITYLSDDSMGEKFGRELKSDKLNYDFHSVEFQVESYLRYQGEEFSGRFDANTYLLMTKALDYFDPAATHGGDLAATLAHVTADYCIMSFTTDWRFSPARSREIVDALMAARKNVCYLEIDSPYGHDAFLIPTPRYMQGFSNYMNRIAI

SEQ ID NO: 20677 - protein, 370 aa, Xylella fastidiosa 9a5c
MTEFIPPGSLFHALSSPFPMKRGGQLHRARIAYETWGHLNASATNAILIMPGLSPNAHAAHHDSNAEPGWWESMLGPGKPIDTDRWFVICVNSLGSCKGSTGPASYNPITQAMYRLDFPALSIEDGANAAIEVVHALGIKQLASLIGNSMGGMTALAILLLHPDIARSHINISGSAQALPFSIAIRSLQREAIRLDPHWNQGHYDDTHYPESGLRIARKLGVITYRSALEWDGRFGRVRLDSDQTNDTPFGLEFQIENYLESHAHRFVHTFDPNCYLYLSRSMDWFDVAEYANGDILAGLARIRIQRALAIGSHTDILFPIQQQQQIAEGLRRGGTHATFLGLDSPQGHDAFLVDIAGFGPPVKEFLDEL

SEQ ID NO: 20678 - protein, 345 aa, Xylella fastidiosa 9a5c
MLETAMRSVNPSFTFCLDMPTPDDDGQIAVRGEIMVPLSMCHAGWVDLRLRYELIGCAAGPVVFVLGGISAHRHIAATARFPEKGWLEGLVGTERALNPERFRLLSFDFLGADGQLDVPIDTADQADAIALLLERLGIATLYGFVGYSYGALVGLQFAIRHSERVRRLIVVSGAHRVHPYAAAWRALQRRAVALGQLQCAEHQGLALARQLAMLSYRTPEEFEERFDAAAQVINGRVRVAAEDYLDAVGAQYVACTPVNAYLRLSESIDLHRVDPRQVVVPTVVVAVEGDRLVPLSDLVALIEGLGPCGSLRVLRSPYGHDAFLKETNRIDAILTTALRPIGESI

SEQ ID NO: 20679 - protein, 368 aa, Listeria innocua
MTLQQKELFQKSPLLLENGETLSPVLVGYETYGTLSASRDNCILLEHALTGTAHAAKHFEDDAPGWWDDYIGPGKTIDTDKYFLVCTNVFGGCSGTTGPSSINPKTGEPFRLQFPGFSIKDIIKVQRELLEQLGVTRIVSVIGGSMGGMQATEWAIDYADITDSIINIASPLAAGPDAIGYNLIMRMAILNDPDFNGGNYIGQPEGGLATARMVGMMTYRTSELFSKRFERFTVAESSPAAFSKEHFQIESYLQYQGDTFVERFDANSYLYLTKAIDLFDVTAPAKDDLPAFSKIKIPYLLIGITTDQLFRIHDLRRGYELLKEWDVPVTYHEVASEYGHDAFLVEKEVPKFEPLIRSFLNNLPVKSI

SEQ ID NO: 20680 - protein, 368 aa, Listeria monocytogenes EGD-e
MTLQQKELFQKSPLLLENGETLSPVLVGYETYGTLSASRDNCILLEHALTGTAHAAKHFEDDAPGWWDDYIGPGKTIDTDKYFLVCTNVFGGCSGTTGPSSINPKTGEPFRLQFPGFSIKDIIKVQRELLEQLGVTRIVSVIGGSMGGMQATEWAIDYADITDSIINIASPLAAGPDAIGYNLIMRMAILNDPDFNGGNYVGQPEGGLATARMVGMMTYRTSELFSKRFERFTVAESSPAAFSKEHFQIESYLQYQGDTFVERFDANSYLYLTKAIDLFDVTAPAKDDLPAFSKIKIPYLLIGITTDQLFRIHDLRRGYELLKEWDVPVTYHEVASEYGHDAFLVEKEVPKFEPLIRSFLSNLPVKSI

SEQ ID NO: 20681 - protein, 379 aa, Corynebacterium glutamicum
MPTLAPSGQLEIQAIGDVSTEAGAIITNAEIAYHRWGEYRVDKEGRSNVVLIEHALTGDSNAADWWADLLGPGKAINTDIYCVICTNVIGGCNGSTGPGSMHPDGNFWGNRFPATSIRDQVNAEKQFLDALGITTVAAVVLLGGSMGGARTLEWAAMYPETVGAAAVLAVSARASAWQIGIQSAQIKAIENDHHWHEGNYYESGCNPATGLGAARRIAHLTYRGELEIDERFGTKAQKNENPLGPYRKPDQRFAVESYLDYQADKLVQRFDAGSYVLLTDALNRHDIGRDRGGLNKALESIKVPVLVAGVDTDILYPYHQQEHLSRNLGNLLAMAKIVSPVGHDAFLTESRQMDRIVRNFFSLISPDEDNPSTYIEFYI

SEQ ID NO: 20682 - protein, 322 aa, Staphylococcus epidermidis ATCC 12228
MTNYTVNTLELGEFITESGETIDHLRLRYEHVGLPGQPLVVVCHALTGNHLTYGTDAQPGWWREIIDGGYIPVHDYQFLTFNVIGSPFGSSSKLNDDNFPEHLTLRDIVRAIELGIQALEFKKINILIGGSLGGMQAMELLYNRQFEVEKAIILAATDKTSSYSRAFNEIARQAIHIGGKEGLSIARQLGFLTYRSSKSYDQRFTPDEVVSYQQHQGDKFKEYFDLNCYLTLLDVLDSHHLDRGRDDVDEVFQSLETKVLTMGFIDDLLYPDDQVRALGERFKYHRHFFVPDNVGHDGFLLNFNDWAPNLYHFLNLKQFRRK

SEQ ID NO: 20683 - protein, 382 aa, Mycobacterium leprae
MTISKVPTQKLPAEGEVGLVDIGSLTTESGAVIDDVCIAVQRWGELSPTRDNVVMVLHALTGDSHITGPAGPGHPTPGWWDWIAGPGAPIDTNRWCAIATNVLGGCRGSTGPSSLARDGKPWGSRFPLISIRDQVEADIAALAAMGITKVAAVVGGSMGGARALEWIIGHPDQVRAGLLLAVGVRATADQIGTQTTQIAAIKTDPNWQGGDYYETGRAPENGLTIARRFAHLTYRSEVELDTRFANNNQGNEDPATGGRYAVQSYLEHQGDKLLARFDAGSYVVLTETLNSHDVGRGRGGIGTALRGCPVPVVVGGITSDRLYPLRLQQELAEMLPGCTGLQVVDSTYGHDGFLVESEAVGKLIRQTLELADVGSKEDACSQ

SEQ ID NO: 20684 - protein, 370 aa, Xylella fastidiosa Temecula1
MTEFIPPGSLFHALSSPFAMKRGGQLHHARIAYETWGRLNAGATNAILIMPGLSPNAHAAHHDSNAEPGWWESMLGPGKPIDTDRWFVICVNSLGSCKGSTGPASYNPITQAMYRLDFPALSIEDGANAAIEVVHALGIKQLASLIGNSMGGMTALAILLLHPDIARSHINISGSAQALPFSIAIRSLQREAIRLDPHWKQGHYDDTHYPESGLRIARKLGVITYRSALEWDGRFGRVRLDSDQTNDTPFGLEFQIENYLESHAHRFVHTFDPNCYLYLSRSMDWFDVAEYANGDIIAGLARIRIQRALAIGSHTDILFPIQQQQQIAEGLRRGGTHATFLGLDSPQGHDAFLVDIAGFGPPVKEFLDEL

SEQ ID NO: 20685 - protein, 345 aa, Xylella fastidiosa Temecula1
MLETAMRSVNPSFTFCLDMPTPDDDGQIAVRGEIMVPLSMCHAGWVDLRLRYELIGCAAGPVVFVLGGISAHRHIAATARFPEKGWLEGLVGTERALNPERFRLLSFDFLGADGQLDVPIDTADQADAIALLLERLGIATLYGFVGYSYGALVGLQFAIRHSERVRRMIVVSGAHRAHPYAAAWRALQRRAVALGQLQCAEHQGLALARQLAMLSYRTPEEFEERFDVAAQVINGRVRVAAEDYLDAVGAQYVACTPVNAYMRLSESIDLHRVDPTQVVVPTVVVAVEGDRLVPLSDLVALIEGLGPCGSLRVLRSPYGHDAFLKETNRIDAILTTALRPIGESI

SEQ ID NO: 20686 - protein, 394 aa, Magnetospirillum magnetotacticum
MSLNETVPTVSPNALGLKVELGRDRPIRLDCGVELGPIQVAYQTYGSLNADKSNAILICHALTGDHYVADPHPITAKPGWWSELVGPGRVFDTDRYFLICSNVLGGCMGTTGPMDENQETGQPWGLDFPVITIGDMVKVQARLVDHLGIDQLFCVVGGSMGGMQVLKWAQTYPERVFSAIPIAAAARHSAQNIAFHEVGRQAIMADPDWCDGNYLKEGKRPHRGLAVARMAAHITYLSEPALHQKFGRNLQNRDTVTYGFDADFQVESYLRHQGSTFVDRFDANSYLYITRAMDYFDLAAENGGVLANAFRGTRTRFCVVSFTSDWLFPTSESRAVVHALNAVAANVSFVEIKSDKGHDAFLLDEPEFHATLTGFLDGAAAHRGLPRQTSGAGP

SEQ ID NO: 20687 - protein, 540 aa, Methanosarcina acetivorans C2A
MAVSSGNSSVNSSKKLFSGKKGQSIGIVRSMNYKIPGTFGLESGKTLSGVRVEYEMYGKMNADKSNVILICHALTGDAHAAGFHEGDKKPGWWEIVIGPNKAFDTEKYCVICSNILGGCKGSTGPSSIDPETGKHYGISFPVITVKDMVNAQKKLIEHLGVKQLFAVAGGSMGGMQVLQWTVSYPEMVRKAIAIATTASTTPQQIAFGAIGRKAITDDPKWNGGDYYGKEIPSQGLALARMIGHITYLSDASMQNKFGRLQQDTDKSGIKGTTGTEGKNSSEISSEISSISSEISSELSYDFTPNFQVESYLNYKGDNFTKRFDANSYLYITKAVDYFDLAKNGSLIEGFSGVTAKYLVISISSDWLYPPYQSQEIVSALTANGVDARYEEIRSQHGHDAFLLEEGQLSYLLRSFLSHILVSDVMNRNFYTVSRDETIEHSSKLMVKECVSHLPVISEDGKLEGIVTSWDITKAVACKINELDEIITRDVKYVYEDEKIEHASSIMEKHSISALPVIDSEHRIIGIVTSESISALFGKYD

SEQ ID NO: 20688 - protein, 366 aa, Leptospira interrogans serovar lai str. 56601
MNETGSIGIIETKYAEFKELILNNGSVLSPVVIAYETYGTLSSSKNNAILICHALSGDAHAAGYHSGSDKKPGWWDDYIGPGKSFDTNQYFIICSNVIGGCKGSSGPLSIHPETSTPYGSRFPFVSIQDMVKAQKLLVESLGIEKLFCVAGGSMGGMQALEWSIAYPNSLSNCIVMASTAEHSAMQIAFNEVGRQAILSDPNWKNGLYDENSPRKGLALARMVGHITYLSDDKMREKFGRNPPRGNILSTDFAVGSYLIYQGESFVDRFDANSYIYVTKALDHYSLGKGKELTAALSNATCRFLVVSYSSDWLYPPAQSREIVKSLEAADKRVFYVELQSGEGHDSFLLKNPKQIEILKGFLENPN

SEQ ID NO: 20689 - protein, 328 aa, Streptomyces clavuligerus
MECRIFEIDELPLLDGEVLRDARIGYAMYGTPNADGTNVVLCPSFFGRDHTGYDWLIGAGLPLDTRRYCVVTAGLFGNGVSSSPGNHPSGSRFPLITPQDNVAAQHRLLTEELGVRELALVTGWSMGAAHAYQWAVSHPGMVRRIAPICGAPVSSPHSLVLLSGLAAALSADAGERGRKAAGRVFAGWGTSRSFWARRAHRELGFATREEYLTGFWEQVFLSGPGAADLLTMVRTWENTDVGATPGAGGSVEAALASVTARAVVLPGALDVCFAVEDEKRVADLLPYASLEVIPGVWGHLAGSGGSAADREFIGGALRRLLDSPVDGG

SEQ ID NO: 20690 - protein, 380 aa, Xanthomonas campestris pv. campestris str. ATCC 33913
MTEFIPTGTRFHALPSPLPMKRGGVLHQARVAYETWGTLDADHGNAVLIVTGLSPNAHAAANADNPEPGWWEAMVGPGKPIDTDRWFVVCVNSLGSCKGSTGPASIDPATGAPYRLSFPELSIEDVADAAADVVRALGIAQLACLIGNSMGGMTALALLLRHPGIARSHINISGSAQALPFSIAIRSLQREAIRLDPHWNGGHYDDVQYPESGMRMARKLGVITYRSALEWDGRFGRVRLDSELTAEDPFGLEFQVESYLEGHARRFVRFFDPNCYLYLSRSMDWFDLAEYAPDTRADAAAPESGVLAGLAQIRIARALAIGANTDILFPVQQQEQIAEGLRAGGADAQFLGLDSPQGHDAFLVDFARFGPAVRAFLADC

SEQ ID NO: 20691 - protein, 343 aa, Xanthomonas campestris pv. campestris str. ATCC 33913
MSLVTTASPLTTADTYTPAADSDAPPAVRGELVINLPMRHAGQRELRLRYELVGAEQAPVVFVAGGISAHRHLAASAVFPEKGWVEGLVGAGRALDPASRRLLAFDFLGADGSLDAPIDTADQADAIAALLDALGIARLHGFVGYSYGALVGLQFASRHAARLHTLVAVSGAHRAHPYAAAWRALQRRAVALGQLQCAEHHGLALARQFAMLSYRTPEEFSERFDAPPELINGRVRVAAEDYLDAAGAQYVARTPVNAYLRLSESIDLHRIDPAAVAVPTVVVAVEGDRLVPLADLVSLVEGLGPRGSLRVLRSPFGHDAFLKEIDRIDAILTTALRTTGETA

SEQ ID NO: 20692 - protein, 400 aa, Xanthomonas axonopodis pv. citri str. 306
MTEFIPAGTLYHALPSPFPMKRGGVLHQARVAYETWGTLAADRSNAILIVTGLSPNAHAAANQANPEPGWWEAMLGPGKPIDTARWFVVCVNSLGSCKGSTGPASVNPDTGAPYRLSFPDLSIEDVADAAADVVHALGIAQLACLIGNSMGGMTALALLLRHPGIARSHINISGSAQALPFSIAIRSLQREAIRLDPHWNGGHYDDVRYPESGMRMARKLGVITYRSALEWDGRFGRVRLDSEQAADDPFGLEFQVESYLEGHARRFVRFFDPNCYLYLSRSMDWFDLAEYVEERPVAGSAIDNARADARPASAKPQTGVSTADTVLAGLARIRIARALAIGANTDILFPVQQQEQIADGLRAGGADAQFIGLDSPQGHDAFLVDFARFGPAVSDFLQDC

SEQ ID NO: 20693 - protein, 343 aa, Xanthomonas axonopodis pv. citri str. 306
MSLVNTASPSTNDFVDTPASSDDGITAVRGELVIALPMRHAGMRELRLRYELIGAANAPVVFVAGGISAHRHLAASNLFPEKGWVDGLVGSGRALDPASRRLLAFDFLGADGILDAPIDTADQADAIAALLDALGIGRLHGFVGYSYGALVGLQFAIRHEARVGTLVAVSGAHRAHPYAAAWRALQRRAVALGQLQCAEQHGLALARQFAMLSYRTPEEFSERFDAPPEVINGRVRVAAEDYLDAAGAQYVARTPVNAYLRLSESIDLHRIDPAQVRVPTVVVAVEGDRLVPLADMVSLVEGLGPRGSLRVLRSPYGHDAFLKEIDRIDAILTTALRSTGETP

SEQ ID NO: 20694 - protein, 382 aa, Caulobacter crescentus CB15
MAALDPITPAGGGTWRFPANEPLRLDSGGVIEGLEIAYQTYGQLNADKSNAVLICHALTGDQHVASPHPTTGKPGWWQRLVGPGKPLDPARHFIICSNVIGGCMGSTGPASINPATGKTYGLSFPVITIADMVRAQAMLVSALGVETLFAVVGGSMGGMQVQQWAVDYPERMFSAVVLASASRHSAQNIAFHEVGRQAIMADPDWRGGAYAEHGVRPEKGLAVARMAAHITYLSEPALQRKFGRELQRDGLSWGFDADFQVESYLRHQGSSFVDRFDANSYLYITRAMDYFDIAASHGGVLAKAFTRARNVRFCVLSFSSDWLYPTAENRHLVRALTAAGARAAFAEIESDKGHDAFLLDEPVMDAALEGFLASAERDRGLV

SEQ ID NO: 20695 - protein, 356 aa, Chlorobium tepidum TLS
MTRMDHRSIISDTTQYFESNEPLQLELGGELPGVRVAYRTWGTLNAEKSNVILVCHALTGNADADSWWCGMFGEGRAFDETRDFIVCSNVLGSCYGTTGPMSVNPLSGRHYGPDFPRITIRDMVNVQRLLLRSLGIDRIRLIVGASLGGMQVLEWGAMYPEMAGALMPMGVSGRHSAWCIAQSEAQRQAIAADAEWQDGWYDPEVQPRKGLAAARMMAMCTYRCFENYQQRFGRKQREDGLFEAESYVRHQGDKLVGRFDANTYITLTRAMDMHDLGRGRDSYEAALGALKMPVEILSIDSDVLYPRQEQEELARLIPGSRLLFLDEPYGHDAFLIDTETVSRMVCEFKRQLIVDN

SEQ ID NO: 20696 - protein, 448 aa, Corynebacterium efficiens YS-314
MPCRWGRVVARAPQAGHRYIQSHPAGVLHERPPETGLDRAVHINLARVPTPGAPTQRTSTMLPQSEQAEFPMPQLAPEGQLATQQIGDIRTEAGALIPDVTIAYHRWGEYEENADGSTNVVLIEHALTGDSNAADWWCDLVGPGKAIDTDLYCVICTNVLGGCNGSTGPSSQHPDGGFWGSRFPATDIRDQVKAEKQFLDAIGITRVKAVLGGSMGGARTLEWAAMFPDVVDAAAVLAVSARASAWQIGIQSAQIMAIENDHHWHEGNYYESGCNPSKGLGAARRIAHLTYRGELEIDERFGTQPQKGENPLGPYRRPDQRFAVESYLDHQADKLVKRFDAGSYVTLTDALNRHDIGRGRGGLNKALESITIPVMVAGVDTDILYPYHQQEHLSRNLGNLLAMAKIVSPVGHDAFLTESRQMDRILRNFFSLISPDEDNPSTYIEFFI

SEQ ID NO: 20697 - protein, 322 aa, Staphylococcus aureus subsp. aureus MW2
MTNYTVDTLNLGKFITESGEVIDNLRLRYEHVGYHGQPLVVVCHALTGNHLTYGTDDYPGWWREIIDGGYIPIHDYQFLTFDVIGSPFGSSSPLNDPHFPKKLTLRDIVRANERGIQALGYDKINILIGGSLGGMQAMELLYNQQFEVDKAIILAATSRTSSYSRAFNEIARQAIHLGGKEGLSIARQLGFLTYRSSKSYDERFTPDEVVAYQQHQGNKFKEHFDLNCYLTLLDVLDSHNIDRGRTDVTHVFKNLETKVLTMGFIDDLLYPDDQVRALGERFKYHRHFFVPDNVGHDGFLLNFSTWAPNLYHFLNLKHFKRK

SEQ ID NO: 20698 - protein, 377 aa, Corynebacterium glutamicum ATCC 13032
MPTLAPSGQLEIQAIGDVSTEAGAIITNAEIAYHRWGEYRVDKEGRSNVVLIEHALTGDSNAADWWADLLGPGKAINTDIYCVICTNVIGGCNGSTGPGSMHPDGNFWGNRFPATSIRDQVNAEKQFLDALGITTVAAVLGGSMGGARTLEWAAMYPETVGAAAVLAVSARASAWQIGIQSAQIKAIENDHHWHEGNYYESGCNPATGLGAARRIAHLTYRGELEIDERFGTKAQKNENPLGPYRKPDQRFAVESYLDYQADKLVQRFDAGSYVLLTDALNRHDIGRDRGGLNKALESIKVPVLVAGVDTDILYPYHQQEHLSRNLGNLLAMAKIVSPVGHDAFLTESRQMDRIVRNFFSLISPDEDNPSTYIEFYI

SEQ ID NO: 20699 - protein, 349 aa, Corynebacterium glutamicum ATCC 13032
MLDNSFYTAEVQGPYETASIGRLELEEGGVIEDCWLAYATAGTLNEDKSNAILIPTWYSGTHQTWFQQYIGTDHALDPSKYFIISINQIGNGLSVSPANTADDSISMSKFPNVRIGDDVVAQDRLLRQEFGITELFAVVGGSMGAQQTYEWIVRFPDQVHRAAPIAGTAKNTPHDFIFTQTLNETVEADPGFNGGEYSSHEEVADGLRRQSHLWAAMGFSTEFWKQEAWRRLGLESKESVLADFLDPLFMSMDPNTLLNNAWKWQHGDVSRHTGGDLAAALGRVKAKTFVMPISEDMFFPVRDCAAEQALIPGSELRVIEDIAGHLGLFNVSENYIPQIDKNLKELFES

SEQ ID NO: 20700 - protein, 379 aa, Thermobifida fusca
MSHDTTPPLPATGAWREGDPPGDRRWVELSEPLPLETGGELPGVRLAYETWGSLNEDRSNAVLVLHALTGDSHVVGPEGPGHPSPGWWEGIIGPGLALDTDRYFVVAPNVLGGCQGSTGPSSTAPDGRPWGSRFPRITIRDTVRAEFALLREFGIHSWAAVLGGSMGGMRALEWAATYPERVRRLLLLASPAASSAQQIAWAAPQLHAIRSDPYWHGGDYYDRPGPGPVTGMGIARRIAHITYRGATEFDERFGRNPQDGEDPMAGGRFAVESYLDHHAVKLARRFDAGSYVVLTQAMNTHDVGRGRGGVAQALRRVTARTMVAGVSSDFLYPLAQQQELADGIPGADEVRVIESASGHDGFLTEINQVSVLIKELLAQ

SEQ ID NO: 20701 - protein, 381 aa, Microbulbifer degradans 2-40
MPAPFPEDSVGLVTPQLFHFDQPLALANGRSLDSYELMVETYGELNAEKSNGILICHALSGSHHVAGYHSEDDKKPGWWEHYVGPGKPIDTNRFYVVCMNNIGGCHGSTGPQSINPATGKPWGSSFPFLRVRDWVETQVRLADRLGINQWAAVVGGSLGGMQAMRWALEHPNRLRHCVVIASAMNLTAQNIAFNETARQAIQSDPNFFNGDYLAQSTLPKRGLSVARMIGHITYLSDDGMGKKFGRELRSGSFDRGNDQLVEFQIESYLRYQGSTFSEVFDANTYILMTRALDYFDLAREYNGDAAEAFKQASCKFLVVSFTSDWRFAPERSREIVTALMRANRDVVYGEIDSVHGHDAFLVPNQLRYWELFSAYMNRVEV

SEQ ID NO: 20702 - protein, 357 aa, Haemophilus somnus 129PT
MAVQTLTLFTDYPLMLVQGGQLKNIEVAYQTYGTLNKDKSNVILICHALTGDAEPYFADKSQNGWWQSFMGEGLALDTSKYFFICSNVLGGCKGTTGPSSINPDTNKPYGSQFPHIIVQDMVKVQRELLNTLDIAKLYAVIGGSFGGMQATQWAIDYPDCVSRVVNLCSSLYLSAEAIGFNHVMRQAIINDPHFNNGDYYDRLPPSKGLSIARMLAMLTYRTDFQLEKAFGRAKKAESLYWGDYFQVESYLTYQGKKFLERFDANSYVHLLRALDLYDPAWNYKDIKAALSRIKARYTLVAVTTDQLFKLTDLHKSKALLEQSGVDLNYYEFPSDYGHDAFLVDYDFFESKIMTGLA

SEQ ID NO: 20703 - protein, 379 aa, Pseudomonas syringae pv. syringae B728a
MPTVFPHDSVGLVTPQTAHFSEPLALACGRSLPAYDLIYETYGQLNAARSNAVLICHALSGHHHAAGFHSADDRKPGWWDSCIGPGKPIDTTKFFVVSLNNLGGCNGSTGPSSIDPDTGKPFGANFPVVTVEDWVNSQARLADLLGIDTWAAVIGGSLGGMQALQWTISYPNRVRHCLAIASAPKLSAQNIAFNEVARQAILTDPEFHGGSFQERGVIPKRGLMLARMVGHITYLSDDSMGEKFGRGLKSEKLNYDFHSVEFQVESYLRYQGEEFSGRFDANTYLLMTKALDYFDPAANFNDDLAKTFANATARFCVMSFTTDWRFSPARSRELVDALMAARKDVCYLEIDAPQGHDAFLIPIPRYLQAFGNYMNRISL

SEQ ID NO: 20704 - protein, 356 aa, Pseudomonas syringae pv. syringae B728a
MHRLISRPTIGLLFSMALLGSAVSAAPLPAATEGDWVAPQFTFHTGEKLANLKLHYITLGNPKNPAILFLHGTYRPGSDMLSKDFGGELFGPGQPLDASKYYIISTDGIGVGQSSKPSDGLRTRFPAYNYNDMVKAQYRLVTEGLGIKHLRLIIGNSMGGMQTWMWGQNWPQMMDALVPMASQPTEMSSRNWMMRRLLVESIKQDPAWNNGNYSAQPPSLRLANAMFSVATSGGTLAYQATAPTRAQADKLVDERLSAAQTGDANDFIYQWQSSADFNAAPGLKKIQAPVLAINSADDERIPPETGLMEASMKELKHARLLLIPASADTRGHGTTSMAKFYSKELGQFMRETEKAK

SEQ ID NO: 20705 - protein, 379 aa, Pseudomonas fluorescens PfO-1
MPAAFPPDSVGLVTPQTAHFSEPLALACGRSLADYDLIYETYGTLNAQASNAVLICHALSGHHHAAGYHSVDDRKPGWWDSCIGPGKPIDTNKFFVVSLNNLGGCNGSTGPSSLNPETGKPFGADFPVLTVEDWVHSQARLADLLGIGQWAAVIGGSLGGMQALQWTITYPDRVRHCLAIASAPKLSAQNIAFNEVARQAILTDPEFHGGSFQEHGVIPKRGLMLARMVGHITYLSDDSMGEKFGRGLKSEKLNYDFHSVEFQVESYLRYQGEEFSGRFDANTYLLMTKALDYFDPAANFNDNLAKTFEGAKAKFCVMSFTTDWRFSPARSRELVDALMAARKDVSYLEIDAPQGHDAFLIPIPRYLQAFGNYMNRITL

SEQ ID NO: 20706 - protein, 379 aa, Pseudomonas aeruginosa PAO1
MPTVFPDDSVGLVSPQTLHFNEPLELTSGKSLAEYDLVIETYGELNATQSNAVLICHALSGHHHAAGYHSVDERKPGWWDSCIGPGKPIDTRKFFVVALNNLGGCNGSSGPASINPATGKVYGADFPMVTVEDWVHSQARLADRLGIRQWAAVVGGSLGGMQALQWTISYPERVRHCLCIASAPKLSAQNIAFNEVARQAILSDPEFLGGYFQEQGVIPKRGLKLARMVGHITYLSDDAMGAKFGRVLKTEKLNYDLHSVEFQVESYLRYQGEEFSTRFDANTYLLMTKALDYFDPAAAHGDDLVRTLEGVEADFCLMSFTTDWRFSPARSREIVDALIAAKKNVSYLEIDAPQGHDAFLMPIPRYLQAFSGYMNRISV

SEQ ID NO: 20707 - protein, 457 aa, Methanosarcina barkeri
VPFIILKQEALRYSFPILTIADMVNAQKKLVEHLGVKQLFAVAGGSMGGMQVLQWTVSYPEMVKKAIAIATTASTTPQQIAFGAIGRKAITDDPKWNGGNYYGKKTPAQGLALARMIGHITYLSDASMQKKFGRDKQEKVGPDMPKISSKVSSEVSPAASSKTSSETSPETSSKTSSKTSSETSSKTSSKTSSKTSSKTSSETSSETSSKTFSETFPDRSSHFQVESYLNHQGDTFTKRFDANSYLYITKAVDFFDLSKNGSLIEGLSVVTAKYLVISITSDWLYPPYQSQEIVSALTANGVDAKYEEIRSQYGHDAFLLEEGQLNYLIRGFLSQILVSDIMYRNFYSVSRNETIENASTLMVKKKVNHLPVVSEDGKLEGIVTSWDITKAVACKITELDEIITRDVKYVFSGDKIETASSIMEDFSISALPVIDSENRVIGMVTSESISALIGKFS

SEQ ID NO: 20708 - protein, 379 aa, Pseudomonas syringae pv. tomato str. DC3000
MPTVFPHDSVGLVTPQTAHFSEPLALACGRSLPAYDLIYETYGQLNAARSNAVLICHALSGHHHAAGFHSADDRKPGWWDSCIGPGKPIDTDKFFVVSLNNLGGCNGSTGPSSIDPDTGKPFGANFPVVTVEDWVNSQARLADVLNIDTWAAVIGGSLGGMQALQWTISYPDRVRHCLAIASAPKLSAQNIAFNEVARQAILTDPEFHGGSFQERGVIPKRGLMLARMVGHITYLSDDSMGEKFGRGLKSEKLNYDFHSVEFQVESYLRYQGEEFSGRFDANTYLLMTKALDYFDPAANFNDDLAKTFANATARFCVMSFTTDWRFSPARSRELVDALMAARKDVCYLEIDAPQGHDAFLIPIPRYLQAFGNYMNRISL

SEQ ID NO: 20709 - protein, 400 aa, Bradyrhizobium japonicum USDA 110
MVGVTSISSPAISADERSHEVDHPSSLVAHFGADQPLPLDCGIDLTPFQIAYQTYGELNADRSNAILICHALTGDQHVANVHPVTGKPGWWETLVGAGRPLDPSQYFIICANVIGGCMGSTGPASINPATGKVWGLDFPVITIPDMVRAQAMLIDRLGIDTLFAVVGGSMGGMQVLQWTAAYPERVYSALAIACSTRHSAQNIAFHELGRQAVMADPDWHNGGYADRGIHPHRGLAVARMAAHITYLSDAALHRKFGRRMQDRDLPTFSFDADFQVESYLRYQGSSFVERFDANSYLYLTRAMDYFDIAGDHGGVLAKAFAGIKTRFCVVSFTSDWLFPTSESRALVHALNASSARVSFAEIETDRGHDAFLLDVPEFFDIARAFLESAGKARGLNGRGG

SEQ ID NO: 20710 - protein, 356 aa, Bradyrhizobium japonicum USDA 110
MHRHFSGAFCDRVSGVERMTAQRDYETFEAGDVTLQSGAIFPSMTLAYKTYGTLSPAKDNVILYPTSFSAQHYDTEWLIGSGGVLDPERYFIIIPNLFGNGLSSSPSNTAGPFPEPTYHDAIAVQHRLLTGRFGISKLALVYGWSMGGMQAYHWAASHPDMVERAAVVCGSARCAPYNHVFLESVKAALTGDPAFRNGRFVEKPTVGYRAMGRVYAGWAMSHGFYRDELWREAGFSSLEDYLVRGWDATFARRDANDLLAQIGIWQSGDISRCAAFGGDLDRALAAIKAHMLLMPGATDRYFDVRDNEDELGRLVNAKSAVLHPIPSLHGHRAGNPVNNPPDQAFIRAEIAQLLSK

SEQ ID NO: 20711 - protein, 353 aa, Bradyrhizobium japonicum USDA 110
MKASCAALSAILLSISAAAMAADYPAPKQADWIARDFKFHTGDVMPELRLHYTTVGEPSGQPVLVLHGTGGSGASMLTPSFAGELFGAGQPLDAAKYYIIIPDGIGHGKSSKPSDGMKTGFPKYDYDDMVEAQYRLVTEGLGVKHLRLVIGNSMGGMHTWLWGEKYPKAMDALIPMASQPTEMASRNWMLRRIMLDTIRNDPDYNGGNYSSQPRMMKYAVTAYGIASIGGTLAYQSQAPTAAKADKIVDERLATPITADANDFVYQWESSHDYNAGEKLEQIEASLLLINSADDERNPPETGLTDAAMKQVKNGRLYLIPASTETRGHGTTGNAKFYSEQVRQLLQTAPQRTM

SEQ ID NO: 20712 - protein, 374 aa, Bacillus cereus ATCC 14579
MQIVKKEKFVLKGFTFENGREIPVQMGYETYGTLNRERSNVILVCHYFSATSHAAGKYTVHDEESGWWDGLIGPGKAIDTNKYFVICTDNLCNVQVRNPYVITTGPKSINPETGEEYAMDFPVFTFLDVARMQYELIKGMGISRLHAVIGPSVGGMIAQQWAVHYPHMVERMIGVITNPQNPIITSVNVAQNAIEAIQLDPSWKGGKYGEEQPIKGLHLANRMMFMNAFDEHFYEMAFPRNSIEIEPYEKFSTLTSFEKEINKATYRSIELVDANSWMYTAKAVLLHDIAHGFSSLEESLSNIEANVLMIPCKQDLLQPSRYNYKMVDILQKQGKYAEVYEIESINGHMAGAFDIHLFEKKVYEFLNRKVSSFV

SEQ ID NO: 20713 - protein, 109 aa, Saccharomyces paradoxus
NNFPIAYKTWGTLNEAADNVLVICHALTGSADVADWWGPLLGNNLAFGPSRFFIICLNSMGSPYGSFSPLTINEETGVRYGPEFPLCTVRDDVKAHRIVLDSLGVKSIA

SEQ ID NO: 20714 - protein, 380 aa, Thermus thermophilus
MSEIALEAWGEHEALLLKPPRSPLSIPPPKPRTAVLFPRREGFYTELGGYLPEVRLRFETYGTLSRRRDNAVLVFHALTGSAHLAGTYDEETFRSLSPLEQAFGREGWWDSLVGPGRILDPALYYVVSANHLGSCYGSTGPLSLDPHTGRPYGRDFPPLTIRDLARAQARLLDHLGVEKAIVIGGSLGGMVALEFALMYPERVKKLVVLAAPARHGPWARAFNHLSRQAILQDPEYQKGNPAPKGMALARGIAMMSYRAPEGFEARWGAEPELGEIHLDYQGEKFLRRFHAESYLVLSRAMDNHDVGRGRGGVEEALKRLRAIPSLFVGIDTDLLYPAWEVRQAAKAAGARYREIKSPHGHDAFLIETDQVEEILDAFLP

SEQ ID NO: 20715 - protein, 369 aa, Geobacter metallireducens
MSVGIVQEQSVTFDTELRLESGRILGPITLAYETYGELNADRSNAILVAHAWTGNAHLAGKNSEEDTKPGWWDAIVGPGRLLDTDRCFVICSNVIGSCYGSTGPASINPKTGKRYNLTFPVITVRDMVRAQALLLDHLGIDRLLTVLGGSMGGMQALEWATQFPDRIRSAIALATTSRPSPQAISLNAVARWAIFNDPTWKKGEYRKNPKDGLALARGIGHITFLSDESMWQKFGRRFNARDGLFDFFGQFEVERYLSYNGYNFVDRFDTNSFLYLAKALDLYDTAWGYESLEEAFSRVKAPIQFFAFTSDWLYPPYQTEEMATILRSLGKPVEYHLIESAYGHDAFLLEHETFAPMVREFLDKVERSE

SEQ ID NO: 20716 - protein, 379 aa, Leptospira meyeri
MPTSEQNEFSHGSVGVVYTQSIRFESLTLEGGETITPLEIAYETYGTLNEKKDNAILVCHALSGDAHAAGFHEGDKRPGWWDYYIGPGKSFDTNRYFIISSNVIGGCKGSSGPLTINGKNGKPFQSTFPFVSIGDMVNAQEKLISHFGIHKLFAVAGGSMGGMQALQWSVAYPDRLKNCIVMASSSEHSAQQIAFNEVGRQAILSDPNWNQGLYTQENRPSKGLALARMMGHITYLSDEMMREKFGRKPPKGNIQSTDFAVGSYLIYQGESFVDRFDANSYIYVTKALDHFSLGTGKELTKVLAKVRCRFLVVAYTSDWLYPPYQSEEIVKSLEVNAVPVSFVELNNPAGRHDSFLLPSEQQDSILRDFLSSTDEGVFL

SEQ ID NO: 20717 - protein, 358 aa, Pseudomonas putida
MSTVFPEDSVGLVVRQTSRFDEPLALACGRSLASYELVYETYGTLNASASNAVLICHALSGHHHAAGYHAATDRKPGWWDSCIGPGKPIDTNRFFVVSLNNLGGCNGSTGPSSVNPATGKPYGAEFPVLTVEDWVHSQARLADRLGIQQWAAIVGGSLGGMQALQWTMTYPERVRHCVDIASAPKLSAQNIAFNEVARQAILTDPEYRRGSFPGPGVIPKRGLMLARMVGHITYLSDDSMGEKFGRELKATSSTTTSTASSSRSKATCAIRARSFPAVSTPTPTLMTKALDYFDPAATHGGDLAATLAHVTADYCICRSPPTALLSGPFARDRRRADGRAQERLLPGDRFALRARCIS

SEQ ID NO: 20718 - protein, 403 aa, Ralstonia solanacearum
MTELQVDPAASADPAAAADTPRHPAATLPPDSVGLVVPERMHFAEPLPLRNGSQLVGYDLMVETYGTLNAERSNAVLICHALNASHHVAGVHAEGEVGWWDNMVGPGKPVDTNRFFVIGVNNLGSCFGSTGPMSPHPQTGQPYGARFPVVTVEDWVNAQARVADRFGIRQFAAVMGGSLGGMQALAWSLMYPERVRHCVVVASTPKLSAQNIAFNEVARSAILSDPDFHGGDYYAHNVKPKRGLRVARMIGHITYLSDEDMAEKFGRELKAEDIRFSFDVEFQVESYLRYQGDKFAEYFDANTYLLITRALDYFDPALAYEGSLTRAVAHTRASYLVVSFTTDWRFAPARSRELVKALLDNKRPVTYGEIDAPHGHDAFLLEDARYHALVRAYYERIAQEIGA

SEQ ID NO: 20719 - protein, 363 aa, Azotobacter vinelandii
MLHFSEPLTLACGRSLSDYELVYETYGELNAARSNAVLVCHALSGHHHAAGYHSPEDRKPGWWDSCIGPGKPIDTRRFFVVALNNLGGCNGSTGPGSLNPATARPYGADFPVVTVEDWVHSQARLADALGIQQWAAVIGGSLGGMQALQWTISYPERVRHCLAIASAPKLSAQNIAFNEVARQAILSDPEFHGGHFQEHGVIPRRGLMLARMVGHITYLSDDAMGEKFGRELKTDQLNYDFHSVEFQVESYLRYQGEEFSGRFDANTYLLMTKALDYFDPAAAHGDDLAKTLAVARADFCLMSFTTDWRFSPARSREIVDALIAAGKNVSYLEIDAPQGHDAFLMPIPRYLQGFASYMNRIAV

SEQ ID NO: 20720 - protein, 389 aa, Mesorhizobium loti
MAALRAGKTNNEADQPSSPVLRFGADKPLKLDAGTLLSPFQIAYQTYGTLNDARSNAILVCHALTGDQHVANTNPVTGKPGWWEVLIGPGRIIDTNRFFVICSNVIGGCLGSTGPASTNPATGKPYGLDLPVITIRDMVRAQQMLIDHFGIEKLFCVLGGSMGGMQVLEWASSYPERVFSALPIATGARHSSQNIAFHEVGRQAVMADPDWHGGKYFENGKRPEKGLAVARMAAHITYLSEAALHRKFGRNLQDREALTFGFDADFQIESYLRHQGMTFVDRFDANSYLYMTRSMDYFDLAADHGGRLADAFAGTKTRFCLVSFTSDWLFPTEESRSIVHALNAAGASVSFVEIETDRGHDAFLLDEPELFAAINGFIGSAARARGLSA

SEQ ID NO: 20721 - protein, 199 aa, Triticum aestivum
  unsure (1)..(199): unsure at all Xaa locations
KYQXMTDIKNYSLGNFTPQNGSVLPRAWISYKTFGDPSLPAVLYPSWFSGAISDNEWLIGNDKTLSPEKYFIIITALFGNGQSTSPSNSDITPFPDVSFYDNVKAQHQLMTHLGIKHLRAVLGWSMGAAQSFQWATQYPDFMDICVPFCGSARTSLHNQVFLEGVKSALLVSKDVLSPRHTARETGPXKKRRRXESFWX

SEQ ID NO: 20722 - protein, 504 aa, Schizosaccharomyces pombe
MLRASSKRLQLSWQVFRRFQSSNPQLSFPCVDQAQERSRQFEQSLQKQQACPNSVDPSASITSPSLSSGPEPVYGKIVSGFKKFYHNKPFLCDHGGILPKFEIAYETWGTLNKDHSNAILLHTGLSASSHAHSHPENTAPGWWEQFIGPGKDVDTNKFFVICTNVLGSCYGSTGPSSVDPGDGKHYATRFPIITVNDMIRAQLLLLDHLKIEKLYASVGSSLGGMQSLTLGALAPHRVGRIASISGGARSHPYSIALRFTQRQILMNDPYWNRGFYYDGVPPHTGMKLAREVATISYRSGPEWEQRFGNRRADPSVSPAFCPDFLIETYLDHAGEKFCLQYDPNSLLYISKAMDMHDMSASHQRSLSENRKKNQHKLDKYLSADVSAEEIIKLNEDTSVLPDVPYQEIANEDRAPEPDPETNLIAGLAPLKDTPVMVMGVESDNLMPVECQRETARCLEKAGNKQVVYHELDANESFYGHDTFLIYRKDLDLVGGKLKKFLELS

SEQ ID NO: 20723 - protein, 149 aa, Saccharomyces bayanus
RIVQVPELVLESGVVLNNFPIAYKTWGTLNEACDNVLVICHALTGSADVADWWGPLLGNDLAFDPSRFFIICLNSMGSPYGSFSPLTINEQTGTRYGPEFPLCTVRDDVRAHRIVLDSLGVKSIACVIGGSMGGMLSLEWTAMYGNEYV

SEQ ID NO: 20724 - protein, 142 aa, Saccharomyces bayanus
  unsure (1)..(142): unsure at all Xaa locations
VQVPELVLESGVVXNNFPIAYKTWGTLNEACDNVLVICHALTGSADVADWWGPLLGNDLAFDPSRFFIICLNSMGSPYGSFSPLTINEQTGTRYGPEFPLCTVRDDVRAHRIVLDSLGVKSIACVIGGSMGGMLSLEWTAMY

SEQ ID NO: 20725 - protein, 525 aa, Neurospora crassa
MRPQKHIAASLRRVSGALSHASYSPATSQSSRTAAVAGLRLSRAQPQQQQQQRCLHGQAPRRSGASNPAMAFPCLDALETRSETLKKRSDASGPEPSYVAGATQTFHCDEPLLLDWGGMLPEFDIAYESWGEMNADKSNVILLHTGLSASSHAHSTSANPQPGWWERFIGPGLALDTDKYHIICTNVIGGCYGSTGPSSIDPADGQRYATRFPILTLEDMVRAQFRLLDNLGVNKLYASVGSSMGGMQSLAAGVLFPERVGRIISISGCARSHPYSIAMRHTQRQVLMMDPNWNRGFYYDNVPPHAGMKLAREIATVTYRSGPEWELRFGRRRADPSKPPALCPDFLIETYLDHAGEKFCLTYDPNSLLYVSKAMDLFDLGHAGQKAAASRRAERLDSLHKGVYASNENVSCSLTLPDKPYEEQPESAGSADIDTKLATQSDSKPPEDLIKGLSALRDHPALVMGVASDILFPAWQQREIADALRLAGNRNVAHYELSEEQSMFGHDTFLLDVKNVGGAIKNFLQ

SEQ ID NO: 20726 - protein, 401 aa, Halobacterium sp. NRC-1
MAAALAVIAVHNTVAKNYYQVCTDGGPMPTTELDGFTFACGDTVDSLTVAYRTYGDYTGSNAVLVCHALTGSQHVRGRADGDDRGWWPDIVGPGRPIDTTEYFVVCANVPGSCHGTDGPPADGPGGDPWGTAFPPVTVPDWTRCQRRLLDTLGVDRLHAVVGGSVGGMNALDWARRYPDDVHRIAAVATAPRLDAQCLGLNAIARRAIRGDPNWNDGDYYGGAHPDRGLALARQLGHVMYLSKASMADKFGRRTATTDTALPADPAAEFFATRDVESYLDYQADTFVARFDANSYLYLLRAMDAYDLAAGRPSVADALAAFDGDALVLSFTGDWHFTAAQSATVADAFRAGGAAGVAHHVVDSDYGHDAFLVDSAAVGPPLADFLAAGTDGAAVTDATGGV

SEQ ID NO: 20727 - protein, 358 aa, Haemophilus influenzae Rd
MSVQNVVLFDTQPLTLMLGGKLSHINVAYQTYGTLNAEKNNAVLICHALTGDAEPYFDDGRDGWWQNFMGAGLALDTDRYFFISSNVLGGCKGTTGPSSINPQTGKPYGSQFPNIVVQDIVKVQKALLDHLGISHLKAIIGGSFGGMQANQWAIDYPDFMDNIVNLCSSIYFSAEAIGFNHVMRQAVINDPNFNGGDYYEGTPPDQGLSIARMLGMLTYRTDLQLAKAFGRATKSDGSFWGDYFQVESYLSYQGKKFLERFDANSYLHLLRALDMYDPSLGYDNVKEALSRIKARYTLVSVTTDQLFKPIDLYKSKQLLEQSGVDLHFYEFPSDYGHDAFLVDYDQFEKRIRDGLAGN

SEQ ID NO: 20728 - protein, 360 aa, Pasteurella multocida
MAVQKVKLFTEAPFTLSLGGTLQDIEIAYQTYGELNKEKTNAILICHALTGDAEPYFADHSQRGWWQTFMGEGLALDTSQYFFICSNVLGGCKGTTGPSSINPKTNKPYGSQFPNIIVQDIVALQRALLTHLNIPRLHAVIGGSFGGMQATQWAIDYPDDVSNVINLCSSLLFGAEAIGFNHVMRQAVINDPNFNGGDYYDSQPPEKGLAIARMLGMLTYRTDLQLTKAFGRATKAETEFWGDYFQVESYLSYQGKKFLARFDANSYLHLLRALDLYDPGFQYESLSAALARIKARYTLVAVENDQLFKLTELQKSKKLLEESGVDLVYYQFSSDYGHDAFLVDYAFFEKKIRLALANQD

SEQ ID NO: 20729 - protein, 379 aa, Mycobacterium tuberculosis CDC1551
MTISDVPTQTLPAEGEIGLIDVGSLQLESGAVIDDVCIAVQRWGKLSPARDNVVVVLHALTGDSHITGPAGPGHPTPGWWDGVAGPSAPIDTTRWCAVATNVLGGCRGSTGPSSLARDGKPWGSRFPLISIRDQVQADVAALAALGITEVAAVVGGSMGGARALEWVVGYPDRVRAGLLLAVGARATADQIGTQTTQIAAIKADPDWQSGDYHETGRAPDAGLRLARRFAHLTYRGEIELDTRFANHNQGNEDPTAGGRYAVQSYLEHQGDKLLSRFDAGSYVILTEALNSHDVGRGRGGVSAALRACPVPVVVGGITSDRLYPLRLQQELADLLPGCAGLRVVESVYGHDGFLVETEAVGELIRQTLGLADREGACRR

SEQ ID NO: 20730 - protein, 379 aa, Mycobacterium tuberculosis H37Rv
MTISDVPTQTLPAEGEIGLIDVGSLQLESGAVIDDVCIAVQRWGKLSPARDNVVVVLHALTGDSHITGPAGPGHPTPGWWDGVAGPGAPIDTTRWCAVATNVLGGCRGSTGPSSLARDGKPWGSRFPLISIRDQVQADVAALAALGITEVAAVVGGSMGGARALEWVVGYPDRVRAGLLLAVGARATADQIGTQTTQIAAIKADPDWQSGDYHETGRAPDAGLRLARRFAHLTYRGEIELDTRFANHNQGNEDPTAGGRYAVQSYLEHQGDKLLSRFDAGSYVILTEALNSHDVGRGRGGVSAALRACPVPVVVGGITSDRLYPLRLQQELADLLPGCAGLRVVESVYGHDGFLVETEAVGELIRQTLGLADREGACRR

SEQ ID NO: 20731 - protein, 109 aa, Saccharomyces sp. IFO 1802
SNFPIAYKTWGTLNKAGDNVLVISHALTGSADVADWWGPLLGNDLAFDPSRFFIICLNSMGSPYGSFSPLTINEETGARYGPEFPLCTVRDDVRAHRIVLDSLGVKSIA

SEQ ID NO: 20732 - protein, 109 aa, Saccharomyces sp. CID1
SNFPIAYKTWGTLNEACDNVLVICHALTGSADVADWWGPLLGNDLAFDPSRFFIICLNSMGSPYGSFSPLTINEQTGTRYGPEFPLCTVRDDVRAHRIVLDSLGVKSIA

SEQ ID NO: 20733 - protein, 109 aa, Saccharomyces sp. CID1
NNFPIAYKTWGTLNEAGDNVLVICHALTGSADVADWWGPLLGNDLAFDPSRFFIICLNSMGSPYGSFSPLTINEETGVRYGPEFPLCTVRDDVRAHRIVLDSLGVKSIA

SEQ ID NO: 20734 - protein, 377 aa, Nitrosomonas europaea
MSTQDSDSIGIVSARRAHFDTPLSLKSGAVLDSYELVYETYGELNADRSNAVLICHALSGNHHVAGVYADNPKNTGWWNNMIGPGKPVDTRKFFVIGINNLGGCHGSTGPISINDKTGKRFGPDFPLVTTADWAKTYVRFADQFSIDCFAAVIGGSLGGMSAMQLALDAPERVRHAIVVAASARLTAQNIAFNDVARQAILTDPDFHDGDYYSHGTHPRRGLRLARMLGHITYLSDDSMASKFGRELRNGSLAFNYDVEFQIESYLHHQGDKFADLFDANTYLLMTKALDYFDPAQDYDGNLSAAFARAQADFLVLSFTSDWRFSPERSRDIVKALLDNKLNVSYAEIPSSYGHDSFLMQDDYYHQLIRAYMNNIAL

SEQ ID NO: 20735 - protein, 338 aa, Cytophaga hutchinsonii
MEYHIYTHKSPVTLESGAVLPEVRIQYSTSGIRNADEDNIIWVCHALTANSDVESWWPGLVGTDYLYNPQEHFIVCANILSSCYGTTGPTETNPETNKPYFLSFPVVTIRDMVTIHDILREHLEIKKIHTLIGGSLGGQQAMEWAIQQPHLFQHLILLSTNAFHSPWGIAFNESQRMAIDMDPTWKNPSLDAGREGLKTARSIAMLSYRSYETYVETQREEDSSKTDDYRAITYQHYQGDKLVKRFNCHSYWYLSKAMDSHHVGRNRESAAAALASIRSKTLVIGISSDILFPVCEQEYVAKHISGAQYVCIDSLYGHDGFLTETDKLDVVIRNFYLE

SEQ ID NO: 20736 - protein, 193 aa, Streptomyces coelicolor A3(2)
MQPLIDNARMFGQRPEEFTGHAEGQSPEVLFITCSDSRVVPALITGARPGQLFELRTAGNIVPPHGTGHPSGEAATVEYAVQVLGVADIVVCGHSHCGAVGALVRGDDLTAVPAVRDWLAHAADEPKPCDPADPTVAGAVQHHVLAQLLRLRSYPCVERRLADGRLRLHGWYYEVHTGLVRAHRADTDAFETL

SEQ ID NO: 20737 - protein, 222 aa, Rhodobacter sphaeroides
MDLTEDDAMHNARPLPNYLVQRFHGWRATTFADNKSWYRRLSESGQHPRAMVISCCDSRVHVTSIFGADEGEFFIHRNIANLVPPYSPDGKQHGTSAAVEYAVTALGVAHIVVLGHSNCGGVKGCHDMCSGKAPQLEETSSFVGRWMDILRPGYERVKDLPEEERVTALEKEAVLVSIGNLMTFPFVREAVEREVLTLHALWTHIGEGSLEQYTPGQGFVPV

SEQ ID NO: 20738 - protein, 235 aa, Rhodopseudomonas palustris
MTAVSFADVPHPRTPKEGTAPMTSFPKSLIDGYEAFRTQRLPTEQSRFRELSERGQSPEVMVIGCCDSRVSPEVIFDAGPGEIFVVRNVANLVPVYEPDGGAHGVSAALEFAVQVLRVKHIVVLGHALCGGIKAFTDKTPPLTESDFIGRWMQMFTKPGEVVEKRDHETVQDFRTRIEKAAVFRSIENLMTFPCIKILVERGKLQLHGAYFGVADGDLFVLDQENKQFVPAAEVV

SEQ ID NO: 20739 - protein, 217 aa, Rhodospirillum rubrum
MIRTVDIQDLITNNRKWAEERESALPGYFHILSEVQSPKFLWIGCSDSRVPANEIVGMQPGELFVHRNIANVVPHADANCHAVLEYAIDVLKVEHIMVVGHYGCGGVRAALNRLAMGPIDNWLSHIKDIARIFAAELEDLPDEESRVDRLCELNAMAQVMNVARTSMVQAAWRRGQPLAIHAWCYGLKTGLVNDLGRTLTRIADLPEPYRLIFPDQV

SEQ ID NO: 20740 - protein, 272 aa, Synechococcus sp. PCC 7942
MRKLIEGLRHFRTSYYPSHRDLFEQFAKGQHPRVLFITCSDSRIDPNLITQSGMGELFVIRNAGNLIPPFGAANGGEGASIEYAIAALNIEHVVVCGHSHCGAMKGLLKLNQLQEDMPLVYDWLQHAQATRRLVLDNYSGYETDDLVEILVAENVLTQIENLKTYPIVRSRLFQGKLQIFGWIYEVESGEVLQISRTSSDDTGIDECPVRLPGSQEKAILGRCVVPLTEEVAVAPPEPEPVIAAVAAPPANYSSRGWLAPEQQQRIYRGNAS

SEQ ID NO: 20741 - protein, 228 aa, Ralstonia metallidurans
MLEPSNDDGGVGVKDLIQGILKFQREEFPKRSALFKHLATQQNPKTLFIACSDSRVVPALLTQCEPGELFVIRNAGNIVPAYAVQPGGVSASVEYAVAGLKVRDIVICGHSDCGAMTAVATCQCLDHMPAVEEWLEHASGARRISLTRPHASDRARVDDMVRENVIEQLDHLRTHPSVAQALAEGRVDLHGWVYDIETGEIDALEGRTGKFVPLREQPDVTATLERVA

SEQ ID NO: 20742 - protein, 225 aa, Ralstonia metallidurans
MRKLIMGIVEFREKMLPRYAEQFSKLALAQTPDALFITCSDSRVVPDLLASTHPGDLFTMRNVGNLIPPATAEGVSTGDLSEASAIEYAVLVLKVANIVVCGHSECGAMKAVYSRNPKLKAPNLDKWLYHASNAAFRLEHEGALDESLKPHDQLSQLNVLVQIEHLMTYPIVRRQVMAGALVLSGWWFDIATGDMYAYERASRSFEVIDRALAERLASRLASRAR

SEQ ID NO: 20743 - protein, 244 aa, Ralstonia metallidurans
MHEIERLLKGFERFQRRYFEARPELFDALRTGQKPQTLLIGCSDSRVDPGLLLDCDPGELFTVRNVANLVPPCGDGASGRLHGVSAAIQFAVEQLHVVRIIVMGHAGCGGIRALLAHPQNDDTNAPQDFIGPWVRIAGPARRMVEQTLPNASPAERQRACEQAAILVSLRNLESFPFVREACERGALTLHGWYFDLQAGALLAYSERADDFLPLVCPLTPEARPHRQPSNRPSIDSGQAEMLGS

SEQ ID NO: 20744 - protein, 223 aa, Ralstonia metallidurans
MSDAIAQLFRNNREWVDRVNAEDPTFFTRLANQQAPEYLWIGCSDSRVPANQILGLAPGEVFVHRNIANVISHSDLNALSVLQFAVDVLKVRHVTVVGHYGCGGVKVALKRERVGLADNWLRHVQDVADKHAGYLGTVLREDDAHTRLCELNVIEQVNNVCQTTVLQDAWARGQAVTVHGWVYGVSDGLLRDLGMAASNNDELHAQIAAALRQYGDPPQASIR

SEQ ID NO: 20745 - protein, 211 aa, Burkholderia fungorum
MQEIIEGFIRFQREVFPQQSGLFKRLSTAQSPSTLFVTCSDSRVVPELLTQTEPGSLFVIRNAGNIVPSYGPEPGGVSATVEYAVAVLRVRDIVICGHSNCGAMTAISTCMNLDHLPAVAGWLRHADAAKAINASRTYHSDAECLEALVKDNVIAQLANIRTHPSVAVGLANKTLQLHGWIFDIESGVMLALDGRTGKFLPLVDNPDIYAV

SEQ ID NO: 20746 - protein, 234 aa, Burkholderia fungorum
MRPRERSREFGAESMRLAYGALSMNRPKRLLVANVAWAHETAVRNPAFFRDLVRGQNPHVLWIGCSDSRVPAETITHCEPGDLFVHRNIANLFQAGDDNSASVLEYAVKVLKVGHVIVCGHYGCGGVRAALLPPEPGLPHVNRRIAPLCALARAHHEELDGHANERQRIDRLAELNVLEQVRGLRAHPVVRDADPAPLVHGWIFALEDGRIKVLSSGYEADDAMTCTTAAHSAA

SEQ ID NO: 20747 - protein, 219 aa, Escherichia coli O157:H7 EDL933
MKEIIDGFLKFQREAFPKREALFKQLATQQSPRTLFISCSDSRLVPELVTQREPGDLFVIRNAGNIVPSYGPEPGGVSASVEYAVAALRVSDIVICGHSNCGAMTAIASCQCMDHMPAVSHWLRYADSARVVNEARPHSDLPSKAAAMVRENVIAQLANLQTHPSVRLALEEGRIALHGWVYDIESGSIAAFDGATRQFVPLAANPRVCAIPLRQPTAA

SEQ ID NO: 20748 - protein, 220 aa, Escherichia coli O157:H7 EDL933
MKDIDTLISNNALWSKMLVEEDPGFFEKLAQAQKPRFLWIGCSDSRVPAERLTGLEPGELFVHRNVANLVIHTDLNCLSVVQYAVDVLEVEHIIICGHYGCGGVQAAVENPELGLINNWLLHIRDIWFKHSSLLDEMPQERRLDTLCELNVMEQVYNLGHSTIMQSAWKRGQKVTIHGWAYGIHDGLLRDLDVTATNRETLEQRYRHGISNLKLKHANHK

SEQ ID NO: 20749 - protein, 218 aa, Magnetococcus sp. MC-1
MCKTPISNFLTQLKQGHQQFLRDELPNHLALFQRLSAEGQNPRAAVVACSDSRIHPNMITQSSPGELFIIRNVANLVPPHDPDGGYHGTSAALEYAVRVLNVEAIIILGHSCCGGVRALSQDCCEKVGADGSDFIGKWMEIAWNDAHVQQLALTAAKTGQHRPLEERMVTLSIHNLRGFPFIHQRETAGTLELIGLYFNIAEGRLYRYEPSIDAFEPL

SEQ ID NO: 20750 - protein, 328 aa, Vigna radiata
MSSSSINGWCLSSISPAKTSLKKATLRPSVFATLTTPSSPSSSSSFPSLIQDKPVFAAPSHIITPTVREDMAKDYEQAIEELQKLLREKTELKATAAEKVEQITASLGTSSSDSIPSSEASDRIKSGFLYFKKEKYDKNPALYGELAKGQSPKFMVFACSDSRVCPSHVLDFQPGEAFVVRNVANIVAPYDQSKYSGTGAAIEYAVLHLKVSNIVVIGHSACGGIKGLLSFPFDGTYSTDFIEEWVKIGLPAKAKVKTQHGDAPFAELCTHCEKEAVNVSLGNLLTYPFVRDGLVNKTLALKGGYYDFVKGTFELWSLNFGLASSFSV

SEQ ID NO: 20751 - protein, 239 aa, Pseudomonas putida KT2440
MPVKDPSKVVPQVPAESADAALKHIVDGFLRFHHDVFPDQQELFKKLATAQTPRAMFITCADSRIVPELITQSSPGDLFVTRNVGNVVPPYGQMNGGVSSAIEYAVMALKVHHIIICGHSDCGAMRAVLNPQSLTKMPTVGAWLRHAEVARTVVENNCSCGSEHETMQVLTKENVIAQLHHLRTHPSVASRLAAGELFIHGWVYDIETSKIEAYDAASDSFLPLAAGEPVPCATPRGRY

SEQ ID NO: 20752 - protein, 256 aa, Anopheles gambiae str. PEST
VMERILRGVMRYRHTTREQMVQEFRKVRDNPQPKAVFFTCMDSRMIPTRFTETHVGDMFVVRNAGNLVPHAEHFQDEYFSCEPAALELGCVVNNIKHIIVCGHSDCKAMNLLYKLKDPEFASLDNRRISPLRAWLCEHANTSLAKFQNLKEIGLDKPLIFSSETPLRKFVAYIDPENNFAIEDKLSQVNTLQQIENVASYGFLKRRLESHDLHIHALWFDIYTGDIYFFSRNSKRFIAIDESSIDRLLDEVRRYYS

SEQ ID NO: 20753 - protein, 213 aa, Agrobacterium tumefaciens str. C58 (Cereon)
MKDFPETLLNGYKNFMSGRYVDERERYRVLADTGQKPQTLFIACCDSRSAPETIFDCGPGELFVVRNVANMVPPFEPDGQYHATSAAIEYAVQVLKVKDIVVMGHGRCGGIQAALDPNLEPLSPGDFIGKWMNMVKSAAEQIQSNDVMTASERQTALERVSIRNSIANLRGFPFVKAQETAGKVKLHGAWFDISTGELWVMDSKTGDFRRPDL

SEQ ID NO: 20754 - protein, 310 aa, Yersinia pestis KIM
MVNCVISSAYVISKKEPYSMGLLVVLRTHEVFNPPHMRDVTGNIKNQTGTEKILRRQYRVITETTVPISKSESLPYIILSQPEHYRLFTLMKEIEKLIANNRTWSNTICKDDPGFFEHLAQSQKPRFLWIGCSDSRVPAEQLTGLKSGELFVHRNVANLVIHTDLNCLSVVQYAIDVLQVEHIIICGHLGCGGVEAAIKGEEMGLIDNWLLHIRDLWYKHSSLLGELPQEERSNVLCQINVVEQVYNLGHSTIVRSAWKRGQKAMIHGWVYGIENGLLRDLEVSATSLGSLEMVYRKAMAELLQNNKEDH

SEQ ID NO: 20755 - protein, 219 aa, Magnetospirillum magnetotacticum
MSKVPGIDRLLANNKVWAEETERTKPGFFAHLAEQQTPGYLWIGCADSRVPANEIVGLEPGEVFVHRNVANQVHHADMNCLSVLQYAIDVLKVEHIIVCGHYGCGGVRAALQDSRLGVTEYWIRPVRDICECHRHELDMLPNEAAQVDRLCELNVMAQVRNLCRSPVIQDAWQRGQQLEVHSWVYGLTDGMVRTLGPVVTGLKSLDELGASYLMRGAAF

SEQ ID NO: 20756 - protein, 226 aa, Xanthomonas campestris pv. campestris str. ATCC 33913
MESLLEGFRHFRKEVYPRQSARFHELAAGQKPHTLFITCADSRVMPELIFSAQPGELFVYRNIGNVVPPYSQHVSGVVAAIEYAIAVLGVRHIVVCGHTDCGAMKAVLKPESLEDVPSVAAWLKHTDAARHVTAHHGHDPASQEALSCMTEENVVSQLDHLRTQPVVAARLAAGTLRIHGWIYDIAHGEIRAFDAEKGGFRPLLGETTPEATPRPRLQQAVRAELV

SEQ ID NO: 20757 - protein, 220 aa, Xanthomonas campestris pv. campestris str. ATCC 33913
MNELNHLLENNRAWADRINREDPEFFAKLSTQQSPEYLWIGCSDSRVPANQIIDMAPGEVFVHRNIANVVVHTDLNCLSVIQFAVDVLKVKHILVVGHYGCGGVFASLTQKRMGLVDNWIRHVTDVADKHEACLHQAGDLSVQHARLCELNVLEQVVNVCRTTIVRDAWDRGQDLRVHGWVYSLRDGRAHDLRMSVDRADILQERYDAALAQIQADHSER

SEQ ID NO: 20758 - protein, 226 aa, Xanthomonas axonopodis pv. citri str. 306
MESLLEGFRHFRKEVYPRQSARFQELAGGQSPHTLFITCADSRVMPELIFSAQPGELFVYRNIGNVVPPYSQHVSGVVAAIEYAIAVLGVRHIVICGHTDCGAMKAVLKPESLEDVPSVAAWLKHTDAARHVTAHHGHDPQSPDALNCMTEENVVSQLDHLRTQPVVAARLAAGTLRIHGWIYDIAHGEIRAFDAEKGGFRPLLAESTPEATPRPRLQQVVRAELA

SEQ ID NO: 20759 - protein, 220 aa, Xanthomonas axonopodis pv. citri str. 306
MNELNHLLENNRAWSERIRREDPEFFSKLSTQQTPEYLWIGCSDSRVPANQIIDMAPGEVFVHRNIANVVVHTDLNCLSVIQFAVDVLKVKHVLVVGHYGCGGVFASLTQKRMGLVDNWIRHVTDVADKHEACLHNAGELSVQHARLCELNVLEQVVNVCRTTIVHDAWERGQQLSVHGWVYSLRDGRAHDLGMSIDRPELLQERYDAALAQIQADQTER

SEQ ID NO: 20760 - protein, 222 aa, Caulobacter crescentus CB15
MLEDLKAKNAAWSKSKTAEDPDFFTRLAKQQSPEYLWIGCSDSRVPANEIVGLDPGELFVHRNVANLAPPQDANYLSVLQFAVDVLKVKHIMVVGHYGCGGVAAAIDGKRRGLVDHWLHPIREVYAEHRPELEAIPEKREMIDRLTELNVARQVRNVAADVFVQDAWARGQSLAVHGWVYSLANGLVNDLNVGIASLEDYERTVAETVVPDRPFWKRGQAEG

SEQ ID NO: 20761 - protein, 211 aa, Campylobacter jejuni subsp. jejuni NCTC 11168
MENLISGAIKFMQEDFKEHEELFESLKNKQNPHTLFIGCSDSRVIPNLITNTGPGELFVIRNIANIVPPYRVGEDYLATTSAIEYALNSLHIKNIVVCGHSNCGGCNALYYSDEELNKIPNVKKWLTMLDPIKKDVMIFARDDLAMRSWLTEKLNLVNSLQNILTYPGVQEALDEGKIEVHAWYYIIETGEIYEYDFKAKIFTLIQDRKVQ

SEQ ID NO: 20762 - protein, 220 aa, Escherichia coli CFT073
MKDIDTLISNNALWSKMLVEEDPGFFEKLAQAQKPRFLWIGCSDSRVPAERLTGLEPGELFVHRNVANLVIHTDLNCLSVVQYAVDVLEVEHIIICGHYGCGGVQAAVENPELGLINNWLLHIRDIWFKHSSLLGEMPQERRLDTLCELNVMEQVYNLGHSTIMQSAWKRGQKVTIHGWAYGIHDGLLRDLDVTATNRETLEQRYRHGISNLKLKHINHK

SEQ ID NO: 20763 - protein, 209 aa, Microbulbifer degradans 2-40
MNDLDNLFQSNKDWAEAIKAEDPHFFEKLSAQQFPEYLWIGCSDSRVPANQIVGLMPGEMFVHRNIANCVVHTDLNCLSVIHYAVSVLKVKHIIVTGHYGCGGVAAALTNQQFGLVDHWIRNIRDVYQKQKAELENITDEKERLNRLCELNVKQQALNVTALPAVQNAWKEGRELTVHGWIYSLEDGLLKKLTDSIGSIEQVAEQFRVI

SEQ ID NO: 20764 - protein, 213 aa, Brucella suis 1330
MADLPDSLLAGYKTFMSEHFAHETARYRDLAEKGQSPETLVVACCDSRAAPETIFNAAPGEIFVLRNVANLIPPYEPDGEYHAASAALEFAVQSLKVKHIVVMGHGRCGGIKAALDTESAPLSPSDFIGKWMSLISPAAEAISGNALMTQSERHTALERISIRYSLANLRTFPCVDILEKKGKLTLHGAWFDISTGELWVMDHRTGDFKRPEL

SEQ ID NO: 20765 - protein, 219 aa, Brucella suis 1330
MPMKNDHSPDQRTLSELFEHNRQWAAEKQEKDPEYFSRLLSSQRPEFLWIGCSDSRVPANVVTGLQPGEVFVHRNVANLVHRADLNLLSVLEFAVGVLEIKHIIVCGHYGCGGVRAAMDGYGHGIIDNWLQPIRDIAQANQAELDTIENTQDRLDRLCELSVSSQVESLSRTPVLQSAWKDGKDIIVHGWMYNLKDGLLRDIGCDCTRNALQFACQPAE

SEQ ID NO: 20766 - protein, 230 aa, Haemophilus somnus 129PT
MKKIEQLFANNFSWANRMKEENAEYFKALAENQTPSYLWIGCSDSRVPAENLTNLKPGELFVHRNVANQVIHTDLNCLSVVQYAVDVLNIEHIIICGHTNCGGIKAAMVDQDLGLINNWLLHIRDIWFKHGHLLGKLSPEKRADMLTRINVAEQVYNLGSSSIVKSAWKSGKKLSLHGWIYDVNDGFLIDQGVTATSRETLEISYRDTIAKLFKLNEDELLLKPHQVKSE

SEQ ID NO: 20767 - protein, 286 aa, Pseudomonas syringae pv. syringae B728a
MSSAIALKGFVRDALQRGITSGSGQTGMKNPHQFVREDEDMTDIGKQHSATSSSTSSHSDSADVALKHIVDGFVHFRKEVFPQQEELFKKLATAQSPRAMFITCADSRIVPELITQSSPGDLFVTRNVGNVVPPYGQMNGGVSTALEYAVVALGVQHIIVCGHSDCGAMRAVLNPDSLDKMPTVKAWLRHAEVARTVVEQNCSCSGELETMQVLTQENVISQLQHLRTHPSVAAKMASGQLFIHGWVYSIETSEILAYDAELDRFIPLDGTGPTPMASPKARFSAD

SEQ ID NO: 20768 - protein, 260 aa, Pseudomonas syringae pv. syringae B728a
MNHSWEILISGGRKKWTGHDFEDSFFVDRDLKDLTPVQGWASLSRRQSMNELQDLIDNNARWADAIKQEDPEFFAKLARQQTPEFLWIGCSDARVPANEIVGMLPGDLFVHRNVANVVLHTDLNCLSVIQYAVDVLKVKHILVTGHYGCGGVRASMQDRQFGLIDGWLRTIRDLYYENRELLAKLPTEEERVDRLCELNVIQQVANVGHTSIVQNAWHRGQSLSVHGCIYGIKDGRWKSLDVTISGFEQLPPQYRLRPQD

SEQ ID NO: 20769 - protein, 243 aa, Pseudomonas fluorescens PfO-1
MSDKDKQPLAASAQAAPVAESADAALKRIVDGFLHFHHEVFPQQEELFKKLATAQSPRAMFITCADSRIVPELITQSSPGDLFVTRNVGNVVPPYGQMNGGVSTAIEYAVLALGVQHIIICGHSDCGAMRAVLNPDSLEKMPTVKAWLRHAEVAKTMVHDNCNCTDEKESMPILTEENVIAQLQHLRTHPSVASRMANGHLFIHGWVYNIETSEIKAYDADQGCFLPLDGSHPIPVATPKARF

SEQ ID NO: 20770 - protein, 219 aa, Pseudomonas fluorescens PfO-1
MKNLIEGFLKFQNEAFPQRTELFKHLATTQTPGTLFITCSDSRVVPELLTQQEPGELFVIRNAGNIVPSYSPHPGGVSATVEYAVAVLGVTDIVICGHSDCGAMTAIAQCKCMDHLPAVSGWLQHAESAKVVNESRPHANDAAKLSSMVRENVIAQLANIQTHPSVRLAQEKGLLNLHGWVYDIETGSIDALSADRRTFVSLAEQPSTCAVYGQTVDAA

SEQ ID NO: 20771 - protein, 214 aa, Pseudomonas fluorescens PfO-1
MHDLQDLIDNNERWADAITKEDPDFFAKLARQQTPEYLWIGCSDARVPANEIVGMLPGDLFVHRNVANVVLHTDLNCLSVIQYAVDVLKVKHILVTGHYGCGGVRASMQDRQFGLIDGWLRSIRDLYYEKREELARLPTEEEQVDRLCELNVIQQVANVAHTSIIQNAWHRGQSLSIHGCIYGIKDGRWKSLNTTISGFEQLPPQYRLRPVGAP

SEQ ID NO: 20772 - protein, 242 aa, Pseudomonas aeruginosa PAO1
MPDRMRGVKSDSPEQESADDALKRIVDGFQHFRREVFPEQQALFKKLANSQRPRAMFITCADSRIVPELITQSSPGDLFVTRNVGNVVPPYGQMNGGVSTAIEYAVLALGVHHIIVCGHSDCGAMRAVLDPQTLERMPTVKAWLRHAEVARTVVADNCDCGASHDTLGVLTEENVVAQLDHLRTHPSVASRLASGQLFIHGWVYDIESAQIRAYDAKQGRFLPLDGEHPVPMATPAPRYLSS

SEQ ID NO: 20773 - protein, 220 aa, Pseudomonas aeruginosa PAO1
MRDIIDGFLRFQRDAYPARSQLFKSLATRQAPKALFIACSDSRVVPELLTQREPGELFVIRNAGNIVPGYGPQPGGVSASVEYAVAVLGVGDIVVCGHSDCGAMGAIASCACLDQLPAVAGWLHHAEAARAMNSAHEHASEAARLDALVRHNVIAQLANLRTHPCVARALEQGRLNLHGWVYDIESGRIDALDGASRRFVSLAEHPEVRAVGGEPGQAVA

SEQ ID NO: 20774 - protein, 215 aa, Pseudomonas aeruginosa PAO1
MSDLQQLFENNVRWAEAIKQEDPDFFAKLARQQTPEYLWIGCSDARVPANEIVGMLPGDLFVHRNVANVVLHTDLNCLSVIQFAVDVLKVKHILVTGHYGCGGVRASLHNDQLGLIDGWLRSIRDLAYEYREHLEQLPTEEERVDRLCELNVIQQVANVSHTSIVQNAWHRGQSLSVHGCIYGIKDGLWKNLNVTVSGLDQLPPQYRLSPLGGCC

SEQ ID NO: 20775 - protein, 201 aa, Shewanella oneidensis MR-1
MKLLKPLFDNNLRWAGRISQEHPDFFEQLAKQQNPEYLWIGCSDSRVPSNQIIDLMPGEVFVHRNIANMVIHTDLNCLSVLQYAIDVLKVKHIMVVGHYGCGGVRAAMGNQRLGLIDNWLGHLRDVYRLHHDELMQMDEAKRFDRLCELNVIEQVSNVTSSTIVQEAWARGQELAVHGWIYGIDNGLLTDLDVTVDRAQVV

SEQ ID NO: 20776 - protein, 220 aa, Yersinia pestis CO92
MKEIEKLIANNRTWSNTICKDDPGFFEHLAQSQKPRFLWIGCSDSRVPAEQLTGLKSGELFVHRNVANLVIHTDLNCLSVVQYAIDVLQVEHIIICGHLGCGGVEAAIKGEEMGLIDNWLLHIRDLWYKHSSLLGELPQEERSNVLCQINVVEQVYNLGHSTIVRSAWKRGQKAMIHGWVYGIENGLLRDLEVSATSLGSLEMVYRKAMAELLQNNKEDH

SEQ ID NO: 20777 - protein, 222 aa, Vibrio vulnificus CMCP6
MPEIKQLFENNSKWSEEIKSHQPEYFSKLEEGQNPGFLWIGCSDSRVPAERLTGLYSGELFVHRNVANQVIHTDLNCLSVVQYAVDVLKVKHIIICGHYGCGGVNAAIENPRLGLINNWLLHIRDLYLKHRNWLGELPKEKWGDKLCEINVAEQVYNLGNSTIMESAWERGQDVEIHGVVYGIGDGLLQDIGVRCYSRESLEVNYQAAMAKILNSDVMKFHE

SEQ ID NO: 20778 - protein, 221 aa, Pseudomonas syringae pv. tomato str. DC3000
MKHIVDGFVHFRKEVFPQQEELFKKLATAQSPRAMFITCADSRIVPELITQSSPGDLFVTRNVGNVVPPYGQMNGGVSTALEYAVVALGVQHIIVCGHSDCGAMRAVLNPSSLDKMPTVKAWLRHAEVARTVVEQNCNCSGELETMQVLTQENVISQLHHLRTHPSVAAKMASGQLFIHGWVYSIETSEILAYDAERDTFVPLDGTGPTPMASPKARFSAD

SEQ ID NO: 20779 - protein, 212 aa, Pseudomonas syringae pv. tomato str. DC3000
MNELQDLIDNNARWADAINQEDPEFFAKLARQQTPEFLWIGCSDARVPANEIVGMLPGDLFVHRNVANVVLHTDLNCLSVIQYAVDVLKVKHILVTGHYGCGGVRASMQDRQFGLIDGWLRTIRDLYYENRDVLAKLPTEEERVDRLCELNVIQQVANVGHTSIVQNAWHRGQSLSVHGCIYGIKDGRWKSLDVTISGFEQLPPQYRLRPQD

SEQ ID NO: 20780 - protein, 222 aa, Vibrio parahaemolyticus RIMD 2210633
MPEIKQLFENNSKWSEEIKSDRPEYFAKLAEGQKPDFLWIGCSDSRVPAERLTGLYSGELFVHRNVANQVIHTDLNCLSVVQYAVDVLKVKHIIVCGHYGCGGVNAAIDNPQLGLINNWLLHIRDLYFKHRSYLDQMPVEDRADKLGEINVAEQVYNLGNSTIMQNAWERGQDVEIHGVVYGIEDGRLEYLGIRSNSKETVEASYQKALSTILNPDNKLLCR

SEQ ID NO: 20781 - protein, 214 aa, Bradyrhizobium japonicum USDA 110
MVTFPKHLLEGYQAFATQRLPTEQTRYRELSVKGQFPEVMVIGCCDSRVSPEVIFDVGPGELFVVRNIANLVPVYQPDGNAHGVSAALEYAVTVLKVKHIVVLGHAQCGGIRAFVDKIEPLTPGDFIGKWMQMFIKPGEVVEQRDHESMAQFVERIEKAAVFRSLENLMTFPFVQKAVDAGQMQTHGAYFGVAEGSLFVLDKVAKEFRSVKDAA

SEQ ID NO: 20782 - protein, 213 aa, Brucella melitensis 16M
MADLPDSLLAGYKTFMSEHFAHETARYRDLAEKGQSPETLVVACCDSRAAPETIFNAAPGEIFVLRNVANLIPPYEPDGEYHAASAALEFAVQSLKVKHIVVMGHGRCGGIKAALDTESAPLSPSDFIGKWMSLISPAAEAISGNALMTQSERHTALERISIRYSLANLRTFPCVDILEKKGKLTLHGAWFDISTGELWVMDHQTGDFKRPEL

SEQ ID NO: 20783 - protein, 211 aa, Brucella melitensis 16M
MPMKNDHSPDQRTLSELFEHNRQWAAEKQEKDPEYFSRLSSSQRPEFLWIGCSDSRVPANVVTGLQPGEVFVHRADLNLLSVLEFAVGVLEIKHIIVCGHYGCGGVRAAMDGYGHGIIDNWLQPIRDIAQANQAELDTIENTQDRLDRLCELSVSSQVESLSRTPVLQSAWKDGKDIIVHGWMYNLKDGLLRDIGCDCTRNALQFACQPAE

SEQ ID NO: 20784 - protein, 206 aa, Coxiella burnetii RSA 493
MEKSFEKIIRGYHDFRKKYATGNNSSMQSLAYHGQQPEIMIVACCDSRVDPALILQCDPGDLFVVRNVANIVPPYEADESHHGTSAALEFGICYLNVKHLIILGHSQCGGINALLNSENLKQNDFITRWVSLIKTNSSMIQDANQFSKEALTHSYQNCLTFPWIKERIQQKKLSIHLWFFDIKEGEIFAYSFENKKYQQLISNAQN

SEQ ID NO: 20785 - protein, 193 aa, Streptomyces avermitilis MA-4680
MQPLIDHARAHGQRPEEFAQLAEGQSPQALFITCSDSRVVPALITGARPGELFELRTAGNIVPPYAASQHPTSEAATIEYAVEVLKVTDVVVCGHSHCGAVGALVRGDDLTAVPAVRDWLAHAAPRPAGAVEDPAVTEAVQSHVLTQLLRLRSYPCVSAKLTSGQLRLHAWFYEVHTGSVLAHRPQTDTFTAL

SEQ ID NO: 20786 - protein, 201 aa, Streptomyces avermitilis MA-4680
MKELLDHARSFKRQVDFESGEYRKLAEGQYPEALFITCSDSRVIPALITGARPGEIFELRNAGNIVPPHGQHGASGEAATIEYALEVLGVQNVVVCGHSHCGAMGALKSGDDLSMLPGVDAWLELARPDLAPMLGTACDDPSLPDVAQCNIVNQLSTLRSYPVVRQRLETGLLRLHGWYYEVDTGQVYELDDDGRFRVHAG

SEQ ID NO: 20787 - protein, 211 aa, Geobacter metallireducens
MITTLLEGNRRFVAETFEKEKELFVELTRGQKPTVLWIGCSDSRVPVNTITQTKAGEVFVHRNVGNIVAANDWNLSAVLEFSINHLKIPDIVICGHYGCGGIQALDEENSDDKYIPIWLINAYKAKERVDEKLRALHIDIPHEQRMKLIVEENVRLQLEHLREYPFVRRAVEEGKLTLNGWVYDMGNGEIRIVATESAPRIGKGTCSIKIK

SEQ ID NO: 20788 - protein, 214 aa, Ralstonia solanacearum
MYRPKRMLVGNVAWAHEIAERDPRFFSRLAQGQKPQVLWIGCADSRVPAETITHSNPGDLFVHRNIANLVCPADDNTMSVLEYAVRVLKVGHIIVCGHDGCGGVRASLLPQSDALPHVNRRIGPLCALAVRHRAELDAVPDMDDRVNRLAELNVLEQVRWLRESSIVREAEPAPRVHGWIFGLADGRIRVLGSGEPGEAPPVRGDILEPAEAEA

SEQ ID NO: 20789 - protein, 226 aa, Ralstonia solanacearum
MPHRIKELFENNRKWVERVNAEDPAFFSGLANQQNPEYLWIGCSDSRVPANQIIGLPPGEVFVHRNIANVVVHSDLNCLSVLQFAVEVLKIRHITVVGHYGCSGVKAALTNQRFGLADNWIRHVRDVAEQHDTYLGTVIREQDRHDRLCELNVIHQVNNVCLTTVVQDAWERGQPLTVHGWIYGVKDGLLRNLGMAVNSNEELHGQLASAWLNYGKKGSVPTPVGY

SEQ ID NO: 20790 - protein, 330 aa, Flaveria brownii
MSTASAFATNVPSFVNASSLKKSSTSSARSGVLSAKFTCNSSSSSSSATPPSLIRNEPVFAAPAPIITPNWTEDGNESYEEAIDALKKMLIEKGELEPVAAARIDQITAQAAAPDTKAPFDPVERIKSGFVKFKTEKFVTNPALYDELAKGQSPKFMVFACSDSRVCPSHVLDFQPGEAFVVRNVANMVPPFDKTKYSGVGAAVEYAVLHLKVQEIFVIGHSRCGGIKGLMTFPDEGPHSTDFIEDWVKVCLPAKSKVVAEHNGTHLDDQCVLCEKEAVNVSLGNLLTYPFVRDGLRNNTLALKGGHYDFVNGTFELWALDFGLSSPTSV

SEQ ID NO: 20791 - protein, 263 aa, Lotus japonicus
MAKHSPDQLAIEELKKLIREKEELNESADTKIEDVIAELQLQGCHPTPETAEQRIIDGFTYFKIHNFDKNPDLYKELAKGQSPKFLIFACSDSRVSPTTILNFQPGEAFMVRNIANMVPPFNQLRYSGVGAAIEYAILELKVPNILIIGHSRCGGIARLMSHPEDDSPSFEFIDDWVKIGLPAKIKVLKEHASCDSLEQRTLCEKESVNNSLVNLHTYPFVDEQIRSKGLGLFGVYYDFVNGEFKLWKYESHVTKHISIPHCH

SEQ ID NO: 20792 - protein, 343 aa, Azotobacter vinelandii
MALRHRCRRVPAGTIGRDELRCIRFHLSCVAGYSVSLKLWAPRIQLYLSWLTQADFHRGHPSAPRPPVPKSSSRLVINGDDHRALPLSATQGGYAMNNVISKQGPSQGTTEARTESENAEVALKNIVDGFHRFRTEVFPQQKEFYRSLASAQRPRAMFITCADSRIVPELITQSAPGDLFVSRNVGNVVPPYGQINGGVSTAIEYAVAALGVHHIVVCGHSDCGAMKAVLDPPTLESMPTVKAWLRHAEVAKTVVLENRCSCNGRDTLEVLTEENVVAQLDHLRTHPSVAARLASGQLFIHGWVYSIETAEIKAYDAEQGCFRPLDSEGSIPVATPRPRFHQG

SEQ ID NO: 20793 - protein, 254 aa, Spinacia oleracea
MAYEEAIAALKKLLSEKGELENEAASKVAQITSELADGGTPSASYPVQRIKEGFIKFKKEKYEKNPALYGELSKGQAPKFMVFACSDSRVCPSHVLDFQPGEAFMVRNIANMVPVFDKDKYAGVGAAIEYAVLHLKVENIVVIGHSACGGIKGLMSFPDAGPTTTDFIEDWVKICLPAKHKVLAEHGNATFAEQCTHCEKEAVNVSLGNLLTYPFVRDGLVKKTLALQGGYYDFVNGSFELWGLEFGLSPSQSV

SEQ ID NO: 20794 - protein, 319 aa, Spinacia oleracea
MSTINGCLTSISPSRTQLKNTSTLRPTFIANSRVNPSSSVPPSLIRNQPVFAAPAPIITPTLKEDMAYEEAIAALKKLLSEKGELENEAASKVAQITSELADGGTPSASYPVQRIKEGFIKFKKEKYEKNPALYGELSKGQAPKFMVFACSDSRVCPSHVLDFQPGEAFMVRNIANMVPVFDKDKYAGVGAAIEYAVLHLKVENIVVIGHSACGGIKGLMSFPDAGPTTTDFIEDWVKICLPAKHKVLAEHGNATFAEQCTHCEKEAVNVSLGNLLTYPFVRDGLVKKTLALQGGYYDFVNGSFELWGLEYGLSPSQSV

SEQ ID NO: 20795 - protein, 254 aa, Spinacia oleracea
MAYEEAIAALKKLLSEKGELENEAASKVAQITSELADGGTPSASYPVQRIKEGFIKFKKEKYEKNPALYGELSKGQAPKFMVFACSDSRVCPSHVLDFQPGEAFMVRNIANMVPVFDKDKYAGVGAAIEYAVLHLKVENIVVIGHSACGGIKGLMSSPDAGPTTTDFIEDWVKICLPAKHKVLAEHGNATFAEQCTHCEKEAVNVSLGNLLTYPFVRDGLVKKTLALQGGYYDFVNGSFELWGLEFGLSPSQSV

SEQ ID NO: 20796 - protein, 571 aa, Porphyridium purpureum
MVQIYNGGAGFERALSRGKSKDGKPKATAAATAAPAASSSAAPARAAPARAAPAAAAPVSKPTAEKPAVAQDATLVKLAAGMGVMSDLEKKFIELEAKLVAQPAGQAMPGKSNIFANNEAWRQEMLKQDPEFFNRLANGQSPEYLWIGCADSRVPANQLLDLPAGEVFVHRNIANQCIHSDISFLSVLQYAVQYLKVKHILVCGHYGCGGAKAALGDSRLGLIDNWLRHIRDVRRMNAKYLDKCKDGDEELNRLIELNVLEQVHNVCATSIVQDAWDAGQELTVQGVVYGVGDGKLRDLGVVVNSSDDISKFYRTKSDSGALKAGNPNAPLVQVTKGGESELDSTMEKLTAELVQQTPGKLKEGANRVFVNNENWRQKMLKQDPQFFSNLAHTQTPEILWIGCADSRVPANQIINLPAGEVFVHRNIANQCIHSDMSFLSVLQYAVQYLKVKRVVVCGHYACGGCAAALGDSRLGLIDNWLRHIRDVRRHNQAELSRITDPKDSLNRLIEINVLEQMHNVCATSIVQDAWDAGQELEVQGVVYGVGDGKLRDMGVVAKANDDIGQIFRTKQ

SEQ ID NO: 20797 - protein, 571 aa, Porphyridium purpureum
MVQIYNGGAGFERALSRGKSKDGKPKATATATAAPAASSSAAPARAAPAKAAPAAAAPVSKPTAEKPAVAQDATLVKLAAGMGVMSDLEKKFIELEAKLVAQPAGQAVPGKSNIFANNEAWRQEMLKQDPEFFNRLANGQSPEYLWIGCADSRVPANQLLDLPAGEVFVHRNIANQCIHSDISFLSVLQYAVQYLKVKHILVCGHYGCGGAKAALGDSRLGLIDNWLRHIRDVRRMNAKYLDKCKDGDEELNRLIELNVLEQVHNVCATSIVQDAWDAGQELTVQGVVYGVGDGKLRDLGVVVNSSDDISKFYRTKSDSGALKAGNPNAPLVQVTKGGESELDSTMEKLTAELVQQTPGKLKEGANRVFVNNENWRQKMLKQDPQFFSKLAHTQTPEILWIGCADSRVPANQIINLPAGEVFVHRNIANQCIHSDMSFLSVLQYAVQYLKVKRVVVCGHYACGGCAAALGDSRLGLIDNWLRHIRDVRRHNQAELSRITDPKDSLNRLIEINVLEQMHNVCATSIVQDAWDAGQELEVQGVVYGVGDGKLRDMGVVAKANDDIGQIFRTKQ

SEQ ID NO: 20798 - protein, 496 aa, Porphyridium purpureum
VKLAAGMGVMSDLEKKFIELEAKLVAQPAGQAMPGKSNIFANNEAWRQEMLKQDPEFFNRLANGQSPEYLWIGCADSRVPANQLLDLPAGEVFVHRNIANQCIHSDISFLSVLQYAVQYLKVKHILVCGHYGCGGAKAALGDSRLGLIDNWLRHIRDVRRMNAKYLDKCKDGDEELNRLIELNVLEQVHNVCATSIVQDAWDAGQELTVQGVVYGVGDGKLRDLGVVVNSSDDISKFYRTKSDSGALKAGNPNAPLVQVTKGGESELDSTMEKLTAELVQQTPGKLKEGANRVFVNNENWRQKMLKQDPQFFSNLAHTQTPEILWIGCADSRVPANQIINLPAGEVFVHRNIANQCIHSDMSFLSVLQYAVQYLKVKRVVVCGHYACGGCAAALGDSRLGLIDNWLRHIRDVRRHNQAELSRITDPKDSLNRLIEINVLEQMHNVCATSIVQDAWDAGQELEVQGVVYGVGDGKLRDMGVVAKANDDIGQIFRTKQ

SEQ ID NO: 20799 - protein, 322 aa, Gossypium hirsutum
SINGWCLTSSSSSTTTSSFSARRRPTLRPSVVASLNSSPSPPTLIQDRPVFAAPVPLLTPREEMGNKSYDEAIEALKKLLSEKGELKAEAAARVDQITAELNTTSADGKPSDSSVERLKEGFVYFKKEKYEKNPALYGELAKGQSPKYMIVACSDSRVCPSHVLDMQPGEAFVVRNVANMVPPYDQIKYAGIGSAIEYAVLHLKVQEIVVIGHSACGGIKGLMSFPLDGNNSTDFIEDWVKIGIPAKAKVLAEHGGEPLGVQCTHCEKEAVNVSLGNLLSYPFVRDGLVKKTLGIKGGYYDFVKGSFELWSLQFQLSSSLSV

SEQ ID NO: 20800 - protein, 326 aa, Gossypium hirsutum
MSTASINGWCLTSSSSTTTTSSFSARRRPTLRPSVVASLNSSPSPPTLIQDRPVFAAPIPLLTPREEMGNKSYDEAIEALKKLLSEKGELKAEAAARVDQITAELNTASADGKPSDSSVERLKEGFVYFKKEKYEKNPALYGELAKGQSPKYMIVACSDSRVCPSHVLDMQPGEAFVVRNVANMVPPYDQIKYAGIGSAIEYAVLHLKVQEIVVIGHSACGGIKGLMSFPFDGNNSTDFIEDWVKIGIPAKTKVLAEHGGEPLGVQCTHCEKEAVNVSLGNLLSYPFVRDGLVKKTLGIKGGYYDFVKGSFELWSLQFQLSSSLSV

SEQ ID NO: 20801 - protein, 319 aa, Gossypium hirsutum
GWCLTSSSSTTTTSSFSARRRPTLRPSVVASLNSSPSPPTLIQDRPVFAAPIPLLTPREEMGNKSYDEAIEALKKLLSEKGELKAEAAARVDQITAELNTASADGKPSDSSVERLKEGFVYFKKEKYEKNPALYGELAKGQSPKYMIVACSDSRVCPSHVLDMQPGEAFVVRNVANMVPPYDQIKYAGIGSAIEYAVLHLKVQEIVVIGHSACGGIKGLMSFPFDGNNSTDFIEDWVKIGIPAKTKVLAEHGGEPLGVQCTHCEKEAVNVSLGNLLSYPFVRDGLVKKTLGIKGGYYDFVKGSFELWSLQFQLSSSLSV

SEQ ID NO: 20802 - protein, 336 aa, Arabidopsis thaliana
MSTAPLSGFFLTSLSPSQSSLQKLSLRTSSTVACLPPASSSSSSSSSSSSRSVPTLIRNEPVFAAPAPIIAPYWSEEMGTEAYDEAIEALKKLLIEKEELKTVAAAKVEQITAALQTGTSSDKKAFDPVETIKQGFIKFKKEKYETNPALYGELAKGQSPKYMVFACSDSRVCPSHVLDFQPGDAFVVRNIANMVPPFDKVKYGGVGAAIEYAVLHLKVENIVVIGHSACGGIKGLMSFPLDGNNSTDFIEDWVKICLPAKSKVISELGDSAFEDQCGRCEREAVNVSLANLLTYPFVREGLVKGTLALKGGYYDFVKGAFELWGLEFGLSETSSV

SEQ ID NO: 20803 - protein, 270 aa, Arabidopsis thaliana
MGTEAYDEAIEALKKLLIEKEELKTVAAAKVEQITAALQTGTSSDKKAFDPVETIKQGFIKFKKEKYETNPALYGELAKGQSPKYMVFACSDSRVCPSHVLDFQPGDAFVVRNIANMVPPFDKVKYGGVGAAIEYAVLHLKVENIVVIGHSACGGIKGLMSFPLDGNNSTDFIEDWVKICLPAKSKVISELGDSAFEDQCGRCEREAVNVSLANLLTYPFVREGLVKGTLALKGGYYDFVKGAFELWGLEFGLSETSSVKDVATILHWKL

SEQ ID NO: 20804 - protein, 347 aa, Arabidopsis thaliana
MSTAPLSGFFLTSLSPSQSSLQKLSLRTSSTVACLPPASSSSSSSSSSSSRSVPTLIRNEPVFAAPAPIIAPYWSEEMGTEAYDEAIEALKKLLIEKEELKTVAAAKVEQITAALQTGTSSDKKAFDPVETIKQGFIKFKKEKYETNPALYGELAKGQSPKYMVFACSDSRVCPSHVLDFQPGDAFVVRNIANMVPPFDKVKYGGVGAAIEYAVLHLKVENIVVIGHSACGGIKGLMSFPLDGNNSTDFIEDWVKICLPAKSKVISELGDSAFEDQCGRCEREAVNVSLANLLTYPFVREGLVKGTLALKGGYYDFVKGAFELWGLEFGLSETSSVKDVATILHWKL

SEQ ID NO: 20805 - protein, 280 aa, Arabidopsis thaliana
MAPAFGKCFMFCCAKTSPEKDEMATESYEAAIKGLNDLLSTKADLGNVAAAKIKALTAELKELDSSNSDAIERIKTGFTQFKTEKYLKNSTLFNHLAKTQTPKFLVFACSDSRVCPSHILNFQPGEAFVVRNIANMVPPFDQKRHSGVGAAVEYAVVHLKVENILVIGHSCCGGIKGLMSIEDDAAPTQSDFIENWVKIGASARNKIKEEHKDLSYDDQCNKCEKEAVNVSLGNLLSYPFVRAEVVKNTLAIRGGHYNFVKGTFDLWELDFKTTPAFAFS

SEQ ID NO: 20806 - protein, 258 aa, Arabidopsis thaliana
MATESYEAAIKGLNDLLSTKADLGNVAAAKIKALTAELKELDSSNSDAIERIKTGFTQFKTEKYLKNSTLFNHLAKTQTPKFLVFACSDSRVCPSHILNFQPGEAFVVRNIANMVPPFDQKRHSGVGAAVEYAVVHLKVENILVIGHSCCGGIKGLMSIEDDAAPTQSDFIENWVKIGASARNKIKEEHKDLSYDDQCNKCEKEAVNVSLGNLLSYPFVRAEVVKNTLAIRGGHYNFVKGTFDLWELDFKTTPAFAFS

SEQ ID NO: 20807 - protein, 258 aa, Arabidopsis thaliana
MSTESYEDAIKRLGELLSKKSDLGNVAAAKIKKLTDELEELDSNKLDAVERIKSGFLHFKTNNYEKNPTLYNSLAKSQTPKFLVFACADSRVSPSHILNFQLGEAFIVRNIANMVPPYDKTKHSNVGAALEYPITVLNVENILVIGHSCCGGIKGLMAIEDNTAPTKTEFIENWIQICAPAKNRIKQDCKDLSFEDQCTNCEKEAVNVSLGNLLSYPFVRERVVKNKLAIRGAHYDFVKGTFDLWELDFKTTPAFALS

SEQ ID NO: 20808 - protein, 259 aa, Arabidopsis thaliana
MGNESYEDAIEALKKLLIEKDDLKDVAAAKVKKITAELQAASSSDSKSFDPVERIKEGFVTFKKEKYETNPALYGELAKGQSPKYMVFACSDSRVCPSHVLDFHPGDAFVVRNIANMVPPFDKVKYAGVGAAIEYAVLHLKVENIVVIGHSACGGIKGLMSFPLDGNNSTDFIEDWVKICLPAKSKVLAESESSAFEDQCGRCEREAVNVSLANLLTYPFVREGVVKGTLALKGGYYDFVNGSFELWELQFGISPVHSI

SEQ ID NO: 20809 - protein, 331 aa, Arabidopsis thaliana
MVPFWTTVSRNGSSDSETTLQSASKATKQYKYPSLRPSHRLSLLFLFPFHLSANGACFRCTCFSHFKLELRRMGNESYEDAIEALKKLLIEKDDLKDVAAAKVKKITAELQAASSSDSKSFDPVERIKEGFVTFKKEKYETNPALYGELAKGQSPKYMVFACSDSRVCPSHVLDFHPGDAFVVRNIANMVPPFDKVKYAGVGAAIEYAVLHLKVENIVVIGHSACGGIKGLMSFPLDGNNSTDFIEDWVKICLPAKSKVLAESESSAFEDQCGRCEREAVNVSLANLLTYPFVREGVVKGTLALKGGYYDFVNGSFELWELQFGISPVHSI

SEQ ID NO: 20810 - protein, 301 aa, Arabidopsis thaliana
MAATPTHFSVSHDPFSSTSLLNLQTQAIFGPNHSLKTTQLRIPASFRRKATNLQVMASGKTPGLTQEANGVAIDRQNNTDVFDDMKQRFLAFKKLKYMDDFEHYKNLADAQAPKFLVIACADSRVCPSAVLGFQPGDAFTVRNIANLVPPYESGPTETKAALEFSVNTLNVENILVIGHSRCGGIQALMKMEDEGDSRSFIHNWVVVGKKAKESTKAVASNLHFDHQCQHCEKASINHSLERLLGYPWIEEKVRQGSLSLHGGYYNFVDCTFEKWTVDYAASRGKKKEGSGIAVKDRSVWS

SEQ ID NO: 20811 - protein, 259 aa, Arabidopsis thaliana
MGNESYEDAIEALKKLLIEKDDLKDVAAAKVKKITADVQAASSSDSKSFDPVERIKEGFVTFKKEKYETNPALYGELAKGQSPKYMVFACSDSRVCPSHVLDFHPGDAFVVRNIANMVPPFDKVKYAGVGAAIEYAVLHLKVENIVVIGHSACGGIKGLMSFPLDGNNSTDFIEDWVKICLPAKSKVLAESESSAFEDQCGRCEREAVNVSLANRCTYPFVREGVVKGTLALKGGYYAFVNGSFELWELQFGISPVHSI

SEQ ID NO: 20812 - protein, 290 aa, Arabidopsis thaliana
MAFTLGGRARRLVSATSVHQNGCLHKLQQIGSDRFQLGEAKAIRLLPRRTNMVQELGIREEFMDLNRETETSYDFLDEMRHRFLKFKRQKYLPEIEKFKALAIAQSPKVMVIGCADSRVCPSYVLGFQPGEAFTIRNVANLVTPVQNGPTETNSALEFAVTTLQVENIIVMGHSNCGGIAALMSHQNHQGQHSSLVERWVMNGKAAKLRTQLASSHLSFDEQCRNCEKESIKDSVMNLITYSWIRDRVKRGEVKIHGCYYNLSDCSLEKWRLSSDKTNYGFYISDREIWS

SEQ ID NO: 20813 - protein, 286 aa, Arabidopsis thaliana
MAFTLGGRARRLVSATSVHQNGCLHKLQQIGSDRFQLGEAKAIRLLPRRTNMVQELGIREEFMDLNRETETSYDFLDEMRHRFLKFKRQKYLPEIEKFKALAIAQSPKVMVIGCADSRVCPSYVLGFQPGEAFTIRNVANLVTPVQNGPTETNSALEFAVTTLQVENIIVMGHSNCGGIAALMSHQNHQGQHSRWVMNGKAAKLRTQLASSHLSFDEQCRNCEKESIKDSVMNLITYSWIRDRVKRGEVKIHGCYYNLSDCSLEKWRLSSDKTNYGFYISDREIWS

SEQ ID NO: 20814 - protein, 255 aa, Arabidopsis thaliana
MAFTLGGRARRLVSATSVHQNGCLHKLQQIGSDRFQLEAKAIRLLPRRTNMVQELGIREEFMDLNRETETSYDFLDEMRHRFLKFKRQKYLPEIEKFKALAIAQSPKVMVIGCADSRVCPSYVLGFQPGEAFTIRNVANLVTPVQNGPTETNSALEFAVTTLQVENIIVMGHSNCGGIAALMSHQNHQGQHSSLVERWVMNGKAAKLRTQLASSHLSFDEQCRNCEKESIKDSVMNLITYSWIRDRVKRDREIWS

SEQ ID NO: 20815 - protein, 215 aa, Urochloa panicoides
MSGCLCLPGYKKKTMDPVERLQSGFKQFKSEVYDKKPELFEPLKEGQAPTYMVFACSDSRCCPSVTLGLKPGEAFTVRNIAAMVPPYDKNRYTGIGSAIEYAVCALKVKVLTVIGHSRCGGIKALLSMQDGAADNFHFVEDWVRIGFLAKKKVLTDHPMAPFDDQCSILEKEAVNVSLYNLLTYPWVKEGVSNGSLKLVGGHYDFVKGAFVTWEK

SEQ ID NO: 20816 - protein, 240 aa, Urochloa panicoides
MSALAIRSAPSSIIASVRTPAHRRPGLVRNAAATTAELTMDPVERLQSGFKQFKSEVYDKKPELFEPLKEGQAPTYMVFACSDSRCCPSVTLGLKPGEAFTVRNIAAMVPPYDKNRYTGIGSAIEYAVCALKVKVLTVIGHSRCGGIKALLSMQDGAADNFHFVEDWVRIGFLAKKKVLTDHPMAPFDDQCSILEKEAVNVSLYNLLTYPWVKEGVSNGSLKLVGGHYDFVKGAFVTWEK

SEQ ID NO: 20817 - protein, 214 aa, Mesorhizobium loti
MPHLPDHLLAGYRNFMNGRYLTESGRYRELAREGQAPETMIVACCDSRAAPEAIFDAGPGELFVLRNVGNLVPPYEPDGEFHSTSAALEFAVQSLKVKNIVVMGHGRCGGIRAALDPNAAPLSPGDFIGKWMSLIAPAAETVSSSTFMTAAERQTALERISIRYSIANLRTFPCVSILEGKGRLSLHGAWFDISTGELWVMNKETGDFERPVLE

SEQ ID NO: 20818 - protein, 227 aa, Sinorhizobium meliloti
MPQERVDETGLPMDIQGFPEHLLTGYRNFMSGRFNEQQQRYKTLAESGQKPKTMVIACCDSRAAPETIFDSGPGELFVVRNVANMMPPYEPDGHYHSTSAALEFAVQSLRVTNIVVMGHGRCGGIKAALDPDAEPLSPGDFIGRWMNLLKPAAEQIQSNDVMTQAERQRALERVSIRNSIANLRTFPCVNILESKGKLRLHGAWFDISTGELWVMDAKTGDFSRPGM

SEQ ID NO: 20819 - protein, 330 aa, Glycine max
MSTSSINGWCLSSISPAKTSLKKATLGPSVFATVSTPSSPSSSSSSSFPSLIQDRPVFAAPAPIITPTVREDMAKEYEQAIEELQKLLREKSELKATAAEKVEQITASLGTSSSDGIPSSEASDRIKAGFIHFKKEKYDKNPALYGELAKGQSPKFMVFACSDSRVCPSHVLDFQPGEAFVVRNVANIVPPYDQSKYAGTGAAVEYAVLHLKVSEIVVIGHSACGGIKGLLSFPYDGTYSTDFIEEWVKIGLPAKAKVKTQHGDAPFAELCSHCEKEAVNVSLGNLLTYPFVRDGLVNKTLSLKGGYYDFVKGSFELWGLQFGLASSFSV

SEQ ID NO: 20820 - protein, 308 aa, Glycine max
  unsure (1)..(308): unsure at all Xaa locations
XLEDSKANKEANPTKNSNXLILGXSVKSNFHISEREDMAKEYEQAIEELQKLLREKSELKATAAEKVEQITXASLGTSSSDGXIPSSEASDRIKAGFIHFKKEKYDKNPALYGELAKGQSPKFMVFACSDSRVCPSHVLDFQPGEAFVVRNVANIVPPYDQSKYAGTGAAVEYAVLHLKVSEIVVIGHSACGGIKGLLSFPYDGTYSTDFIEEWVKIGLPAKAKVKTQHGDAPFAELCSHCEKEAVNVSLGNLLTYPFVRDGLVNKTLSLKGGYYDFVKGSFELWGLQFGLASSFSVKDVATILHWKL

SEQ ID NO: 20821 - protein, 331 aa, Glycine max
  unsure (1)..(331): unsure at all Xaa locations
MSTSSINGWCLSSISPAKTSLRKATLRPSVFATLNTPSSPSSSSSFPSLIQDRPVFAAPAPIITPTVREDMAKEYEKAIEELQKLLREKSELKATAAEKVEQITASLGTSSSDGIPSSEASDRIKAGFIHFKKEKYDKNPALYGELAKGQSPKFMVFACSDSRVCPSHVLDFQPGEAFVVRNVANIVPPYDQSKYAGTGAAVEYAVLHLKVSEIVVIGHSAXCGGIKGLLSFPYDGXTYSTDFIEEWVKIGLPAKAKVKTQHGDAPFAELCSHCEKESVNVSLGNLLTYPFVRDGLVNKTLSLKGGYYDFVKGSFEXLWGLQFGLASSFSV

SEQ ID NO: 20822 - protein, 261 aa, Glycine max
MAKSSELAIEELKKLLRDKEEFDAVAAAKVEELIAELQGCGPRPYEPAVQRIVDGFTHFKINNFDKNSDLYSQLANGQSPKYLVFSCSDSRVSATTILNFQPGEAFMVRNIANMVPPFNQLRYSGVGAAIEYAITALKVPNILVIGHSRCGGIQRLMSHPEDGSSPFDFIDDWVKIGLPAKLKVLKEYEGYDFKEQCKFCEKESVNNSLVNLKTYPYVEKGIRNKNIALLGGYYDFVIGEFKLWKYESHITEPISIPLCTH

SEQ ID NO: 20823 - protein, 182 aa, Glycine max
  unsure (1)..(182): unsure at all Xaa locations
XGQSPKFMVFACSDSRXVCPSHVLDFQPGEAFVVRNVANIVPPYDQSKYAGTGAAVEYAVLHLKVSEIVVIGHSACGGIKGLLSFPYDGTYSTDFIEEWVKIGLPAKAKVKTQHGDAPFAELCSHCEKESVNVSLGNLLTYPFVRDGLVNKTLSLKGGYYDFVKGSFELWGLQFGLASSFSV

SEQ ID NO: 20824 - protein, 261 aa, Glycine max
MAKSSELAIEELKKLLRDKEEFDAVAAAKVEELIAELQGCGPRPYEPAVQRIVDGFTHFKINNFDKNSDLYSQLANGQRPKYLVFSCSDSRVSATTILNFQPGEAFMVRNIANMVPPFNQLRYSGVGAAIEYAITALKVPNILVIGHSRCGGIQRLMSHPEDGSAPFDFIDDWVKIGLPAKLKVLKEYEGYDFKEQCKFCEKESVNNSLVNLKTYPYVEKGIRNKNIALLGGYYDFVIGEFKLWKYESHITEPISIPLCTH

SEQ ID NO: 20825 - protein, 261 aa, Glycine max; identical to SEQ ID NO: 20824

SEQ ID NO: 20826 - protein, 324 aa, Glycine max
  unsure (1)..(324): unsure at all Xaa locations
FQKTKPCRFCARGRVRFSLSSPMAAPAPFSLSSDPFASKSATSTXPWSCRAENRELXANSFRIVHGIKEKSXGFTLKASMGPPGFTEKLNNNRLKTLADAEDGCDIFNDLKDRFLSFKKNKYMKNIEQFENLAKVQTPKFMVIACADSRVCPSNVLGFQPGEAFMIRNVANLVPTFESGPSETNAALEFAVNSLLVENILVIGHSCCGGIRALMGMQDDDVEKSFIKSWVIAGKNARKKAKAAASNLSFDEQCKHCEKESINHSLLNLLTYPWIEEKVANGELSIHGGYYDFTDCSFEKWTLDYRGTKLEENGKIAAKNKIFWC

SEQ ID NO: 20827 - protein, 239 aa, Glycine max
  unsure (1)..(239): unsure at all Xaa locations
XSAARRRQNYQNLFGLMKQRFLSFKSQKYIQKXELEHFEALAEAQFPKVIANXFMVIACADSRVCPSNILGFQPGEVFMIRNIANLVPVMKNGPSECNAALEFAVTTLQVENILVIGHSSCAGIEALMNMQEDAESRNFIHKWVANGKLAKQRTKAATAHLSFDQQCKFCEKESINQSLLNLLSYPWIQDRVRKELLSLHGGYYNFSNCSFEKWTLDFXXQCNVEEGSSYVVKEQEFWC

SEQ ID NO: 20828 - protein, 325 aa, Glycine max
  unsure (1)..(325): unsure at all Xaa locations
FQKTKQCLFFSLHNFYFCLSSPMAAPAPFSLSSDPFASKSATSTIFGPAALKKGNFEQTHFGIFTALRRXXQGFTLKASMGPPGFTEKLNNNKLKTLADAEDGCDIFNDLKDRFXLSFKKNKYLKNIEHFENLAKVQTPKFMVIACADSRVCPSNVLGFQPGEAFMIRNVANLVPTFESGPTETNAALEFAVNSLLVENILVIGHSCCGGIRALMGMQDDDVEKSFIKSWVIAGKNARKKAKAAASNLSFDEQCKHCEKESINHSLLNLLTYPWIEEKVANGELSIHGGYYDFTDCSFEKWTLDYRGTKLEENGKIAAKNKIFWC

SEQ ID NO: 20829 - protein, 172 aa, Glycine max
  unsure (1)..(172): unsure at all Xaa locations
XCSDSXRVCPSHVLDFQPGEAFXVRNVANIVPPYDQSKYAGTGAAVEYAVLHLKVSEIVVIGHSACGGIKGLLSFPYDGTYSTDFIEEWVKIGLPAKAKVKTQHGDAPFAELCSHCEKEAVNVSLGNLLTYPFVRDGLVNKTLSLKGGYYDFVKGSFELWGLQFGLASSFSV

SEQ ID NO: 20830 - protein, 338 aa, Glycine max
  unsure (1)..(338): unsure at all Xaa locations
MSTSSINGWCLSSISPAKTSLKKATLXAPSVFATVSTPSSPSSSSSSSSFPSLIQDRPVFAAPSPIITPTVREDMAKEYEQAIEELQKLLREKSELKATAAEKVEQITASLGTSSSDGIPSSEASDRIKAXGFIHFKKEKYDKNPALYGELAKGQSPXKFMXEFACSDSRVCPSHVLEFQPGEAFVVRNVANIVPPYDQSKYAGTGXAAVEYAVLHLKVSEIVVIGHSACGGIKGLXCLFPYDGTYSTDFIEEWVKIGLAXAKAKVKTQHGDAPFAELCSHCEKEAVNVSLGNLLTYPFVRDGLVNKTLSLKGGYYDFVKGSFELWGLQFGLASSFSV

SEQ ID NO: 20831 - protein, 292 aa, Glycine max
YLLIISQTQTSLFSSKSHHPESTKATHISNLFLKEEMAGESYEEAITSLTKLLSEKAELGGVAAAKIKELTAELDAAGSKPFNPEERIRTGFIHFKNEKFEKNPYLYGELAKGQSPKFMVFACSDSRVCPSHILDFQPGEAFMVRNIANMVPPYDKTKYSGAGAAIEYAVLHLKVENIVVIGHSCCGGIKGLMSIPDDGTTASEFIEQWVQICTPAKSKVKAGKSDLSFSEQCTNCEKEAVNVSLGNLLTYPFVRDGVVNKTLALKGAHYDFVNGNFELWDLNFKLLPTISV

SEQ ID NO: 20832 - protein, 336 aa, Glycine max
  unsure (1)..(336): unsure at all Xaa locations
PRVRPRVRINGWCLSSISPAVTSRKKATLGPSFFATVSTPSSPSSSSSSSFPSLIQDRPVFAAPAPIITPTVREDMAKEYEQAIEELQKLLREKSELKATAAEKVEQITASLGTSSSDGIPSSEASDRIKAGFIHFKKEKYDKNPALYGELAKGQSPKFMVFACSDSRVCPSHVLDFQPGEAFVVRNVANIVPPYDQSKYAGTGAAVEYAVLHLKVSEIVVIGHSACGGIKGLLSFPYDGTYSTDFIEEWVKIGXLPAKAKVKTQHGDAPFAELCSHCEKKSVNVSLGNLLTYPFVRDXGLVNKTLSLKGGYYDFVKGSFELWXALQFGLASSVCV

SEQ ID NO: 20833 - protein, 275 aa, Glycine max
  unsure (1)..(275): unsure at all Xaa locations
YPESTKATHMGNLFFKEEMAGESYEEAITSLTKLLSEKAELGGVAAAXIKELTAELDAAGSKPFNPEERIRTGFIHFKNEKFEKNPDLYGELSKGQSPKFMVFACSDSRVCPSHILDFQPGEAFMVRNIANMVPPYDKTKYSGAGAAIEYAVXLNLKVENIVVIGHSCCGGIKGLMSIPDDGTTASEFIEQWVQICTPAKSKVKAGKSDLSFSEQCTNCEKEAVNVSLGNLLTYPFVRDGVVNKTLALKGAHYDFVNGNFELWDLNFKLLPTISV

SEQ ID NO: 20834 - protein, 290 aa, Glycine max
  unsure (1)..(290): unsure at all Xaa locations
GMHNASLIIETDPASVAHNTXVLVPLLQRNMAGGSYEEAIAALTKLLSEKADLGGVAAAKIKQLTAELDTATANGSTPFNPDERIRTGFAHFKNEKYQKNPELYGELAKGQSPKFMVFACSDSRVCPSHILDFNPGEAFVVRNIANMVPPYDKTKYSGTXGRPIEYAVLHLKVENIVVIGHSCCGGIKGLMSIPDDGTTASEFIEHWVQICTPAKSKVKTEANTLEFSEQCTSCEKEAVNVSLGNLLTYRFVRDAVVKKTLALKGAHYNFVKGTFELWDLDLKISNSVSV

SEQ ID NO: 20835 - protein, 164 aa, Glycine max
  unsure (1)..(164): unsure at all Xaa locations
XTRPPTRPAAAAATKPSIDSSSSPSLLTNNHPXXPSKMDAAVDRLKDGFAKFKTEFYDKKPELFEPLKAGQAPKYMVFSCADSRVCPSVTMGLEPGEAFTVRNIANMVPAYCKIKHAGVGSAIEYAVCALKVELIVVIGHSRCGGIKALLSLKDGAPDSFHFLX

SEQ ID NO: 20836 - protein, 266 aa, Medicago sativa
MANQSSELAIEQLKKLLREKEELNEVATTKIEELIVELQGCHPQPIDPAEQRIIDGFTYFKLNNFNKNPELYDRLAKGQSPKFMVFACSDSRVSPSIILNFQPGEAFKVRNIANMVPPFNQLRYSGVGATFEYAITALKVESILVIGHSRCGGISRLMSHPEDGSAPYDFIDDWVKIGLSSKVKVLKGHECNDFKEQCKFCEMDSVNNSLVNLKTYPYVDSEIRNENLALLGGYYDFVNGEFKLWKYKTHVTKSVTIPLNGFDMTK

SEQ ID NO: 20837 - protein, 328 aa, Pisum sativum
MSTSSINGFSLSSLSPAKTSTKRTTLRPFVSASLNTSSSSSSSTFPSLIQDKPVFASSSPIITPVLREEMGKGYDEAIEELQKLLREKTELKATAAEKVEQITAQLGTTSSSDGIPKSEASERIKTGFLHFKKEKYDKNPALYGELAKGQSPPFMVFACSDSRVCPSHVLDFQPGEAFVVRNVANLVPPYDQAKYAGTGAAIEYAVLHLKVSNIVVIGHSACGGIKGLLSFPFDGTYSTDFIEEWVKIGLPAKAKVKAQHGDAPFAELCTHCEKEAVNASLGNLLTYPFVREGLVNKTLALKGGYYDFVKGSFELWGLEFGLSSTFSV

SEQ ID NO: 20838 - protein, 221 aa, Pisum sativum
TTSSSDGIPKSEASERIKTGFLHFKKEKYDKNPALYGELAKGQSPPFMVFACSDSRVCPSHVLDFQPGEAFVVRNVANLVPPYDQAKYAGTGAAIEYAVLHLKVSNIVVIGHSACGGIKGLLSFPFDGTYSTDFIEEWVKIGLPAKAKVKAQHGDAPFAELCTHCEKEAVNASLGNLLTYPFVREGLVNKTLALKGGYYDFVKGSFELWGLEFGLSSTFSV

SEQ ID NO: 20839 - protein, 329 aa, Pisum sativum
MSTSSINGFSLSSLSPAKTSTKRTTLRPFVFASLNTSSSSSSSSTFPSLIQDKPVFASSSPIITPVLREEMGKGYDEAIEELQKLLREKTELKATAAEKVEQITAQLGTTSSSDGIPKSEASERIKTGFLHFKKEKYDKNPALYGELAKGQSPPFMVFACSDSRVCPSHVLDFQPGKAFVVRNVANLVPPYDQAKYAGTGAAIEYAVLHLKVSNIVVIGHSACGGIKGLLSFPFDGTYSTDFIEEWVKIGLPAKAKVKAQHGDAPFAELCTHCEKEAVNASLGNLLTYPFVREGLVNKTLALKGGYYDFVKGSFELWGLEFGLSSTFSV

SEQ ID NO: 20840 - protein, 264 aa, Nicotiana tabacum
NPILREEMAKESYEQAIAALEKLLSEKGELGPIAAARVDQITAELQSSDGSKPFDPVEHMKAGFIHFKTEKYEKNPALYGELSKGQSPKFMVFACSDSRVCPSHVLNFQPGEAFVVRNIANMIPAYDKTRYSGVGAAIEYAVLHLKVENIVVIGHSACGGIKGLMSLPADGSESTAFIEDWVKIGLPAKAKVQGEHVDKCFGDQCTACEKEAVNVSLGNLLTYPFVREGLVKKTLALKGGHYDFVNGGFELWGLEFGLSPSLSV

SEQ ID NO: 20841 - protein, 321 aa, Nicotiana tabacum
MSTASINSCLTISPAQASLKKPTRPVAFARLSNSSSSTSVPSLIRNEPVFAAPTPIINPILREEMAKESYEQAIAALEKLLSEKGELGPIAAARVDQITAELQSSDGSKPFDPVEHMKAGFIHFKTEKYEKNPALYGELSKGQSPKFMVFACSDSRVCPSHVLNFQPGEAFVVRNIANMVPAYDKTRYSGVGAAIEYAVLHLKVENIVVIGHSACGGIKGLMSLPADGSESTAFIEDWVKIGLPAKAKVQGEHVDKCFADQCTACEKEAVNVSLGNLLTYPFVREGLVKKTLALKGGHYDFVNGGFELWGLEFGLSPSLSV

SEQ ID NO: 20842 - protein, 321 aa, Nicotiana tabacum
MSTASINSCLTISPAQASLKKPTRPVAFARVSNSSSSPSVPSLIRNEPVFAAPTPIINPILREEMANESYEQAIAALEKLLSEKGELGPIAAARVDQITAELQSSDGSKPFDPVEHMKAGFIHFKTEKYEKNPALYGELSKGQSPKYMVFACSDSRVCPSHILNFQPGEAFVVRNIANMVPAYDKTRYSGVGAAIEYAVLHLKVENIVVIGHSACGGIKGLMSLPADGSESTAFIEDWVKIGLPAKAKVQGEHVDKCFADQCTACEKEAVNVSLGNLLTYPFGRDGLVKKTLALKGGHYDFVNGGFELWGLEFGLSPSLSV

SEQ ID NO: 20843 - protein, 227 aa, Coccomyxa sp. PA
MSAKDTADLSPLLEANRKWADECAAKDSTYFSKVAGSQAPEYLYIGCADSRVSPAQLFNMAPGEVFVQRNVGNLVSNKDLNCMSCLEYTVDHLKIKHILVCGHYNCGACKAGLVWHPKTAGVTNLWISDVREVRDKNAAKLHGLSADDAWDKMVELNVEAQVFNVCASPIVQAAWARGQPLSVHGIVYTPGTGLVKELIKPITGMEDAGALLRADLKQHCFFSESLA

SEQ ID NO: 20844 - protein, 279 aa, Flaveria bidentis
MFKNCIALCCAKRPSVAEDMEANGVPVYIDDVIDRLNKLLSEKNDLQIFAAEKIKQLTAELEVSDAGEFKAVERIRNGFARFKKEKYDTNPTLYGELAKGQSPKFLVFACSDSRVCPSHILNFQPGEAFVVRNIANMVPPYDTIKHSGAGAAIEYAVLHLKVENIVVIGHSCCGGIKGLMSIPDDGTTASDFIEQWVKIGLPAKSKVKADCSDLEYSDLCTKCEKEAVNVSLGNLLTYPFVREAALNKKLSLKGAHYDFVNGSFDLWNLNIGFSSSIIY

SEQ ID NO: 20845 - protein, 331 aa, Flaveria bidentis
MSAASAFAMNAPSFVNASSLKKASTSARSGVLSARFTCNSSSSSSSSSATPPSLIRNELVFAAPAPIITPNWTEDGNESYEEAIDALKKTLIEKGELEPVAATRIDQITAQAAAPDTKAPFDPVERIKSGFVKFKTEKFVTNPALYDELAKGQSPKFMVFACSDSRVCPSHVLDFQPGEAFVVRNVANMVPPFDKTKYSGVGAAVEYAVLHLKVQEIFVIGHSRCGGIKGLMTFPDEGPHSTDFIEDWVKVCLPAKSKVVAEHNGTHLDDQCVLCEKEAVNVSLGNLLTYPFVRDGLRNKTLALKGGHYDFVNGTFELWALDFGLSSPTSV

SEQ ID NO: 20846 - protein, 324 aa, Flaveria bidentis
AMNAPSFVNASSLKKASTSARSGVLSARFTCNSSSSSSSSSATPPSLIRNELVFAAPAPIITPNWTEDGNESYEEAIDALKKTLIEKGELEPVAATRIDQITAQAAAPDTKAPFDPVERIKSGFVKFKTEKFVTNPALYDELAKGQSPKFMVFACSDSRVCPSHVLDFQPGEAFVVRNVANMVPPFDKTKYSGVGAAVEYAVLHLKVQEIFVIGHSRCGGIKGLMTFPDEGPHSTDFIEDWVKVCLPAKSKVVAEHNGTHLDDQCVLCEKEAVNVSLGNLLTYPFVRDGLRNKTLALKGGHYDFVNGTFELWALDFGLSSPTSV

SEQ ID NO: 20847 - protein, 258 aa, Flaveria bidentis
MGSKSYDEAIAALKKLLSEKKELAPMAAAKIDQITAQLQTLDSTKPGFDPVERIKTGFAKFKTEKYLKNPALYGELSKGQSPKFMAFACSDSRVCPSHVLDFQPGEAFVVRNVANIVPPFDKLKYAGVGSAVEYAVLHLKVEQIVVIGHSKCGGIKGLMTFPDEGPTSTDFIEDWVKVGLPAKSKVKAEHGSASIDDQCVSCEKEAVNVSLANLLTYPFVRNGLINKTLAIKGAHYDFVNGTFELWALEFSLSPTTSA

SEQ ID NO: 20848 - protein, 190 aa, Flaveria linearis
NPTLYGELAKGQSPKFLVFACSDSRVCPSHILDFQPGEAFVVRNIANMVPPYDTIKHSGAGAAIEYAVLHLKVENIVVIGHSCCGGIKGLMSIPDDGTPASDFIEQWVKLGLPAKSKVKANCNNLEFADLCTKCEKEAVNVSLGNLLTYPFVRDALVNKKLSLKGAHYDFVNGAFDLWNLDFGISPSLLQ

SEQ ID NO: 20849 - protein, 330 aa, Flaveria linearis
MSTASAFAINAPSFVNASSLKKSSTSSARSGVLSARFTCNSSSSSSSATPPSLIRNEPVFAAPAPIITPNWTEDGNESYEEAIDALKKMLIEKGELEPVAAARIDQITAQAAAPDTKAPFDPVERIKSGFVKFKTEKFVTNPALYDELAKGQSPKFMVFACSDSRVCPSHVLDFQPGEAFVVRNVANMVPPFDKTKYSGVGAAVEYAVLHLKVQEIFVIGHSRCGGIKGLMTFPDEGPHSTDFIEDWVKVCLPAKSKVVAEHNGTHLDDQCVQCEKEAVNVSLGNLLTYPFVRDGLRNNTLALKGGHYDFVNGTFELWALDFGLSSPTSV

SEQ ID NO: 20850 - protein, 329 aa, Flaveria pringlei
MSTASAFAINAPSFVNASSLKKSSSSARSGVLSARFTCNSSSSSSSATPPSLIRNEPVFAAPAPIITPNWTEDGNESYEEAIDALKKMLIEKGELEPVAAARIDQITAQAAAPDTKAPFDPVERIKSGFVKFKTEKFVTNPVLYDELAKGQSPKFMVFACSDSRVCPSHVLDFQPGEAFVVRNVANMVPPFDKTKYSGVGAAVEYAVLHLKVQEIFVIGHSRCGGIKGLMTFPDEGPHSTDFIEDWVKVCLPAKSKVVAEHNGTHLDDQCVLCEKEAVNVSLGNLLTYPFVRDGLRNNTLALKGGHYDFVNGTFELWALDFGLSSPTSV

SEQ ID NO: 20851 - protein, 276 aa, Dictyostelium discoideum
MSSQNTPSATSPTIEPQNTNNNNNESQTTQVAAPANTCVPNCNSCTSPSVTNSIEIEQLIANNHAWSTRIKQEDPGFFAHLAQAQKPCFPWIGCSDSRVPAERLTGLESGQIFVHRNVANLVIHTDLNCLSVLQYAVEVLQVEHIIVCGHYGCGGVAASYDNPELGLINNWLLHIRDLTFKHAELIEMTKSNRKRLLSTLCELNVVEQCNNLGNTTIMQSAWKKGQNVKIHGWIYGIHDGYLRDLGVSASSRETLELNYKNAILKLKDNCSLGDSN

SEQ ID NO: 20852 - protein, 261 aa, Dictyostelium discoideum
MSAPNNNNNNNNTSPRQTTTSPTTTAAVTTKAPGPFHSHSTPQYLNCAPNCNTCTSPNVNSIEIDQLIANNHAWSTRIKQEDPGFFTHLAEAQKPRFLWIGCSDSRVPAERLTGLESGQLFVHRNVANLVIHTDLNCLSVVQYAVEVLQVEHIIICGHYGCDLTFKHATMISMLEGNRKRLLDTLCELNVVEQCFNLGNSTVMQSAWKRGQDVKIHGWIYGIQDGYLRDLGITASSRDTLESNYKNSIQKLKENISLSTSN

SEQ ID NO: 20853 - protein, 324 aa, Hordeum vulgare
MSLQIGRTERARSPVFVFAHKRQLLHGRCSTIDNANCSTCSMKINSTCTLTALPIAALPGPRTTSHYSTAAANWCYATVAPRARSSTIAASLGTPAPSSSASFRPKLIRTTPVQAAPVAPALMDAAVERLKTGFEKFKTEVYDKKPDFFEPLKAGQAPKYMVFACADSRVCPSVTLGLEPGEAFTIRNIANMVPAYCKNKYAGVGSAIEYAVCALKVEVIVVIGHSRCGGIKALLSLKDGADDSFHFVEDWVRIGFPAKKKVQTECASMPFDDQCTVLEKEAVNVSLQNLLTYPFVKEGVTNGTLKLVGGHYDFVSGKFETWEQ

SEQ ID NO: 20854 - protein, 358 aa, Oryza sativa
  unsure (1)..(358): unsure at all Xaa locations
FIIFLKKKIAASTSVSPSHRRRARCLALPRKIPPGRCRAKLFPPTNARDPAPTTTTRASTGTSSHGSXSAPXXASPCLNLAPPTADGPGRSRSAVSLRVGGSSRRDSTMASRDHSGLTRQLLDFQHGTVDEIDGEHDPFMELKARFMDFKHRNRVDNISNYQNLAQQQTPKFMVVACADSRVCPSSVLGFQPGEAFTVRNIANLVPPYQHGASETSAALEFAVNTLEVENVLVVGHSRCGGIQALMSMKSKQDDSQSRSFIRDWVSIAKSARLSTEAAAGNLNFELQCKHCEKESINSSLLNLLTYPWIEKRVNEGTLSLHGGYYNFIDCTFEKWKLVYRQGLEGGSKYAIKNRTTWS

SEQ ID NO: 20855 - protein, 302 aa, Oryza sativa
  unsure (1)..(302): unsure at all Xaa locations
ACCVLWSPGPCDQQLGAWLLPPPPHAQLQLRSLTRHHLRRCLLSHVHLKTQRSSTCGAPPDTTTASLPPASSRRLVVQSIGGTFRVPQWPQEIXSGLTRQLLDFQHGTVDEIDGEHDPFMELKARFMDFKHRNCVDNISNYQNLAQQQTPKFMVVACADSRVCPSSVLGFQPGEAFTVRNIANLVPPYQHGASETSAALEFAVNTLEVENVLVVGHSRCGGIQALMSMKSKQDDSQSRSFIRDWVSIAKSARLSTEAAAGNLNFELQCKHCEKESINSSLLNLLTYPXIEKRVNEGTLSLHX

SEQ ID NO: 20856 - protein, 273 aa, Oryza sativa
MSTAAAAAAAQSWCFATVTPRSRATVVASLASPSPSSSSSSSSNSSNLPAPFRPRLIRNTPVFAAPVAPAAMDAAVDRLKDGFAKFKTEFYDKKPELFEPLKAGQAPKYMVFSCADSRVCPSVTMGLEPGEAFTVRNIANMVPAYCKIKHAGVGSAIEYAVCALKVELIVVIGHSRCGGIKALLSLKDGAPDSFHFVEDWVRTGFPAKKKVQTEHASLPFDDQCAILEKEAVNQSLENLKTYPFVKEGIANGTLKLVGGHYDFVSGNLDLWEP

SEQ ID NO: 20857 - protein, 273 aa, Oryza sativa; identical to SEQ ID NO: 20856

SEQ ID NO: 20858 - protein, 272 aa, Oryza sativa
MSTAAAAAAAQSWCFATVTPRSRATVVASLASPSPSSSSSSSNSSNLPAPFRPRLIRNTPVFAAPVAPAAMDAAVDRLKDGFAKFKTEFYDKKPELFEPLKAGQAPKYMVFSCADSRVCPSVTMGLEPGEAFTVRNIANMVPAYCKIKHAGVGSAIEYAVCALKVELIVVIGHSRCGGIKALLSLKDGAPDSFHFVEDWVRTGFPAKKKVQTEHASLPFDDQCAILEKEAVNQSLENLKTYPFVKEGIANGTLKLVGGHYDFVSGNLDLWEP

SEQ ID NO: 20859 - protein, 273 aa, Oryza sativa; identical to SEQ ID NO: 20856

SEQ ID NO: 20860 - protein, 248 aa, Oryza sativa
  unsure (1)..(248): unsure at all Xaa locations
MSTAAAAAAAQSWCFATVTPRSRATVVASLASPSPPSPPSSSNSSNLPAPFRPRLIRNTPVFAAPVAPAAMDAAVDRLKDGFAKFKTEFYDKKPELFEPLKAGQAPKYMVFSCADSRVCPSVTMGLEPGEAFTVRNIANMVPAYCKIKHAGVGSAIEYAVCALKVELIVVIGHSRCGGIKALLSLKDGAPDSFHFVEDWVRTGFPAKKKVQTEHASLAFDDQCAILEKEAVNQSLENLKTYPFVRRGX

SEQ ID NO: 20861 - protein, 252 aa, Oryza sativa
  unsure (1)..(252): unsure at all Xaa locations
AGADRFCSYSDSRSRGRIEDGCLLLLLPGLQTREGEPDAVDQRVTHPAQXPRPTTPYHPPPPPFITYTDKGMNAVERFKTGFENFRNTIYDKRPELFERLKTGQSPKYMVFSCADSRVCPTLTFGLQPGEAFTVRNIASMVPAYDKVRQCSIGSAIEYAVVVLKVECIIVIGHSCCGGIKELLSLKEDRPNTFHFVDDWVKIGLAAKKKVERENMLLPFDDQCTVLEKSLVNIASLSSLWSPLMARGQGXGX

SEQ ID NO: 20862 - protein, 169 aa, Triticum aestivum
  unsure (1)..(169): unsure at all Xaa locations
XHPILVFACSDSRVCPSVTLGLHPGEAFAVRNIASMVPPYDKTKYAGVGSAIEYAVCALKVEVIVVIGHSRCGGIKALLSLEDGAPDKFHFVEEWVRIGGPAKTKVKTDHASVPFEDQCSILEKEAVNVSLENLKTYPFVKEGVEKGTLKLVGGHYDFVNGKFETWEPX

SEQ ID NO: 20863 - protein, 233 aa, Triticum aestivum
  unsure (1)..(233): unsure at all Xaa locations
XESHPTSSPTLQQASSFSLFLTSSPTLPARXMDPAVERLKTGFEKFKTEVYDQKPDLFEPLKAHQSPKYMVFACADSRVCPSVTLGLEPGEAFTVRNIAAMVPSYCKNKHTGVGSAIEYAVCALKVEFIVVIGHSRCGGIKALLNLKDGADDTFHFVEDWVRIGYPARKKVKDECSEMPFEEQCGVLEKEAVNVSLQNLSTYPFVKEAVANGTLKLVGGHYDFVSGKFDTWAL

SEQ ID NO: 20864 - protein, 227 aa, Triticum aestivum
  unsure (1)..(227): unsure at all Xaa locations
XPPPPSASSFSLFLXXSSPTLPARXMDPAVERLKTGFEKFKTEVYDQKPDLFEPLKAHQSPKYMVFACADSRVCPSVTLGLEPGEAFTVRNIAAMVPCYCKNKHTGVGSAIEYAVCALKVEVIVVIGHSRCGGIKALLNLKDGADDTFHFVEDWVRIGFPARKKVKDECSEMSPEEQCGVLEKEAVNVSLQNLNTYPFVKEAVANGTLKLVGGHYDFVSGKFDTWAL

SEQ ID NO: 20865 - protein, 240 aa, Triticum aestivum
  unsure (1)..(240): unsure at all Xaa locations
AGRVREKPTRHPPPPSSKQVPSLSSTPPPLPPLRPCSXMDPAVERLKTGFEKFKTEVYDQKPDLFEPLKAHQSPKYMVFACADSRVCPSVTLGLEPGEAFTVRNIAAMVPSYCKNKHTGVGSAIEYAVCALKVEFIVVIGHSRCGGIKALLNLKDGADDTFHFVEDWVRIGYPARKKVKDECSEMPFEEQCGVLEKEAVNVSLQNLSTYPFVKEGVANGTLKLVGGHYDFVSGKFDTWTL

SEQ ID NO: 20866 - protein, 267 aa, Triticum aestivum
  unsure (1)..(267): unsure at all Xaa locations
XPAGPGRMSTAXAANWCYATVVAPRARSSTIVASLGTPAPSNSSSFRPKLIRNTPVQAAPVAPALMDAAVERLKTGFEKFKTEVYDKKPDFFEPLKAGQAPKYMVFACADSRVCPSVTLGLEPGEAFTIRNIANMVPSYCKNKYAGVGSAIEYAVCALKVEVIVVIGHSRCGGIKALLSLKDGADDSFHFVEDWVRIGFPAKKKVQTECASMPFDDQCTVLEKEAVNVSLQNLLTYPFVKEGVSNGTLKLVGGHYDFVSGKFETWEQ

SEQ ID NO: 20867 - protein, 339 aa, Triticum aestivum
  unsure (1)..(339): unsure at all Xaa locations
RFKRVFILYIGYNTGVQVHIQQACIAPQLHTIIHGKKIKFHQRSSSXVVAHSSDXLLTPNVSLTWGRMPVAAWPGRPCRSTMSTAAANWCYATVAPRARSSTIVASLGTPAPSNSSSFRPKLIRNTPVQAAPVAPALMDAAVERLKTGFEKFKTEVYDKKPDFFEPLKAGQAPKYMVFACADSRVCPSVTLGLEPGEAFTIRNIANMVPSYCKNKYAGVGSAIEYAVCALKVEVIVVIGHSRCGGIKALLSLKDGADDSFHFVEDWVRIGFPAKKKVQTECASMPFDDQCTVLEKEAVNVSLQNLLTYPFVKEGVSNGTLKLVGGHYDFVSGKFETWEQ

SEQ ID NO: 20868 - protein, 265 aa, Triticum aestivum
  unsure (1)..(265): unsure at all Xaa locations
XPAGPGQMSTAAANWCYATVAPRARSSTIVASLGTPAPSNSSSFRPKLIRNTPVQAAPVAPALMDAAVERLKTGFEKFKTEVYDKKPDFFEPLKAGQAPKYMVFACADSRVCPSVTLGLEPGEAFTIRNIANMVPSYCKNKYAGVGSAIEYAVCALKVEVIVVIGHSRCGGIKALLSLKDGADDSFHFVEDWVRIGFPAKKKVQTECASMPFDDQCTVLEKEAVNVSLQNLLTYPFVKEGVSNGTLKLVGGHYDFVSGKFETWEQ

SEQ ID NO: 20869 - protein, 229 aa, Triticum aestivum
  unsure (1)..(229): unsure at all Xaa locations
XTSSPPSTSFVSLIHTSSSSSASSLLEMALERLKTGFEKFKTEVYDQRADLFEPLKAHQSPKYMVSACADSRVCPSVTLGLEPGXAFTVRNIARXMVPCYCKERTLGVGSAIEYAVCALKVEFIVVIGHSRCGGIKALLNLKXDGADDTFHFVEDWVRIGYPARKKVKDECSEMPFEEQCGVLEKEAVNVSLQNLSTYPFVKEGVANGTLKLVGGHYDFVSGKFDTWTL

SEQ ID NO: 20870 - protein, 227 aa, Triticum aestivum
  unsure (1)..(227): unsure at all Xaa locations
CRXFGTRILHKXPSLSSSSSSTLADRKMERLRTGFDKFKTEVYDKKPDLFEPLKDNQEPTYMLFACADSRVCPSVTLGLEPGEAFTVRNIGRXMVPCYCKERTPGVGSAIEYAVCALKVKVIVVIGHSRCGGIKALLSLKDGEDDSFHFVEDWVRIGFSAKKKVKDECCDLPFEDQCAVLXEKEAVNVSLQNLSTYPFVKEGVANGTLKLIGGHYDFVSGKFDTWEL

SEQ ID NO: 20871 - protein, 277 aa, Triticum aestivum
  unsure (1)..(277): unsure at all Xaa locations
PTRPGGRGHMENXARAAARWCYATVVVAPRARSSTIVASLGRPPXAPSNSSSFRPKLIRNTPVQAAPVAPALMDAAVERLKTGFEKFKTEVYDKKPDFFEPLKAGQAPKYMVFXACADSRXVCPLVTLGLEPGEAFTVRNIAAMVPCYCKNKHTGVGSAIEYAVCALKVEVIVVIGHSRCGGIKALLNLKDGADDTFHFVEDWVRIGYPARKKVKDECSEMPPEEQCXAVLDKEAVNVSLQNLSTYPFVKEAVANGTLKLVGGHYDFVSGKFDTWAL

SEQ ID NO: 20872 - protein, 153 aa, Triticum aestivum
  unsure (1)..(153): unsure at all Xaa locations
RTRGXRREPAEVLCSRDGGYDPFSQLKARFTDFKQRNYVENFTNYQKLAEQQTPEFMVVACADSRVCPTSILGLQPGDAFTVRNVANLVPPYEHGASETTAALEFAVNSLQVPNVLVVGHSRCGGIQALMSMKSKKDDRSSRTFIRDWVSLGX

SEQ ID NO: 20873 - protein, 223 aa, Triticum aestivum
  unsure (1)..(223): unsure at all Xaa locations
XIRHELFAAPLSIQFTACPFSFSFFLVKHLVIRSSPLLPLQMDAAVERLKTGFEKFKTEVYDKKPDFFEPLKAGQAPKYMVFACADSRVCPSVTLGLEPGEAFTIRNIANMVPSYCKNKYAGXVGSAIEYAVCALKXVEVIVVIGHSRCGGIKALLSLKDGADDSFHFVEDWVRIGFPAKKKVQTECAXLTYPFVKEGVSNGTLKLVGGHYDFVSGKFETWEQ

SEQ ID NO: 20874 - protein, 257 aa, Zea mays
  unsure (1)..(257): unsure at all Xaa locations
RLGSSRPAGRAKQSAETRKSERIPPVLXXNPPEPALSSSTRLXTVMXXVERLKTGFEQFKADVYDKKPELFEPLKAHQSPKYMVFACSDSRVCPSVTLGLHPGEAFAVRNIASMVPPYDKTKYAGVGSAIEYAVCALKVEVIVVIGHSRCGGIKALLSLEDGAPDKFHFVEEWVRVGAPAKSKVLADHASAPFEDQCSILEKEAVNVSLENLKSYPFVKEGLEKGTLKLVGGHYDFVNGKFETWEPPGGALXPRGGG

SEQ ID NO: 20875 - protein, 255 aa, Zea mays
  unsure (1)..(255): unsure at all Xaa locations
HSFGRLGSSRPATTTGKDMAVERLKTGFEQFKADVYDKKPELFEPLKAHQSPKYMVFACSDSRVCPSVTLGLHPGEAFAVRNIASMVPPYDKTKYAGVGSAIEYAVCALKVEVIVVIGHSRCGGIKALLSLEDGAPDKFHFVEEWVRVGAPAKSKVLADHASAPFEDQCSILEKEAVNVSLENLKSYPFVKEGLEKGTLKLVGGHYDFVNGKFETWEPXVAIYEKFVQIRPTGLISCVECLIICRYIYTYTGIYR

SEQ ID NO: 20876 - protein, 342 aa, Zea mays
  unsure (1)..(342): unsure at all Xaa locations
DMPRLKCVNLARTCTSPVPARKRDGGQLRSQTREXDRERKGGHPXPAGGDKRGGERGQRRGGGEEEEDEQLPLPSEKKGGASEGEAAHRYPHLVTPSEPEALXQPPPPPSKASSKSMDPTVERLKSGFQKFKTEVYDKKPELFEPLKSGQSPRYMVFACSDSRVCPSVTPGLQPGEAFTVRNIASMVPPYDKIKYAGTGSAIEYAVCALKVQVIVVIGHSCCGGIRALLSLQDGAPDTFHFVEDWVKIGFIAKMKVKKEHASVPFDDQCSILEKEAVNVSLENLKTYPFVKEGLANGTLKLIGGHYDFVSGEFLTWKPNVNVISNIIFYHFSFLKKKKKKRX

SEQ ID NO: 20877 - protein, 262 aa, Zea mays
  unsure (1)..(262): unsure at all Xaa locations
MYTLPVRPTTSSIVXPACHPRAVLLLRLRPPXGSSGTPXRLRRPXATVVGMDPTVERLKSGFQKFKTEVYDKKPELFEPLKSGQSPRYMVFACSDSRVCPSVTLGLQPGEAFTVRNIASMVPPYDKIKYAGTGSAIEYAVCALKVQVIVVIGHSCCGGIRALLSLKDGAPDNFHFVEDWVRIGSPAKNKVKKEHASVPFDDQCSILEKEGVNVSLQNLKSYPFVNEGLAGGTLKLVGAHYDFVKGQFVTWGAXPQDAIEALX

SEQ ID NO: 20878 - protein, 653 aa, Zea mays
MYTLPVRATTSSIVPACHPRAVLLLRLRPPGSGSSGTPRLRRPATVVGMDPTVERLKSGFQKFKTEVYDKKPELFEPLKSGQSPRYMVFACSDSRVCPSVTLGLQPGEAFTVRNIASMVPPYDKIKYAGTGSAIEYAVCALKVQVIVVIGHSCCGGIRALLSLKDGAPDNFTFVEDWVRIGSPAKNKVKKEHASVPFDDQCSILEKEAVNVSLQNLKSYPFVKEGLAGGTLKLVGAHYSFVKGQFVTWEPPQDAIERLTSGFQQFKVNVYDKKPELFGPLKSGQAPKYMVFACSDSRVCPSVTLGLQPAKAFTVRNIAAMVPGYDKTKYTGIGSAIEYAVCALKVEVLVVIGHSCCGGIRALLSLKDGAPDNFHFVEDWVRIGSPAKNKVKKEHASVPFDDQCSILEKEAVNVSLQNLKSYPLVKEGLAGGTSSGWPHYDFVKGQFVTWEPPQDAIERLTSGFQQFKVNVYDKKPELFGPLKSGQAPKYMVFACSDSRVSPSVTLGLQPGEAFTVRNIAAMVPGYDKTKYTGIGSAIEYAVCALKVEVLVVIGHSCCGGIRALLSLQDGAPDTFHFVEDWVKIAFIAKMKVKKEHASVPFDDQWSILEKEAVNVSLENLKTYPFVKEGLANGTLKLIGAHYDFVSGEFLTWKK

SEQ ID NO: 20879 - protein, 653 aa, Zea mays; identical to SEQ ID NO: 20878

SEQ ID NO: 20880 - protein, 205 aa, Zea mays
  unsure (1)..(205): unsure at all Xaa locations
XGRDRENFSNYQNLAEQQTPKFMVIACADSRVCPTAVLGFQPGEAFTVRNVANLVPPYEHEGSETSAALEFAINTLEVENVLVVGHSRCGGIQALMSMKDDSTSGSFIKNWVSIGKSARLSTRAAAGNLSFDMQCKHCEKESINSSLLNLLTYPWIEKRVNEGTLNLHGGYYNFVDCTFEKWTLLYREGLEGGSKYAIKNRSTWC

SEQ ID NO: 20881 - protein, 318 aa, Zea mays
MIGDSGTRGVALRMGGLEAGRVLSVTMASRDHTGLTRQLLDFQHDTIDEVGAEHRKQIKTGPFMDLKARFMDFKQRNYVENFSNFQNLAEQQTPKFMVIACADSRVCPTAVLGFQPGEAFTVRNVANLVPPYEHEGSETSAALEFAINTLEVENVLVVGHSRCGGIQALMSMKDDSTSGSFIKNWVSIGKSARLSTRAAAGNLSFDMQCKHCEKESINSSLLNLLTYPWIEKRVNEGTLNLHGGYYNFVDCTFEKWTLLYREGLEGGSKYAIKNRSTWSWPMKALFTWVNFTLSPAVQHGFALPLRCSFPLHLAPLWY

SEQ ID NO: 20882 - protein, 301 aa, Zea mays
MASGVLHRSASRCPAAPTPDSGRGHGAVMIGDSGTRGVALRLGGSSRRELLSVTMASRDHTGLTRQLLDFQHDTIDEVGAEHGPFMDLKARFMDFKQRNYVENFSNYQNLAEQQTPKFMVIACADSRVCPTAVLGFQPGEAFTVRNVANLVPPYEHEGSETSAALEFAINTLEVENVLVVGHSRCGGIQALMSMKDDSTSGSFIKNWVSIGKSARLSTRAAAGNLSFDMQCKHCEKESINSSLLNLLTYPWIEKRVNEGTLNLHGGYYNFVDCTFEKWTLLYREGLEGGSKYAIKNRSTWS

SEQ ID NO: 20883 - protein, 269 aa, Zea mays
  unsure (1)..(269): unsure at all Xaa locations
DSLGRLGSSRPAGTERNNPQRLGSRKESLLFFVNPPEPALSSSTRLRPXXKDMAVERLKTGFEQFKADVYDKKPELFEPLKAHQSPKYMVFACSDSRVCPSVTLGLHPGEXAFAVRNIASMVPPYDKTKYAGVGSAIEYAVCALKVEVIVVIGHSRCGGIKALLSLEDGAPDKFHFVEEWVRVGAPAKSKVLADHASVPFEDQCSILEKEAVNVSLENLKSYPFVKEGLEKGTLKLVGGHYDFVNGKFETWEPXKEYMCSLTSKKKKKK

SEQ ID NO: 20884 - protein, 257 aa, Zea mays
  unsure (1)..(257): unsure at all Xaa locations
XRGRPGIICPMASRDHTGLTRQPXGFSTXYXIDEVGAEHAFMDLKARFMDFKQRNYVENFSNYQNLAEQQTPKFMVIACADSRVCPTAVLGFQPGEAFTVRNVANLVPPYEHEGSETSAALEFAINTLEVENVLVVGHSRCGGIQALMSMKDDSTSGSFIKNWVSIGKSARLSTRAAAGNLSFDMQCKHCEKESINSSLLNLLTYPWIEKRVNEGTLNLHGGYYNFIDCTFEKWTLLYREGLEGGSKYAIKNRSTWS

SEQ ID NO: 20885 - protein, 452 aa, Zea mays
  unsure (1)..(452): unsure at all Xaa locations
PRGRPGRESDSPIXVHIARPPHHIQHXSPASPPPRRPPPPAPAAPGSGMDPTVERLKSGFQKFKTEVYDKKPELFEPLKSGQSPRYMVFACSDSRVCPSVTLGLQPGEAFTVRNIASMVPPYDKIKYAGTGSAIEYAVCALKVQVIVVIGHSCCGGIRALLSLKDGAPDNFHFVEDWVRIGSPAKNKVKKEHASVPFDDQCSILEKEAVNVSLQNLKSYPFVKEGLAGGTLKLVGAHYDFVKGQFVTWEPPQDAIERLTSGFQQFKVNVYDKKPELFGPLKSGQAPKYMVFACSDSRVCPSVTLGLQPGEXFTVRNIAAMVPGYDKTKYTGIGSAIEYAVCALKVEVLVVIGHSCCGGIRALLSLQDGAPDTFHFVEDWVKIGFIAKMKVKKEHASVPFDDQCSILEKEAVNVSLENLKTYPFVKEGLANGTLKLIGGHYDFVSGEFLTWKK

SEQ ID NO: 20886 - protein, 541 aa, Zea mays
  unsure (1)..(541): unsure at all Xaa locations
MYTLPVRATTSSIVASLATPAPSSSSGSGRPRLRLIRNAPVFAAPATVVXHGPHRRALEERVPEVQDRGLXQEAGAVRASQVRPEPQVHGVRLLRLPRVPVGDTGTAARRGIHRPQHRFRSSGTPPSSPPPPPSXXGMDPTVERLKSGFQKFKTEVYDKKPELFEPLKSGQSPRYMVFACSDSRVCPSVTLGLQPGEAFTVRNIASMVPPYDKIKYAGTGSAIEYAVCALKVQVIVVIGHSCCGGIRALLSLKDGAPDNFHFVEDWVRIGSPAKNKVKKEHASVPFDDQCSILEKEAVNVSLQNLKSYPFVKEGLAGGTLKLVGAHYDFVKGQFVTWEPPQDAIERLTSGFQQFKVNVYDKKPELFGPLKSGQAPKYMVFACSDSRVCPSVTLGLQPGEAFTVRNIAAMVPGYDKTKYTGIGSAIEYAVCALKVEVLVVIGHSCCGGIRALLSLQDGAPDTFHFVEDWVKIGFIAKMKVKKEHASVPFDDQCSILEKEAVNVSLENLKTYPFVKEGLANGTLKLIGGHYDFVSGEFLTWKK

SEQ ID NO: 20887 - protein, 549 aa, Zea mays
  unsure (1)..(549): unsure at all Xaa locations
MYTLPVRPTTSSIVASLATPAPSSSSGSGRPRLRLRLIRNAPVFAAPATVXCKRDGGQLRSQTREIERXRKGGHPPAAGDKRGGERGQRRGGEEEENEQLPLPSEKKGGASEGEAVHRYPHLVTPSEPEALXQPPPPPSKASSKGMDPTVERLKSGFQKFKTEVYDKKPELFEPLKSGQSPRYMVFACSDSRVCPSVTLGLQPGEAFTVRNIASMVPPYDKIKYAGTGSAIEYAVCALKVQVIVVIGHSCCGGIRALLSLKDGAPDNFHFVEDWVRIGSPAKNKVKKEHASVPFDDQCSILEKEAVNVSLQNLKSYPFVKEGLAGGTLKLVGAHYDFVKGQFVTWEPPQDAIERLTSGFQQFKVNVYDKKPELFGPLKSGQAPKYMVFACSDSRVCPSVTLGLQPGEAFTVRNIAAMVPGYDKTKYTGIGSAIEYAVCALKVEVLVVIGHSCCGGIRALLSLQDGAPDTFHFVEDWVKIGFIAKMKVKKEHASVPFDDQCSILEKEAVNVSLENLKTYPFVKEGLANGTLKLIGAHYDFVSGEFLTWKK

SEQ ID NO: 20888 - protein, 545 aa, Zea mays
MYTLPVRATTSSIVASLATPAPSSSSGSGRPRLRLIRNAPVFAAPATVCKRDGGQLRSQTREIERERKGGHPPAGGHKRGGERGQRRGGEEEEDEQLPLPSEKKGGASEGEAVHRYPHLVTPSEPEALQPPPPPSKASSKGMDPTVERLKSGFQKFKTEVYDKKPELFEPLKSGQSPRYMVFACSDSRVCPSVTLGLQPGEAFTVRNIASMVPPYDKIKYAGTGSAIEYAVCALKVQVIVVIGHSCCGGIRALLSLKDGAPDNFTFVEDWVRIGSPAKNKVKKEHASVPFDDQCSILEKEAVNVSLQNLKSYPFVKEGLAGGTLKLVGAHSHFVKGQFVTWEPPQDAIERLTSGFQQFKVNVYDKKPELFGPLKSGQAPKYMVFACSDSRVCPSVTLGLQPGEAFTVRNIAAMVPGYDKTKYTGIGSAIEYAVCALKVEVLVVIGHSCCGGIRALLSLQDGAAYTFHFVEDWVKIGFIAKMKVKKEHASVPFDDQCSILEKEAVNVSLENLKTYPFVKEGLANGTLKLIGAHYDFVSGEFLTWKK

SEQ ID NO: 20889 - protein, 263 aa, Zea mays
  unsure (1)..(263): unsure at all Xaa locations
ARDHYLEHPNRKTILHTLQSPSIPPFXLFSSVAISSVVACSSPTFSLRCTVLAGEGPXDDPVERLKDGFHKFKTEVYDKKPELFEPLKAGQAPKYVVFACSDSRVCPSVTLGLQPGEAFTVRNIAAMVPAYDKTKYTGIGSAIEYAVCALKVEVLVVIGHSCCGGIRALLSLQDGAPDNFHFVENWVKIGFPAKIKVKKDHASVPFDDQCSILEKEAVNLSLENLKTYPFVKEGLANGTLKLVGGHYNFVSGEFLTWDNKQPS

SEQ ID NO: 20890 - protein, 385 aa, Zea mays
MDLKPRGELITSSPAKSSLTFPEKKAPHRLDLDSSAPIAVVSSSASLSVRSAPPLKNPSGHCRTELPFLKCPRPGRLDAQLRARMASGVLHRSASLCPAGSSADSGRGHGAVMIGDSRTRVAALRLGGSSRRELLSVTMASRDHTGLTRQLLDFQHDTIDEVGAGHDPFMDLKARFMDFKQRNYVEKFSNYQTLAEQQTPKFMVVACADSRVCPTAVLGFQPGEAFTVRNVANLVPPYEHGGTETSAALEFAVNTLQVENVLVIGHSRCGGIQALMSMKDDSTSGSFIKNWVSIGKSARLSTKAAAGNMSFDIQCKHCEKESINSSLLNLLTYPWIEKRVNEGTLNLHGGYYNFVDCTFEKWTLLYREGLEGGSKYAIKNRSTWC

SEQ ID NO: 20891 - protein, 257 aa, Zea mays
  unsure (1)..(257): unsure at all Xaa locations
KKRGEGEQLPLPASHVVIKRSGAGVTEGVQFIHLXSLPENQKATHLPRQGPWXDPVERLKDGFHKFKTEVYDKKPELFEPLKAGQAPKYMVFACSDSRVCPSVTLGLQPGEAFTVRNIAAMVPAYDKTKYTGIGSAIEYAVCALKVEVLVVIGHSCCGGIRALLSLQDGAPDTFHFVENWVKIGFPAKIKVKKDHASVPFDDQCSILEKEAVNLSLENLKTYPFVKDGLANGTLKLVGGHYNFVSGEFLTWDNKQPS

SEQ ID NO: 20892 - protein, 259 aa, Zea mays
  unsure (1)..(259): unsure at all Xaa locations
MYTLPVRATTSSIVXPACHPRAVLLLRLRPPXGSGSSGTPXRLRRPXATVVGMDPTVERLKSGFQKFKTEVYDKKPELFEPLKSGQSPRYMVFACSDSRVCPSVTLGLQPGEAFTVRNIAAMVPAYDKTKYTGIGSAIEYAVCALKVEVLVVIGHSCCGGIRALLSLQDGAPDTFHFVENWVKIGFPAKIKVKKHHASVPFDDQCSILEKEAVNLSLENLKTYPFVKDGLANGTLKLVGGHYNFVSGEFLTWDNKQPSI

SEQ ID NO: 20893 - protein, 301 aa, Zea mays
MASGVLHRSASRCPAAPTPDSGRGHGAVMIGDSGTRGVALRLGGSSRRELLSVTMASRDHTGLTRQLLDFQHDTIDEVGAGHGPFMDLKARFMDFKQRNYVENFSNYQTLAEQQTPKFMVVACADSRVCPTAVLGFQPGEAFTVRNVANLVPPYEHGGTETSAALEFAVNTLQVENVLVIGHSRCGGIQALMSMKDDSTSGSFIKNWVSIGKSARLSTKAAAGNMSFDIQCKHCEKESINSSLLNLLTYPWIEKRVNEGTLNLHGGYYNFVDCTFEKWTLLYREGLEGGSKYAIKNRSTWC

SEQ ID NO: 20894 - protein, 217 aa, Zea mays
PAGVQFIHLVPPDDPVERLKDGFHKFKTEVYDKKPELFEPLKAGQAPKYMVFACSDSRVCPSVTLGLQPGEAFTVRNIAAMVPAYDKTKYTGIGSAIEYAVCALKVEVLVVIGHSCCGGIRALLSLQDGAPDTFHFVENWVKIGFPAKIKVKKDHASVPFDDQCSILEKEAVNLSLENLKTYPFVKDGLANGTLKLVGGHYNFVSGEFLTWDNKQPS

SEQ ID NO: 20895 - protein, 219 aa, Zea mays
  unsure (1)..(219): unsure at all Xaa locations
XHLVRPSLRTRRPPDDPVERLKDGFHKFKTEVYDKKPELFEPLKAGQAPKYVVFACSDSRVCPSVTLGLQPGEAFTVRNIAAMVPAYDKTKYTGIGSAIEYAVCALKVEVLVVIGHSCCGGIRALLSLQDGAPDTFHFVENWVKIGFPAKIKVKKEHASVPFDDQCSILEKEAVNVSLENLKTYPFVKDGLANGTLKLVGGHYNFVSGEFLTWDNKQPS

SEQ ID NO: 20896 - protein, 455 aa, Zea mays
  unsure (1)..(455): unsure at all Xaa locations
WVPRGRPGSGLARSXVHIARPCHHIQHRRQPRHPRAVXPPPAPAAPGSGGMDPTVERLKSGFQKFKTEVYDKKPELFEPLKSGQSPRYMVFACSDSRVCPSVTLGLQPGEAFTVRNIASMVPPYDKIKYAGTGSAIEYAVCALKVQVIVVIGHSCCGGIRALLSLKDGAPDNFHFVEDWVRIGXSPAKNKVKKEHASVPFDDQCSILEKEAVNVSLQNLKSYPFVKEGLAGGTLKLVGAHYDFVKGQFVTWEPPQDAIERLTSGFQQFKVNVYDKKPELFGPLKSGQAPKYMVFACSDSRVCPSVTLGLQPGEAFTVRNIAAMVPGYDKTKYTGIGSAIEYAVCALKVEVLVVIGHSCCGGIRALLSLQDGAPDTFHFVEDWVKIGFIAKMKVKKEHASVPFDDQCSILEKEAVNVSLENLKTYPFVKEGLANGTLKLIGAHYDFVSGEFLTWKK

SEQ ID NO: 20897 - protein, 643 aa, Zea mays
  unsure (1)..(643): unsure at all Xaa locations
MYTLPVRPTTSSIVASLATPAPSSSSGSGRPRLRLRLIRNAPVFAAPATVVKRDGGQLRSQTREIERXRKGGHPPAAGDKRGGERGQRRGGEEEENEQLPLPSEKKGGASEGEAVHRYPHLVTPSEPEALXQPPPPPSKASSKGMDPTVERLKSGFQKFKTEVYDKKPELFEPLKSGQSPRYMXVFACSDSRVCPSVTLGLQPGEAFTVRNIASMVPPYDKIKYAGTGSAIEYAVCALKVQVIVVIGHSCCGGIRALLSLKDGAPDNFTFVEDWVRIGSPAKNKVKKEHASVPFDDQCSILEKEXXXXXXXNLKSYPFVKEGLAGGTLKLVGAHSHFVKGQFVTWEPPQDAIERLTSGFQQFKVNVYDKKPELFGPLKSGQXXKYMVFACSDSRVCPSVTLGLQPGEAFTVRNIAAMVPGYDKTKYTGIGSAIEYAVCALKVEVLVVIGHSCCGGIRALLSLQDGAPDTFHFVEDWVKIGFIAKMKVKKEHASVPFDDQCSILEKEAVNVSLENLKTYPFVKEGLANGTLKLIGAHYDFVSGEFLTWXXXXXRATAILPARRLLHHHKYICYTILLRTYRYAPEQCECVEYYISVFCIYIYIPDQSPNVNVISNIIFYHFSFLTLSFLCTISHIIIHHIRYST

SEQ ID NO: 20898 - protein, 455 aa, Zea mays
  unsure (1)..(455): unsure at all Xaa locations
LGREAALARSXVHIARPPHHIQHXSPASPPPRRPPPPAPAAPGSGMDPTVERLKSGFQKFKTEVYDKKPELFEPLKSGQSPRYMVFACSDSRVCPSVTLGLQPGEAFTVRNIASMVPPYDKIKYAGTGSAIEYAVCALKVQVIVVIGHSCCGGXIRALLSLKDGAPDNFPXFVEDWVRIGSPAKNKVKKEHASVPFDDQCSILEKEAVNVSLQNLKSYPFVKEGXLAGGTLXKLVGAHYDFVKGQFVTWXEPPQDAIERXLTSGFQQFKVNVYDRSPELFGPLKSGQAPKYMVFACSDSRVCPSVTLGLQPGEAFTVRNIAAMVPGYDKTKYTGIGSAIEYAVCALKVEVLVVIGHSCCGGIRALLSLQDGAPDTFHFVEDWVKIGFIAKMKVKKEHASVPFDDQCSILEKEAVNVSLENLKTYPFVKEGLANGTLKLIGAHYDFVSGEFLTWKK

SEQ ID NO: 20899 - protein, 548 aa, Zea mays
  unsure (1)..(548): unsure at all Xaa locations
MYTLPVRATTSSIVASLATPAPSSSSGSGRPRLRLIRNAPVFAAPATVXCKRDGGQLRSQTREIERERKGGHPPAGGHKRGGERGQRRGGEEEEDEQLPLPSEKKGGASEGEAVHRYPHLVTPSEPEALXQPPPPPSKASSKGMDPTVERLKSGFQKFKTEVYDKKPELFEPLKSGQSPRYMVFACSDSRVCPXSVTLGLQPGEAFTVRNIASMVPPYDKIKYAGTGSAIEYAVCALKVQVIVVIGHSCCGGIRALLSLKDGAPDNFTFVEDWVRIGSPAKNKVKKEHASVPFDDQCSILEKEAVNVSLQNLKSYPFVKEGLAGGTLKLVGAHSHFVKGQFVTWEPPQDAIERLTSGFQQFKVNVYDKKPELFGPLKSGQAPKYMVFACSDSRVCPSVTLGLQPGEAFTVRNIAAMVPGYDKTKYTGIGSAIEYAVCALKVEVLVVIGHSCCGGIRALLSLQDGAAYTFHFVEDWVKIGFIAKMKVKKEHASVPFDDQCSILEKEAVNVSLENLKTYPFVKEGLANGTLKLIGAHYDFVSGEFLTWKK

SEQ ID NO: 20900 - protein, 288 aa, Zea mays
  unsure (1)..(288): unsure at all Xaa locations
XEGEQLPLPPLSLXKRIGAGVTEGVXXFIHLVPPGEPEGYPPSKAGEXAMDDPVERLKDGFHKFKTEVYDKKPELFEPLKAGQAPKYMVFACSDSRVCPSVTLGLQPGEAFTVRNIAAMVPAYDKTKYTGIGSAIEYAVCALKVEVLVVIGHSCCGGIRALLSLQDGAPDNFHFVENWVKIGFPAKIKVKKDHASVPFDDQCSILEKEAVNLSLENLKTYPFVKEGLANGTLKLVGGHYNFVSGEFLTWAPPTISSHRESIYIHYMMHVRIQHAATYIYIYRITQCNV

SEQ ID NO: 20901 - protein, 238 aa, Zea mays
  unsure (1)..(238): unsure at all Xaa locations
XRPGANGLXASAGPCKPXPPTAPGMDPTVERLKSGFQKFKTEVYDKKPELFEPLKSGQSPRYMVFACSDSRVCPSVTLGLQPGEAFTVRNIASMVPPYDKIKYAGTGSAIEYAVCALKVQVIVVIGHSCRGGIRALLSLKDGAPDNFHFVEDWVRIGSPAKNKVKKEHASVPFDDQCSILEKEAVNVSLQNLKSYPFVKEGLAGGTLKLVGAHYDFVKGQFVTWEPPQDAIERLTSGF

SEQ ID NO: 20902 - protein, 218 aa, Zea mays
  unsure (1)..(218): unsure at all Xaa locations
XEGEQLPWEGPXDDPVERLKDGFHKFKTEVYDKKPELFEPLKAGAAPKYMVFACSDSRVCPSVTLGLQPGEAFTVRNIAXAMVPAYDKTKYTGIGSAIEYAVCALKVEVLVVIGHSCCGGIRALLSLQDGAPDNFHFVENWVKIGFPAKIKVKKDHASVPFDDQCSILEKEAVNLSLENLKTYPFVKDGLANGTLKLVGGHYNFVSGEFLTWDNKQPS

SEQ ID NO: 20903 - protein, 251 aa, Zea mays
MPAFPVRASASSSVVGSLTGTRRPRLIKNTTVIFATAPSTLVAMGHWVPRGDAVEHLKSGFQKFKTEVYDKKPELFEPLKAGQAPKYMVFACSDSRVCPSVTLGLQPGEAFTVRNIAAMVPAYDKTKYTGIGSAIEYAVCALKVEVLVVIGHSCCGGIRALLSLQDGAPDNFHFVENWVKIGFPAKVKVKKEHASVPFDDQCSILEKEAVNVSLENLKTYPFVQEGLAKGTLKLVGAHYDFVSGKFLVWET

SEQ ID NO: 20904 - protein, 549 aa, Zea mays
  unsure (1)..(549): unsure at all Xaa locations
MYTLPVRATTSSIVASLATPAPSSSSGSGSGRPRPRLIRNAPVFAAPATVVKRDGGQLRSQTREXDRERKGGHPXPAGGDKRGGERGQRRGGGEEEEDEQLPLPSEKKGGASEGEAVHRYPHLVTPSEPEALXQPPPPPSKASSKGMDPTVERLKSGFQKFKTEVYDKKPELFEPLKSGQSPRYMVFACSDSRVCPSVTLGLQPGEAFTVRNIASMVPPYDKIKYAGTGSAIEYAVCALKVQVIVVIGHSCCGGIRALLSLKDGAPDNFHFVEDWVRIGSPAKNKVKKEHASVPFDDQCSILEKEAVNVSLQNLKSYPFVKEGLVGAHYDFVKGQFVTWEPPQDAIERLTSGFQQFKVNVYDKKPELFGPLKSGQAPXKYMVFACSDSRVCPSVTLGLQPGEAFTVRNIAXAMVPAYDKTKYTGIGSAIEYAVCALKVEVLVVIGHSCCGGIRALLSLQDGAPDTFHFVENWVKIGFPAKIKVKKDHASVPFDDQCSILEKEAVNLSLENLKTYPFVKDGLANGTLKLVGGHYNFVSGEFLTWDNKQPS

SEQ ID NO: 20905 - protein, 229 aa, Zea mays
  unsure (1)..(229): unsure at all Xaa locations
XVACSSPTFSLRCTVLAGEGPXDDPVERLKDGFHKFKTEVYDKKPELFEPLEAGQAPXKYMVFACSDSRVCPSVTLGLQPGEAFTVRNIAXAMVPAYDKTKYTGIGSAIEYAVCALKVEVLVVIGHSCCGGIRALLSLQDGAPDTFHFVENWVKIGFPAKIKVKKDHASVPFDDQCSILEKEAVNLSLENLKTYPFVKDGLANGTLKLVGGHYNFVSGEFLTWDNKQPS

SEQ ID NO: 20906 - protein, 679 aa, Zea mays
  unsure (1)..(679): unsure at all Xaa locations
GYLEAGREKKRHSHDQCTTLPVRATTSSIVXPACHPRAVLLLRLRPPXGSGSSGTPXRLRRPXATVVGMDPTVERLKSGFQKFKTEVYDKKPELFEPLKSGQSPRYMVFACSDSRVCPSVTLGLQPGEAFTVRNIASMVPPYDKIKYAGTGSAIEYAVCALKVQVIVVIGHSCCGGIRALLSLKDGAPDNFHFVEDWVRIGSPAKNKVKKEHASVPFDDQCSILEKEAVXNVSLQNLKSYPFVKEGXLAGGTLXKLVGAHYDFVKGQFVTWXEPPQDAIERLTSGFQQFKVNVYDKKPELFGPLKSGQAPKYMVFACSDSRVCPSVTLGLQPAKAFTVRNIAAMVPGYDKTKYAGIGSAIEYAVCALKVQVIVVIGHSCCGGIRALLSLKDGAPDNFHFVEDWVRIGSPAKNKVKKEHASVPFDDQCSILEKEAVNVSLQNLKSYPFVKEGLAGGTXQAGWPHYDFVKGQFVTWEPPQDAIERLTSGFQQFKVNVYDKKPELFGPLKSGQAPKYMVFACSDSRVCPSVTLGLQPGEAFTVRNIAXAMVPGYDKTKYTGIGSAIEYAVCALKVEVLVVIGHSCCGGIRALLSLQDGAPDTFHFVEDWVKIGFIAKMKVKKEHARVPFDDQCSILEKEAVNVSLENLKTYPFVKEGLANGTLKLIGAHYDFVSGEFLTWKK

SEQ ID NO: 20907 - protein, 231 aa, Zea mays
IHRSLTSLTLKNQRTHPPYLLHPHLSKKAMGDAVEHLKSGFQKFKTEVYDKKPELFEPLKAGQAPKYMVFACSDSRVCPSVTLGLQPGEAFTVRNIAAMVPAYDKTKYTGIGSAIEYAVCALKVEVLVVIGHSCCGGIRALLSLQDGAPDNFHFVENWVKIGFPAKVKVKKEHASVPFDDQCSILEKEAVNVSLENLKTYPFVQEGLAKGTLKLVGAHYDFVSGMFLVWET

SEQ ID NO: 20908 - protein, 230 aa, Zea mays
  unsure (1)..(230): unsure at all Xaa locations
XGRAGVQFIHLVRPSLRTRRPPDDPVERLKDGFHKFKTEVYDKKPELFEPLKAGXQAPKYVAXFACSDSRVCPSVTLGLQPGXEAFTVRNIAAMVPAYDKTKYTGIGSAIEYAVCALKVEVLVVIGHSCCGGIRALLSLQDGAPDNFHFVENWVKIGFPAKIKVKKDHASVPFDDQCSILEKEAVNLSLENLKTYPFVKEGLANGTLKLVGGHYNFVSGEFLTWDNKQPS

SEQ ID NO: 20909 - protein, 209 aa, Zea mays
  unsure (1)..(209): unsure at all Xaa locations
QKLHHAPPQDAIERLTSGFQQFKVNVYDKKPELFGPLKSGQAPKYMVFACSDSRVCPSVTLGLQPGEAFTVRNIAAMVPGYDKTKYTGIGSAIEYAVCALKVEVLVVIGHSCCGGIRALLSLQDGAPDTFHFVEDWVKIGFIAKMKVKKEHASVPFDDQCSILEKEAVNVSLQNLKSYPFVKEGLAGGTLKLVGAHYDFVSGEFLTXKK

SEQ ID NO: 20910 - protein, 234 aa, Zea mays
  unsure (1)..(234): unsure at all Xaa locations
XAREGFEETVGSNFYXPILLFLASQFVLHKLPQDAIERLTSGFQQFKVNVYDKKPELFGPLKSGQAPKYMVFACSDSRVCPSVTLGLQPGEAFTVRNIAAMVPGYDKTKYTGIGSAIEYAVCALKVEVLVVIGHSCCGGIRALLSLQDGAPDTFHFVEDWVKIGFIAKMKVKKEHASVPFDDQCSILEKEAVNVSLENLKTYPFVKEGXLANGTLKLIGAHYDFVSGEFLTWKK

SEQ ID NO: 20911 - protein, 202 aa, Zea mays
  unsure (1)..(202): unsure at all Xaa locations
XPTSSPTLQXASSISLFLTSSPTLPARXMDPAVERLKTGFEKFKTEVYDQKPDLFEPLKAHQSPKYMVFACADSRVCPSVTLGLEPGEAFTVRNIAAMVPSYCKNKHTGVGSAIEYAVCALKVEFIVVIGHSRCGGIKALLNLKDGTDDTFHFVEDWVRIGYPARKKVKDECSEMPFEEQCGVLEKEAVNVSLQNLSTYPFX

SEQ ID NO: 20912 - protein, 515 aa, Zea mays
  unsure (1)..(515): unsure at all Xaa locations
DMPRLKCVNLARTCTSPVPARKRDGGQLRSQTREXDRERKGGHPXPAGGDKRGGERGQRRGGGEEEEDEQLPLPSEKKGGASEGEAAHRYPHLVTPSEPEALXQPPPPPSKASSKSMDPTVERLKSGFQKFKTEVYDKKPELFEPLKSGQSPRYMXVFACSDSRVCPSVTPGLQPGEAFTVRNIASMVPPYDKIKYAGTGSAIEYAVCALKVQVIVVIGHSCCGGIRALLSLKDGAPDNFHFVEDWVRIGSPAKNKVKKEHASVPFDDQCSILEKEAVNVSLQNLKSYPFVKEGLVGAHYDFVKGQFVTWEPPQDAIERLTSGFQQFKVNVYDKKPELFGPLKSGQAPKYMVFACSDSRVCPSVTLGLQPGXEAFTVRNIAAMVPGYDKTKYTGIGSAIEYAVCALKVEVLVVIGHSCCGGIRALLSLQDGAPDTFHFVEDWVKIGFIAKMKVKKEHASVPFDDQCSILEKEAVNVSLENLKTYPFVKEGLANGTLKLIGAHYDFVSGEFLTWKK

SEQ ID NO: 20913 - protein, 252 aa, Zea mays
  unsure (1)..(252): unsure at all Xaa locations
MPAFPVRASASSSVVGSLTGTRRPRLIKNTTVIFATAPSTLVAMGHWVPRGDAVEHLKSGFQKFKTEVYDKKPELFEPLKAGQAPKYMVFACSDSRVCPSVTLGLQPGEAFTVRNIAAMVPAYDKTKYTGIGSAIEYAVCALKVEVLVVIGHSCCGGIRALLSLQDGAPDNFHFVENWVKIGFPAKXVKVKKEHASVPFDDQCSILEKEAVNVSLENLKTYPFVQEGLAKGTLKLVGAHYDFVSGMFLVWET

SEQ ID NO: 20914 - protein, 209 aa, Zea mays
  unsure (1)..(209): unsure at all Xaa locations
MGHWVPRGDAVEHLKSGFQKFKTEVYDKKPELFEPLKAGQAPKYMVFACSDSRVCPSVTLGLQPGEAFTVRNIAAMVPAYDKTKYTGIGSAIEYAVCALKVEVLVVIGHSCCGGIRALLSLQDGAPDNFHFVENWVKIGFPAKVKVKKEHASVPFDDQCSILEKEAVNXVSLENLKTYPFVQEGLAKGTLKLVGAHYDFVSGNFLVWET

SEQ ID NO: 20915 - protein, 261 aa, Zea mays
  unsure (1)..(261): unsure at all Xaa locations
XWVPRGRPGIICQMGSRDHSGLTRQPLDFXNMIQXMRQAQNTVXFMDLKARFMDFKQRNYVENSSNFHNLAEQQTPKFMEIACADSTVCPTAVLRFQPAEAFTGHNVANLVPPYEHEGSETSAALEIAINTLEVENVLVVSHSRCGGIQALMSMKDDSTSGSFIKNWVTIEKSARLSTRAAAGNLSFDMQCKHCEKESINSSLLNLLTYPWIEKRVNEGTLNLHGGYYNFVDCTFEKWTLLYREGLEGGSKYAIKNRSTWC

SEQ ID NO: 20916 - protein, 208 aa, Zea mays
  unsure (1)..(208): unsure at all Xaa locations
MYTLPVRATTSSIVXPACHPRAVLLLRLRPPGPGSSGTPXRLRRPXATVVGMDPTVXERLKSGFQKFKTEVYDKKPELFEPLKSGQSPRXYMVFACSDSRVCPSVTLGLQPGEAFTVRNIASMVPPYDKIKYAGTGAAIEYAACALKVQVIAVIGHSCCGGIRALLSLEDGAPDNFHFVEDWVRIGSPAKNEVKKEHASVPVDDQCSX

SEQ ID NO: 20917 - protein, 119 aa, Zea mays
  unsure (1)..(119): unsure at all Xaa locations
XAIEYAVCALKVEVIVVIGHSRCGGIKALLSLEDGAPDKFHFVEEWVRIGGPAKTKVKTDHASVPFEDQCSILEKEAVNVSLENLKTYPFVKEGVEKGTLKLVGGHYDFVNGKFETWEP

SEQ ID NO: 20918 - protein, 257 aa, Zea mays
  unsure (1)..(257): unsure at all Xaa locations
LLRAIGYLEAGRDPFPSIHRSLTSLTREEPENPPTLLHLLHPHLSKKEPWGDAVEHLKSGFQKFKTEVYDKKPELFEPLKAGQAPKYMVFACSDSRVCPSVTLGLQPGEAFTVRNIAAMVPAYDKTKYTGIGSAIXEYAVCALKVEVLVVIGHSCCGGIRXALLSLQDGAPDNFHFVENWVKIGFPAKXVKVKKEHASVPFDDQCSILXRRRAVNVSLENLKTYPFVQEGLAKGTXLKLVGAHYDFVSXGNLLVWET

SEQ ID NO: 20919 - protein, 240 aa, Zea mays
  unsure (1)..(240): unsure at all Xaa locations
GTSRPAGILVPSPHSLVKSQRTHPPSFISYIRIYPRWRPWATPSQDLKSGFQKFKTDVYDKKPELFEPFKAVQVPEYMVFACSDSRVCPSETLGLPPGEAFTVRNIAAMVPAYDXTKYTGIGSAIXEYTVCALTVEVLVVIGHMCCGVIRALLSLHDGAPDYFHFXXCWGKIRFPAEVEVKKEYASVPFYDQCSILEKEAENVSLENLETYPFIQEGLDKGTLKLVRAHYDFWSRNFLVX

SEQ ID NO: 20920 - protein, 320 aa, Populus tremula x Populus tremuloides
MSTASINSWCLTSVSPSKKSLPALRPSVFASLNSSVSPPTLIRNQPVFAAPAPILYPRRGEEMGNDYNEAIESLKKLLSDKEELKTVAAAKVEQITAELQTVSSSDPKAFDPVEKIKSGFIHFKKEKYDKNPGLYSELAKGQSPKFMVFACSDSRVCPSHVLDFQPGEAFVVRNVANMVPPYDKTKYAGVGAAIEYAVLHLKVEYIVVIGHSACGGIKGLMSFPYDGTTSTDFIEDWVKVCYNAKTKILAEHANSPFPDMCTQCEKEAVNVSLGHLLTYPFVRDGLVNKTLGLKGGYYDFVKGSFELWGLEYSLSPSLSV

SEQ ID NO: 20921 - protein, 320 aa, Populus tremula x Populus tremuloides
MSTASINSWCLTSVSASKKSLPALRPSVFASLNSSVSPPTLIRNQPVFAAPAPILYPRRGEEMGNDYNEAIESLKKLLSDKEELKTVAAAKVEQITAELQTVSSSDPKAFDPVEKIKSGFIHFKKEKYDKNPGLYSELAKGQSPKFMVFACSDSRVCPSHVLDFQPGEAFVVRNVANMVPPYDKTKYAGVGAAIEYAVLHLKVEYIVVIGHSACGGIKGLMSFPYDGTTSTDFIEDWVKVCYNAKTKILAEHANSPFPDMCTQCEKEAVNVSIGHLLTYPFVRDGLVNKTLGLKGGYYDFVKGSFELWGLEYSLSPSLSV

SEQ ID NO: 20922 - protein, 233 aa, Novosphingobium aromaticivorans
MTIVNELIGRVFSFEKTVFPDSRELFGKLSTQGQSPKALMISCADSRIVPEQIMQAEPGELFVCRNAGNMVPPFATMNGGVSSTVEYAVVALGVRDIIVCGHSDCGAMKALAAPELPQGMPNVVAWLRHGSAAEHVVSSCSPHLHGNERVRAVSLQNIIAQIAHLRTHPSVAAAIARGEMALHGWFVDISAGMVLGLDGDTGQFVPLREDRSLPVALPAQPRAASEPLVEAAE

SEQ ID NO: 20923 - protein, 224 aa, Novosphingobium aromaticivorans
MGPLARPMTQDASPELDRLIAGYRRFREQGWTPKLERWRELRDGQEPQVMIIACSDSRVDPAQIFDVDPGEIFVVRNVAAMVPPFETNPGHHGVSAALEFAVQVLKVKEVVVMGHGMCGGCKAALTQDLKGTEPGEGGFIADWIALLDGVRDEVVDKHGTTGRPAERAMEEAGVRASLANLRTFPCIRRKEATGELKLRGTFFAISDGVLHVLDETTGDFSPVN

SEQ ID NO: 20924 - protein, 244 aa, Schizosaccharomyces pombe
MPDRLKRRIEEIDHQDEIIDREASTASPVSGAGKIDQNGEIKDLLERNLTWSQQTSRKYPSFFTATKDIQTPQVLWIGCSDSRVPETTILNLLPGEVFVHRNIANVVPRSDINALAVMEYSVTVLKVKHIIVCGHYGCGGVAAALGPNLNNLLDHWLRHIRDVIEDNREELDAIEDPQLRRLKLAELNTRAQAISVTRVGFVREAMEKRGLQVHGWIYDLSNGQIKKLDITDAIKKAKYGTYDS

SEQ ID NO: 20925 - protein, 221 aa, Saccharomyces cerevisiae
MSATESSSIFTLSHNSNLQDILAANAKWASQMNNIQPTWFPDHNAKGQSPHTLFIGCSDSRYNENCLGVLPGEVFTWKNVANICHSEDLTLKATLEFAIICLKVNKVIICGHTDCGGIKTCLTNQREALPKVNCSHLYKYLDDIDTMYHEESQNLIHLKTQREKSHYLSHCNVKRQFNRIIENPTVQTAVQNGELQVYGLLYNVEDGLLQTVSTYTKVTPK

SEQ ID NO: 20926 - protein, 221 aa, Saccharomyces cerevisiae
MSATESSSIFTLSHNSNLQDILAANAKWASQMNNIQPTLFPDHNAKGQSPHTLFIGCSDSRYNENCLGVLPGEVFTWKNVANICHSEDLTLKATLEFAIICLKVNKVIICGHTDCGGIKTCLTNQREALPKVNCSHLYKYLDDIDTMYHEESQNLIHLKTQREKSHYLSHCNVKRQFNRIIENPTVQTAVQNGELQVYGLLYNVEDGLLQTVSTYTKVTPK

SEQ ID NO: 20927 - protein, 223 aa, Ralstonia eutropha
MTDAIAQLFRNNREWVDRVNAEDPTFFMRLANQQAPEYLWIGCSDSRVPANQILGLAPGEVFVHRNIANVIAHSDLNALAVIQFAVEVLKVRHITVVGHYGCGGVKVALKRERIGLADNWLRHVRDVADKHEAYLGTLLREDDAHTRLCELNVIEQVNNVCQTTVLQDAWSRGQAVTVHGWVYGVSDGLLRDLGMAASSNDELREQLAAAYRQYGDPPQASIR

SEQ ID NO: 20928 - protein, 283 aa, Neurospora crassa
MLSTRLGLSPLLHSSKQASSALSRLAVPRTTSTPLPRRRLTIVPSATPRRSFCSSHTADDKDRSKKDITMYLQETHDKVFENNKSWAAEQVAKDPDFFKKLAAGQNPEYLWIGCSDSRIPAEQITGLQPGDAFVHRNIANLVCNTDLNVMSVIEYAVKHLQVKHIVVCGHYGCGGVKAAMTPKDLGLMNPWLRNIRDVYRLHEKELDAIADEEARYERLVELNVYEQCRNVVKTAALQQSYAENGFPIIHGWVFNFRDGMLKDLNVDFKTILKDIQKIYNLTN

SEQ ID NO: 20929 - protein, 230 aa, Neurospora crassa
MSADNTFHYALSSNNAWAGYKAHQNPQFFPKLAGGQSPEILWIGCSDSRCPETTILGMQPGDVFVHRNIANIISPTDINTTAVIEYAVANLKVKHVVLCGHSACGGAAAALSDARVGGVLDTWLLPLKTVRFNHAEELEAITDEKERIMRIAQLNVEAGIKVLMNNATIREAIAERGLEVHGVFFDISCGRIKELGCGTAHAGKGDHVVRGKHGQLVFGQDGEAAIAAAQ

SEQ ID NO: 20930 - protein, 218 aa, Escherichia coli
MKEIIDGFLKFQREAFPKREALFKQLATQQSPRTLFISCSDSRLVPELVTQREPGDLFVIRNAGNIVPSYGPEPGGVSASVEYAVAALRVSDIVICGHSNCGAMTAIASCQCMDHMPAVSHWLRYADSARVVNEARPHSDLPSKAAAMVRENVIAQLANLQTHPSVRLALEEGGSLHGWVYDIESGSIAAFDGATRQFVPLAANPRVCAIRLRQPTAA

SEQ ID NO: 20931 - protein, 220 aa, Escherichia coli
  unsure (1)..(220): unsure at all Xaa locations
XKDIDTLISNNALWSKXLVEEDPGFFEKLAQAQKPRFLWIGCSDSRVPAERLTGLEPGELFVHRNVANLVIHTDLNCLSVVQYAVDVLEVEHIIICGHYGCGGVQAAVENPELGLINNWLLHIRDIWFKHSSLLGEXPQERRLDTLCELNVXEQVYNLGHSTIXQSAWKRGQKVTIHGWAYGIHDGLLRDLDVTATNRETLEQRYRHGISNLKLKHANHK

SEQ ID NO: 20932 - protein, 213 aa, Escherichia coli
MKDIDTLISNNALWSKMLVEEDPGFFEKLAQAQKPRFLWIGCSDSRVPAERLTGLEPGELFVHRNVANLVIHTDLNCLSVVQYAVDVLEVEHIIICGHYGCGGVQAAVENPELGLINNWLLHIRDIWFKHSSLLGEMPQERRLDTLCELNVMEQVYNLGHSTIMQSAWKRGQKVTIHGWATAFTTACCVIWMLPPPTAKPLSNVTVTGFPTSS

SEQ ID NO: 20933 - protein, 322 aa, Nicotiana paniculata
MSTASINSCLTISPAQASLKKPIRPVAFARLSNTSSSSSSVPSLIRNEPVFAAPTPIINPILREEMAKESYEQAIAALEKLLSEKGELGPIAAARVDQITAELQSSDGSKPFDPVEHMKAGFIHFKTEKYEKNPALYGELSKGQSPKFMVFACSDSRVCPSHVLNFQPGEAFVVRNIANMVPAYDKTRYSGVGAAIEYAVLHLKVENIVVIGHSACGGIKGLMSLSADGSESTAFIEDWVKIGLPAKAKVEGEHADKCFADQCTACEKEAVNVSLGNLLTYPFVREGLVKKTLALKGGHYDFVNGGFELWGLEFGLSPSLSV

SEQ ID NO: 20934 - protein, 270 aa, Caenorhabditis elegans
MNKILRGVIQFRNTIRKDLVKQFEEIKNNPSPTAVMFTCMDSRMLPTRFTQSQVGDMFVVRNAGNMIPDAPNYGAFSEVSVNTEPAALELAVKRGGIRHIVVCGHSDCKAINTLYGLHQCPKNFDVTSPMDHWVRRNGFASVKRLNERLHRGPSSMKFESEVAPSQSFDAIIDPMDTLAMEDKLSQINVLQQLINICSHEFLKEYLESGRLHIHGMWFDIYKGEDYLFSKDKKRFVVIDEKTVTDLLAELNARYPVPEDQDGPVAFAKSN

SEQ ID NO: 20935 - protein, 429 aa, Caenorhabditis elegans
MTPVEEIIKKDIFRETPLRYLGYANEVGEAFRSLVKPVVVKFSYVVAFGYVAADSIDKGLQEYIKTHSTSTEKTKKVAIAAVDTVLWQTFASVLIPGFTINRFCFFSNLLLQKSTKLPTNMRKWTVTCLGLATIPFIVHPIDSFVEEAMDKTARKIYNKMNKILRGVIQFRNTIRKDLVKQFEEIKNNPSPTAVMFTCMDSRMLPTRFTQSQVGDMFVVRNAGNMIPDAPNYGAFSEVSVNTEPAALELAVKRGGIRHIVVCGHSDCKAINTLYGLHQCPKNFDVTSPMDHWVRRNGFASVKRLNERLHRGPSSMKFESEVAPSQSFDAIIDPMDTLAMEDKLSQINVLQQLINICSHEFLKEYLESGRLHIHGMWFDIYKGEDYLFSKDKKRFVVIDEKTVTDLLAELNARYPVPEDQDGPVAFAKSN

SEQ ID NO: 20936 - protein, 272 aa, Nostoc punctiforme
MKKLIKGLREFKSSYFSANEELFEQLSHGQKPRVLFITCSDSRIDPNLITQAGLGELFVIRNAGNIIPPFGATNGGEGATIEYAIQALDIQQIIVCGHSHCGAMKGLMKLDSLRVEMPLVHDWLKYAEATRRLVKDNYSHYEGEELLEIIIAENVLTQIENLRTYPVIRSKLHQGQLSIYAWIYQIETGEILAYDPQKHAYVLPQNQLLSSEIDETLLSPPLNSNVEIHFTKTQQRPFQSSGELPIPTHEWFPMTVLSPEQMERIYRGSATK

SEQ ID NO: 20937 - protein, 222 aa, Nostoc punctiforme
MKYNSIDELFRNNQAWVAEKLAIDPTYFQELSKGQTPPFLYIGCSDSRLPLTNLTRTEPGELFVHRNIANQVSLTDINFLAVLEYAILHLKVEHIIVCGHYDCGGIKAALEGRTIGILDNWVNPIRELYLHKQEEIDALPTREERLNRLAEINVVAQVKNLYQTSIMRQALYERKAPMVHGWVLDIRTGLIKDLNVSTVQWQLHICPLLLEFRLYAMLKNES

SEQ ID NO: 20938 - protein, 222 aa, Vibrio cholerae
MPEIKQLFENNSKWSESIKAETPEYFAKLAKGQNPDFLWIGCADSRVPAERLTGLYSGELFVHRNVANQVIHTDLNCLSVVQYAVDVLQVKHIIVCGHYGCGGVTAAIDNPQLGLINNWLLHIRDYYLKHREYLDQMPAEDRSDKLAEINVAEQVYNLANSTVLQNAWERGQAVEVHGFVYGIEDGRLEYLGVRCASRSAVEDNYHKALEKILNPNHRLLCR

SEQ ID NO: 20939 - protein, 229 aa, Haemophilus influenzae Rd
MDKIKQLFANNYSWAQRMKEENSTYFKELADHQTPHYLWIGCSDSRVPAEKLTNLEPGELFVHRNVANQVIHTDFNCLSVVQYAVDVLKIEHIIICGHTNCGGIHAAMADKDLGLINNWLLHIRDIWFKHGHLLGKLSPEKRADMLTKINVAEQVYNLGRTSIVKSAWERGQKLSLHGWVYDVNDGFLVDQGVMATSRETLEISYRNAIARLSILDEENILKKDHLENT

SEQ ID NO: 20940 - protein, 255 aa, Drosophila melanogaster
MERILRGIMRYRNTTREQMVKEFQKVRDNPEPKAVFFTCMDSRMIPTRYTDTHVGDMFVVRNAGNLIPHAQHFQDEYFSCEPAALELGCVVNDIRHIIVCGHSDCKAMNLLYQLRDPDFASKLNRRLSPLRSWLCTHANTSLERFQEWRDAGMKDPLIFSSETPLRRFVAYIDEEQKFALEDKLSQINTLQQMSNIASYGFLKARLESHDLHIHALWFDIYTGDIYYFSRGAKRFLPVDEDTVDRLSEEVRRFYS

SEQ ID NO: 20941 - protein, 229 aa, Pasteurella multocida
MKKIEQLFANNYSWALRMKEENSSYFKELADHQTPSYLWIGCSDSRVPAEKLTNLGPGELFVHRNVANQVIHTDLNCLSVVQYAVEVLNIEHIIICGHTNCGGIKAAMADQDLGLINNWLLHLRDIWYKHSHLLGNLPPEKRADMLTKINVAEQVYNLGRSSIIKSAWKNGKKLSLHGWVYDVNDGFLIDQGVIATSRESLEISYRNAIARLLKLNEDEILKKDQDEEA

SEQ ID NO: 20942 - protein, 220 aa, Escherichia coli K12
MKDIDTLISNNALWSKMLVEEDPGFFEKLAQAQKPRFLWIGCSDSRVPAERLTGLEPGELFVHRNVANLVIHTDLNCLSVVQYAVDVLEVEHIIICGHYGCGGVQAAVENPELGLINNWLLHIRDIWFKHSSLLGEMPQERRLDTLCELNVMEQVYNLGHSTIMQSAWKRGQKVTIHGWAYGIHDGLLRDLDVTATNRETLEQRYRHGISNLKLKHANHK

SEQ ID NO: 20943 - protein, 219 aa, Escherichia coli O157:H7
MKEIIDGFLKFQREAFPKREALFKQLATQQSPRTLFISCSDSRLVPELVTQREPGDLFGIRNAGNIVPSYGPEPGGVSASVEYAVAALRVSDIVICGHSNCGAMTAIASCQCMDHMPAVSHWLRYADSARVVNEARPHSDLPSKAAAMVRENVIAQLANLQTHPSVRLALEEGRIALHGWVYDIESGSIAAFDGATRQFVPLAANPRVCAIPLRQPTAA

SEQ ID NO: 20944 - protein, 221 aa, Helicobacter pylori 26695
MKAFLGALEFQENEYEELKELYESLKTKQKPHTLFISCVDSRVVPNLITGTKPGELYVICNMGNVNPPKTSYKESLSTIASIEYAIAHVGVQNLIICGHSDCGACGSVHLIHDETTKAKTPYIANWIQFLEPVKEELKNHPQFSNHFAKRSWLTERLNARLQLNNLLSYDFIQEKASKNELKIFGWHYIIETGRIYNYNFESHFFEPIGETIKQRKSHENF

SEQ ID NO: 20945 - protein, 221 aa, Helicobacter pylori J99
MEAFLGALEFQENEYEEFKELYESLKTKQKPHTLFISCVDSRVVPNLITGTQPGELYVIRNMGNVIPPKTSYKESLSTIASVEYAIAHVGVQNLIICGHSDCGACGSIHLIHDETTKAKTPYIANWIQFLEPIKEELKNHPQFSNHFAKRSWLTERLNARLQLNNLLSYDFIQERVINNELKIFGWHYIIETGRIYNYNFESHFFEPIEETIKQRISHENF

SEQ ID NO: 20946 - protein, 220 aa, Salmonella enterica subsp. enterica serovar Typhi
MKDIDTLISNNALWSKMLVEEDPGFFEKLAQAQKPRFLWIGCSDSRVPAERLTGLEPGELFVHRNVANLVIHTDLNCLSVVQYAVDALEVEHIIICGHSGCGGIKAAVENPELGLINNWLLHIRDIWLKHSSLLGKMPEEQRLDALYELNVMEQVYNLGHSTIMQSAWKRGQNVTIHGWAYSINDGLLRDLDVTATNRETLENGYHKGISALSLKYIPHQ

SEQ ID NO: 20947 - protein, 216 aa, Cytophaga hutchinsonii
MLEYNQIFENNRKWLAEKNRTNSEFFDQLSEGQNPDYLFIGCSDSRVTAEAIMGAKPGEVFVHRNIANLVPNNDNSSASVIEYAVKHLGVKHIVVCGHYLCGGVKAAMQSVDLGILNPWLRNIRDVYRLHKNELNAIADETARYNRLVELNVQEQCINIIKMAVWQKRYLNEGFPEVHGWVFDIHTGKLIDLEIDFNNALKSIREIYDLGTSTENL

SEQ ID NO: 20948 - protein, 212 aa, Cytophaga hutchinsonii
MKESYQKLLNNNKIWALGKIQDDADYFKRMKLAQTPEYLWIGCSDSRVPETEVTGTLQGQLFVHRNIANMVVHTDLNLLSVVEYAVEVLKVKHIIVCGHYGCGGVAAATKNNSFGYVDNWLRNIKEIYNKNTVELLAIENEEERINRLVELNVVEQVRNLAKTKPVQRAWKNRALEIHGWVYGLDTGIIKDLHSLYDEAEDLEPIFRYTFED

SEQ ID NO: 20949 - protein, 220 aa, Salmonella typhimurium LT2
MKDIDTLISNNALWSKMLVEEDPGFFEKLAQAQKPRFLWIGCSDSRVPAERLTGLEPGELFVHRNVANLVIHTDLNCLSVVQYAVDVLEVEHIIICGHSGCGGIKAAVENPELGLINNWLLHIRDIWLKHSSLLGKMPEEQRLDALYELNVMEQVYNLGHSTIMQSAWKRGQNVTIHGWAYSINDGLLRDLDVTATNRETLENGYHKGISALSLKYIPHQ

SEQ ID NO: 20950 - protein, 184 aa, Streptomyces coelicolor A3(2)
MLTVGDKFPEFDLTACVSLEKGKEFQQINHKTYEGQWKVVFAWPKDFTFVCPTEIAAFGKLNDEFADRDAQILGFSGDSEFVHHAWRKDHPDLTDLPFPMLADSKHELMRDLGIEGEDGFAQRAVFIVDQNNEIQFTMVTAGSVGRNPKEVLRVLDALQTDELCPCNWSKGDETLDPVALLSGE

SEQ ID NO: 20951 - protein, 184 aa, Streptomyces coelicolor A3(2)
MLTVGDKFPEFDLTACVSLEKGKDFQQINHKTYEGQWKVVFAWPKDFTFVCPTEIAAFGKLNDEFADRDAQILGFSGDSEFVHHAWRKDHPDLTDLPFPMLADSKHELMRDLGIEGEDGFAQRAVFIVDQNNEIQFTMVTAGSVGRNPKEVLRVLDALQTDELCPCNWSKGDETLDPVALLSGE

SEQ ID NO: 20952 - protein, 152 aa, Streptomyces coelicolor A3(2)
MAIQVGDKAPDFELKDNHGATVRLSEFRGRKNVVLLFYPFAFTGVCTGELCEVRDNLPQFSDRDTEVLAVSNDSIHTLRVFAEQEGLEYPLLSDFWPHGNVSRAYGVFDEDKGCAVRGTFVIDQEGVVRWTVVNALPDARDLAEYVKALDAL

SEQ ID NO: 20953 - protein, 198 aa, Cricetulus griseus
MASGNAHIGKPAPDFTATAVVDGAFKEVKLSDYRGKYVVLFFYPLDFTFVCPTEIIAFSNHAEDFRKLGCEVLGVSVDSQFTHLAWINTPRKEGGLGPLNIPLLADVTRSLSENYGVLKTDEGIAYRGLFIIDAKGILRQITVNDLPVGRSVDEALRLVQAFQYTDEHGEVCPAGWKPGSDTIKPNVDDSKEYFSKHN

SEQ ID NO: 20954 - protein, 199 aa, Cricetulus griseus
MSSGNAKIGYPAPNFKATAVMPDGQFRDICLSEYRGKYVVFFFYPLDFTFVCPTEIIAFSDRAEEFKKLNCQVIGASVDSHFCHLAWINTPKKQGGLGPMNIPLVSDPKRTIAQDYGVLKADEGISFRGLFIIDDKGILRQITINDLPVGRSVDEILRLVQAFQFTDKHGEVCPAGWKPGSDTIKPDVQKSKEYFSKQK

SEQ ID NO: 20955 - protein, 198 aa, Mus musculus
MASGNAQIGKSAPDFTATAVVDGAFKEIKLSDYRGKYMVLFFYPLDFTFVCPTEIIAFSDHAEDFRKLGCEVLGVSVDSQFTHLAWINTPRKEGGLGPLNIPLLADVTKSLSQNYGVLKNDEGIAYRGLFIIDAKGVLRQITVNDLPVGRSVDEALRLVQAFQYTDEHGEVCPAGWKPGSDTIKPNVDDSKEYFSKHN

SEQ ID NO: 20956 - protein, 198 aa, Mus musculus
MASGNAQIGKSAPDFTATAVVDGAFKEIKLSDYRGKYVVLFFYPLDFTFVCPTEIIAFSDHAEDFRKLGCEVLGVSVDSQFTHLAWINTPRKEGGLGPLNIPLLADVTKSLSQNYGVLKNDEGIAYRGLFIIDAKGVLRQITVNDLPVGRSVDEALRLVQAFQYTDEHGEVCPAGWKPGSDTIKPNVDDSKEYFSKHN

SEQ ID NO: 20957 - protein, 198 aa, Mus musculus
MASGNAQIGKSAPDFTATAVVDGAFKEIKLSDYRGKYVVLFFYPLDFTFVCPTEIIAFSDHAEDFRKLGCEVLGVSVDSQFTHLAWINTPRKEGGLGPLNIPLLADVTKSLSQNYGVLKNDEGIAYRGLFIIDAKGVLRQITVNDLPVGRSVDEALRLVQAFQYTDEHGEVCPAGWKPGSDNIKPNVDDSKEYFSKHN

SEQ ID NO: 20958 - protein, 198 aa, Mus musculus
MASGNAQIGKSAPDFTATAVVDGAFKEIKLSDYRGKYVVLFFYPLDFTFVCPTEIIAFSDHAEDFRKLGCEVLGVSVDSQFTHLAWINTPRKEGGLAPLNIPLLADVTKSLSQNYGVLKNDEGIAYRGLFIIDAKGVLRQITVNDLPVGRSVDEALRLVQAFQYTDEHGEVCPAGWKPGSDNIKPNVDDSKEYFSKHN

SEQ ID NO: 20959 - protein, 198 aa, Mus musculus
MASGNAQIGKSAPDFTATAVVDGAFKEIKLSDYRGKYVDLFFYPLDFTFVCPTEIIAFSDHAEDFRKLRCEVLGVSVDSQFTHLAWINTPRKEGGLGPLNIPLLADVTKSLSHNYGVLKNDEGVAYRGLFIIDASGVLRQITVNDLPVGRSVDEALRLVQAFQYTDEHGEVCPAGWKPGSDTIKPNVDDSKEYFSKHN

SEQ ID NO: 20960 - protein, 199 aa, Mus musculus
MSSGNAKIGYPAPNFKATAVMPDGQFKDISLSEYKGKYVVFFFYPLDFTFVCPTEIIAFSDRADEFKKLNCQVIGASVDSHFCHLAWINTPKKQGGLGPMNIPLISDPKRTIAQDYGVLKADEGISFRGLFIIDDKGILRQITINDLPVGRSVDEIIRLVQAFQFTDKHGEVCPAGWKPGSDTIKPDVNKSKEYFSKQK

SEQ ID NO: 20961 - protein, 199 aa, Mus musculus
MSSGNAKIGYPAPNFKATAVMPDGQFKDISLSEYKGKYVVFFFYPLDFTFVCPTEIIAFSDRADEFKKLNCQVIGASVDSHFCHLAWINTPKKQGGLGPMNIPLISDPKRTIAQDYGVLKADEGISFRGLFIIDDKGILRQITINDLPVGRSVDEIIRLVQAFQFTDKHGEVCPAGWKPGSDTIKPDVNKSKEYFFKQK

SEQ ID NO: 20962 - protein, 274 aa, Mus musculus
MEARSKLLDGTTASRRWTRKLVLLLPPLLLFLLRTESLQGLESDERFRTRENECHFYAGGQVYPGEASRVSVADHSLHLSKAKISKPAPYWEGTAVINGEFKELKLTDYRGKYLVFFFYPLDFTFVCPTEIIAFGDRIEEFKSINTEVVACSVDSQFTHLAWINTPRRQGGLGPIRIPLLSDLNHQISKDYGVYLEDSGHTLRGLFIIDDKGVLRQITLNDLPVGRSVDETLRLVQAFQYTDKHGEVCPAGWKPGSETIIPDPAGKLKYFDKLN

SEQ ID NO: 20963 - protein, 257 aa, Mus musculus
MAAAAGRLLWSSVARHASAISRSISASTVLRPVASRRTCLTDILWSASAQGKSAFSTSSSFHTPAVTQHAPYFKGTAVVNGEFKELSLDDFKGKYLVLFFYPLDFTFVCPTEIVAFSDKANEFHDVNCEVVAVSVDSHFSHLAWINTPRKNGGLGHMNITLLSDITKQISRDYGVLLESAGIALRGLFIIDPNGVVKHLSVNDLPVGRSVEETLRLVKAFQFVETHGEVCPANWTPESPTIKPSPTASKEYFEKVHQ

SEQ ID NO: 20964 - protein, 254 aa, Mus musculus
MAAAAGRLLWSSVARHASAISRSISASTVLRPVASRRTCLTDILWSASAQGKSAFSTSSSFHTPAVTQHAPYFKGTAVVNGEFKELSLDDFKGKYLVLFFYPLDFTFVCPTEIVAFSDKANEFHDVNCEVVAVSVDSHFSHLAWINTPNGGLGHMNITLLSDITKQISRDYGVLLESAGIALGLFIIDPNGVVKHLSVNDLPVGRSVEETLRLVKAFQFVETHGEVCPANWTPESPTIKPSPTASKEYFEKVHQ

SEQ ID NO: 20965 - protein, 154 aa, Mus musculus
MSSGNAKIGYPAPNFKATGVMPDGQFKDTSLSEYKGKYVVFFFYPLDFTFVCPTEIIAFRDRADEFKKLTCQVIGVSVDSHFCHLPWINTPKKQGGLGPMNIPLISDPKRTIAQDYGVLKADEGISFRGLFIIDDKGILQQITINDLPVGRLCG

SEQ ID NO: 20966 - protein, 145 aa, Mus musculus
MSSGNAKIGYPAPNFIATAVMPDGQFKDISLREYKGKYVVFFFYPLDFTFVCPTEIIAFSDRADEFKKLNCQVIGASVDSHFCHLAWINTPKKQGGLGPMNIPLISDPKCTIAQNYGVLKADEGISFRGLFIIDDKGILSTDNNK

SEQ ID NO: 20967 - protein, 168 aa, Mus musculus
MASNKAHIRKPAPDFTALILDYRGKYLVLFFYPLDITFVCPTEIIAFNNHAEDFRKLGWECLTPWKEGGLGPLNIPLPADVTKSLSQNYSMLKNDEGIASLSAMQGCPSPMTVNDLPVGRSVDEALCLVQAFQYTDEHGEVSPAVWKPGSGTIKPIVDDSKEYFSKHN

SEQ ID NO: 20968 - protein, 162 aa, Mus musculus
MSSGNTNTGHPAPKTSKQQLLSLLSVIEQKNLRTQLPSDWSSYGFSLLPWINTPNKQGALGPMSILLISDPKCTIAQDYGVFEADEGISLRGLFVIGDKNILQQMTINYLPSGRSVDVILRPVQTFQFTDEHGEVCLAGWKPGSGTTKPDVNKSKGYFSKQK

SEQ ID NO: 20969 - protein, 198 aa, Rattus norvegicus
MASGNAHIGKPAPDFTGTAVVDGAFKEIKLSDYRGKYVVLFFYPLDFTFVCPTEIIAFSDHAEDFRKLGCEVLGVSVDSQFTHLAWINTPRKEGGLGPLNIPLLADVTKSLSQNYGVLKNDEGIAYRGLFIIDAKGVLRQITVNDLPVGRSVDEALRLVQAFQYTDEHGEVCPAGWKPGSDTIKPNVDDSKEYFSKHN

SEQ ID NO: 20970 - protein, 199 aa, Rattus norvegicus
MSSGNAKIGHPAPSFKATAVMPDGQFKDISLSDYKGKYVVFFFYPLDFTFVCPTEIIAFSDRAEEFKKLNCQVIGASVDSHFSHLAWINTPKKQGGLGPMNIPLVSDPKRTIAQDYGVLKADEGISFRGLFIIDDKGILRQITINDLPVGRSVDEILRLVQAFQFTDKHGEVCPAGWKPGSDTIKPDVNKSKEYFSKQK

SEQ ID NO: 20971 - protein, 199 aa, Rattus norvegicus
MSSGNAKIGHPAPSFKATAVMPDGQFKDISLSDYKGKYVVFFFYPLDFTFVCPTEIIAFSDRAEEFKKLNCQVIGASVDSHFCHLAWINTPKKQGGLGPMNIPLVSDPKRTIAQDYGVLKADEGISFRGLFIIDDKGILRQITINDLPVGRSVDEILRLVQAFQFTDKHGEVCPAGWKPGSDTIKPDVNKSKEYFSKQK

SEQ ID NO: 20972 - protein, 273 aa, Rattus norvegicus
METWSKLLDGTTPSRRWRKLVLLLPPLLLFLLQTEALQGLESDDRFRTRENECHFYAGGQVYPGEVSRVSVADHSLHLSKAKISKPAPYWEGTAVINGEFKELKLTDYRGKYLVFFFYPLDFTFVCPTEIIAFGDRIEEFKSINTEVVACSVDSQFTHLAWINTPRRQGGLGPIRIPLLSDLNHQISKDYGVYLEDSGHTLRGLFIIDDKGVLRQITLNDLPVGRSVDETLRLVQAFQYTDKHGEVCPAGWKPGSETIIPDPAGKLKYFDKLN

SEQ ID NO: 20973 - protein, 257 aa, Rattus norvegicus
MAAAAGRLLWSSVARPASTIFRSISASTVLRPVASRRTCLTDMLWSACPQAKFAFSTSSSFHTPAVTQHAPHFKGTAVVNGEFKELSLDDFKGKYLVLFFYPLDFTFVCPTEIVAFSDKANEFHDVNCEVVAVSVDSHFSHLAWINTPRKNGGLGHMNITLLSDLTKQISRDYGVLLESAGIALRGLFIIDPNGVIKHLSVNDLPVGRSVEEPLRLVKAFQFVETHGEVCPPNWTPESPTIKPSPTASKEYFEKVHQ

SEQ ID NO: 20974 - protein, 199 aa, Rattus norvegicus
MSSGNAKTGHPAPNFKATAVMPDGQFKNISLSDYKGKYVVFFFYPLDFTFVCPTEIIAFSDRAEEFKKLNCQVIGASVNSHFCHLAWINTPKKQGGSGPMSIPLVSDPKPTIAQDDGVLKADEGFSFRGLFLIDEKGSLRQMTINDLPVGRSVDEILRLVQAFQFTDKHGEVCPAGWKPGSDTIKPDVNKSKEYFSKQK

SEQ ID NO: 20975 - protein, 263 aa, Rattus norvegicus
MRQDTGATHKRQGLEISKGVLSSPGCVTPFESTLGPLRALLCALVPKHRATTAEPNSEPCKDMHPTTEPYTPISCAIFLDSFASVLTVMASSNAHSRKPAPDFIATLVVDGAFKEIKLSDYRGNNHAEDFRKLDCEVPGASVDSQFTHLAWINTPRKEGDVGPLNIPLLADVTKSLSQNYGVLKNDEGIADRGLFIINAKGVLRQITVNSLSVGRSVDEALHLVQAFQYTDEHGEVCPAGWKPGSDTIKPNVDDSKEYFSEHS

SEQ ID NO: 20976 - protein, 246 aa, Rattus norvegicus
MLEWFADSRKQMGAAWNHLDKLALVPMVRQSESQPARVLVGTGSAAPSLSGVNHWSLLWTVMASSNAHSRKPAPDFIATLVVDGAFKEIKLSDYRGNNHAEDFRKLDCEVPGASVDSQFTHLAWINTPRKEGDVGPLNIPLLADVTKSLSQNYGVLKNDEGIADRGLFIINAKGVLRQITVNSLSVGRSVDEALHLVQAFQYTDEHGEVCPAGWKPGSYLNCRDVSQAHCSHTYRKAPVVFLSNLY

SEQ ID NO: 20977 - protein, 203 aa, Nostoc sp. PCC 7120
MSITYGTQESLRVGQQAPDFTATAVVDQEFKTIKLSDYRGKYVVLFFYPLDFTFVCPTEITAFSDRYEEFKKLNTEILGVSVDSEFSHLAWIQTDRKSGGVGDLNYPLVSDIKKEVSDAYNVLDPAAGIALRGLFIIDKDGIIQHATINNLAFGRSVDETLRTLQAIQYVQSHPDEVCPAGWQPGEKTMTPDPVKSKVYFAAV

SEQ ID NO: 20978 - protein, 229 aa, Rhodopseudomonas palustris
MHDLVRRVTQHSTNVQETVPMSLHIGDIAPDFTADTTKGKISFHDFIGNSWVFFFSHPADFTPVCTTEMGKTAKLAQPFASRNVKPIGLSTDTVDEHLKWIADVNDTQQTDLQFPIIADPELKVAKLYDMIHPNQSDTAAVRSVFIIDPNKKIRLTMTYPMNVGRNFDEILRVIDALQFADKHTVAAPADWRPGDKVIIPLSVKGEAATKAFPQGWEEPRPYLRLTTIK

SEQ ID NO: 20979 - protein, 197 aa, Buchnera aphidicola str. APS (Acyrthosiphon pisum)
MVLVTQNAPNFIAPAILKNNQIVEQFDLKKYSNGQSTVLFFWPMDFTFVCPSEIIEFNKLHSEFKKRNVKIVGVSIDSVYVHQAWQNTLPKNGGIGKINFPMVSDVKHDIQKSYGIQHPNLGIALRASFLIDSNWIIRHQVVNDLPFGRNITDMIRMVDALDFHNKFGEVCPANWKKGEEGITASSEGVSQYLSKYS

SEQ ID NO: 20980 - protein, 339 aa, Rhodospirillum rubrum
MNPASSSARTRRKHGGAEMPARLARSTLVIRPSLWRSLRILRSMRSSLTRCVAMKTLPSSYRCRSIRERKLHVITRTAQREYPLPHGRDHPPCGLRSATRHTKRAARVEAPVGGGGSYRGAFYGAPSPKSRDLSAMTESVGTLTGRPVPDFTAPAVLADNSIVEDFCLKDYLAGFYGLIFFYPLDFTFVCPSEILAHDHRLPAFAAKEAKVVAISVDSQYSHLAWKKTPIAEGGLGPIGFPMVADISKAIARSFGVLLETGVALRASFLVDRGGIVRHQTVNDLPLGRNVDETLRMIDALRFHDAHGQVCPAGWKTGDPGMTASPEGVAAYLSANAERL

SEQ ID NO: 20981 - protein, 207 aa, Rhodospirillum rubrum
MVIPVLGCALFRSHNAAEKTMSLIGSEVKPFKADAFKAGKFVTVTDDTLKGKWSVVFFYPADFTFVCPTELEDLAENYAEFQRLGVEIFSVSTDTHFAHKAWHDTSEAIKKIEYTMVGDPTGTISRNFDVLIEDAGLADRGTFVIDPEGRIQIVEITAGGIGRDALELLRKVKAAQYVASHPGEVCPAKWKEGEKTLAPSLDLVGRI

SEQ ID NO: 20982 - protein, 167 aa, Rhodospirillum rubrum
ADAFKAGKFVTVTDDTLKGKWSVVFFYPADFTFVCPTELEDLAENYAEFQRLGVEIFSVSTDTHFAHKAWHDTSEAIKKIEYTMVGDPTGTISRNFDVLIEDAGLADRGTFVIDPEGRIQIVEITAGGIGRDALELLRKVKAAQYVASHPGEVCPAKWKEGEKTLAP

SEQ ID NO: 20983 - protein, 155 aa, Chloroflexus aurantiacus
MATPPQVGEMAPDFTLPNEAGEPVSLSQFRGKRVILYFYPKDDTPGCTSQACGFRDSYPVIEEKNAVVIGISPDGTKSHAKFKTKHNLPFILLADEQHSVAEAYGVWGEKSMMGKKYMGIIRSHFVIDEEGRIVQAEIKVSPADSVKRALAALGL

SEQ ID NO: 20984 - protein, 176 aa, Candidatus Carsonella ruddii
MLNTRIKPFKNISYYKKKFYEIKEIDLKSNWNVFFFYPYSYSFICPLELKNISNKIKEFKNLNTKIYAISNDSHFVQKNWIENELKFINFPFISDFNHKISNNFNILNKKDGNCLRSTIIIDKNLIIKYINIVDDSIGRSIDEILKNIKMLQFINTNENKLCPYSWNNDSKSIEIN

SEQ ID NO: 20985 - protein, 177 aa, Candidatus Carsonella ruddii
MLNTKIKPFNTISYFNKKFFNINLNDLKNKWNIFFFFPYSFTFICPTELKDISNYTFKFKEKNCNIFAISTDSHYTQKKWVETELNFVNFPLISDFNKNISKNFNIYNKKDGNCERSTFILDRNLNIKYIEILDINIGRSINDIYQKLSMIQFTNKNINKLCPFSWIKDGKHIDLNL

SEQ ID NO: 20986 - protein, 177 aa, Candidatus Carsonella ruddii
MLNTKIKPFNAISYFNKKFYNINLNDLKNKWNIFFFFPFSFTFVCPTELKDISNYNLKFKEKNCNIFAISTDSHYTHKKWIDEELTFVNFPLISDFNKLISKNFNIYNKKDGNCERSTFILDKNLNIKYIEILDTNIGRSILNIYQKLLMMQFTYKNINKLCPFSWNNDNKYIEINL

SEQ ID NO: 20987 - protein, 177 aa, Candidatus Carsonella ruddii
MLNTKIKPFNTISYFNKKFYNINLNDLKNKWNIFFFFPYSFTFICPTELKDISNYNLKFKEKNCNLFAISTDSHYTHKKWIESELTFINFPFISDFNKLISKNFNIYNKKDGNCERSTFILDKNLNIKYIEILDNNIGRSIHNIYQKLIMMQFTYKNINKLCPFSWNNDNKAIGINL

SEQ ID NO: 20988 - protein, 177 aa, Candidatus Carsonella ruddii
MLNTKINSFKSIAYFKKKFFEITDKELKNFWNVLFFFSFSYTYICPTELLELSKNINLFKNLKCNIYAISTDSHYTHKNWIENEINFINFPFISDFNHKTSKNYKILNKNDGNCYRSTFIIDPNLIIKSIEIIDISISRSIQEILNKIKMLIFTFKNKNKLCPYNWLKDNNSIDINL

SEQ ID NO: 20989 - protein, 186 aa, Sedum lineare
QTLQTSSQSQFHGLKFSHASSFKSPSAPLRKNSIFAKVTKGSTPPPFTLKDQEGRPVSLSKFKGKPVVVYFYPADETPGCTKQACAFRDSYEKFKKAGAEVVGISGDSSESHKAFAKKYKLPFTLLSDEGNKVRKEWGVPSDLFGTLPGRETYVLDKNGVVQLVYNNQFQPEKHIDETLKLLQSLK

SEQ ID NO: 20990 - protein, 208 aa, Chlamydophila pneumoniae AR39
MRNNKRVEEEVFMTLSLVGKEAPDFVAQAVVNGETCTVSLKDYLGKYVVLFFYPKDFTYVCPTELHAFQDALGEFHTRGAEVIGCSVDDIATHQQWLATKKKQGGIEGITYPLLSDEDKVISRSYHVLKPEEELSFRGVFLIDKGGIIRHLVVNDLPLGRSIEEELRTLDALIFFETNGLVCPANWHEGERAMAPNEEGLQNYFGTID

SEQ ID NO: 20991 - protein, 196 aa, Chlamydophila pneumoniae CWL029
MTLSLVGKEAPDFVAQAVVNGETCTVSLKDYLGKYVVLFFYPKDFTYVCPTELHAFQDALGEFHTRGAEVIGCSVDDIATHQQWLATKKKQGGIEGITYPLLSDEDKVISRSYHVLKPEEELSFRGVFLIDKGGIIRHLVVNDLPLGRSIEEELRTLDALIFFETNGLVCPANWHEGERAMAPNEEGLQNYFGTID

SEQ ID NO: 20992 - protein, 182 aa, Ralstonia metallidurans
MKTVGDKLEAFHVVGVKPGFNNHEENGQSAFEDITEKSFEGKWKVIYFYPKDFTFVCPTEIVAFAKLNGDFADRDAIVLGGSTDNEFVKLAWRREHKDLNKLNQWQFADVTGSLVDQLGVRDQAAGVALRATFIVDPDNTIQHVSVNNLNVGRNPEEVLRILDGLQTDELCPCNRAVGGATL

SEQ ID NO: 20993 - protein, 179 aa, Staphylococcus aureus
FTAQAFDPKKDQFKEVTQEDLKGSWSVVCFYPADFSFVCPTELEDLQNQYEELQKLGVNVFSVSTDTHFVHKAWHDHSDAISKITYTMIGDPSQTITRNFDVLDEATGLAQRGTFIIDPDGVVQASEINADGIGRDASTLAHKIKAAQYVRKNPGEVCPAKWEEGAKTLQPGLDLVGKI

SEQ ID NO: 20994 - protein, 151 aa, Deinococcus radiodurans
MTLVGQPAPDFTLPASTGQDITLSSYRGQSHVVLVFYPLDFSPVCSMQLPEYSGSQDDFTEAGAVVLGINRDSVYAHRAWAAEYGIEVPLLADMQLEVARQYGVAIDERGISGRAVFVIDREGVVRYQHVEEQTGQYTVRPGAVLEQLRGL

SEQ ID NO: 20995 - protein, 173 aa, Burkholderia fungorum
SVLSNGNRDVTEESLMGKWSVFVFYPADFTFVCPTELGDLADRYAEFQKLGVEIYSVSTDTHFTHKAWHDTSDTIQKIKYPMVADPTLAISRNFDVLIEEEGLALRGTFVINPEGEIKVAEIHDNGIGRDAGELLRKVQAAQYIAAHPGEVCPAKWTPGAETLTPSLDLIGKI

SEQ ID NO: 20996 - protein, 163 aa, Enterococcus faecium
MKKILWGTGVFFACYPADFTFVCPTELEDLQEQYSTLKSLGVEVFSCSTDTHFTHKAWHDTSDAIGKIEYVMIGDPSHQISRIFDVLDEEQGLAQRGTFIIDPDGIVQAMEINADGIGRDASALIDKIRAAQYVRTHPGEVCPAKWKESGETLKPSFDLVGKI

SEQ ID NO: 20997 - protein, 187 aa, Lactococcus lactis subsp. lactis
MSLVGKKIEEFSTDAYLGGKFIKVSDKDFYGKWSVLCFYPADFSFVCPTELEDLEETYPTLKSLGVEVYSASTDTHFVHAAWHEHSDAISKITYPMLADPSQKISRAFDVLDEEAGLAQRGTFIIDPDGVIQALEITADGIGRDASQLVDKIKAAQYVRNHPGEVCPAKWKEDGASLHVGIDLVGKI

SEQ ID NO: 20998 - protein, 188 aa, Amphibacillus xylanus
MSLIGTEVQPFRAQAFQSGKDFFEVTEADLKGKWSIVVFYPADFSFVCPTELEDVQKEYAELKKLGVEVYSVSTDTHFVHKAWHENSPAVGSIEYIMIGDPSQTISRQFDVLNEETGLADRGTFIIDPDGVIQAIEINADGIGRDASTLINKVKAAQYVRENPGEVCPAKWEEGGETLKPSLDIVGKI

SEQ ID NO: 20999 - protein, 209 aa, Methanothermobacter thermautotrophicus
MPLIGDKFPEMEVQTTHGPMELPDEFEGKWFILFSHPADFTPVCTTEFVAFQEVYPELRELDCELVGLSVDQVFSHIKWIEWIAENLDTEIEFPVIADTGRVADTLGLIHPARPTNTVRAVFVVDPEGIIRAILYYPQELGRNIPEIVRMIRAFRVIDAEGVAAPANWPDNQLIGDHVIVPPASDIETARKRKDEYECYDWWLCTQSRG

SEQ ID NO: 21000 - protein, 178 aa, Clostridium pasteurianum
MERLVGKPAPEFEMKAVKGDGRGFTEVKLGDYKGKWLVMFFYPLDFTFVCPTEITGFSKRAEEFRDLKAELLAVSCDSQYSHETWINQDIKQGGLGKINFPIASDKTTEVSTKYGIQIEEEGISLRGLFIIDPEGIVRYSVVHDLNVGRSVDETLRVLKAFQTGGMCALDWHEGDDNL

SEQ ID NO: 21001 - protein, 187 aa, Escherichia coli O157:H7 EDL933
MSLINTKIKPFKNQAFKNGEFIEITEKDTEGRWSVFFFYPADFTFVCPTELGDVADHYEELQKLGVDVYAVSTDTHFTHKAWHSSSETIAKIKYAMIGDPTGALTRNFDNMREDEGLADRATFVVDPQGIIQAIEVTAEGIGRDASDLLRKIKAAQYVASHPGEVCPAKWKEGEATLAPSLDLVGKI

SEQ ID NO: 21002 - protein, 206 aa, Xylella fastidiosa Dixon
MLKLYIILSSTLSATNRKYSMSVLNTEILSFKAIAYKNGQFVEVSEAVLKGKWAVFVFYPADFTFVCPTELEDLADHYEEFQKYGVEIYSVSTDTHFSHKAWHDISPAIGKIKYAMIGDPTHEISRNFNVLRPSGLADRGTFIIDPQGVIQSVEITAEGIGRDAKELLRKVKAAIYVANHPGEVCPAKWEEGGKTLAPSLDLVGKI

SEQ ID NO: 21003 - protein, 186 aa, Xylella fastidiosa Ann-1
MSVLNTEILSFKATAYKNGQFVEVSEAVLKGKWAVFVFYPADFTFVCPTELEDLADHYEEFQKYGVEIYSVSTDTHFSHKAWHDISPAIGKIKYAMIGDPTHEISRNFNVLRPSGLADRGTFIIDPQGVIQSVEITAEGIGRDAKELLRKVKAAIYVANHPGEVCPAKWEEGGKTLAPSLDLVGKI

SEQ ID NO: 21004 - protein, 198 aa, Magnetococcus sp. MC-1
MSVLVTKQAPDFNATAVMADNSFQEISMSDYKGQYVVLFFYPLDFTFVCPSELIAFDHRLGEFEKRNVQVLGCSIDSHFSHLAWKNTEINNGGIGQVKYPLIADLNKQIARDYDVLFNDAIALRGSFLIDKEGKVRHQVVNDLPLGRNIDEMLRMIDALQFTEAHGEVCPAGWKSGDAGMQGSTEGVAKYLAANADKL

SEQ ID NO: 21005 - protein, 189 aa, Staphylococcus aureus subsp. aureus Mu50
MSLINKEILPFTAQAFDPKKDQFKEVTQEDLKGSWSVVCFYPADFSFVCPTELEDLQNQYEELQKLGVNVFSVSTDTHFVHKAWHDHSDAISKITYTMIGDPSQTITRNFDVLDEATGLAQRGTFIIDPDGVVQASEINADGIGRDASTLAHKIKAAQYVRKNPGEVCPAKWEEGAKTLQPGLDLVGKI

SEQ ID NO: 21006 - protein, 188 aa, Treponema pallidum
MESLIGKRVIDFKLPAYVGGKFTEVSNASIKGSWAVFMFYPADFTFVCPTELADLARVYPSFVEIGCKVYSVSTDSEYVHKAWADATDTIKNLPYEMISDKAGKLAGFFGVLLPDTWHALRGTFVVDPEGLVKAFEVHDMGIGRDADELLRKVQSAQFVAKHGDQVCPARWKPGAKTLKPGIDLIGKI

SEQ ID NO: 21007 - protein, 200 aa, Pseudomonas putida KT2440
MSVLVGKKAPDFTVPAVLGNGEIVDSFNLASAIKGKYGLVFFYPLDFTFVCPSELIALDNRIPDFQARNVEVIGVSIDSHFTHNAWRNTPVNNGGIGQVKYTLAADMTHEICKAYDVESEGGVAFRGAFLIDTNGVVRSQIVNDLPLGRNMDELLRLVDALQFHEEHGEVCPANWKKGDKGMNASPEGVAAYLSENAGKL

SEQ ID NO: 21008 - protein, 187 aa, Pseudomonas putida KT2440
MPIINSQVKPFNATAYHKGEFVQVSEADLKGKWSVVFFYPADFTFVCPTELGDLADNYAEFQKLGVEIYGVSTDTHFTHKAWHDTSDTIGKIEYPLIGDPTHVISRNFDVLIEEAGLADRGTFVINPEGQIKIVELNDGGVGRDAAELLRKVKAAQYVAAHPGEVCPAKWKEGEATLAPSLDLVGKI

SEQ ID NO: 21009 - protein, 186 aa, Streptococcus pyogenes M1 GAS
MSLIGKEIAEFSAQAYHDGKFITVTNEDVKGKWAVFCFYPADFSFVCPTELGDLQEQYETLKSLGVEVYSVSTDTHFVHKAWHDDSDVVGTITYPMIGDPSHLISQAFEVLGEDGLAQRGTFIVDPDGIIQMMEINADGIGRDASTLIDKIHAAQYVRKHPGEVCPAKWKEGAETLTPSLDLVGKI

SEQ ID NO: 21010 - protein, 206 aa, Xylella fastidiosa 9a5c
MLKLYIILSSTLSATNRKYSMSVLNTEILSFKATAYKNGQFVEVSEAVLKGKWAVFVFYPADFTFVCPTELEDLADHYEEFQKYGVEIYSVSTDTHFSHKAWHDISPAIGKIKYAMIGDPTHEISRNFNVLRPSGLADRGTFIIDPQGVIQSVEITAEGIGRDAKELLRKVKAAIYVANHPGEVCPAKWEEGGKTLAPSLDLVGKI

SEQ ID NO: 21011 - protein, 181 aa, Listeria innocua
MAERLVGTQAPRFEMEAVMPNQTFGKVSLEKNIEDDKWTVLFFYPMDFTFVCPTEIVAISARSDEFDALNARIIGASTDTIHSHLAWTNTPIKEGGIGKLTYPLAADTNHQVASDYGVLIEEEGVALRGLFIINPKGEIQYEVVHHNNIGREVDEVLRVLQALQTGGLCPINWQPGEKTIV

SEQ ID NO: 21012 - protein, 181 aa, Listeria monocytogenes EGD-e
MAERLVGTQAPRFEMEAVMPNQTFGKVSLEKNIEDDKWTILFFYPMDFTFVCPTEIVAISARSDEFDALNARIIGASTDTIHSHLAWTNTPIKEGGIGKLNYPLAADTNHQVASDYGVLIEEEGVALRGLFIINPKGEIQYEVVHHNNIGREVDEVLRVLQALQTGGLCPINWQPGEKTIV

SEQ ID NO: 21013 - protein, 198 aa, Corynebacterium diphtheriae
MSILTVGEKFPEFNLTALKGGDLHDVNASQPEDYFETVSLDKYEGKWKVVFFYPKDFTFVCPTEIAAFGKLDEEFQDRDTQILGGSIDNEFSHFNWRATHPELKTVPFPLFSDIKHDLIKALGVENEEGVADRATFIIDPDGIIQFVSVTPDAVGCNVDEVLRVLDALQSEEVCACNWQKNDPTKNIDKFAELEKGLN

SEQ ID NO: 21014 - protein, 203 aa, Eubacterium acidaminophilum
  unsure (1)..(203): unsure at all Xaa locations
MVSVGKKAPDFEMAGFYKGEFKTFRLSEYLGKWVVLCFYPGDFTFVXATEVSAVAEKYPEFQKLGVEVLSVSVDSVFVHKMWNDNELSKMVEGGIPFPMLSDGGGNVGTLYGVYDPEAGVENRGRFLIDPDGIIQGYEVLILPVGRNVSETLRQIQAFQLVRETKGAEVAPSGWKPGKKTLKPGPGLVGNVYKEWSVKEAFED

SEQ ID NO: 21015 - protein, 189 aa, Staphylococcus epidermidis ATCC 12228
MSLINKEILPFTAQAYDPKKDEFKEVTQEDFKGSWNVVCFYPADFSFVCPTELEDLQNQYAKLQELGVNVYSVSTDTHFVHKAWHDHSDAISKLEYSMIGDPSQTITRNFDVLDEESGLAQRGTFIIDPDGVVQAAEINADGIGRDASTLVNKIKAAQYVRQHPGEVCPAKWEEGSESLQPGLDLVGKI

SEQ ID NO: 21016 - protein, 195 aa, Mycobacterium avium
MPLLTIGDQFPAYELTALIAGDLSKVDAKQPGDYFTTITSEDHAGKWRVVFFWPKDFTFVCPTEIATFGKLNDEFEDRDAQVLGVSIDSEFVHFNWRAQHEDLKNLPFPMLSDIKRELSLATGVLNADGVADRATFIVDPNNEIQFVSVTAGSVGRNVEEVLRVLDALQSDELCACNWRKGDPTLNATELLKASA

SEQ ID NO: 21017 - protein, 195 aa, Mycobacterium leprae
MSLLSIGQQFPAYQLTALIGGDLSKVDAQQPGDYFTTVSSDSHPGKWRVVFFWPKDFTFICPTEIAAFGKLNEEFEGRGAQILGVSIDSEFVHFQWRAQHEDLKRLPFPMLSDIKRELSAASGALNADGVADRVTFIVDPDNDIQFVSVTAGSVGRNVEEVLRVLDALQSDQLCACNWRKGDPTLNATELLKTSA

SEQ ID NO: 21018 - protein, 195 aa, Mycobacterium avium subsp. paratuberculosis
MPLLTIGDQFPAYELDRVIAGDLSKVDAKQPGDYFTTVTSEDHAGKWRVVFFWPKDFTFVCPTEIATFGKLNDEFEDRDAQVLGVSIDSEFVHFNWRAQHEDLKNLPFPMLSDIKRELSLATGVLNADGVADRATFIVDPNNEIQFVSVTAGSVGRNVEEVLRVLDALQSDELCACNWRKGDPTLNATELLKASA

SEQ ID NO: 21019 - protein, 195 aa, Mycobacterium smegmatis
MALLTIGDQFPEYDLTAVVGGDLSKVDAKQPDDYFTRVTSKDYEGKWRIIFFWPKDFTFVCPTEIAAFGKLNEDFEDRDAKVLGVSVDNEFVHFQWRAQHEDLKTLPFPMVSDLKRELTAACGVLNADGVADRATFIVDPNNEVQFVSVTAGSVGRNVDEVLRVLDALQSDELCACNWKKGDPTINAGELLAGAV

SEQ ID NO: 21020 - protein, 195 aa, Mycobacterium marinum
MSLLTIGQQFPAYSLTALIGGDLSKVDAKQPGDYFKTVTSDDHAGKWRVVFFWPKDFTFVCPTEIAAFGKLNDEFEDRDAQVLGVSIDSEFVHFQWRAQHDDLKNLPFPMLADIKRDVVAATGVLNADGVADRVTFIVDPNNEIQFVSATAGSVGRNVDEVLRVLDALQSDELCACNWRKGDPTLDAGELLKASA

SEQ ID NO: 21021 - protein, 239 aa, Anopheles gambiae str. PEST
CSAFKMSFLVRQLAQACTRVGTSAAARGCLQRSALLHTGRTLSVAQVQQPAPSFQGTAVVNSDFREIKLADYRGKYLVLFFYPLDFTFVCPTEIIAFSDRINEFRELNTEVVGVSVDSHFSHLAWINTPRKAGGLGKLEYPLLADLTKRISADYGVLLPDGISLRGLFIIDPAGVVRQITINDLPVGRSVDETLRLIKAFQFVEKHGEVCPANWEPKSNAATIKPNPKDSREYFEKHGK

SEQ ID NO: 21022 - protein, 264 aa, Anopheles gambiae str. PEST
SKALLSMRNFDAAIMPGIVACCLLLFSFAIIVQEGDGAVADEPGSCHSFGGGHVYPQEAPRFVDHKLQYTKAVISRPAPAFEATAVVDGAFKKIKLSDYRGKYLVFFFYPLDFTFVCPTEILAFSDRVNEFKKLNAEVIAASIDSHFTHLAWINTPRKEGGLGKINIPLVSDITHSISKDYGVFLDDLGHTLRGLFIIDDRGVLRQITMNDLPVGRSVDETLRLVQAFQYTDKHGEVCPAGWKPGQDTIVPNPEEKIKYFEKNH

SEQ ID NO: 21023 - protein, 250 aa, Anopheles gambiae str. PEST
PNRTQATLLRSVNFAVRVCDCVRVCLCVSLVLPAFCVILSQIFPALYVRVISLQMPVPELQKPAPAFSGTAVVNGEFKEIRLSDYLGKYVVLFFYPLDFTFVCPTEIVAFSDRADEFHEKKCQVIACSTDSHFTHLAWINTPRKQGGLGELKIPLLADKSMKIARDYGVLQEESGVPFRGLFIIDDKGNLRQVTVNDLPVGRSVDETLRLVEAFRYTDEFGEVCPANWKPGSKTMVADPHKSKDYFNAVN

SEQ ID NO: 21024 - protein, 218 aa, Agrobacterium tumefaciens str. C58 (Cereon)
MSLRINDIAPDFTAETTQGPVRFHDWIGDGWAVLFSHPKNFTPVCTTELGAMGGLQPEFEKRGVKIIGISVDPVESHEKWKADIRTATGFNVDYPLIGDKDLKVAKLYDMLPAGAGDSSEGRTPADNATVRSVFVIGPDKKIKLVLTYPMTTGRNFDEILRAIDSIQLTSKHQVATPANWKQGEDVIITAAVSNEDAIARFGSYDTVLPYLRKTKQPG

SEQ ID NO: 21025 - protein, 186 aa, Xylella fastidiosa Temecula1
MSVLNTEILSFKATAYKNGQFVEVSEAVFKGKWAVFVFYPADFTFVCPTELEDLADHYEEFQKYGVEIYSVSTDTHFSHKAWHDISPAIGKIKYAMIGDPTHEISRNFNVLRPSGLADRGTFIIDPQGVIQSVEITAEGIGRDAKELLRKVKAAIYVANHPGEVCPAKWEEGGKTLAPSLDLVGKI

SEQ ID NO: 21026 - protein, 201 aa, Giardia lamblia ATCC 50803
MPVPIPGTPCPDFEVDVVTPELKFAKRKLSDYKGKYLIVFFYPLDFTFVCPSEIIHFSNLAEQLKKKCNAEIIIGSTDSVYSHYAWCLQGQNEGGIGTCKCDLFADTNHKMARDFGVLVEDAGIALRGMFIVSDKGVVRHVTINDLPVGRSVEEAMRLVQAFQYADKTGGDIPCGWTPEKNDTIIPDPEKKKEYFSKTFKE

SEQ ID NO: 21027 - protein, 201 aa, Giardia lamblia ATCC 50803
MPVPIPGTPCPDFEVDVVTPELKFAKRKLSDYKGKYLIVFFYPLDFTFVCPSEIIHFSNLAEQLKKKCNAEIIIGSTDSVYSHYAWCLQGQNEGGIGTCKCDLFADTNHKMARDFGVLVEDAGIALRGMFIVSDKGVVRHVTINDLPVGRSVEEAMRLVQAFQYADKTGGVIPCGWTPEKNDTIIPDPEKKKEYFSKTFKK

SEQ ID NO: 21028 - protein, 246 aa, Giardia lamblia ATCC 50803
MLLLICLISVAFAAACTLTVNKNTCIPDKCEKFGDTEVCMQLKTTSSVPIPGTPCPDFEVEVLTPELKFTKRKLADYKGKYLIIFFYPADFTFVCPSEIIHFSSMAEQLKKKYNTEIIIGSTDTVYSHHAWCLQNKTDGGIGPCKCDLFADTNHKMARDFGILVEEMGLALRAMFIVSDKGIVRHVTINDFPVGRSVEEAMRMIQAFQYADKTGGVIPCGWTPEKNDFIIPDPEKKKEYFSKTFTK

SEQ ID NO: 21029 - protein, 189 aa, Pyrococcus furiosus DSM 3638
MIRVGEVVPDFEADAYFPEKDEIGKLRISDYRGKWVVLAFYPADFTFVCPTELEELAEYYEEFKKEGAEIISVSTDTAYVHKAWHDTSPAIKKVRFPMLADPAGKICRLFGTYIEDEGISWRATFIIDPDGKVVHMEMHDNSIGRSAKEILRRLRAAKFVRENPGVVCPASWEPGKEALKVSLDLVGKI

SEQ ID NO: 21030 - protein, 226 aa, Methanothermobacter thermautotrophicus str. Delta H
MGEKVYELRKIKKKGRGMPLIGDKFPEMEVQTTHGPMELPDEFEGKWFILFSHPADFTPVCTTEFVAFQEVYPELRELDCELVGLSVDQVFSHIKWIEWIAENLDTEIEFPVIADTGRVADTLGLIHPARPTNTVRAVFVVDPEGIIRAILYYPQELGRNIPEIVRMIRAFRVIDAEGVAAPANWPDNQLIGDHVIVPPASDIETARKRKDEYECYDWWLCTQSRG

SEQ ID NO: 21031 - protein, 213 aa, Magnetospirillum magnetotacticum
MMEPLIMSDAIQNPTSLVTKAAPDFTAPAVMPDNEINPAFNLKSYLAGSYGIVFFYPLDFTFVCPSEILAHDHRVKAFAERNTKVIAVSVDSHFTHLAWKNTPVDKGGLGNVQFPMVADLTKDIAKSYGVLLPGGVALRGTFVIDKNGVVQSAHVNNLPLGRNVDEALRLIDALQFHEEHGEVCPAGWNKGKAGMKANPNGVAEYLAKHASEL

SEQ ID NO: 21032 - protein, 248 aa, Magnetospirillum magnetotacticum
MSSMKRVPTCSAWACICSISQGHWTASANTGEVLHIRGDGQLSAQLQPGHQDGLEIGTRGIDGGGAASRTGTQNQNLGVVMRHRDASRNLLILLRHSIRRGRTSSRRSILKSYLDGSYGIVFFYPLYFNFVCPSEILAHDHRVKAFAERNTNVIAVSVDSHFTHLAWKNTPVDKGGLGNVQFPMVADLTKDIAKSYGVLLPGGVALRGTFVIDKNGVVQSAHVNNLPLGRNVDEALRLIDALQFHEEH

SEQ ID NO: 21033 - protein, 193 aa, Leptospira interrogans serovar lai str. 56601
MPQVTSLAPDFKAEAVLGKEIKEIKLSDYKGKWVVLFFYPLDFTFVCPTEIIEYDNKLAEFKKLGTEVLGVSVDSAFTHLAWKNTPKKEGGIGEIKYPLIADLTKSISRDYNVLTEGGVALRGTFIIDPAGVIRQATINDLPVGRNIDEAIRLIKAFQFVEKHGEVCPANWDEGKKTMKADPEKSKDYFAAVN

SEQ ID NO: 21034 - protein, 188 aa, Fusobacterium nucleatum subsp. nucleatum ATCC 25586
MSLIGRKVPEFKATAFKKGEKDFVTVTDKDLLGKWSVFVFYPADFTFVCPTELEDLQDNYEAFKKEGAEVYSVSCDTAFVHKAWADHSERIKKVTYPMVADPTGFLARAFEVMIEEEGLALRGSFVINPEGKIVAYEVHDNGIGREAKELLRKLQGAKFVAEHGEVCPAKWQPGSETLKPSLDLIGEL

SEQ ID NO: 21035 - protein, 187 aa, Xanthomonas campestris pv. campestris str. ATCC 33913
MSLINTQVQPFKANAYHNGNFIEVTEASLKGKWSVLIFMPAAFTFNCPTEVEDAADNYAAFQKAGAEVYIVTTDTHFSHKVWHETSPAVGKAQFPLIGDPAHKLTRAFGVHIEEEGLALRGTFIINPEGVIKTLEIHDNSIARDVTETLRKLTAAQFVANNPGQVCPAKWKEGAKTLAPSLDLVGKI

SEQ ID NO: 21036 - protein, 187 aa, Xanthomonas axonopodis pv. citri str. 306
MSLINTQVQPFKANAYHNGNFIEVTEASLKGKWSVLIFMPAAFTFNCPTEVEDAADNYAAFQKAGAEVYIVTTDTHFSHKVWHETSPAVGKAQFPLIGDPTHKLTRAFGVHIEEEGLALRGTFIINPEGVIKTLEIHDNSIARDVTETLRKLTAAQFVANNPGQVCPAKWKEGAKTLAPSLDLVGKI

SEQ ID NO: 21037 - protein, 187 aa, Caulobacter crescentus CB15
MSLINTEIKPFTAQAYKDGKFVTVSEADVKGKWSVFFFYPADFTFVCPTELEDLADNYDVFTRLGVEIYAVSTDTHFSHKAWHDSSPAIGKIKYTMVGDPSGQVTNNFEIMRPGVGLADRGTFLVDPQGVIQFMEVTAEGIGRNAIELLRKIKAAQYVAAHPGEVCPAKWEEGEKTLAPSLDLVGKI

SEQ ID NO: 21038 - protein, 187 aa, Bacillus anthracis str. A2012
MLLIGTEVKPFKANAYHNGEFIQVTDESLKGKWSVVCFYPADFTFVCPTELEDLQNQYATLKELGVEVYSVSTDTHFTHKAWHDSSETIGKIEYIMIGDPTRTITTNFNVLMEEEGLAARGTFIIDPDGVIQSMEINADGIGRDASILVNKIKAAQYVRNNPGEVCPAKWQEGSATLKPSLDLVGKI

SEQ ID NO: 21039 - protein, 198 aa, Campylobacter jejuni subsp. jejuni NCTC 11168
MIVTKKALDFTAPAVLGNNEIVQDFNLYKNIGPKGAVVFFYPKDFTFVCPSEIIAFDKRYQEFKNRGIEVIGISGDNEFSHFAWKNTPVNQGGIGQVKFPLVADLTKQIARNFDVLYAEAVALRGSFLLDADGTVRHAVVNDLPLGRNIDEMLRMVDTMLFTNEHGEVCPAGWNKGDEGMKANPKGVAEYLGKNEAKL

SEQ ID NO: 21040 - protein, 195 aa, Chlorobium tepidum TLS
MSVLVGRPAPDFNAAAVVNGSTFVDSCQLSAYRGKYVVLFFYPLDFTFVCPTELHAFQEKLDEFKKRNVEVLGCSVDSKFSHFAWLNTPRSKGGIQGVTYPLISDINKTIAKDYDVLTPDGSVALRGLFLIDKEGIVRHQVVNDLGIGRNIDEVLRIVDALQFTEEFGEVCPANWNKGDKTMKPTDEGLKEYFAE

SEQ ID NO: 21041 - protein, 189 aa, Clostridium perfringens str. 13
MQMSLINKKVLDFKVQAYQNGEFKEVTSEDLKGHWSVFVFYPADFTFVCPTELGELADNYESFKEIGCEVYSISTDTHFVHKAWADASDTIGKIKYPMLADPTGKLARDFEVMIEEEGLALRGSFVINPEGEIKAYEIHDNGIGRNAEELLRKVQAAQFVAEHGDQVCPAKWKPGEETLAPSLDLIGKL

SEQ ID NO: 21042 - protein, 197 aa, Thermosynechococcus elongatus BP-1
MSECLRVGQPAPDFEAVAVYDQEFKTIKLSDYRGKYVVLFFYPLDFTFVCPTEIVAFSDRYDEFAKLNTEILGVSVDSQFSHLAWTQTDRKAGGVGDLKYPLVSDLKKDISTAYNVLTEEGVALRGLFIIDKEGIIQHATINNLAFGRSVDETLRVLQAIQYVQTHPDEVCPAGWHPGDKTMNPDPVKSKVYFEAVG

SEQ ID NO: 21043 - protein, 198 aa, Buchnera aphidicola str. Sg (Schizaphis graminum)
MTLVTQKAPNFIAPAILKNGKIMNNFDLKKYSNGQITVLFFWPMDFTFVCPSEIIEFNKTFEAFEKRNVKIVGVSIDSVFVHQAWQNTFPENGGIGKIKFPMVSDIKHEIQKSYHIEHPELNIALRASFLIDENWIIRHQVVNDLPFGRNIDEMIRMIDALNFHNKYGEVCPVNWKHGQEGMKASQEGVSSYLKKYFS

SEQ ID NO: 21044 - protein, 156 aa, Thermobifida fusca
MPIEVGQNAPDFELADQHGQTVRLSDFRGRSRVAVVFYPLAFSGICDKELRQLHECMSEFTARSVQPLAISVDSMFAHRVWADREGVDFPLLSDFWPHGAVAQRYGVFDETKGVALRGSFLIDTEGVVRWKVVNPTFQGRDMDDYRQAFADLGWNP

SEQ ID NO: 21045 - protein, 187 aa, Clostridium thermocellum ATCC 27405
MSLIGTEVKPFTAEAYHNGKFITVTEQDFKGKWSIVVFYPADFTFVCPTELEDLQNNYEKFKALGAEVYSVSTDTHYTHKAWHDTSEAIKKITYVMIGDPSHTLSRNFDVLNEATGLADRGTFIIDPDGVIQYVEVSAENVGRNAEALIDKIKAAQYVRNHPGEVCPAKWKEGGATLKPSIDLVGKI

SEQ ID NO: 21046 - protein, 189 aa, Leuconostoc mesenteroides subsp. mesenteroides ATCC 8293
MVTNFIDSEITDFKVNAYHDGDFTEVTKQDTLGKWGVYFFYPADFSFVCPTELGDLADHYADFQNINAEIYSVSEDSEFVHKAWAEATDTIAKVKYPMLADPAGKLARFFNVLDEDAGLAFRATFIVDPEGKIQSYTINNMGIGRNAEEILRTLEAAQFVAEHGDRVCPANWHPGEDTIAPSLDLVGKI

SEQ ID NO: 21047 - protein, 200 aa, Microbulbifer degradans 2-40
MGVLVGKQAPDFTAPAVLGSGEIVDSYNFAEATKGKKAVVFFYPLDFTFVCPSELLAFDHRIAEFEKRGVEVIGVSIDSHFSHNAWRNTPVNEGGIGPVKYTLVADMTHAICKAYDVESEGGVAFRGSFLIDEDGLVRHQVVNDLPLGRNVDEMLRMVDALAFHQEHGEVCPAGWKDGDKGMTASPEGVAAYLSENASNL

SEQ ID NO: 21048 - protein, 188 aa, Microbulbifer degradans 2-40
MQTIINTKILPFKATAFSKGDFIPVSEQDLLGKWSVVMFYPADFTFVCPTELGDMADHYAQLQEMGVEVYSVSTDTHFTHKAWHDSSDTIGKINFPMIGDPTGTISRNFGVMIEEDGLALRGTFVINPEGEIKVAEIHDLGIGRSAKELVRKIQAAQYVAEHDGEVCPAAWQPGEATLAPSLDLVGKI

SEQ ID NO: 21049 - protein, 199 aa, Trichodesmium erythraeum IMS101
MTDECLRVGQKAPDFTATAVVDQEFETIKLSDYRGKYVVLFFYPLDFTFVCPTEITAFSDRYKEFELLNTEILGVSVDSEFSHLAWIQTDRKSGGIGDLNYPLLSDIKKEISTAYNVLDLEAGIALRGLFIIDREGIIQHATVNNFAFGRNVDEAIRTLQAIQYVQIHPNEVCPVGWKPGDKTMNSDPIKSKEFFAAVS

SEQ ID NO: 21050 - protein, 184 aa, Brucella suis 1330
MLGIGDKLPSFKVTGVKPGFNHHEENGVSAFEEVTEQSFPGKWKVIFFYPKDFTFVCPTEIAEFARLASEFEDRDAVVLGGSTDNEFVKLAWRRDHKDLNKLPIWSFADTNGSLVDGLGVRSPDGVAYRYTFVVDPDNVIQHVYATNLNVGRAPKDTLRVLDALQTDELCPCNREVGGETLKAA

SEQ ID NO: 21051 - protein, 188 aa, Bifidobacterium longum DJO10A
MMTLLQHELTDFKVNAFQNNEFHEVTKDDVLGHWSLFFFYPADFTFVCPTELEDLAKNYAKFKEIGCEIYSVSCDTHFVHKAWHDANEKIAKIEYPMLADPTALLAKDLDTYNEADGMAERGDFIVSPEGKVVAYEVISSNVGRNAEELLRRVQASQFVYEHGDQVCPANWTPGEETIEPSLDLVGQL

SEQ ID NO: 21052 - protein, 200 aa, Haemophilus somnus 129PT
MVLVTRQAPDFTAAAVLGNGEIVEKFNLKQHIAGKAAVVFFYPMDFTFVCPSELIAFDHRYKEFQDRNVEIIGVSIDSEFTHNAWRNTPVDNGGIGQVQYALVADIKHEIAKAYGIEHPEAGVALRASFLIDKEGVVRHQVVNDLPLGRNIDEMLRMVDALQFHEEHGEVCPAQWEKGKEGMTGSPEGVAKYLKQNADKL

SEQ ID NO: 21053 - protein, 187 aa, Pseudomonas syringae pv. syringae B728a
MPIINSQVKPFKATAFKNGAFVDVSDADFKGKWSVVFFYPADFTFVCPTELEDLADNYEEFKKLGVEIYSVSTDTHFAHAAWHNTSPAIGKIQYTMIGDPTLTISRNFDVLIEEAGLADRGTFVINPEGQIKIVELNDGGVGRDASELLRKIKAAQYVAAHPGEVCPAKWKEGEATLAPSLDLVGKI

SEQ ID NO: 21054 - protein, 200 aa, Pseudomonas fluorescens PfO-1
MSVLVGKQAPDFTVPAVLGNGEIVDSFTLSSAIKGKYGLVFFYPLDFTFVCPSELIALDNRMADFKARNVEVVAVSIDSHFTHNAWRNTPVNNGGIGQVKYTMAADMKHEIAKAYDVESEGGVAFRGAFLIDDKGVVRSQIINDLPLGRNMEELIRLVDALQFHEEHGEVCPANWKKGDKGMNASPEGVAAYLTENAAAL

SEQ ID NO: 21055 - protein, 253 aa, Pseudomonas fluorescens PfO-1
MLKRAPFTGWPGLRINRCRRRYRFLLLIPSANSENKSAASGLPMSHPSSDWVGFTHRIHNPDGESSMPIINSQVKPFKATAFKNGDFVQVSDADLKGKWSVVFFYPADFTFVCPTELEDLADNYAAFQKLGVEIYSVSTDTHFAHAAWHNTSPAIGKIQYTMIGDPTQVISRNFDVLIEEAGLADRGTFVINPEGQIKIVELNDGGVGRDASELLRKIKAAQYVAAHPGEVCPAKWKEGEATLAPSLDLVGKI

SEQ ID NO: 21056 - protein, 187 aa, Bifidobacterium longum NCC2705
MTLLQHELTDFKVNAFQNNEFHEVTKDDVLGHWSLFFFYPADFTFVCPTELEDLAENYAKFKEIGCEIYSVSCDTHFVHKAWHDANEKIAKIEYPMLADPTALLAKDLDTYNEADGVAERGDFIVSPEGKVVAYEVISSNVGRNAEELLRRVQASQFVYEHGDQVCPANWTPGEETIEPSLDLVGQL

SEQ ID NO: 21057 - protein, 186 aa, Streptococcus agalactiae 2603V/R
MSLVGKEIIEFSAQAYHDGKFITVTNEDVKGKWAVFCFYPADFSFVCPTELGDLQEQYETLKSLDVEVYSVSTDTHFVHKAWHDDSDVVGTITYPMIGDPSHLISQGFDVLGQDGLAQRGTFIIDPDGVIQMMEINADGIGRDASTLIDKVRAAQYIRQHTGEVCPAKWKEGAETLTPSLDLVGKI

SEQ ID NO: 21058 - protein, 199 aa, Pseudomonas aeruginosa PAO1
MSVLVNKQAPDFTAAAVLGDGSIVDAFQLSSLRGKYVVLFFWPLDFTFVCPSEIIAHNNRMDKFRELGVEVVGVSIDSQFTHHAWRSTPVEKGGIGAVEFTMVADVKHEITRAYGIEHEDGVALRASFLIDRAGVVQHQVVNNLPLGREVDEMVRLVEALQFTEEHGEVCPAGWRKGQKGMKASAEGVASYLAENAEAL

SEQ ID NO: 21059 - protein, 200 aa, Pseudomonas aeruginosa PAO1
MSVLVGKKAPDFNVAAVLGNGEIVESFTLSEAIKGKYGLVFFYPLDFTFVCPSELIALDHRIPEFQARNVEVIGVSIDSHFTHNAWRNTPVDKGGIGAVKYTLAADTKHEIAKAYDVESDGGVAFRGAFLIDKEGVVRSQIVNDLPLGRNMDELLRLVDALQFHEEHGEVCPANWKKGDKGMTASPEGVAKYLAENASKL

SEQ ID NO: 21060 - protein, 187 aa, Pseudomonas aeruginosa PAO1
MSLINTQVQPFKVNAFHNGKFIEVTEESLKGKWSVLIFMPAAFTFNCPTEIEDAANNYGEFQKAGAEVYIVTTDTHFSHKVWHETSPAVGKAQFPLIGDPTHQLTNAFGVHIPEEGLALRGTFVINPEGVIKTVEIHSNEIARDVGETVRKLKAAQYTAAHPGEVCPAKWKEGEKTLAPSLDLVGKI

SEQ ID NO: 21061 - protein, 188 aa, Fusobacterium nucleatum subsp. vincentii ATCC 49256
MSLIGRKVPEFKATAFKKGEKDFITVTDKDLLGKWSVFVFYPADFTFVCPTELEDLQDNYEAFKKEGAEVYSVSCDTAFVHKAWADHSERIKKVTYPMVADPTGFLARAFEVMIEEEGLALRGSFVINPEGKIVAYEVHDNGIGREAKELLRKLQGAKFVAEHGEVCPAKWQPGSETLKPSLDLIGEL

SEQ ID NO: 21062 - protein, 181 aa, Helicobacter pylori
LVTKLAPDFKAPAVLGNNEVDEHFELSKNLGKNGVILFFWPKDFTFVCPTEIIAFDKRVKDFQEKGFNVIGVSIDSEQVHFAWKNTPVEKGGIGQVSFPMVADITKSISRDYDVLFEEAIALRGAFLIDKNMKVRHAVINDLPLGRNADEMLRMVDALLHFEEHGEVCPAGWRKGDKGMKA

SEQ ID NO: 21063 - protein, 181 aa, Helicobacter pylori
LVTKLAPDFKAPAVLGNNEVDEHFELSKNLGKNGVILFFWPKDFTFVCPTEIIAFDKRVKDFQEKGFNVIGVSIDSEQVHFAWKNTPVEKGGIGQVTFPMVADITKSISRDYDVLFEEAIALRGAFLIDKNMKVRHAVINDLPLGRNADEMLRMVDALLHFEEHGEVCPAGWRKGDKGMKA

SEQ ID NO: 21064 - protein, 181 aa, Helicobacter pylori
LVTKLAPDFKAPAVLGNNEVDEHFELSKNLGKNGVILFFWPKDFTFVCPTEIIAFDKRVKDFHEKGFNVIGVSIDSEQVHFAWKNTPVEKGGIGQVSFPMVADITKSISRDYDVLFEEAIALRGAFLIDKNMKVRHAVINDLPLGRNADEMLRMVDALLHFEEHGEVCPAGWRKGDKGMKA

SEQ ID NO: 21065 - protein, 181 aa, Helicobacter pylori
LVTKLAPDFKAPAVLGNNEVDEHFELSKNLGKNGVILFFWPKDFTFVCPTEIIAFDKRVKDFHEKGFNVIGVSIDSEQVHFAWKNTPVEKGGIGQVTFPMVADITKSISRDYDVLFEEAIALRGAFLIDKNMKVRHAVINDLPLGRNADEMLRMVDALLHFEEHGEVCPAGWRKGDKGMKA

SEQ ID NO: 21066 - protein, 181 aa, Helicobacter pylori
LVTKLAPDFKAPAVLGNNEVDEHFELSKNLGKNGAILFFWPKDFTFVCPTEIIAFDKRVKDFHEKGFNVIGVSIDSEQVHFAWKNTPVEKGGIGQVSFPMVADITKSISRDYDVLFEEAIALRGAFLIDKNMKVRHAVINDLPLGRNADEMLRMVDALLHFEEHGEVCPAGWRKGDKGMKA

SEQ ID NO: 21067 - protein, 181 aa, Helicobacter pylori
LVTKLAPDFKAPAVLGNNEVDEHFELSKNLGKSGAILFFWPKDFTFVCPTEIIAFDKRVKDFQEKGFNVIGVSIDSEQVHFAWKNTPVEKGGIGQVTFPMVADITKSISRDYDVLFEEAIALRGAFLIDKNMKVRHAVINDLPLGRNADEMLRMVDALLHFEEHGEVCPAGWRKGDKGMKA

SEQ ID NO: 21068 - protein, 198 aa, Helicobacter pylori
MLVTKLAPDFKAPAVLGNNEVDEHFELSKNLGKNGAILFFWPKDFTFVCPTEIIAFDKRVKDFHEKGFNVIGVSIDSEQVHFAWKNTPVEKGGIGQVSFPMVADITKSISRDYDVLFEEAIALRGSFLIDKNMKVRHAVVNDLPLGRNADEMLRMVDALLHFEEHGEVCPAGWRKGDKGMKATHQGVAEYLKENSIKL

SEQ ID NO: 21069 - protein, 181 aa, Helicobacter pylori
LVTKLAPDFKAPAVLGNNEVDEHFELSKNLGKNGAILFFWPKDFTFVCPTEIIAFDKRVKDFQEKGFNVIGVSIDSEQVHFAWKNTPVEKGGIGQVTFPMVADITKSISRDYDVLFEEAIALRGAFLIDKNMKVRHAVINDLPLGRNADEMLRMVDALLHFEEHGEVCPAGWRKGDKGMKA

SEQ ID NO: 21070 - protein, 196 aa, Helicobacter pylori
MLVTKLAPDFKAPAVLGNNEVDEHFELSKNLGKNGAILFFWPKDFTFVCPTEIIAFDKRVKDFQEKGFNVIGVSIDSEQVHFAWKNTPVEKGGIGQVTFPMVADITKSISRDYDVLFEEAIALRGAFLIDKNMKVRHAVINDLPLGRNADEMLRMVDALLHFEEHGEVCPAGWRKGDKGMKATHQGVAEYLKENSI

SEQ ID NO: 21071 - protein, 181 aa, Helicobacter pylori
LVTKLAPDFKAPAVLGNNEVDEHFELSKNLGKNGAILFFWPKDFTFVCPTEIIAFDKRVKDFHEKGFNVIGVSIDSEQVHFAWKNTPVEKGGIGQVTFPMVADITKSISRDYDVLFEEAIALRGAFLIDKNMKVRHAVINDLPLGRNADEMLRMVDALLHFEEHGEVCPAGWRKGDKGMKA

SEQ ID NO: 21072 - protein, 181 aa, Helicobacter pylori
LVTKLAPDFKAPAVLGNNEVDEHFELSKNLGKNGAILFFWPKDFTFVCPTEIIAFDKRVKDFHEKGFNVIGVSIDSEQVHFAWKNTPVEKGGIGQVSFPMVADITKSISRDYDVLFEEAIALRGAFLIDKNMKVRHTVINDLPLGRNADEMLRMVDALLHFEEHGEVCPAGWRKGDKGMKA

SEQ ID NO: 21073 - protein, 186 aa, Streptococcus mutans UA159
MSLVGKEMVEFSAQAYHQGEFVTVNNEDVKGKWAVFCFYPADFSFVCPTELGDLQEQYATLQSLGVEVYSVSTDTHFVHKAWHDDSDVVGTITYTMIGDPSHVLSQGFEVLGEDGLAQRGTFIVDPDGIIQMMEVNADGIGRDASTLIDKVRAAQYIRQHPGEVCPAKWKEGAETLKPSLDLVGKI

SEQ ID NO: 21074 - protein, 186 aa, Streptococcus agalactiae NEM316
MSLVGKEIIEFSAQAYHDGKFITVTNEDVKGKWAVFCFYPADFSFVCPTELGDLQEQYETLKSLDVEVYSVSTDTHFVHKAWHDDSDVVGTITYPMIGDPSHLISQGFDVLGQDGLAQRGTFIIDPDGVIQMMEINADGIGRDASTLIDKVRAAQYIRQHPGEVCPAKWKEGAETLTPSLDLVGKI

SEQ ID NO: 21075 - protein, 189 aa, Shewanella oneidensis MR-1
MTQSIINSTIKPFKATAYHNGEFVPVTEQDLLGKWSVVFFYPADFTFVCPTELGDMADHYAKLQGMGVEVYSVSTDTHFTHKAWHDTSDTIKKINFPMLADPTGTISRNFGVMIEEEGLALRGTFVINPEGQIKVAEIHDLGIGRSAQELVRKIQAAQYVATHDGEVCPAKWQPGDETLAPSLDLVGKI

SEQ ID NO: 21076 - protein, 200 aa, Yersinia pestis CO92
MVLVTRQAPDFTAAAVLGNGEIVENFNLKKHLNGRPAVLFFWPMDFTFVCPSELIAFDHRYEEFQKRGVEVVGVSFDSEFVHNAWRKTPVDKGGIGEVKYPMVADIKREIQKAYGIEHPDAGVALRGSFLIDKNGIVRSQIVNDLPIGRNIDEMIRTVDALQFHEEHGEVCPAQWEKGKAGMGASPDGVAKYLSENASKL

SEQ ID NO: 21077 - protein, 202 aa, Vibrio vulnificus CMCP6
MVLVGRQAPDFTAAAVLGNGEIVDNFNFAEFTKGKKAVVFFYPLDFTFVCPSELIAFDNRYEDFKAKGVEVIGVSIDSQFSHNAWRNTPVENGGIGQVKYPLIADVKHEICQAYDVEHPEAGVAFRGSFLIDEDGLVRHQVVNDLPLGRNIDEMLRMVDALNFHQKHGEVCPAQWEEGKAGMDASPQGVAAFLSEHAADLKK

SEQ ID NO: 21078 - protein, 185 aa, Vibrio vulnificus CMCP6
MINTTIKPFSATAYKDGKFVDITEQDVLGKWSVFFFYPADFTFVCPTELGDLADHYEELQSRGVEVYSVSTDTHFTHKAWHDSSDTIGKIKYFMVGDQTGNITNNFGVMRPGQGLADRATFVIDPQGVIQAVEITAEGIGRDAEDLLRKIKAAQYVAAHPGEVCPAKWKEGEQTLAPSLDLVGKI

SEQ ID NO: 21079 - protein, 152 aa, Tropheryma whipplei TW08/27
MSNQVLPKGSFAPDFELVDQNGATVVLSEVAAKKDVVLFFFPLAFSGICTDELIQVRDSLDSFKSFEVFALSVDSKFTLRAYSESQGFSFALLSDFWPHGGVAKQFGAFLEDVGVASRSTFIVGRDLKIKASFFSGIHEPRDFSEIRAALAS

SEQ ID NO: 21080 - protein, 158 aa, Oceanobacillus iheyensis HTE831
MSVEIGSKVNDFSLPNQHGENISLSDYQGKYVVLYFYPKDMTPGCTTEACDFRDNHESFKELDAVILGVSPDPEARHQKFIDKHELPFNLLSDEDHQLAEQFDVWKLKKNFGKEYYGIERSTFIIDKDGKLIKEYRKVRVKDHVSDALEYIKEINEVG

SEQ ID NO: 21081 - protein, 187 aa, Pseudomonas syringae pv. tomato str. DC3000
MPIINSQVKPFKATAFKNGSFVDVSDADFKGKWSVVFFYPADFTFVCPTELEDLADNYDTFQKLGVEIYSVSTDTHFAHAAWHNTSPAIGKIQYTMIGDPTLAISRNFDVLIEEAGLADRGTFVINPEGQIKIVELNDGGVGRDASELLRKIKAAQYVAAHPGEVCPAKWKEGEATLAPSLDLVGKI

SEQ ID NO: 21082 - protein, 203 aa, Vibrio parahaemolyticus RIMD 2210633
MVLVGRQAPDFTAAAVLGNGEIVENFNFAEFTKGKKAVVFFYPLDFTFVCPSELIAFDNRLADFQAKGVEVIGVSIDSQFSHNAWRNTAIEDGGIGQVKYPLVADVKHEICKAYDVEHPEAGVAFRGSFLIDEEGVVRHQVVNDLPLGRNIDEMLRMVDALNFHQKHGEVCPAQWEEGKAGMDASPKGVAAFLSEHAADLGKK

SEQ ID NO: 21083 - protein, 185 aa, Vibrio parahaemolyticus RIMD 2210633
MINTKIKPFAATAYKNGEFVEVTEQDVLGKWAVFFFYPADFTFVCPTELGDLADHYEELQKRGVEVYSVSTDTHFTHKAWHDSSETIGKIQYYMLGDQTGNITNNFGVMREGQGLADRATFLIDPEGTIQAMEITAEGIGRDAEDLLRKVKAAQYVAAHPGEVCPAKWKEGEETLAPSLDLVGKI

SEQ ID NO: 21084 - protein, 180 aa, Bacillus subtilis subsp. subtilis str. 168
MAERMVGKQAPRFEMEAVLASKEFGKVSLEENMKNDKWTVLFFYPMDFTFVCPTEITAMSDRYDEFEDLDAEVIGVSTDTIHTHLAWINTDRKENGLGQLKYPLAADTNHEVSREYGVLIEEEGVALRGLFIINPEGELQYQTVFHNNIGRDVDETLRVLQALQTGGLCPANWKPGQKTL

SEQ ID NO: 21085 - protein, 187 aa, Bacillus subtilis subsp. subtilis str. 168
MSLIGKEVLPFEAKAFKNGEFIDVTNEDLKGQWSVFCFYPADFSFVCPTELEDLQEQYAALKELGVEVYSVSTDTHFVHKGWHDSSEKISKITYAMIGDPSQTISRNFDVLDEETGLADRGTFIIDPDGVIQTVEINAGGIGRDASNLVNKVKAAQYVRQNPGEVCPAKWEEGGETLTPSLDLVGKI

SEQ ID NO: 21086 - protein, 211 aa, Aquifex aeolicus VF5
MDVKEIAKKIITDCPVRVGQKVPNFEMETYDPSTGKFGKVVLEDLLKERKWVILFFYPADYTFVCPTELADLAEKYDELKEMGCEVISVSTDTKFVHLAWHRDEPLLKNVKYPMGADPTGQVSRLFGVYDENTGLALRGTFIINPEGVLVGSEVNFYNVGRNADELVRKMKANVYLMSHPEEACPAKWEPGKKTLKPSEELVGRVGEVLNE

SEQ ID NO: 21087 - protein, 184 aa, Bradyrhizobium japonicum USDA 110
MLGIGSQLPPFDITGVKPGFQAQEEEGQSAFETLTEMSFPEKWKIIFFYPKDFTFVCPTEIAEFARLSKEFADRDAVVLGGSTDNEFCKLAWRRSHVDLHNLPIWQFADTKGTLVDGLGVRSPEGVAYRYTFIVDPQNTIQHVYATNLSVGRSPKDTLRVLDALQTDELCPCNREIGGETLKVA

SEQ ID NO: 21088 - protein, 184 aa, Brucella melitensis 16M
MLGIGDKLPPFKVTGVKPGFNHHEENGVSAFEEVTEQSFPGKWKVIFFYPKDFTFVCPTEIAEFARLASEFEDRDAVVLGGSTDNEFVKLAWRRDHKDLNKLPIWSFADTNGSLVDGLGVRSPDGGAYRYTFVVDPDNVIQHVYATNLNVGRAPKDTLRVLDALQTDELCPCNREVGGETLKAA

SEQ ID NO: 21089 - protein, 199 aa, Buchnera aphidicola str. Bp (Baizongia pistaciae)
MVLVTYPAPDFTASAISCNGDIINNFNFKEFTNNQTSILFFWPMDFTFVCPSEIIAFNQELSKFKKRNVKLIGVSIDSVYVHHAWRNTLSHNGQIDKINFTMVSDLKREIQRSYGIEHPQLGVALRATFLIDKNRIIRHQTINDLPFGRNISETLRMIDALHFYEKYGEVCPANWKKGDTGIKTTQEGIHKYLEKISKK

SEQ ID NO: 21090 - protein, 187 aa, Enterococcus faecalis V583
MNLINQKLFDFECDAYHDGEFTRVSTEDILGKWSIFFFYPADFSFVCPTELGDMQEHYAHLQELNCEVYSVSEDSHYVHKAWADATETIGKIKYPMLADPNGQLARFFGVLDEASGMAYRASFIVSPEGDIKSYEINDMGIGRNAEELVRKLEASQFVAEHGDKVCPANWQPGEETIAPSLDLVGKI

SEQ ID NO: 21091 - protein, 188 aa, Bacteroides thetaiotaomicron VPI-5482
MEPILNSQLPEFSVQAFQNGAFKTVTNNDLKGKWAILFFYPADFTFVCPTELVDMADKYAQFQEMGVEIYSVSTDSHFVHKAWHDASESIRKIKYPMLADPTGALSRALGVYIEEEGMAYRGTFVVNPEGKIKVVELNDNNIGRDASELLRKVEAAQFVATHDGEVCPAKWKKGESTLKPSIDLVGKI

SEQ ID NO: 21092 - protein, 187 aa, Bacillus cereus ATCC 14579
MLLIGTEVKPFKANAYHNGEFIQVTDESLKGKWSVVCFYPADFTFVCPTELEDLQNQYATLKDLGVEVYSVSTDTHFTHKAWHDSSETIGKIEYIMIGDPTRTITTNFNVLMEEEGLAARGTFIIDPDGVIQSMEINADGIGRDASILVNKIKAAQYVRNNPGEVCPAKWQEGSATLKPSLDLVGKI

SEQ ID NO: 21093 - protein, 200 aa, Coxiella burnetii RSA 493
MAVLVGREAPDFTVPAVLANGDIVENFNLAEAIQNKYGLVFFYPLDFTFVCPSELIALDKAIADFQKRRVEVIGVSIDSQFTHNAWRNTPVEKGGIGPVRYPLASDVTHSICRSYGVEHVAGVALRGAFLIDKQGIVRSQIVNDLPLGRSIPELLRLVDALQFTEEHGEVCPANWKKGDPAMQASPDGVAKYLAENADNL

SEQ ID NO: 21094 - protein, 179 aa, Coxiella burnetii RSA 493
MIKIGEQFPSFSLKAVISNDVNKAFTEINEKSYANKWLVLFFWPKDFTFVCPTEIAEFGRLNGEFADRDAQVLGASVDSEFVHLAWRREKEELSQLPFPMLSDIRRDLSQRLGILNEKEGVAERATFIVDPNHIVRFVMVNDLNVGRNPQEVLRVLDALQTDELCPCNWQQGEETIVVA

SEQ ID NO: 21095 - protein, 184 aa, Streptomyces avermitilis MA-4680
MLTVGDKFPEFDLTACVSLEKGNEFQQINHKTYEGQWKVIFAWPKDFTFVCPTEIAAFGKLNDEFADRDAQVLGFSGDSEFVHHAWRKDHDDLRDLPFPMMADSKHELMRDLGIEGEDGFAKRAVFIVDQNNEIQFSMVTAGSVGRNPKEVLRVLDALQTDELCPCNWTKGETTLDPVALLAGE

SEQ ID NO: 21096 - protein, 152 aa, Streptomyces avermitilis MA-4680
MAIQVGDKAPDFELKDNHGATVRLSDFRGEKNVVLLFYPFAFTGVCTGELCALRDELPKFVNDDVQLLAVSNDSIHTLRVFAEQEGLEYPLLSDFWPHGNTSRAYGVFDEDKGCAVRGTFIIDKEGVVRWTVVNGLPDARDLNEYVKALDTL

SEQ ID NO: 21097 - protein, 196 aa, Chlamydophila caviae GPIC
MESLFIGKAAPDFSVQAVVNGEVKNVSLKDYRGKYVILFFYPKDFTYVCPTELHAFQDSLEEFENRGAQIIGCSVDDLDTHKRWLNTDKKAGGVKGITYPLVSDTTHELSKLYGVLDSLSGLSFRGSFLIDKEGIIRHLVINDLPLGRSIDEELRVLDALIFYENHGLVCPANWQQGQKAMAPNEEGLKEYFGTID

SEQ ID NO: 21098 - protein, 174 aa, Thermoplasma acidophilum
MSLVNKAAPDFEANAFVNGQIKKVRLSSYRGKWVVLFFYPADFTFVCPTEVEGFAEDYEKFKKKNTEVISVSADTVYVHQAWVQHDERVAKAKFPMVEDRKGTIARAYDVYNEETGNAQRGLFIINPDGIVKYVVITDDNVGRSTDETLRVLEALQSGGLCPVNWHEGEPTIKV

SEQ ID NO: 21099 - protein, 187 aa, Thermus aquaticus
MSLVGKKVQPFRAQAYHNGEFIEVTEQDFMGKWSIVCFYPADFTFVCPTELEDLQDHYATFKELGVEVYSVSTDTHYTHKAWHDTSPAISKIEYVMIGDPSHQLSRMFDVLDEEQGLAQRGTFIIDPDGVIQAVEINADGIGRNASTLIDKIKAAQYVRNHPGEVCPAKWKEGAETLKPSLDLVGKI

SEQ ID NO: 21100 - protein, 199 aa, Porphyra purpurea
MISGHNCLQVGQIAPDFSATAVYDQEFKTIKLSDFKNKYVILFFYPLDFTFVCPTEITAFSDKYSDFSELNTEILGVSVDSEYSHLAWLQTDRESGGLGDLEYPLVSDLKKEISIAYNVLNSGGVALRGLFIIDPKGIIQYSTVNNLEFGRSVEETLRVLQAIQYVQAHPDEVCPANWKPGDRTMNPDPIKSKNYFAAA

SEQ ID NO: 21101 - protein, 164 aa, Heliobacillus mobilis
MIQTFPRRFNSMAELIAGQIAPDFTLPASNGEEVSLSQFRGSYVVLYFYPKDNTAGCTTEAQEFRDLHGQFLDKNTVVLGVSRDSVTSHGKFITKQELPFLLLSDGDSTLCNLYQVLKEKNMYGKKSIGIERSTFIIDPDGVITHIFRKVKAAGHAAKVLDSIG

SEQ ID NO: 21102 - protein, 160 aa, Mycoplasma penetrans
MLIGRKYINFFSKAYSGKTDSILNYDLTKNMGKNGTLLFFIHQDFYPTSTSEIIELNQKHQNFVNLGVNPIVISVDSELTHQQLVKNLKDKKTINNMSLDFVSDISKEISRDYLVLFEEGYSLPSTIFIDKKGIIKYFSTGSVEVKRDIDSILKTIATYQ

SEQ ID NO: 21103 - protein, 201 aa, Geobacter metallireducens
MCMCTLVTKEAPDFAADAVLPDNTFATIKLSSFRGKYVILFFYPLDFTFVCPSEILAFNKKLDQFKAKNCEVIGVSVDSKFTHLAWKNTKVEDGGIGNIQYPLVSDLKKEIATQFGVLFENGGVALRGLFLIDTKGIVRHAVINDLPLGRSVDEALRMLDALQFVETHGDQVCPANWREGDEAMKPTAAGVADYLAKHAAG

SEQ ID NO: 21104 - protein, 223 aa, Geobacter metallireducens
MNRITALLAAILATSLFAGPACAAPEKADDMTKATELMVQHHKGMVRTAPEMAKVGEPAPPFTLDAVVDKEFKKVSLGDYRGKWVVLFFYPADFTFVCPTEITGFNKAMDRFTELNAQLLGASVDSKYSHLAWIKRGDLGDLKYPLLADNKKEATARYGILDEKEGVALRGLFIIDPNGVLQYQVVNNLSVGRSVDETLRVLEALQTGELCPLGWKPGEKTIK

SEQ ID NO: 21105 - protein, 204 aa, Odontella sinensis
MTNFPKIGKTPPNFLTIGVYKKRLGKIRLSDYRGKKYVILFFYPANFTAISPTELMLLSDRISEFRKLSTQILAISVDSPFSHLQYLLCNREEGGLEDLNYPLVSDLTQTITRDYQVLTDEGLAFPGLFIIDKEGIIQYYTVNNLLCGRNINELLRILESIQYVKENPGYACPVNWNFGDQVFYSHPLKSKIYFKDLYSPKKSS

SEQ ID NO: 21106 - protein, 212 aa, Pseudomonas putida
MSLKLGDIAPDFEQDSSEGKIRFHEWLGNSWGVLFSHPADFTPVCTTELGLTAKLKDDFAKRGVKPIALSVDPVDSHHRWIEDINETQNTVVNFPIIADADRKVSELYDLIHPNANDTLTVRSLFVIDPNKKVRLTITYPASTGRNFNEILRVIDSLQLTDNHKVATPGNWQDGDDVVIVPSLKDEEEIKQRFPKGYRAVKPYLRLTPQLNR

SEQ ID NO: 21107 - protein, 212 aa, Pseudomonas putida
MSLKLGDIAPDFEQDSSEGKIRFHEWLGNSWGVLFSHPADFTPVCTTELGLTAKLKDDFAKRGVKAIALSVDPVDSHHRWIDDINETQNTVVNFPIIADADRKVSDLYDLIHPNASDTLTVRSLFVIDPNKKVRLTITYPASTGRNFNEILRVIDSLQLTDNHKVATPGNWQDGDDVVIVPSLKDEEEIRQRFPKGYRAVKPYLRLTPQPNR

SEQ ID NO: 21108 - protein, 187 aa, Ralstonia solanacearum
MSLINTQVQPFKAQAFHNGKFVEVTEQNLKGKWSVLIFMPAAFTFNCPTEVEDAADNYAEFQKAGAEVYIVTTDTHFSHKVWHETSPAVGKAQFPLVGDPTHVLTNAFGVHIPEEGLALRGTFVINPEGVVKTSEVHDNAIARDVKETLRKLKAAQYVASNPGQVCPAKWNEGAKTLKPSLDLVGKI

SEQ ID NO: 21109 - protein, 230 aa, Ralstonia solanacearum
MRPGTTDAWPIAAHSPIVAGRVRPPLACLAGALLVCRTPSAAPPQEKPMKTIGDKLEPFKVIGVKPGFNRHEENGQSAFEDITEASFPGKWKVIYFYPKDFTFVCPTEIVAFARLNQDFEDRDTVVLGGSTDNEFVKLAWRREHKDLDRLKQWSFADTTGALIDQLGVREHEAGVALRATFIVDPDNVIQHVSVNNLNVGRNPDEVLRILDALQTDELCPCNRAVGGATL

SEQ ID NO: 21110 - protein, 199 aa, Chlamydomonas reinhardtii
RASHAEKPLVGSVAPDFKAQAVFDQEFQEITLSKYRGKYVVLFFYPLDFTFVCPTEITAFSDRYKEFKDINTEVLGVSVDSQFTHLAWIQTDRKEGGLGDLAYPLVADLKKEISKAYGVLTEDGISLRGLFIIDKEGVVQHATINNLAFGRSVDETKRVLQAIQYVQSNPDEVCPAGWKPGDKTMKPDPKGSKEYFSAV

SEQ ID NO: 21111 - protein, 235 aa, Chlamydomonas reinhardtii
MAALQSASRSSAVAFSRQARVAPRVAASVARRSLVVRASHAEKPLVGSVAPDFKAQAVFDQEFQEITLSKYRGKYVVLFFYPLDFTFVCPTEITAFSDRYKEFKDINTEVLGVSVDSQFTHLAWIQTDRKEGGLGDLAYPLVADLKKEISKAYGVLTEDGISLRGLFIIDKEGVVQHATINNLAFGRSVDETKRVLQAIQYVQSNPDEVCPAGWKPGDKTMKPDPKGSKEYFSAV

SEQ ID NO: 21112 - protein, 199 aa, Globodera rostochiensis
MSSNSKAFIGKPAPKFSADAVVNGDFKTISLDDYKGKYVVLFFYPLDFTFVCPTEIIAFSDRADEFKKIDTQLIACSTDSKFSHLEWINKPRKHGGLGEMKIPVLADTNHKISRDYGVLMEEAGIAFRGLFIIDDKGILRQITINDLPVGRSVDETLRLVQAFKYTDTHGEVCPANWQPGEDTIKPDPEGSQTFFGKKR

SEQ ID NO: 21113 - protein, 60 aa, Globodera rostochiensis
RAHIGKPAPDFTVEAVVDHDFQTVSLSDFKGKYVVLIFYPEDFSFVCPTEITAFSDRSDE

SEQ ID NO: 21114 - protein, 199 aa, Trypanosoma brucei rhodesiense
MSCGDAKLNHPAPHFNEVALMPNGTFKKVDLASYRGKWVVLFFYPLDFTFVCPTEICQFSDRVKEFNDVDCEVIACSMDSEFSHLAWTNVERKKGGLGTMNIPILADKTKSIMKAYGVLKEEDGVAYRGLFIIDPQQNLRQITINDLPVGRNVDETLRLVKAFQFVEKHGEVCPANWKPGSKTMKADPNGSQDYFSSMN

SEQ ID NO: 21115 - protein, 187 aa, Azotobacter vinelandii
MSLINTEVKPFKATAYHNGKFIDVTEADLQGKWSVFFFYPADFTFVCPTELGDLADNYAEFQKLGVEIYAVSTDTHFTHKAWHDSSETIKKLQFPMVGDPTLAISRNFEVLIEEAGLAERGTFVVDPQGKIQIIELNAGNIGRDANELLRKIKAAQYVASHPGEVCPAKWKEGEGTLKPSLDLVGKI

SEQ ID NO: 21116 - protein, 265 aa, Spinacia oleracea
MACVASSTTLISSPSSRVFPAKSSLSSPSVSFLRTLSSPSASASLRSGFARRSSLSSTSRRSFAVKAQADDLPLVGNKAPDFEAEAVFDQEFIKVKLSDYIGKKYVILFFYPLDFTFVCPTEITAFSDRHSEFEKLNTEVLGVSVDSVFSHLAWVQTDRKSGGLGDLNYPLISDVTKSISKSFGVLIHDQGIALRGLFIIDKEGVIQHSTINNLGIGRSVDETMRTLQALQYTGNPDEVCPAGWKPGEKSMKPDPKLSKEYFSAI

SEQ ID NO: 21117 - protein, 200 aa, Rickettsia sibirica
MSVFVGKTAPDFTAKAIMPNNNIDDKFKLSNYAAGDNIVLFFYPLDFTFVCPSEIIAFHNKLGEFTERRTKVVAVSVDSHFSHLAWKNTPHNKGGLGQVQFPMVSDIKKDISSKYNVLNEDGVALRGTFLIDKDFIVRHMLVNDLPIGRDINYTLKVIDALIHHQKHGEVCPAGWHKGEEAITPSHEGIAHYLSSHAEKL

SEQ ID NO: 21118 - protein, 219 aa, Fagopyrum esculentum
MPGLTIGDSIPNLQVETTHGSFKLHDFIGDSWVILFSHPGDFTPVCTTELGKMAKYEEEFTKRGVKLLGLSCDDIASHKEWIKDVEAFTPGSKVRYPIIADPKREVITKLNMVDPDEKDSSGSQLPSRALHIVGPDKKVKLSFLYPATTGRNMEEVVRVVESLQKAANDKVATPVDWQPGDEAVISPSVSDEEAKKMFPHGYRTVDLPSKKGYLRFTQV

SEQ ID NO: 21119 - protein, 195 aa, Plasmodium falciparum 3D7
MASYVGREAPYFKAEAVFADNTFGEVNLHDFIGKKYVLLYFYPLDFTFVCPSEIIALDKALDAFKERNVELIGCSVDSKYTHLAWKKTPLTKGGIGNIQHTLISDITKSISRSYNVLFGDSVSLRAFVLIDKQGVVQHLLVNNLAIGRSVEEVLRIIDAVQHHEQHGDVCPANWKKGKVAMKPSEEGVSEYLSKL

SEQ ID NO: 21120 - protein, 216 aa, Plasmodium falciparum 3D7
MFLKKLCRSNFFGNSRRSFSLVTKKAYNFTAQGLNKNNEIINVDLSSFIGQKYCCLLFYPLNYTFVCPTEIIEFNKHIKDFENKNVELLGISVDSVYSHLAWKNMPIEKGGIGNVEFTLVSDINKDISKNYNVLYDNSFALRGLFIIDKNGCVRHQTVNDLPIGRNVQEVLRTIDSIIHVDTSGEVCPINWKKGQKAFKPTTESLIDYMNNANKNV

SEQ ID NO: 21121 - protein, 199 aa, Wigglesworthia glossinidia endosymbiont of Glossina brevipalpis
MLVANKFIDFTAPAILSNGEIVQNFNLSNYIKNKVSVLFFWPMNFTFVCPSELIAFDKRFFEFKNRNVKLVGVSLDTVYSHQAWRSTSTKLGGIGEVRYPMVSDIKRNIMKSYNVEHPEIGVALRASFLIDKAGIVRHQIINDLPIGRDINEMIRVIDALLFHEKHGEVCPAQWKKNREGIVPSREGISQYLSENLNDL

SEQ ID NO: 21122 - protein, 271 aa, Arabidopsis thaliana
MASIASSSSTTLLSSSRVLLPSKSSLLSPTVSFPRIIPSSSASSSSLCSGFSSLGSLTTNRSASRRNFAVKAQADDLPLVGNKAPDFEAEAVFDQEFIKVKLSEYIGKKYVILFFYPLDFTFVCPTEITAFSDRYEEFEKLNTEVLGVSVDSVFSHLAWVQTDRKSGGLGDLNYPLVSDITKSISKSFGVLIPDQGIALRGLFIIDKEGVIQHSTINNLGIGRSVDETMRTLQALQYVQENPDEVCPAGWKPGEKSMKPDPKLSKEYFSAI

SEQ ID NO: 21123 - protein, 271 aa, Arabidopsis thaliana
MASIASSSSTTLLSSSRVLLPSKSSLLSPTVSVPRTLHSSSASSSSLCSGFSSLGSLTTSRSASRRNFAVKAQADDLPLVGNKAPDFEAEAVFDQEFIKVKLSEYIGKKYVILFFYPLDFTFVCPTEITAFSDRYEEFEKLNTEVLGVSVDSVFSHLAWVQTDRKSGGLGDLNYPLVSDITKSISKSFGVLIPDQGIALRGLFIIDKEGVIQHSTINNLGIGRSVDETMRTLQALQYVQENPDEVCPAGWKPGEKSMKPDPKLSKEYFSAI

SEQ ID NO: 21124 - protein, 273 aa, Arabidopsis thaliana
MSMASIASSSSTTLLSSSRVLLPSKSSLLSPTVSFPRIIPSSSASSSSLCSGFSSLGSLTTNRSASRRNFAVKAQADDLPLVGNKAPDFEAEAVFDQEFIKVKLSEYIGKKYVILFFYPLDFTFVCPTEITAFSDRYEEFEKLNTEVLGVSVDSVFSHLAWVQTDRKSGGLGDLNYPLVSDITKSISKSFGVLIPDQGIALRGLFIIDKEGVIQHSTINNLGIGRSVDETMRTLQALQYVQENPDEVCPAGWKPGEKSMKPDPKLSKEYFSAI

SEQ ID NO: 21125 - protein, 266 aa, Arabidopsis thaliana
MASVASSTTLISSPSSRVFPAKSSLSSPSVSFLRTLSSPSASASLRSGFARRSSLSSTSRRSFAVKAQADDLPLVGNKAPDFEAEAVFDQEFIKVKLSDYIGKKYVILFFYPLDFTFVCPTEITAFSDRHSEFEKLNTEVLGVSVDSVFSHLAWVQTDRKSGGLGDLNYPLISDVTKSISKSFGVLIHDQGIALRGLFIIDKEGVIQHSTINNLGIGRSVDETMRTLQALQYIQENPDEVCPAGWKPGEKSMKPDPKLSKEYFSAI

SEQ ID NO: 21126 - protein, 271 aa, Arabidopsis thaliana
MASIASSSSTTLLSSSRVLLPSKSSLLSPTVSFPRIIPSSSASSSSLCSGFSSLGSLTTNRSASRRNFAVKAQADDLPLVGNKAPDFEAEAVFDQEFIKVKLSEYIGKKYVILFFYPLDFTFVCPTEITAFSDRYEEFEKLNTEVLGVSVDSVFSHLAWVQTDRKSGGLGDLNYPLVSDITKSISKSFGVLIPDQGIALRGLFIIDKEGVIQHSPINNLGIGRSVDETMRTLQALQYVQENPDEVCPAGWKPGEKSMKPDPKLSKEYFSAI

SEQ ID NO: 21127 - protein, 266 aa, Arabidopsis thaliana
MASVASSTTLISSPSSRVFPAKSSLSSPSVSFLRTLSSPSASASLRSGFARRSSLSSTSRRSFAVKAQADDLPLVGNKAPDFEAEAVFDQEFIKVKLSDYIGKKYVILFFYPLDFTFVCPTEITAFSDRHSEFEKLNTEVLGVSVDSVFSHLAWVQTDRKSGGLGDLNYPLISYFTKSISKSFGVLIHDQGIALRGLFIIDKEGVIQHSTINNLGIGQSVDETMRTLQALQYIQENPDEVCPAGWKPGEKSMKPDPKLSKEYFSAI

SEQ ID NO: 21128 - protein, 265 aa, Arabidopsis thaliana
MASVASSTTLISSPSSRVFPAKSSLSSPSVSFLRTLSSPSASASLRSGFARRSSLSSTSRRSFAVKAQADDLPLVGNKAPDFKAEAVFDQEFIKVKLSDYNGKKYVILFFYPLDFTFVCPTEITAFSDRHSEFEKLNTEVLGVSVDSVFSHLAWVQTDRKSGGLGDLNYPLISDVTKSISKSFGVLIHDQGIALRGLFIIDKEGVIQHSTINNLGIGRSVDETMRTLQALQYTGNPDEVCPAGWKSGEKSMKPDPKLSKEYFSAI

SEQ ID NO: 21129 - protein, 267 aa, Arabidopsis thaliana
MASVASSTTLISSPSSRVFPAKSSLSSPSVSFLRTLSSPSASASLRSGFARRSSLSSTSRRSFAVKAQADDLPLVGNKAPDFEAEAVFDQEFIKVKLSDYNGKKYVILFFYPLDFTFVCPTITAFSDRHSEFEKLNTEVLGVSVDSVFSHLAWVQTDRKSGGLGDLNYPLISDVTKSISKSFGVLIHDQGIGIALRGLFIIDKEGVIQHSTINNLGIGRSVDETMRTLQALQYIQENPDEVCPAGWKPGEKSMKPDPKLSKEYFSAI

SEQ ID NO: 21130 - protein, 270 aa, Brassica napus
MASLASTTTLISSSSVLLPSKPSPFSPAASFLRTLPSTSVSTSSSLRSCFSSISPLTCIRSSSRPSFAVKAQADDLPLVGNKAPDFEAEAVFDQEFIKVKLSEYIGKKYVILFLYPLDFTFVCPTEITAFSDRYEEFEKLNTEVLGVSVDSVFSHLAWVQTERKSGGLGDLNYPLVSDITKSISKSFGVLIPDQGIALRGLFIIDKKGVIQHSTINNLGIGRSVDETMRTLQALQYVQENPDEVCPAGWKPGEKSMKPDPKLSKEYFSAI

SEQ ID NO: 21131 - protein, 273 aa, Brassica rapa
  unsure (1)..(273): unsure at all Xaa locations
MASVASSTTLISSSASVLPATKSSLLPSPSLSFLPTLSSPSPSASLRSLVPLPSPQSASSSRRSFAVKGQTDDLPLVGNKAPDFEAEGVFDQEFIKFIKVKLSDYIGKKYVILFFLPLDFTFVCPTEITAFSDRYAEFEKLNTEVLGVSVDSVSVFSHLAGVQTDRKFGGLGDLNYPLISDVTKSISKSFGVLIHDQGIALRGLFIIDKEGVIQHSTIXNLGIGRSVDETMRTLQALQYIQEGPGEVCPAGWKPGEKSMKPDPKLSKELFSAI

SEQ ID NO: 21132 - protein, 219 aa, Mesorhizobium loti
MSLRINDIAPDFTAETTQGTISFHDWIGDGWAILFSHPKNFTPVCTTELGTMAGLEGEFKKRNVKIIGISVDPVASHDKWQADIKTATGQTVHYPLIGDKDLKVAKLYDMLPAGAGETSEGRTPADNATVRSVYVIGPDKKIKLVLTYPMTTGRNFDEILRAVDSMQLTAKHQVATPANWKQGEDVIITAAVSNEDAIKRFGAFDTILPYLRKTKQPSA

SEQ ID NO: 21133 - protein, 222 aa, Mesorhizobium loti
MSLRIADTAPDFAAETTHGPISFHDWLGNSWGILFSHPKDFTPVCTTELGYMAKLKPEFDKRNVKIIGLSVDPVERHAGWADDIAETQGQAPNFPMIGDPMLAIAKLYDMLPATAGDSAEGRTAADNQTVRHVYVIGPDKKIKLMIAYPMTTGRNFDEILRVVDSMQLTAKHRVATPVNWRPGDDVIIAGSVSNDEAKVLYPDGWKQPKPYIRIVPQPHSNA

SEQ ID NO: 21134 - protein, 219 aa, Sinorhizobium meliloti
MSLRINDTAPDFTAETTQGTINFHEWIGDGWAVLFSHPKNFTPVCTTELGAMAGIEPEFRKRGVKIIGISVDPVESHSKWKNDIKVATGFEVDYPLIGDRDLKVAKLYDMLPAGAGETSEGRTPADNATVRSVYVIGPDKKIKLILTYPMTTGRNFNEILRAIDSIQLTAKHQVATPANWQQGEDVIITAAVSNEDAVQRFGSFDTVLPYLRKTKQPTA

SEQ ID NO: 21135 - protein, 280 aa, Glycine max
  unsure (1)..(280): unsure at all Xaa locations
SKQQLTSWGRSTRSTLLLMEKATNVVXQDATKPLTSTPSYGELQTLSLPXTLTLSPRALLPPSRALLSPSRAPRRSFVVKASSSELPLVGNTAPDFEAEAVFDQEFINVKLSDYIGKKYVVLFFYPLDFTFVCPTEITAFSDRHAEFEALNTEILGVSVDSVFSHLAWIQTDRKSGGLGDLNYPLISDVTKSISKSYGVLIPDQGIALRGLFIIDKEGVIQHSTINNLAIGRSVDETKRTLQALQYVQENPDEVCPAGWKPGEKSMKPDPKLSKDYFAAV

SEQ ID NO: 21136 - protein, 262 aa, Glycine max
  unsure (1)..(262): unsure at all Xaa locations
MACSATSASLFSANPTPLFSPKPSLSLHLNPLPTRPSPSLTRPSLSLTRPSHSRRSFVVKASSSELPLVGNTAPXDFEAEAVFDQEFINVKLSDYIGKKYVVLFFYPLDFTFVCPTEITAFSDRHAEFEALNTEILGVSVDSVFSHLXAWIQTDRKSGGLGDLNYPLISDVTKSISKSYGVLIPDQGIALRGLFIIDKEGVIQHSTINNLAIGRSVDETKRTLQALQYVQENPDEVCPAGWKPGEKSMKPDPKLSKDYFAAV

SEQ ID NO: 21137 - protein, 267 aa, Glycine max
  unsure (1)..(267): unsure at all Xaa locations
MACSAXPLASLFSANPTPLFSPKSSLSLPNNSLHLNPLPTRPSLSLTRPSHTRRSFVVKASSVSFLNSELPLVGNTAPDFEAEAVFDQEFINVKXLSDYIGKXKYVVLFFYPLDFTFVCPTEITAFSDRHAEFEALNTEILGVSVDSVFSHLAWIQTDRKSGGLGDLNYPLISDVTKSISKSYGVLIPDQGXIALRGLFIIDKEGVIQHSTINNLAIGRSVDETKRTLQALQYVQENPDEVCPAGWKPGEKSMKPDPKLSKDYFAAV

SEQ ID NO: 21138 - protein, 153 aa, Glycine max
  unsure (1)..(153): unsure at all Xaa locations
AVPLFIESDKLSSSSKAFIGKPAPNFMADAVVNGDFKTISLEQFKGQYVVLFFYPLDFTFVCPTEIIAFSDKAGEFKKIGVQLIACSTDSKFCHLEWINKPRKQGGLGEMNIPVLADTSHKISRDSRVLMEEAGIAYRGLFIIDDQGVLRQIX

SEQ ID NO: 21139 - protein, 146 aa, Glycine max
  unsure (1)..(146): unsure at all Xaa locations
VCFKRVTLVGNTAPDFEAEAVFDLEFIKFSHLAXVQTDRKSGGLGHLKYPXVSDITKSTSKSYGVLIPDQGIALRGLFIIDKEGVIQHSTINNLAIGRSVDETKITLQALQYVQENPDEVXPAGWKPGEKSMKPDPKLSKDYFAAV

SEQ ID NO: 21140 - protein, 150 aa, Glycine max
  unsure (1)..(150): unsure at all Xaa locations
MACAFSASTVSTAAALVASPKPAGAPXSACRFPAXRRQALPPRRRRLEDXARARSFVARAAAEYDLPLVGNKAPDFAAEAVFDQEFINVKLSDYIGKKYVILFFYPLDFTFVCPTEITAFSDRHEEFEKINTEILGVSVDSVFFHLAWVQ

SEQ ID NO: 21141 - protein, 170 aa, Glycine max
  unsure (1)..(170): unsure at all Xaa locations
MACSATSASLFSANPTPLFSPKSSLSLXXTTLSTSTLSPRALLSPSRAXSHTRRSFVVKASSSELPLVGNTAPDFEAEAVFDQEFINVKLSDYIGKKYVVLFFYPLDFTFVCPTXFWHLAWVQTDRKSGGLGDLNYPLISDVTKCISKSYGVXLIPDQGNCIXRGLVIYX

SEQ ID NO: 21142 - protein, 155 aa, Glycine max
  unsure (1)..(155): unsure at all Xaa locations
VFPREKRERERQVSMASVASSTTLISSSASVLPATKSSLLPSPSLSFLPTRSSPSPSASLRLARPSPLTSIRSSSRRSFAVKAQTDDLPLVGNKAPDFEAEAVFDQEFIKVKLSEYIGKKYVILFFYPLDFTFICPTEITAFSDRYAEFEXXNTE

SEQ ID NO: 21143 - protein, 218 aa, Tortula ruralis
MGGGWALGDLVPDIQADSTMGHIKVRDYCKDGWTIIFSHPGDYPPVCTTELGKIAAYNPEFEKRGVKLLGLSTDTVEDHQGWIKDIESYTPDAPVLYPILADPDRKITVALNMMDPDEKDANGKPLASRALHIIGPDCRLKLSLLYPGTTGRNFDEVLRVLDSLQLASKHKIATPANWQKGEPVVISPSVSDEKAKQMFPQGWETVNLPKALRMTFVD

SEQ ID NO: 21144 - protein, 260 aa, Phaseolus vulgaris
MASSAPCASLISSNPNILFSPKFPSSSFSSLSFPNSPNSLFKPLRTSLNPSSPPLRTFVARASSELPLVGNTAPDFEAEAVFDQEFIKVKLSDYIGKKYVILFFYPLDFTFVCPTEITAFSDRYAEFEALNTEILGVSVDSVFSHLAWVQTDRKSGGLGDLNYPLISDVTKSISKSYDVLIPDQGIALRGLFIIDKEGVIQHSTINNLAIGRSVDETKRTLQALQYVQENPDEVCPAGWKPGEKSMKPDPKLSKEYFSAI

SEQ ID NO: 21145 - protein, 263 aa, Pisum sativum
MACSAPFASLLYSNPNTLFSPKFSSPRLSSLSIPNAPNSLPKLRTSLPLSLNRSSSSRRTFVVRASGELPLVGNSAPDFEAEAVFDQEFIKVKLSEYIGKKYVILFFYPLDFTFVCPTEITAFSDRHAEFDAINTEILGVSVDSVFSHLAWVQSDRKSGGLGDLKYPLVSDVTKSISESYGVLIPDQGIALRGLFIIDKEGVIQHSTINNLGIGRSVDETKRTLQALQYVQENPDEVCPAGWKPGEKSMKPDPKGSKEYFAAV

SEQ ID NO: 21146 - protein, 220 aa, Oryza sativa (japonica cultivar-group)
MPGLTIGDTVPNLELDSTHGKIRIHDFVGDTYVILFSHPGDFTPVCTTELAAMAGYAKEFDKRGVKLLGISCDDVQSHKDWIKDIEAYKPGNRVTYPIMADPSREAIKQLNMVDPDEKDSNGGHLPSRALHIVGPDKKVKLSFLYPACVGRNMDEVVRAVDALQTAAKHAVATPVNWKPGERVVIPPGVSDDEAKEKFPQGFDTADLPSGKGYLRFTKVG

SEQ ID NO: 21147 - protein, 220 aa, Oryza sativa (japonica cultivar-group)
MPGLTLGDVVPDLELDTTHGKIRLHDFVGDAYVIIFSHPADFTPVCTTELSEMAGYAGEFDKRGVKLLGFSCDDVESHKDWIKDIEAYKPGRRVGFPIVADPDREAIRQLNMIDADEKDTAGGELPNRALHIVGPDKKVKLSFLFPACTGRNMAEVLRATDALLTAARHRVATPVNWKPGERVVIPPGVSDEEAKARFPAGFETAQLPSNKCYLRFTQVD

SEQ ID NO: 21148 - protein, 271 aa, Nicotiana tabacum
MACSASSTALLSSNPKAASISPKSSFQAPISQCLSVPSSFNGLRNCKPFVSRVARSLSTRVAQSQRRRFVVRASSELPLVGNQAPDFEAEAVFDQEFIKVKLSEYIGKKYVILFFYPLDFTFVCPTEITAFSDRYGEFEKLNTEILGVSVDSVFSHLAWVQTDRKSGGLGDLNYPLISDVTKSISKSYNVLIPDQGIALRGLFIIDKEGVIQHSTINNLGIGRSVDETLRTLQALQYVQDNPDEVCPAGWKPGEKSMKPDPKGSKEYFASI

SEQ ID NO: 21149 - protein, 275 aa, Riccia fluitans
MATACAAVSAVAVPVASVANHIASSSSGTPSLAIPRSYEGLNKSFGARIAPRSTSAFRKPVTGVSLKQFSKGKVASARCASPLVGNVAPDFEAEAVFDQEFVKIKLSEYIGKRYVVLFFYPLDFTFVCPTEITAFSDKHEEFEKLNTEVIGVSTDSVFSHLAWIQTDRKSGGLGDLKYPLVSDLTKKIAEDFGVLIPDQGIALRGLFIIDKEGVIQHATINNLAIGRSVEETLRTLQAVQYVQENPDEVCPAGWKPGEKTMKPDTKLSKEYFAQV

SEQ ID NO: 21150 - protein, 193 aa, Litomosoides sigmodontis
MTLAGSKAFIGQPAPNFKTTAVVNGDFKEISLCQFKGKYVVLFFYPLDFTFVCPTEIIAFSDRIAEFKQLDVAVMACSTDSHFSHLAWVNTDRKMGGLGAMNIPILADTNHTISRAYGVLKEDDGIAYRGLFIIDPKGILRQITVNDLPVGRSVDETLRLIQAFQFVDKHGELCPANWQPGSETIKPGVKESK

SEQ ID NO: 21151 - protein, 199 aa, Onchocerca ochengi
MTLAGSKAFIGQPAPNFKTTAVVNGDFKEISLNQFKGKYVVLFFYPLDFTFVCPTEIIAFSDRISEFKKLDVAVMACSTDSHFSHLAWVNTDRKMGGLGQMNIPILADTNHAISKAYGVLKEDEGIAYRGLFIIDSKGILRQITVNDLPVGRSVDETLRLIQAFQFVDNHGEVCPANWQPGSETIKPEVKESKEYFGKH

SEQ ID NO: 21152 - protein, 199 aa, Leishmania donovani chagasi
MSCGDAKINCPAPPFEEVALMPNGSFKKISLAAYKGKWVVLFFYPLDFTFVCPTEIIAFSENVSRFNELNCEVLACSMDSEYAHLQWTLQDRKKGGLGAMAIPMLADKTKSIARAYGVLAEKQGVAYRGLFIIDPNGMVRQITVNDMPVGRNVEEVLRLLEAFQFVEKHGEVCPANWKKGAPTMKPEPKASVEGYFSKQ

SEQ ID NO: 21153 - protein, 199 aa, Leishmania donovani chagasi
MSCGDAKINCPAPPFEEVALMPNGSFKKISLAAYKGKWVVLFFYPLDFTFVCPTEIIAFSENVSRFNELNCEVLACSMDSEYAHLQWTLQDRKKGGLGAMAIPMLADKTKSIARAYGVLAEKQGVAYRGLFIIDPNGMVRQITVNDMPVGRNVEEVLRLLEAFQFVEKHGEVCPANWKKGAPTMKPEPKASVEGYFSKL

SEQ ID NO: 21154 - protein, 190 aa, Leishmania donovani chagasi
MSCGDAKINCPAPPFEEVALMPNGSFKKISLAAYKGKWVVLFFYPLDFSFVCPTEIIQFSENISRFNELNCEVLACSMDSEYAHLQWTLQDRKKGGLGAMAIPMLADKTKSIARAYGVLEEKQGVAYRGLFIIDPNGMVRQITVNDMPVGRNVEEVLRLLEAFQFVEKHGEVCPANWKKGDPGLKVDHNK

SEQ ID NO: 21155 - protein, 222 aa, Haemaphysalis longicornis
MPPLNLGDPFPNFTCETTVGTIDFHQWLGDSWGILFSHPADYTTPVCTTELARAAQLAHVFAQKGVKIIALSCDSVDSHHGWIKDIEAFGELPDGPFPYPIIADEKREIAVKLGMLDPVEKDKEGLPLTCRAVFIIGPDKKMKLSMLYPATTGRNFDEVLRATDSLLVTETRKVATPAGWKKGTPCMVLPSVTEEEIPKLFPTGIKQYDVPSGKKYLRTTMD

SEQ ID NO: 21156 - protein, 201 aa, Legionella pneumophila
MSVLVGRKAPDFTVAAVMGNGEIVDKFNLHEHLKGKYGLVFFYPLDFTFVCPSELIALDHRIEEFKRRNVEVVAVSIDSHFTHNAYRNTPVKNGGIGPVRFTLAADMTHSICQSYGVEHPVAGVAFRGAFVIDTNGMVRSQIVNDLPIGRNIDEILRIIDAVQFFEENGEVCPAGWQKGQAGMKASPKGVAEYLSEHSESL

SEQ ID NO: 21157 - protein, 201 aa, Legionella pneumophila
MSVLVGRKAPDFTVAAVMGNGEIVDKFNLHEHLKGKYGLVFFYPLDFTFVCPSELIALDHRIEEFKRRNVEVVAVSIDSHFTHNAYRNTPVKNGGIGPVRFALAADMTHSICQSYGVEHPVAGVAFRGAFVIDTNGMVRSQIVNDLPIGRNIDEILRIIDAVQFFEENGEVCPAGWQKGQAGMKASPKGVAEYLSEHSESL

SEQ ID NO: 21158 - protein, 205 aa, Dictyostelium discoideum
MTHPHCHKKEQIRIRKPAPAFKGQAVVNGEFKEISLDDYKGKYLYLFFYPLDFTFVCPTEIIAFSNAAEEFKKAGCELVGCSIDSPFTHLAWINTPRKEGGLGGINIPLLSDLTHQISKDYGVYIEEDGHTIRGSILIDKEGLVRVITMNDNPVGRSVDEAIRTLKALKFTDQFGEVCPANWSEGDKSMKADPKGSKEYFEAVNK

SEQ ID NO: 21159 - protein, 202 aa, Bromus secalinus
STHGKIRIHDYVANGYVILFSHPGDFTPVCTTELAAMANYAKEFEKRGVKLLGISCDDVQSHKEWTKDIEAYKPGSKVTYPIMADPDRSAIKQLNMVDPDEKDAEGQLPSRTLHIVGPDKKVKLSFLYPSCTGRNMDEVVRAVDSLLTAAKHKVATPANWKPGECVVIAPGVSDEEAKKLFPQGFETKDLPSKKGYLRFTKV

SEQ ID NO: 21160 - protein, 210 aa, Hordeum vulgare
DARARSFVARAAAEYDLPLVGNKAPDFAAEAVFDQEFINVKLSDYIGKKYVILFFYPLDFTFVCPTEITAFSDRHEEFEKINTEILGVSVDSVFSHLAWVQTERKSGGLGDLKYPLVSDVTKSISKSFGVLIPDQGIALRGLFIIDKEGVIQHSTINNLGIGRSVDETLRTLQALQYVKKPDEVCPAGWKPGEKSMKPDPKGSKEYFAAI

SEQ ID NO: 21161 - protein, 242 aa, Hordeum vulgare
DARARSFVARAAAEYDLPLVGNKAPDFAAEAVFDQEFINVKLSDYIGKKYVILFFYPLDFTFVCPTEITAFSDRHEEFEKINTEILGVSVDSVFSHLAWVQTERKSGGLGDLKYPLVSDVTKSISKSFGVLIPDQGIALRGLFIIDKEGVIQHSTINNLGIGRSVDETLRTLQALQYVKKPDEVCPAGWKPGEKSMKPDLGPKRSTRCYLERTFALSCGVLSWPFLGYMCFCDPSCSYHAYN

SEQ ID NO: 21162 - protein, 261 aa, Oryza sativa
MAACCSSLATAVSSSSAKPLAGIPPAAPHSLSLPRAPAARPLRLSASSSRSARASSFVARAGGVDDAPLVGNKAPDFDAEAVFDQEFINVKLSDYIGKKYVILFFYPLDFTFVCPTEITAFSDRYDEFEKLNTEILGVSIDSVFSHLAWVQTDRKSGGLGDLKYPLISDVTKSISKSFGVLIPDQGIALRGLFIIDKEGVIQHSTINNLAIGRSVDETMRTLQALQYVQDNPDEVCPAGWKPGDKSMKPDPKGSKEYFAAI

SEQ ID NO: 21163 - protein, 266 aa, Oryza sativa
  unsure (1)..(266): unsure at all Xaa locations
CRGASRLPEGARLRAVAAVPAVPPLPSPPGSPCASPPPPPRDPRARSFVARAGGESWDXRAPACVRAQGDLPLVGNKAPDFEAEAMFDQGFIKVKLSEYIGXKKYVVLFFYPLDFTFVCPTEITAFSDRYEEFEKINTEVLGVSIDSVFSHLAWIQTDRKSGGLGDXKYQLISDVTKSISKSFGVLIPDQGIALRGLFIIDKEGVIQHSTINNLAIGRSVDETLRTLQALQYVQENPDEVCPAGWKPGKKSMKPDPKDSKEYFASI

SEQ ID NO: 21164 - protein, 156 aa, Oryza sativa
  unsure (1)..(156): unsure at all Xaa locations
MACAFSVSSAAAPLASPKGDLPLVGNKAPDFEAEAMFDQGFIKSKCXXFVSSAEITAFSDRYEEFEKINTEVLGVSIDSVGIALRGLFIIDKEGVIQHSTINNLAIGRSVDETLRTLQALQYVQENPDEVCPAGWKPGEKSMKPDPKDSKEYFASI

SEQ ID NO: 21165 - protein, 94 aa, Oryza sativa
MACAFSVSSAAAPLASPKGIALRGLFIIDKEGVIQHSTINNLAIGRSVDETLRTLQALQYVQENPDEVCPAGWKPGEKSMKPDPKDSKEYFASI

SEQ ID NO: 21166 - protein, 258 aa, Secale cereale
MACAFSASTVSTAAALVASPKPAGAPSACRFPALRRGRAGLRCARLEDARARSFVARAAAEYDLPLVGNKAPDFAAEAVFDQEFINVKLSDYIGKKYVILFFYPLDFTFVCPTEITAFSDRHEEFEKINTEILGVSVDSVFSHLAWVQTERKSGGLGDLKYPLVSDVTKSISKSFGVLIPDQGIALRGLFMIDKEGVIQHSTINNLGIGRSVDETLRTLQALQYVQENPDEVCPAGWKPGEKSMKPDPKGSKEYFAAI

SEQ ID NO: 21167 - protein, 304 aa, Triticum aestivum
MQSRLHPYARSRGRTRGRTRSSYSGTLSIWRLPNPLPGTPRLTAAAMACAFSASTVSTAAALVASPKPAGVPQCLSFPRAAARPSRLAAAGSRTARARSFVARAAAEYDLPLVGNKAPDFAAEAVFDQEFINVKLSDYIGKKYVILFFYPLDFTFVCPTEITAFSDRHEEFEKINTEILGVSVDSVFSHLAWVQTERKSGGLGDLKYPLVSDVTKSISKSFGVLIPDQGIALRGLFIIDKEGVIQHSTINNLGIGRSVDETLRTLRALQYVQENPDEVCPAGWKPGEKSMKPDPKGSKEYFAAI

SEQ ID NO: 21168 - protein, 210 aa, Triticum aestivum
DARARSFVARAAAEYDLPLVGNKAPDFAAEAVFDQEFINVKLSDYIGKKYVILFFYPLDFTFVCPTEITAFSDRHEEFEKINTEILGVSVDSVFSHLAWVQTERKSGGLGDLKYPLVSDVTKSISKSFGVLIPDQGIALRGLFIIDKEGVIQHSTINNLGIGRSVDETLRTLRALQYVKKPDEVCPAGWKPGEKSMKPDPKGSKEYFAAI

SEQ ID NO: 21169 - protein, 224 aa, Triticum aestivum
PAGLGDLTQSLIQTTQTNTIIMSQAFVQRPAPEFTATTLFPGGEFKDIKLSDYQGQWVVLLFYPMDFTFVCPTEIIQYNNALDRFKEINTTVFGVSTDSHFTHLAWVEKPRKQGGLGHLELPLIADKSTKISRNYGVLIEDEGIALRGLFIIDPKGVLRQITVNDLPVGRDVEETIRLVKAFQFTDEYGEVCPAGWQEGGKTMKADPKGSLEYFSAQGENGAKA

SEQ ID NO: 21170 - protein, 225 aa, Triticum aestivum
  unsure (1)..(225): unsure at all Xaa locations
MACAFSASTVSTAAALVASPKPAGVPXSACRFPAXRRQALPPRRRRLEDXARARSFVARAAAEYDLPLVGNKAPDFAAEAVFDQEFINVKLSDYIGKKYVILFFYPLDFTFVCPTEITAFSDRHEEFEKINTVVVXXFSEVNXNVIFLQGIARRGLFIIGWEGVIQHSTINNLGIGRSVDETLRTLQALQYVQENPDEVCPAGWKLGEKSMKPDPKGSKEYFAAI

SEQ ID NO: 21171 - protein, 124 aa, Triticum aestivum
  unsure (1)..(124): unsure at all Xaa locations
RSARATRLVARAGGVDDLPLVGNKAPDFEAEAVFDQEFINVKLSDYIGKKYVILFFYPLDFTFVCPTEITAFSDRYEEFEKLNTEVLGVSIDSVFSHLAWVQTDRKFGGLGDLKYPLISDATKX

SEQ ID NO: 21172 - protein, 103 aa, Triticum aestivum
  unsure (1)..(103): unsure at all Xaa locations
XARIGKPAPDFKATAVVDGAFKEVKLSDYKGKYVVLFFYPLDFTFVCPTEIITFSNRAEDFRKLGCEVLGVSVDSHFTHLAWINTPRKEGCLGPLNIPLLADX

SEQ ID NO: 21173 - protein, 136 aa, Triticum aestivum
  unsure (1)..(136): unsure at all Xaa locations
MACAFSASTVSTAAALVASPKPAGAPQCLSFPRSFVARAAAEYDLPLVGNKAPDFAAEAVFDQEFIHVKLSDYIGKKYVILFFYPLDFTFVCPTEITAFSDRHEEFEKINTEILGVSVDSVFSHLAWVQTERXSGX

SEQ ID NO: 21174 - protein, 218 aa, Triticum turgidum subsp. durum
MPGLTIGDTVPNLELDSTHGKIRIHDYVGNGYVILFSHPGDFTPVCTTELAAMANYAKEFEKRGVKLLGISCDDVQSHKEWTKDIEAYKPGSKVTYPIMADPDRSAIKQLNMVDPDEKDAEGQLPSRTLHIVGPDKKVKLSFLYPSCTGRNMDEVVRAVDSLLTAAKHKVATPANWNPGECVVIAPGVSDDGAKKMFPQGFETADLPSKKGYLRFTKV

SEQ ID NO: 21175 - protein, 251 aa, Zea mays
  unsure (1)..(251): unsure at all Xaa locations
XWPGNPSQLIPNPKPPIHPSPPHPPAVATAARPLRLVASRSARAIRLVARAGGVDDLPLVGNKAPDFEAEAVFDQEFINVKLSDYIGKKYVVLFFYPLDFTFVCPTEITAFSDRYEEFEKLNTEVLGVSIDSVFSHLAWVQTDRKSGGLGDLKYPLISDVTKSISKAFGVLIPDQGIALRGLFIIDKEGVIQHSTINNLAIGRSVDETMRTLQALQYVQENPDEVCPAGWKPGERSMKPDPKGSKEYFAAV

SEQ ID NO: 21176 - protein, 276 aa, Zea mays
  unsure (1)..(276): unsure at all Xaa locations
PQTPIHPIPSSSTPXAAMACSFSAAITVSSAPTPAARPLAAAPQSVCIARSAVATTARPLRLAASRSARATRLVARARVDDLPLVGNKAPDFEAEAVFDQEFINVKLSDYIGKKYVILFFYPLDFTFVCPTEITAFSDRYEEFEKLNTEVLGVSIDSVFSHLAWVQTDRKSGGLGDLKYPLVSDVTKSISKAFGVLIPDQGIALRGLFIIDKEGVIQHSTINNLAIGRSVDETMRTLQALQYVQENPDEVCPAGWKPGERSMKPDPKGSKEYFAAV

SEQ ID NO: 21177 - protein, 261 aa, Zea mays
  unsure (1)..(261): unsure at all Xaa locations
MACSFAAATVVSSAPTPAARPLAVAPQSVSXLPLRRRRRRQAXLRLVASRSARATRLVARAGGVDDLPLVGNKAPDFEAEAVFDQEFINVKLSDYIGKKYVVLFFYPLDFTFVCPTEITAFSDRYEEFEKLNTEVLGVSIDSVFSHLAWVQTDRKSGGLGDLKYPLISDVTKSISKAFGVLIPDQGIALRGLFIIDKEGVIQHSTINNLAIGRSVDETMRTLQALQYVQENPDEVCPAGWKPGERSMKPDPKGSKEYFAAV

SEQ ID NO: 21178 - protein, 259 aa, Zea mays
  unsure (1)..(259): unsure at all Xaa locations
MACSFAAATVVSSAPTPAARPLAAAPXSPSLFPALATAARPLRLVASRSARAIRLVARAGGVDDLPLVGNKAPDFEAEAVFDQEFINVKLSDYIGKKYVVLFFYPLDFTFVCPTEITAFSDRYEEFEKLNTEVLGVSIDSVFSHLAWVQTDRKSGGLGDLKYPLVSDVTKSISKAFGVLIPDQGIALRGLFIIDKEGVIQHSTINNLAIGRSVDETMRTLQALQYVQENPDEVCPAGWKPGERSMKPDPKGSKEYFAAI

SEQ ID NO: 21179 - protein, 259 aa, Zea mays
  unsure (1)..(259): unsure at all Xaa locations
MACSFAAATVVSFAPTPAARPLAAAPXSPSLFPALATAARPLRLVASRSARAIRLVARAGGVDDLPLVGNKAPDFEAEAVFDQEFINVKLSDYIGKKYVVLFFYPLDFTFVCPTEITAFSDRYEEFEKLNTEVLGVSIDSVFSHLAWVQTDRKSGGLGDLKYPLISDVTKSISKAFGVLIPDQGIALRGLFIIDKEGVIQHSTINNLAIGRSVDETMRTLQALQYVQENPDEVCPAGWKPGERSMKPDPKGSKEYFAAV

SEQ ID NO: 21180 - protein, 294 aa, Zea mays
  unsure (1)..(294): unsure at all Xaa locations
MPVQPRKGGNPSQLIPNPKPPIHPSPPHPLRAAMACSFAAATVVSSAPTPAARPLAVAPQSVSXLPLRRRRRRQAXLRLVASRSARATRLVARAGGVDDLPLVGNKAPDFEAEAVFDQEFINVKLSDYIGKKYVVLFFYPLDFTFVCPTEITAFSDRYEEFEKLNTEVLGVSIDSVFSHLAWVQTDRKSGGLGDLKYPLISDVTKSISKAFGVLIPDQGIALRGLFIIDKEGVIQHSTINNLAIGRSVDETMRTLQALQYVQENPDEVCPAGWKPGERSMKPDPKGSKEYFAAV

SEQ ID NO: 21181 - protein, 260 aa, Zea mays
MACSFAAATVVSSAPTPAARPLAVAPQSVSVSRSAVATAARPLRLVASRSARATRLVARAGGVDDLPLVGNKAPDFEAEAVFDQEFINVKLSDYIGKKYVVLFFYPLDFTFVCPTEITAFSDRYEEFEKLNTEVLGVSIDSVFSHLAWVQTDRKSGGLGDLKYPLISDVTKSISKAFGVLIPDQGIALRGLFIIDKEGVIQHSTINNLAIGRSVDETMRTLQALQYVQENPDEVCPAGWKPGERSMKPDPKGSKEYFAAV

SEQ ID NO: 21182 - protein, 249 aa, Zea mays
  unsure (1)..(249): unsure at all Xaa locations
XGNPSQLIPNPKPPIHPSPPHPPAVATAARPLRLVASRSARAIRLVARAGGVDDLPLVGNKAPDFEAEAVFDQEFINVKLSDYIGKKYVVLFFYPLDFTFVCPTEITAFSDRYEEFEKLNTEVLGVSIDSVFSHLAWVQTDRKSGGLGDLKYPLISDVTKSISKAFGVLIPDQGIALRGLFIIDKEGVIQHSTINNLAIGRSVDETMRTLQAWRYVQENPDEVCPAGWKPGERSMKPDPKGSKEYFAAV

SEQ ID NO: 21183 - protein, 277 aa, Zea mays
  unsure (1)..(277): unsure at all Xaa locations
PQTPIHPIPSSSTPGGHGLLLLRXPSPSLPPLPRPPDPSLLPRSPSASLXSAVATTARPLRLAASRSARATRLVARASVVDDLPLVGNKAPDFEAEAVFDQEFINVKLSDYIGKKYVILFFYPLDFTFVCPTEITAFSDRYEEFEKLNTEVLGVSIDSVFSHLAWVQTDRKSGGLGDLKYPLVSDVTKSISKAFGVLIPDQGIALRGLFIIDKEGVIQHSTINNLAIGRSVDETMRTLQALQYVQENPDEVCPAGWKPGERSMKPDPKGSKEYFAAI

SEQ ID NO: 21184 - protein, 225 aa, Zea mays
  unsure (1)..(225): unsure at all Xaa locations
MINAFQYSTRRAFANTVLKRSVSDRKAVLPLKVTDPAPKWKAMGVLNXXEFKTYELSDYSGKFLVMVFYPLNFTFVCPTELIAFSEKKDEFLKRNTHLVGVSCDSHFSHLAWNNQPRKEGGLGGLNFPLISDIKKQISRDYNVLLPEQGISLRGLFIIDDKGILRVTMVNDLPIGRNVEEVLRLVDAIQFTDKHGEVCPANWNKGSSTIKPNVSGSKEYFKNQXT

SEQ ID NO: 21185 - protein, 199 aa, Zea mays
MASTRFPQIGKPAPEFGGQAVVDGQFKNINLSDYKNKYVVLFFYPLDFTFVCPTEIIAFSEAAEQFRAINTELIACSNDSHFSHLAWVNLPRKQGGLGKMEIPLLADKSGKIARDYGVYIEEEGISFRGLFIIDGNGVLRQITINDLPVGRSVEETLRLVQAFQFTDEHGEVCPANWKPGKKTIKPSVENSKDFFQDSA

SEQ ID NO: 21186 - protein, 166 aa, Zea mays
  unsure (1)..(166): unsure at all Xaa locations
XKGKYVVFFFYPLDFTFVCPTEIIAFSDRAEEFKKLNCQVIGASVDSHFCHLAWVNTPKKQGGLGPMNIPLVSDPKRTIAQDYGVLKADEGISFRGLFIIDDKGILRQITVNDLPVGRSVDETSRLVQAFQFTDKHGEVCPAGLIPGSDTIKPDVHKSKEYFSKQK

SEQ ID NO: 21187 - protein, 158 aa, Zea mays
  unsure (1)..(158): unsure at all Xaa locations
XNALDRFKEINPTVFGVSTDSHFTHLAWVEKPRKQGGLGPDLELPLIADKSTKISRNYGVLIEDEGIALRGLFIIDPKGVLRQITVNDLPVGRDVEETIRLVKAFQFTDEYGEVCPAGWQEGGKTMKADPKGSLEYFSAQGENDTSNETRIPINTRSQ

SEQ ID NO: 21188 - protein, 212 aa, Zea mays
  unsure (1)..(212): unsure at all Xaa locations
SASFTAAITAVFRRYLGRQTLALLPPTPALSVAPPAPPLALLSPSAHLGPRAVHQLVATASVMDLLXPLVARHAYSEAAGCVLHSTFINTVDLSDHIANKYCILLFYPLEFTSTSSSEITALSDRYNEFAKVNTEVLADSFDQAVSHLAWGHTNRKSGGVGDPKYTLASDVSXSISKAFGALITDHGIALRGLFIIDKXGVLQHSTINNLAI

SEQ ID NO: 21189 - protein, 201 aa, Zea mays
  unsure (1)..(201): unsure at all Xaa locations
XNPSQIRKLTPNPNPPXIPSSSTPXAAMACSFSAAITVSSAPTPAARPLAAATQSDDLPLVGNKAPDFVAEAVFDQEFINVKLSDYIGKKYVILVFYPLDFTFVCPTEITAFSDRYEEFEKVNTEGLGGSIDSVVSHLAWVLTDRMSGGLGVLIFPLFFVVSLFFSFFFFFFFFSYFFLLFFFFIFFISFFFILFFFIFFF

SEQ ID NO: 21190 - protein, 243 aa, Entamoeba dispar
MSCNQQKECCKKECQEKECCKEYCCKEYCKKECCCPRIKAFKKFMNTFEKAQIGKEAPEFKAQAYCPCGSIKEIDINEYKGKYVVLLFYPLDWTFVCPTEMIGYSEVAGQLKEINCEVIGVSVDSVYCHQAWCEADKSKGGVGKLGFPLVSDIKRCISIKYGMLNVETGVSRRGYVIIDDKGKVRYIQMNDDGIGRSTEETIRIVKAIQFSEEHGAVCPINWKAGKDTIEPTPEGIKKYLTTH

SEQ ID NO: 21191 - protein, 208 aa, Phytophthora infestans
MVLTIRKPAPEFTADAVVNGEFIKISLSDYKGQYVVLFFYPMDFTFVCPTEICAFSDRADEFKKLNTQVIGCSIDSKFTHLAWINTPRKKGGLGDMNIPLVADVKKDLCSKYEVLVSEGDDEGVAFRGLFIIDKEGVLRQITINDLPIGRNVDEVLRLIEAFQFHEEHGDVCPANWKKGAKGMTANPKDSLKYFETVEEPSKKRKLTK

SEQ ID NO: 21192 - protein, 187 aa, Novosphingobium aromaticivorans
MSIVGTKLKPFQATAFHQGKFVDVSDADVVGKWGVFFFYPADFTFVCPTELEDLAGIYEELQGLGVEVYSVSTDTHFSHKAWHDSSPAIGKINYYMLGDQNHTISNNFGILREGVGLADRGTFVTDPDGTIQLVEITPEGVGRNAAELLRKIKAAKYWREHPGQVCPAKWEEGAETLAPSIDLVGKI

SEQ ID NO: 21193 - protein, 192 aa, Schizosaccharomyces pombe
MSLQIGKPAPDFKGTAVVNGAFEEIKLADYKGKWVFLGFYPLDFTFVCPTEIVAFSEAASKFAERNAQVILTSTDSEYSHLAFINTPRKEGGLGGINIPLLADPSHKVSRDYGVLIEDAGVAFRGLFLIDPKGVLRQITINDLPVGRSVDEALRLLDAFQFVEEHGEVCPANWHKGSDTIDTKNPEKYFSKH

SEQ ID NO: 21194 - protein, 196 aa, Saccharomyces cerevisiae
MVAQVQKQAPTFKKTAVVDGVFDEVSLDKYKGKYVVLAFIPLAFTFVCPTEIIAFSEAAKKFEEQGAQVLFASTDSEYSLLAWTNIPRKEGGLGPINIPLLADTNHSLSRDYGVLIEEEGVALRGLFIIDPKGVIRHITINDLPVGRNVDEALRLVEAFQWTDKNGTVLPCNWTPGAATIKPTVEDSKEYFEAANK

SEQ ID NO: 21195 - protein, 196 aa, Saccharomyces cerevisiae; identical to SEQ ID NO: 598

SEQ ID NO: 21196 - protein, 187 aa, Desulfitobacterium hafniense
MSLIGKEVNEFKVQAFVEGAFKEVTKGDLLGKWSVFVFYPADFTFVCPTELGDLADQYDEFKKIGVEIYSVSTDTHFVHKAWHDASDTIRKIRYPMLADPTAKLAKDFEVYIEEEGLALRGSFVVNPEGKIVAYEVNSNNIGREASELLRKVQAAQFVAEHGDQVCPAKWRPGAETLKPSLDLVGKL

SEQ ID NO: 21197 - protein, 174 aa, Thermoplasma volcanium
MSLVNKAAPDFEANAFVNGEVKKIRLSSYRGKWVVLFFYPADFTFVCPTEVEGFAEDYEKFKKKNTEVISVSEDTVYVHKAWVQYDERVAKAKYPMVEDRKGIIARAYDVYNEETGNAQRGLFIINPDGIVKYVVITDDNVGRSTDETLRVLEALQSGGLCPVNWHEGEPTLKV

SEQ ID NO: 21198 - protein, 202 aa, Ajellomyces capsulatus
MTEERAAPLRLGSIAPNFKAVTTKGEIDFHEFIGDHYVILFSHPDDFTPTCTTELGAFAKLEPEFTARRVKLIGLSANALKSHFEWIKDIDEVTGSNLQFPIIADADRKISYLYDMLDYQDTTNVDEKEVAMTIRSVFIIDPNKKIRLILSYPATTGRNAAEVLRVIDALQTTDKNGVNTPINWTLGEDVIIPPDCEDRGRD

SEQ ID NO: 21199 - protein, 225 aa, Neurospora crassa
MASTDRNAPLRLGTIAPNFQADTTTGPIDFHEFIGDNWVILFSHPEDYTPVCTTELGEMARLEPEFKKRGVKLIGLSANTLGSHEGWINDIKDVTGSQVQFPIIADKERKVAYLYDMLDYQDTTNVDEKGIAFTIRSVFVIDPKKTIRTILAYPASTGRNSAEILRIVDSLQTGDKHKVTTPINWVPGDDVIVHPSIKGEEATRLFPNLKAVKPYLRFTPLPKDA

SEQ ID NO: 21200 - protein, 154 aa, endosymbiont of Riftia pachyptila
MLQIGEVAPEFELPDADMYMVKSTDFIGKKNLVLYFYPKDDTTGCTIEAVELSDLVETFEQSDTQIFGVSRDNCVSHAAFRDKHGLTVRLLADPDGEACEVYGVWQEREAHGEKRMGIVRSTFIIDKHGVLRHALYDVKPKGHAAEVLQLVQQL

SEQ ID NO: 21201 - protein, 196 aa, Candida albicans
MAPVVQQPAPSFKKTAVVDGVFEEVTLEQYKGKWVLLAFIPLAFTFVCPSEIIAYSEAVKKFAEKDAQVLFASTDSEYTWLAWTNVARKDGGIGKVDFPVLADTNHSLSRDYGVLIEEEGVALRGIFLIDPKGVLRQITINDLPVGRSVEESLRLLEAFQFTEKYGEVCPANWHPGDETIKPSPEASKEYFNKVNK

SEQ ID NO: 21202 - protein, 217 aa, Suberites domuncula
MPNLGQIFPNFEADTTEGPIKFHDWLGDGWGILFSHPADFTPVCTTELGTVAKLVPEFQKRNVKVIAISCDPVDSHKTWIKDIESYGKLSSFGYPIIADKNRELAVQFGMLDPEEKDKAGLPLTARAVFIIGPDKKLKLSLLYPATTGRNFDEILRVVDSLQLTAYKKVATPANWKNGEKCMILPSVSKEDAEKFPGYETADVPSGKKYIRLADQPK

SEQ ID NO: 21203 - protein, 188 aa, Crithidia fasciculata
MSCGAAKLNHPAPEFDDMALMPNGTFKKVSLSSYKGKYVVLFFYPMDFTFVCPTEIIQFSDDAKRFAEINTEVISCSCDSEYSHLQWTSVDRKKGGLGPMAIPMLADKTKAIARAYGVLDEDSGVAYRGVFIIDPNGKLRQIIINDMPIGRNVEEVIRLVEALQFVEEHGEVCPANWKKGDAKKKEGH

SEQ ID NO: 21204 - protein, 188 aa, Crithidia fasciculata
MSCGAAKLNHPAPEFDDMALMPNGTFKKVSLSSYKGKYVVLFFYPMDFTFVCPTEIIQFSDDAKRFAEINTEVISCSCDSEYSHLQWTSVDRKKGGLGPMAIPMLADKTKGIARAYGVLDEDSGVAYRGVFIIDPNGKLRQIIINDMPIGRNVEEVIRLVEALQFVEEHGEVCPANWKKGDAKKKEGH

SEQ ID NO: 21205 - protein, 188 aa, Crithidia fasciculata
  unsure (1)..(188): unsure at all Xaa locations
XSCGAAKLNHPAPEFDDXALXPNGTFKKVSLSSYKGKYVVLFFYPXDFTFVCPTEIIQFSDDAKRFAEINTEVISCSCDSEYSHLQWTSVDRKKGGLGPXAIPXLADKTKAIARAYGVLDEDSGVAYRGVFIIDPNGKLRQIIINDXPIGRNVEEVIRLVEALQFVEEHGEVCPANWKKGDAKKKEGH

SEQ ID NO: 21206 - protein, 199 aa, Leishmania donovani
MSCGNAKINCPAPPFEEVALMPNGSFKKISLAAYKGKWVVLFFYPLDFTFVCPTEIIAFSENVSRFNELNCEVLACSMDSEYAHLQWTLQDRKKGGLGAMAIPMLADKTKSIARAYGVLEEKQGVAYRGLFIIDPNGMVRQITVNDMPVGRNVEEVLRLLEAFQFVEKHGEVCPANWKKGAPTMKPEPKASVEGYFSKQ

SEQ ID NO: 21207 - protein, 190 aa, Leishmania donovani
MSCGDAKINCPAPPFEEVALMPNGSFKKISLAAYKGKWVVLFFYPLDFSFVCPTEIIQFSENVSRFNELNCEVLACSMDSEYAHLQWTLQDRKKGGLGTMAIPMLADKTKSIARAYGVLEEKQGVAYRGLFIIDPNGMVRQITVNDMPVGRNVEEVLRLLEAFQFVEKHGEVCPANWKKGDPGLKVDHNK

SEQ ID NO: 21208 - protein, 226 aa, Leishmania major
MLRRLSTSSFLKRAQFRGFAATSPLLNLDYQMYRTATVREAAPQFSGQAVVNGAIKDINMNDYKGKYIVLFFYPMDFTFVCPTEIIAFSDRHADFEKLNTQVVAVSCDSVYSHLAWVNTPRKKGGLGEMHIPVLADKSMEIARDYGVLIEESGIALRGLFIIDKKGILRHSTINDLPVGRNVDEALRVLEAFQYADENGDAIPCGWKPGQPTLDTTKAAEFFEKNM

SEQ ID NO: 21209 - protein, 199 aa, Leishmania major
MSCGNAKINSPAPSFEEVALMPNGSFKKISLSSYKGKWVVLFFYPLDFTFVCPTEVIAFSDSVSRFNELNCEVLACSIDSEYAHLQWTLQDRKKGGLGTMAIPMLADKTKSIARSYGVLEESRGVAYRGLFIIDPHGMLRQITVNDMPVGRSVEEVLRLLEAFQFVEKHGEVCPANWKKGAPTMKPEPKASVEGYFSKQ

SEQ ID NO: 21210 - protein, 199 aa, Leishmania major
MSCGNAKINSPAPSFEEVALMPNGSFKKISLSSYKGKWVVLFFYPLDFSFVCPTEVIAFSDSVSRFNELNCEVLACSIDSEYAHLQWTLQDRKKGGLGTMAIPMLADKTKSIARSYGVLEESQGVAYRGLFIIDPHGMLRQITVNDMPVGRSVEEVLRLLEAFQFVEKHGEVCPANWKKGAPTMKPEPNASVEGYFSKQ

SEQ ID NO: 21211 - protein, 226 aa, Leishmania infantum
MLRRLPTSCFLKRSQFRGFAATSPLLNLDYQMYRTATVREAAPQFSGQAVVNGAIKDINMNDYKGKYIVLFFYPMDFTFVCPTEIIAFSDRHADFEKLNTQVVAVSCDSVYSHLAWVNTPRKKGGLGEMHIPVLADKSMEIARDYGVLIEESGIALRGLFIIDKKGILRHSTINDLPVGRNVDEALRVLEAFQYADENGDAIPCGWKPGQPTLDTTKAGEFFEKNM

SEQ ID NO: 21212 - protein, 185 aa, Leishmania infantum
INCPAPPFEEVALMPNGSFKKISLAAYKGKWVVLFFYPLDFTFVCPTEIIAFSENVSRFNELNCEVLACSMDSEYAHLQWTLQDRKKGGLGAMATPMLADKTKSIARAYGVLEEKQGVAYRGLFIIDPNGMVRQITVNDMPVGRNVEEVLRLLEAFQFVEKHGEVCPANWKNGAPTMKPEPKASV

SEQ ID NO: 21213 - protein, 226 aa, Trypanosoma brucei
MLRRFSMLPLSGGIARRSFFRTAPLFNLDYQAYRTATVREAAPEFAGKAVVDGKIKDISMNDYKGKYIVLFFYPLDFTFVCPTEIVSFSDSHAEFEKLNTQVIAVSCDSHFSHLAWVETPRKKGGLGEMKIPLLSDFTKEISRDYGVLVEEQGLSLRALFVIDDKGILRHVTINDLPVGRNVDEVLRVVQAFQYADKTGDVIPCNWKPGKETMKVEAAKEYFEKNL

SEQ ID NO: 21214 - protein, 199 aa, Trypanosoma cruzi
MSCGDAKLNHPAPDFNETALMPNGTFKKVALTSYKGKWLVLFFYPMDFTFVCPTEICQFSDRVKEFSDIGCEVLACSMDSEYSHLAWTSIERKRGGLGQMNIPILADKTKCIMKSYGVLKEEDGVAYRGLFIIDPKQNLRQITVNDLPVGRDVDEALRLVKAFQFVEKHGEVCPANWKPGDKTMKPDPEKSKEYFGAVA

SEQ ID NO: 21215 - protein, 199 aa, Trypanosoma cruzi
MSCGDAKLNHPAPDFNETALMPNGTFKKVALSSYKGKWLVLFFYPMDFTFVCPTEICQFSDRVKEFSDIGCEVLACSMDSEYSHLAWTSVEAKRGGLGQMNIPILADKTKCIMKSYGVLKEEDGVAYRGLFIIDPKQNLRQITVNDLPVGRDVDEALRLVKAFQFVEKHGEVCPANWKPGDKAMKPDPEKSKEYFGAVA

SEQ ID NO: 21216 - protein, 226 aa, Trypanosoma cruzi
MFRRMAVTSLQKGLSRRAFCNTLRLLNLDYQAYKTATVREAAPEWAGKAVVNGKIQDISLNDYKGKYVVLLFYPMDFTFVCPTEITAFSDAQAEFDKINTQVVAVSCDSQYSHLAWINTPRNKGGLGEMSIPVLSDLTKEIARDYGVLIEEQGISLRGLFIIDDKGILRHITVNDLPVGRNVEEVLRVVQAFQYVDKNGDVIPCNWRPGKPTMKTEKANEYFEKNA

SEQ ID NO: 21217 - protein, 196 aa, Trichomonas vaginalis
MLVGKPAPAFKGQAVFPDTDFKEVSLEQYKGKWLVLFSYPLDFTFVCPTEIIEFSNKYEEFKKIGCEVLGLSVDSVFTHLAWINTPRKEGGLGEIKYPLIGDLGAKIAKEYGFYMCEAGHTLRGTAIIDPEGIIRHVQMNHPDVGRNVDEILRLIKAYQFAAKHGEVCPAQWHGEGDLTIKPNPKASKEYFGKANN

SEQ ID NO: 21218 - protein, 201 aa, Giardia intestinalis
MPVPIPGTPCPDFEVDVVTPELKFAKRKSSDYKGKYLIVFFYPLDFTFVCPSEIIHFSNLAEQLKKKCNAEIIIGSTDSVYSHYAWCLQGQNEGGIGTCKCDLFADTNHKMARDFGVLVEDAGIALRGMFIVSDKGVVRHVTINDLPVGRSVEEAMRLVQAFQYADKTGGVIPCGWTPEKNDTIIPDPEKKKEYFSKTFKK

SEQ ID NO: 21219 - protein, 273 aa, Entamoeba histolytica
MKRRKIIKYDSPSYDDIADKQRNELSNVYNEILQKKLREKARMEVMKEIKAKECQEKECCKECCCPRIKAFKKFINTFEKAQIGKEAPEFKAPAYCPCGSIKEIDINEYRGKYVVLLFYPLDWTFVCPTEMIGYSELAGQLKEIDCEVIGVSVDSVYCHQAWCEADKSKGGVGKLTFPLVSDIKRCISIKYGMLNVEAGIARRGYVIIDDKGKVRYIQMNDDGIGRSTEETIRIVKAIQFSDEHGAVCPLNWKPGKDTIEPTPDGIKKYLTAH

SEQ ID NO: 21220 - protein, 233 aa, Entamoeba histolytica
MSCNQQKECCKKECQEKECCKECCCPRIKAFKKFINTFEKAQIGKEAPEFKAPAYCPCGSIKEIDINEYRGKYVVLLFYPLDWTFVCPTEMIGYSELAGQLKEINCEVIGVSVDSVYCHQAWCEADKSKGGVGKLTFPLVSDIKRCISIKYGMLNVEAGIARRGYVIIDDKGKVRYIQMNDDGIGRSTEETIRIVKAIQFSDEHGAVCPLNWKPGKDTIEPTPDGIKKYLTAH

SEQ ID NO: 21221 - protein, 226 aa, Entamoeba histolytica
GCCKKECQEKECCKECCCPRIKAFKKFINTFEKAQIGKEAPEFKAPAYCPCGSIKEIDINEYKGKYVVLLFYPLDWTFVCPTEMIGYSELAGQLKEINCEVIGVSVDSVYCHQAWCEADKSKGGVGKLTFPLVSDIKRCISIKYGMLNVEAGIARRGYVIIDDKGKVRYIQMNDDGIGRSTEETIRIVKAIQFSDEHGAVCPLNWKPGKDTIEPTPDGIKKYLTAH

SEQ ID NO: 21222 - protein, 218 aa, Entamoeba histolytica
EKECCKECCCPRIKAFKKFINTFEKAQIGKEAPEFKAPAYCPCGSIKEIDINEYKGKYVVLLFYPLDWTFVCPTEMIGYSELAGQLKEINCEVIGVSVDSVYCHQAWCEADKSKGGVGKLTFPLVSDIKRCISIKYGMLNVEAGIARRGYVIIDDKGKVRYIQMNDDGIGRSTEETIRIVKAIQFSDEHGAVCPLNWKPGKDTIEPTPDGIKKYLTAH

SEQ ID NO: 21223 - protein, 208 aa, Entamoeba histolytica
ARVKAFKKFINTFEKAQIGKEAPEFKAPAYCPCGSIKEIDINEYKGKYVVLLFYPLDWTFVCPTEMIGYSELAGQLKEINCEVIGVSVDSVYCHQAWCERDKTAKEEYGKLTFPLVSDIKRCISIKYGMLNVEAGIARRGYVIIDDKGKVRYIQMNDDGIGRSTEETIRIVKAIQFSDEHGAVCPLNWKPGKDTIEPTSDGIKKYLTH

SEQ ID NO: 21224 - protein, 231 aa, Entamoeba histolytica
AREKECCKKECQEKECQEKECCCPRIKAFKKFINTFEKAQIGKEAPEFKAPAYCPCGSIKEIDINEYKGKYVYCCFIHWIGHLFVPTEMIGYSELAGQLKEINCEVIGVSVDSVYCHQAWCEADKSKGGVGKLTFPLVSDIKRCISIKYGMLNVEAGIARRGYVIIDDKGKVRYIQMNDDGIGRSTEETIRIVKAIQFSDEHGAVCPLNWKPGKDTIEPTPDGIKKYLTAH

SEQ ID NO: 21225 - protein, 133 aa, Entamoeba histolytica
GSIKEIDINEYRGKYVVLLFYPLDWTFVCPTEMIGYSELAGQLKEINCEVIGVSVDSVYCHQAWCEADKSKGGVGKLTFPLVSDIKRCISIKYGMLNVEAGIARRGYVIIDDKGKVRYIQMNDDGIGRSTEET

SEQ ID NO: 21226 - protein, 133 aa, Entamoeba histolytica
GSIKEIDINEYKGKYVVLLFYPLDWTFVCPTEMIGYSEVAGQLKEINCEVIGVSVDSVYCHQAWCEADKSKGGVGKLGFPLVSDIKRCISIKYGMLNVETGVSRRGYVIIDDKGKVRYIQMNDDGIGRSTEET

SEQ ID NO: 21227 - protein, 196 aa, Toxoplasma gondii
MPAPMVSQPAPAFEAEAVMADGSFGKISLSQFKGKKYVVLFFYPFDFTFVCPSEILAFHRLHGEFEKRGCQLLGVSVDSKFVHNAWRNVELKDGGIGKISFPLLADVSHKMAEDYGVLHPEGMAFRGLFLIDKEGVLQHCVINNLPLGRSADEALRMLDALQHVEQYGEVCPANWKKGDKAMKPTAEGVKEYLGSK

SEQ ID NO: 21228 - protein, 283 aa, Toxoplasma gondii
MAACLRAARLSLRQMEGLIEPSVRGRSSPLSMVRLLPSSSVSSSSPSPPSALSSPSAPSSPFVSAFQGLVSGKRAFSTADSPNGLCLVTRIAPDFTADAVMPNGEIQKVTLSEVYRSGSGVVLLFYPLDFTFVCPSEILAFNAAVDEFEALGFKVWGVSVDSAYTHQAWTRTAPAEGGIGQLRFPLVSDLDKTISRKFHSLLNNSVALRTLAIVDKTGTVRHLTVNDLPLGRSVEEALRVCEMIREVEKNGGKQVCPANWRRGEKMMHASFEGVKNYLGQLKN

SEQ ID NO: 21229 - protein, 194 aa, Prochlorococcus marinus subsp. pastoris str. CCMP1378
MSLRVGQEAPDFTATAVYDQEFKDITLSSYKGKWVVLFFYPLDFTFVCPTEITAFSDEFNKFSDLNTEVLGVSVDSKHCHLAWIQTPRNEGGIGDINYPLVSDLKREICQAYNVLNDDGEADRGLFLINPEGIVMHTTVNKAPVGRNVDETLRILQGYQYVAANPDEVCPANWTPGEKTMLEDPKGSKEYFSAL

SEQ ID NO: 21230 - protein, 186 aa, Salmonella typhimurium
SLINTKIKPFKNQAFKNGEFIEVTEKDTEGRWSVFFFYPADFTFVCPTELGDVADHYEELQKLGVDVYSVSTDTHFTHKAWHSSSETIAKIKYAMIGDPTGALTRNFDNMREDEGLADRATFVVDPQGIIQAIEVTAEGIGRDASDLLRKIKAAQYVAAHPGEVCPAKWKEGEATLAPSLDLVGKI

SEQ ID NO: 21231 - protein, 184 aa, Salmonella typhimurium
MSLINTKIKPFKNQAFKNGEFIEVTEKDTEGRWSVFFFYPADFTFVCPTELGDVADHYEELQKLGVDVYSVSTDTHFTHKAWHSSSETIAKIKYAMIGDPTGALTRNFDNMREDEGLADVRPLLLTRRVSSRRSKLPLKVSAVTRLTCCVKLKQHSTLPLTQAKYARRNGKKANDSGSILRPGR

SEQ ID NO: 21232 - protein, 177 aa, Encephalitozoon cuniculi
MFPKTLTDSKYKAFVDGEIKEISLQDYIGKYVVLAFYPLDFTFVCPTEINRFSDLKGAFLRRNAVVLLISCDSVYTHKAWASIPREQNGVLGTAWPMVWDAKRELCNQFGLYDEENGHPMRSTVILAKDLSVRHISSNYHAIGRSVDEIIRLIDAITFNDENGDICPAEWRSENKDN

SEQ ID NO: 21233 - protein, 219 aa, Schistosoma mansoni
MLLQGFIKGALRYNRSSVSNLCRHYAAHVQRPAPDFCGTAVVDGQFKEIKLRDFAGKYLVLFFYPLDFTFVCPTELTAFSDRIDEFKNEGVEVVGVSTDSHFSHLAWINTPRKEGGLGGLRYPLLADYQKQVTRDYGVLHEELGVALRGLFIISADGIIRQITINDLPAGRSVDEVLRLVRAFQYTDKYGEVCPADWQPKGPTIKPDLKKYKEYFHKVN

SEQ ID NO: 21234 - protein, 194 aa, Schistosoma mansoni
MLLPNQPAPDFEGTAVIGTELRPISLSQFQGKYVLLVFYPLDFTFVCPTELIAFSERAAEFQSRGCQVIACSTDSVYAHLAWTKLDRKAGGLGQMNIPLLSDKNLRISRAYEVLDEQEGHAFRGMFLIDRKGILRQITVNDRPVGRSVDEAIRLLDAFIFFEKHGEVCPANWKPNSATIKPDPVASLSYFSSVH

SEQ ID NO: 21235 - protein, 185 aa, Schistosoma mansoni
MVLLPNRPAPEFKGQAVINGEFKEICLKDYRGKYVVLFFYPADFTFVCPTEIIAFSDQVEEFNSRNCQVIACSTDSQYSHLAWDNLDRKSGGLGHMKIPLLADRKQEISKAYGVFDEEDGNAFRGLFIIDPNGILRQITINDKPVGRSVDETLRLLDAFQFVEKHGEVCPVNWKRGQHGIKVNQK

SEQ ID NO: 21236 - protein, 194 aa, Fasciola hepatica
MLQPNMPAPNFSGQAVVGKEFKTISLSDYKGKWVILAFYPLDFTFVCPTEIIAFSDQMEQFARRNCAVIFCSTDSVYSHLQWTKMDRKVGGIGQLNFPLLAEKNMSISRAYGVLDEEQGNTYRGNFLIDPKGVLPQITVNDRPVGRSVEEALRLLDAFIFHEEHGEVCPANWKPKSKTIVPTPDGSKAYFSSAN

SEQ ID NO: 21237 - protein, 194 aa, Fasciola hepatica
MLQPNMPAPNFSGQAVVGKEFETISLSDYKGKWVILAFYPLDFTFVCPTEIIAISDQMEQFAQRNCAVIFCSTDSVYSHLQWTKMDRKVGGIGQLNFPLLADKNMSVSRAFGVLDEEQGNTYRGNFLIDPKGVLRQITVNDDPVGRSVEEALRLLDAFIFHEEHGEVCPANWKPKSKTIVPTPDGSKAYFSSAN

SEQ ID NO: 21238 - protein, 193 aa, Echinococcus granulosus
MAAVVGKLAPSFTCKALVDGELKDVSLSDYRGKYVILFFYPMDFTFVCPTEIIAFNDRADEFHQRGCQLLACSTDSGYCHLAWNNVSRKEGGVQGMRIPMLADTNHKISRDYGVLIEDQGIALRGLFIIDDKGVLRQITINDLPVGRSVDEALRLLDAFQFTDKHGEVCPANWQPGSKTFKPSAGDLKSFMSS

SEQ ID NO: 21239 - protein, 185 aa, Echinococcus granulosus
APSFTCKALVDGELKDVSLSDYRGKYVILFFYPMDFTFVCPTEIIAFNDRADEFHQRGCQLLACSTDSGYCHLAWNNVSRKEGGVQGMRIPMLADTNHKISRDYGVLIEDQGIALRGLFIIDDKGVLRQITINDLPVGRSVDEALRLLDAFQFTDKHGEVCPANWQPGSKTFKPSAGDLKSFMSS

SEQ ID NO: 21240 - protein, 193 aa, Echinococcus multilocularis
MVALVGKLAPSFTCKALVDGELKDVSLSDYRGKYVILFFYPMDFTFVCPTEIIAFNDRADEFRQRGCQLLACSTDSGYCHLAWNNVSRKEGGVQGMRIPMLADTNHKISRDYGVLIEDQGIALRGLFIIDDKGVLRQITINDLPVGRSVDEALRLLDAFQFTDKHGEVCPANWHPGSKTFKPSAGDLKSFMSS

SEQ ID NO: 21241 - protein, 195 aa, Caenorhabditis elegans
MSKAFIGKPAPQFKTQAVVDGEFVDVSLSDYKGKYVVLFFYPLDFTFVCPTEIIAFSDRAEEFKAINTVVLAASTDSVFSHLAWINQPRKHGGLGEMNIPVLADTNHQISRDYGVLKEDEGIAFRGLFIIDPSQNLRQITINDLPVGRSVDETLRLVQAFQFVEKHGEVCPAGWTPGSDTIKPGVKESQEYFKKH

SEQ ID NO: 21242 - protein, 576 aa, Caenorhabditis elegans
MVRVTILHPDLGIGGAERLIVDAAVGLQDRGHSVRIFTNQYSRSHCFQETLDLDICTVVPWIPRSIFGKGHALCAYLKMIIAALYIVIYHKDTDVILSDSVSASQFVLRHFSKAKLVFYCHFPDRLLTKRDGNLKAFYRNIIDWIEEYTTGLADVICVNSNFTKNVVRETFKSLASQELTVLYPSLNTEFFDSIEASDDFGEEIPRGTKYVFTSLNRFERKKNIVLALDAFEKLKSNLPADEFSQCHLVIAGGYDLKNPENIEHYDELVEHMKKLELPADQIVFLHSPSDTQKVNLIRRSRAVLYTPDREHFGIVPVEAMYLGTPVIAVNTGGPCESVRNNETGFLVDQTAEAFAEKMIDLMKDEEMYRRMSEEGPKWVQKMSKAFIGKPAPQFKTQAVVDGEFVDVSLSDYKGKYVVLFFYPLDFTFVCPTEIIAFSDRAEEFKAINTVVLAASTDSVFSHLAWINQPRKHGGLGEMNIPVLADTNHQISRDYGVLKEDEGIAFRGLFIIDPSQNLRQITINDLPVGRSVDETLRLVQAFQFVEKHGEVCPAGWTPGSDTIKPGVKESQEYFKKH

SEQ ID NO: 21243 - protein, 226 aa, Caenorhabditis elegans
MFSSAVRALCRTVPTVATRQLSTSRALLSLRPLGPKNTVPAFKGTAVVDGDFKVISDQDYKGKWLVMFFYPLDFTFVCPTEIIAYGDRANEFRSLGAEVVACSCDSHFSHLAWVNTPRKDGGLGDMDIPLLADFNKKIADSFGVLDKESGLSYRGLFLIDPSGTVRHTTCNDLPVGRSVDETLRVLKAFQFSDKHGEVCPADWHEDSPTIKPGVATSKEYFNKVNK

SEQ ID NO: 21244 - protein, 195 aa, Ascaris suum
MSKAMIGKPAPEFTATAVVDGDFKSISLSDYKGKYVVLFFYPMDFTFVCPTEIIAFSEHVGEFKKLGVEVLAASTDSQFSHLAWINTPRKQGGLGEMKIPIISDNNHQISRDYGVLKEDDGIAYRGLFIIDPKGILRQITVNDLPVGRSVTETLRLVQAFQFVDKHGEVCPAGWTPGADTIKPGVKESKAYFEKH

SEQ ID NO: 21245 - protein, 247 aa, Acanthocheilonema viteae
MTLAGSKAFIGQPAPNFKTTAVMNGDFKEISLCQFKGKYVVLFFYPLDFTFVCPTEIIAFSDRIAEFKQLDVAVMACSTDSHFSHLAWVNTDRKMGGLGPMNIPILADTNHEISRAYGVLKEDDGIAYRGLFIIDPKGILRQITINDLPVGRSVDETLRLIQAFQFVDKHGEVCPANWHPGSETIKPGVKESKAYFQNIENEPLYNVDQLSNFFNICVLNTFDEYGISALLYSVILIVLDDIICRFL

SEQ ID NO: 21246 - protein, 199 aa, Brugia malayi
MTLAGSKAFIGQPAPNFKTTAVVNGDFKEISLGQFKGKYVVLLFYPLDFTFVCPTEIIAFSDRIAEFKQLDVAVMACSTDSHFSHLAWVNTDRKMGGLGQMNIPILAYTNHVISRAYGVLKEDDGIAYRGLFIIDPKGILGQITINDLPVGRSVDETLRLIQAFQFVDKHGEVCPANWHPGSETIKPGVKESKAYFEKH

SEQ ID NO: 21247 - protein, 229 aa, Brugia malayi
MIRSVLASVSPLRQILASQLCTSSITLAGIRPLGPKNKAPDFSGTAVVNGDFKTISMKDYKGKWLILFFYPLDFTFVCPTEITAFSDRCAEFQKLNTELIACSCDSHFSHLAWIQTPRSEVGGLGDMKIPVLADFNKDIANAFGVLDHETGISYRGLFLIDPSGEIRHSLVNDLSVGRSVDEAFRTLKAFQFVEKHGEVCPANWSDDKPTIKPGIKESKEYFKKVDGHT

SEQ ID NO: 21248 - protein, 163 aa, Brugia malayi
MTLAGSKAFIGQPAPNFKTTAVVNGDFKEISLGQFKGKYVVLFFYPLDFTFVCPTEIIAFSDRIAEFKQLDVAVMACSTDSHFSHLAWVNTDRKMGGLGQMNIPILADTNHVISRAYGVLKEDDGIAYRGLFIIDPKGILRQITINDLPVGRSVDETLRLIQA

SEQ ID NO: 21249 - protein, 199 aa, Onchocerca volvulus
MTLAGSKAFIGQPAPNFKTTAVVNGDFKEISLNQFKGKYVVLFFYPLDFTFVCPTEIIAFSDRISEFKKLDVAVMACSTDSHFSHLAWVNTDRKMGGLGQMNIPILADTNHAISKAYGVLKEDEGIAYRGLSIIDSKGILRQITVNDLPVGRSVDETLRLVQAFQFVDNHGEVCPANWQPGSETIKPEVKESKEYFGKH

SEQ ID NO: 21250 - protein, 199 aa, Onchocerca volvulus
MTLAGSKAFIGQPAPNFKTTAVVNGDFKEISLNQFKGKYVVLFFYPLDFTFVCPTEIIAFSDRISEFKKLDVAVMACSTDSHFSHLAWVNTTEKWVGLGQMNIPILADTNHAISKAYGVLKEDEGIAYRGLFIIDSKGILRQITVNDLPVGRSVDETLRLIQAFQFVDNHGEVCPANWQPGSETIKPEVKESKEYFGKH

SEQ ID NO: 21251 - protein, 199 aa, Dirofilaria immitis
MTLAGSKAFIGQPAPNFKTTAVVNGDFKEISLCQFKGKYVVLFFYPLDFTFVCPTEIIAFSDRIAEFKKLDVAVMACSTDSHFSHLAWVNTDRKMGGLGQMNIPILADTNHTISRAYGVLKEDDGIAYRGLFIIDPKGILRQITINDLPVGRSVDETLRLIQAFQFVDNHGEVCPANWQPGSEAIKPGVKESKAYFEKH

SEQ ID NO: 21252 - protein, 199 aa, Dirofilaria immitis
MTLAGSKAFIGQPAPNFKTTAVVNGDFKEISLCQFKGKYVVLFFYPLDFTFVCPTEIIAFSDRIAEFKQLDVVVMACSTDSHFSHLAWINTDRKMGGLGQMNIPILADTNHTISRAYGVLKEDDGIAYRGLFIIDPEGILRQITVNDLPVGRSVDETLRLIQAFQFVDNHGEVCPANWHPGSEAIKPGVKESKAYFEKH

SEQ ID NO: 21253 - protein, 193 aa, Ostertagia ostertagi
  unsure (1)..(193): unsure at all Xaa locations
AFIGKPAPDFATKAVYNGDFIDVKLSDYKGKYTVLFFYPLDFTFVCPTEIIAFSDRVEEFKKIDAAVLACSXDSVFSHLAWINTPRKMGGLGDMNIPVLADTNHQIAKDYGVLKEDEGIAYRGLFIIDPKGILRQITVNDLPVGRSVDETLRLVQAFQYVDKHGEVCPAGWTPGKATIKPGVKDSKEYFSKAN

SEQ ID NO: 21254 - protein, 104 aa, Nostoc punctiforme
MSLTYGTEGSLRVGQQAPDFTATAVVDQEFKTIKLSDYRGKYVVLFFYPLDFTFVCPTEITAFSDRYEEFKKINTEVLGASVDSEFSPSLGFNRSVVWWCRRPD

SEQ ID NO: 21255 - protein, 219 aa, Aplysia californica
MVNLGDVFPNFTANTSKGEIKFHDWLGGSWAILFSHPADYTPVCTTELARVVTLAPEFEKRGVKLIALSCDGVNSHVGWGKDVMTFAGGKQDDLPYPIVADEERKLAVELGMIDPDERTKEGLPLTARAVFIIGPDKKLKLSLLYPATTGRNFNGILRVVDSLQLTATQKVATPVDWEKGQKCMVLPTIPMDEARKLFPNMEVRDVPSGEGYLRFTPMS

SEQ ID NO: 21256 - protein, 223 aa, Biomphalaria glabrata
NSARAGGQVYPQETKRTIGHTIQWSQAVISKPAPDWNGTAVIKGEFKDIKLSDFKGKYLVFFFYPLDFTFVCPTEIIAFSDRIDEFQKINTKVVGCSVDSQFTHLAWTNVPRSQGGLGKINYPLLSDITHEISKAYGVYLQDLGHSLRGLFIIDPKGTLRQITMNDLPVGRSVDETLRLVQAFQYTDKHGEVCPAGWKPGSATIIPDPKKSKEYFKQQSNDEL

SEQ ID NO: 21257 - protein, 207 aa, Vibrio cholerae
MLRSKKMVLVGRKAPDFTAAAVLGNGEIVDNFNFAEFTKGKKAVVFFYPLDFTFVCPSELIAFDNRYEDFLAKGVEVIGVSIDSQFSHNAWRNTAVENGGIGQVKYPLVADVKHEICKAYDVEHPEAGVAFRGSFLIDEEGMVRHQVVNDLPLGRNIDEMLRMVDALNFHQTHGEVCPAQWEAGKAGMEASPKGVAAFLSQYSADLK

SEQ ID NO: 21258 - protein, 194 aa, Streptomyces viridosporus
MGASSLQGEPVLTVGDKFPEFELTACVSLEKGKEFETINHKTYEGKWKIVFAWPKDFTFVCPTEIAAFGKLNDEFADRDAQILGFSGDSEFVHHAWRKDHDDLRDLPFPMMADSKHELMRALGIEGEDGFAKRAVFIVDQNNEIQFTMVTAGSVGRNPKEVLRVLDALQTDELCPCNWTKGDETLDPVALLAGE

SEQ ID NO: 21259 - protein, 221 aa, Ixodes scapularis
MGPLNLGDPFPNFTCDTTEGKIDFHEWLGNSWGILFSHPADYTPVCTSELARAAQLHHVFQKKGVKLIALSCDSVESHRGWIKDINAFGELPDGPFPYPIIADEKRDIAVKLGMLDPVEKDKEGLPLTCRAVFIIGPDKKMKLSMLYPATTGRNFDEVLRATDSLLVTETRKVATPAGWQKGTPCMVLPSVTEEEILKLFPTGIKQYEVPSGKNYLRTTMD

SEQ ID NO: 21260 - protein, 196 aa, Aedes aegypti
MPVPDLQKPAPKFSGTAVVNGAFKEIKLEDYAGKYLVLFFYPLDFTFVCPTEIIAFSDRVEEFEKIGCSVIGVSTDSHFTHLAWINTPRKQGGLGELRIPLLADKSMKISRDYGVLQEESGVPFRGLFVIDGKQNLRQVTVNDLPVGRSVDETLRLVQAFQFTDEHGEVCPANWKPGSKTMVADPQKSKEYFNAAN

SEQ ID NO: 21261 - protein, 234 aa, Drosophila melanogaster
MSFVARSLIRNVPLMGKAILSQQKQIAARLLHQTAPLAAVRVQQPAPDFKGLAVVDNSFQEVKLEDYRGKYLVLFFYPLDFTFVCPTEIVAFSERIKEFHDINTEVLGVSVDSHFSHLTWCNVDRKNGGVGQLKYPLLSDLTKKISADYDVLLDKEGISLRGTFIIDPNGILRQYSINDLPVGRSVDEVLRLIKAFQFVEQHGEVCPANWNPNSNPATIKPDVEESKKYFSKHG

SEQ ID NO: 21262 - protein, 194 aa, Drosophila melanogaster
MPQLQKPAPAFAGTAVVNGVFKDIKLSDYKGKYLVLFFYPLDFTFVCPTEIIAFSESAAEFRKINCEVIGCSTDSQFTHLAWINTPRKQGGLGSMDIPLLADKSMKVARDYGVLDEETGIPFRGLFIIDDKQNLRQITVNDLPVGRSVEETLRLVQAFQYTDKYGEVCPANWKPGQKTMVADPTKSKEYFETTS

SEQ ID NO: 21263 - protein, 242 aa, Drosophila melanogaster
MSKYLSVLLLSAALVGAAKPEDNESCYSFAGGSVYPDQPKGDHQLQYTKAVISKPAPQFEGTAVVNKEIVKLSLSQYLGKYVVLLFYPLDFTFVCPTEIIAFSDRIAEFKKIKTEVIGVSVDSHFTHLAWINTPRKEGGLGDVKIPLLSDLTHKISKDYGVYLESSGHALRGLFIIDQTGVLRQITMNDLPVGRSVDETIRLVQAFQYTDTHGEVCPAGWRPGADTIVPNPEEKTKYFAKNN

SEQ ID NO: 21264 - protein, 196 aa, Drosophila melanogaster
MRMLNINQVAPNFTTNAVVSGGYRNFALTDLRGRYVLLVFYPADFSYVCPTELQAFSDRAPEFRNVGCEVLACSTDSHFVHCAWMNTPRKNGGLGELDIPLLADKNMKIARDYGVLDEDTGLALRALFIIDREGRIRQITVNDMGVGRSVDEALRLVQAFQFSDEFGEVCPVNWRPGAKTMKADATGKEEYFKHAI

SEQ ID NO: 21265 - protein, 168 aa, Bacillus sp. YN-1
EFIEVSEESFKGQWSVLCFYPADFTFVCPTELEDLQNEYAALKELGVEVFSASTDTHFTHKGWHDSSETIGKITYAMIGDPSQTLSRNFDVLNEVSGLADRGTFIIDPDGVVQAAEINAEGIGRDASTLVNKIKAAQYVRNNPGEVCPAKWQEGDETLKPSLDLVGKI

SEQ ID NO: 21266 - protein, 215 aa, Plasmodium yoelii yoelii
MRVLNSLFSNVYRRSVRSFSHVTQKAHDFTAQGVNKNNEIINVQLSSYIGKKYCCLFFYPLNYTFVCPTEVIEFNKHVKSFEEKNVELLGISVDSVYSHIAWKNMPIEKGGIGNINFTLVSDINKEISKNYNVLYDNSFALRGLFIIDLEGKIRHKTVNDLSIGRNVNEVLRVIDSIIHVDTSGNVCPINWKKGDKSFKPNNEALLDYLNTEYKK

SEQ ID NO: 21267 - protein, 195 aa, Plasmodium yoelii yoelii
MPSIVGNQAPSFKAEAVFGDNTFGEVSLSDFIGKKYVLLYFYPLDFTFVCPSEIIALDKALDSFKERNVELLGCSVDSKFTHLAWKKTPLSQGGIGNIKHTLISDISKSIARSYDVLFNESVALRAFVLIDKQGVVQHLLVNNLALGRSVDEILRLIDALQHHEKYGDVCPANWQKGKESMKPSEEGVAKYLSNL

SEQ ID NO: 21268 - protein, 200 aa, Prochlorococcus marinus str. MIT 9313
MTTNECLRVGQQAPDFNATAVVDQEFKEISLSQYRGKYVVLFFYPLDFTFVCPTEITAFSDRYTDFSSRNTEVLGVSVDSQFSHLAWIQTSRKEGGLGDINYPLIADLKKEISTAYNVLDDEAGVALRGLFIIDPDGVIMHSTINNLPVGRNVDETLRVLQAFQYVQSHPDEVCPANWTPGEKTMKPDPVGSKEFFASIN

SEQ ID NO: 21269 - protein, 200 aa, Pasteurella multocida
MVLVTRQAPDFTAAAVLGNGEIVDNFNFKQHIAGKAAVVFFYPLDFTFVCPSELIAFDHRYEEFQKRGVEVVGISIDSEFSHNAWRKTPVENGGIGEVKYALVADIKHEIAQAFGIEHPEAGVALRASFLIDKDGVVRHQVVNDLPLGRNIDEMLRMVDALQFHEEHGDVCPAQWEKGKEGMTGSPEGVAKYLKQHADQL

SEQ ID NO: 21270 - protein, 202 aa, Rickettsia conorii
MNMSVFVGKTAPDFTAKAIMPNNNIDDKFKLSNYAAGDNIVLFFYPLDFTFVCPSEIIAFHNKLGEFTERRTKVVAVSVDSHFSHLAWKNTPHNKGGLGQVQFPMVSDIKKDISSKYNVLNEDGVALRGTFLIDKDFIVRHMLVNDLPIGRDINYTLKVIDALTHHQKHGEVCPAGWHKGEEAITPSHEGIAHYLSSHAEKL

SEQ ID NO: 21271 - protein, 200 aa, Rickettsia prowazekii
MSVFVGKTAPDFTAKAIMPNNNIDDKFKLSDYAAGDNIVLFFYPLDFTFVCPSEIIAFHNKLGEFTERRTKVIAVSVDSHFSHLAWKNTPHNKGGLGQVQFPMVSDITKDISSKYNVLNEDGIALRGTFLIDKDFIVRHMLVNDLPIGRDINYTLKVIDALTHHQKHGEVCPAGWHKGEEAITPSHEGIAHYLSSHAEKL

SEQ ID NO: 21272 - protein, 199 aa, Cyprinus carpio
MAAGKAHIGKPAPDFTAKAVMPDGQFKDLSLSEYKGKYVVLFFYPLDFTFVCPTEIIAFSDAVEEFRKINCEVIGASVDSHFCHLAWINTPRKQGGLGHMNVPLVADSLRSISQDYGVLKEDEGIAYRGLFIIDDKGILRQITINDLPVGRSIDETLRLVQAFQFTDKHGEVCPAGWKPGKDTIKPDVQQSKDYFSKQH

SEQ ID NO: 21273 - protein, 209 aa, Methanothermobacter marburgensis str. Marburg
MPLIGDKFPEMEVQTTHGLMKLPAEFKGRWFILFSHPADFTPVCTTEFVAFQEVYPELRELDCELVGLSVDQVFSHIKWIEWIEENLDTEIEFPVIADTGRVADTLGLIHPARPTNTVRAVFVVDPEGIIRAILYYPQELGRNIPEIVRMIRAFRVIDAEGVAAPANWPDNQLIGDHVIVPPASDIETARKRKEEYECYDLALPPQRKW

SEQ ID NO: 21274 - protein, 199 aa, Oncorhynchus mykiss
MAAGKARIGHLAPGFTAKAVMPDGQFKDISMSDYRGKYVVFFFYPLDFTFVCPTEIIAFSDAAEEFRKIGCEVIGASVDSHFCHLAWTNTPRKHGGLGAMKIPLVADTLRSISTDYGVLKEDEGIAYRGLFIIDDKGVLRQITINDLPVGRSVDETLRLVQAFQFTDKHGEVCPAGWKPGSDTIKPDVQKSKDFFSKQQ

SEQ ID NO: 21275 - protein, 200 aa, Oncorhynchus mykiss
MAAGKARIGHLAPGFTAKAVMPDGQFKDISMSDYRGKYVVFFFYPLDFTFVCPTEIIAFSDAAEEFRKIGCEVIGASVDSHFCHLAWTNTPRKHGGLGAMKIPLVADTMRSISTDYGVFEGGMRASPTGGLFIIDDKGVLRQITINDLPVGRCVDEILRLVQAFQFTDKHGEVCPAGWKPGSDTIKPDVQKSKDFFSKQQ

SEQ ID NO: 21276 - protein, 195 aa, Chlamydia trachomatis
MGSLVGRQAPDFSGKAVVCGEEKEISLADFRGKYVVLFFYPKDFTYVCPTELHAFQDRLVDFEERGAVVLGCSVDDIETHSRWLAVARNAGGIEGTEYPLLADPSFKISEAFGVLNPEGSLALRATFLIDKYGVVRHAVINDLPLGRSIDEELRILDSLIFFENHGMVCPANWRSGERGMVPSEEGLKEYFQTMD

SEQ ID NO: 21277 - protein, 210 aa, Bacteroides fragilis
MRSLIGKQAPKFDATAVINGHEIVQNFSLDQYKGKKYVVFFFYPMDFTFVCPTELHAFQEKLEEFEKRDVAVVGCSVDSEYSHFSWLQMPKNEGGIQGVKYPIVSDFSKSISESYGVLAGSYAPDENGNWVCEGTPVAFRGLFLIDKEGVVRHCVINDLPLGRNVDEVLRMVDALQHFEEYGEVCPANWSKGKDAMKATEDGVANYLSKH

SEQ ID NO: 21278 - protein, 188 aa, Bacteroides fragilis
MEPIINSQMPEFKVQAFQNGSFKTVSSEDVKGKWAIFFFYPADFTFVCPTELVDVAEKYEQFQAMGVEVYSVSTDSHFVHKAWHDASESIRKIKYPMLADPTGILSRGFGVMIEEDGMAYRGTFLVNPEGKIKVAEIQDNNIGRNADELLRKVEAAQFVATHDGEVCPAKWKKGEATLKPSIDLVGKI

SEQ ID NO: 21279 - protein, 112 aa, Platichthys flesus
AFSDRAEEFRKIGCEVIGCSVDSHFSHLAWINTPRKQGGLGKMNIPLVADLTKSISRDYGVLKEDDGIAYRGLFVIDDKGTLRQITINDLPVGRSVDETLRLIQAFQHTDFA

SEQ ID NO: 21280 - protein, 200 aa, Cynops pyrrhogaster
MSAGKAQIGKPAPEFQAKAVMPGGEFKDIKLADYRGKYVVFFFYPLDFTFVCPTEIIAFSDRAEEFRKINCELIAASVDSHFCHLAWTNTSRKEGGLGSMKIPLVADTKRTISQDYGVLKEDEGISFRGLFIIDDKGILRQITINDLPVGRSVDETLRLVQAFQHTDKFGEVCPAGWKPGSDTIKPDISKSKEYFSKQKA

SEQ ID NO: 21281 - protein, 195 aa, Mycobacterium tuberculosis H37Rv
MPLLTIGDQFPAYQLTALIGGDLSKVDAKQPGDYFTTITSDEHPGKWRVVFFWPKDFTFVCPTEIAAFSKLNDEFEDRDAQILGVSIDSEFAHFQWRAQHNDLKTLPFPMLSDIKRELSQAAGVLNADGVADRVTFIVDPNNEIQFVSATAGSVGRNVDEVLRVLDALQSDELCACNWRKGDPTLDAGELLKASA

SEQ ID NO: 21282 - protein, 153 aa, Mycobacterium tuberculosis H37Rv
MLNVGATAPDFTLRDQNQQLVTLRGYRGAKNVLLVFFPLAFTGICQGELDQLRDHLPEFENDDSAALAISVGPPPTHKIWATQSGFTFPLLSDFWPHGAVSQAYGVFNEQAGIANRGTFVVDRSGIIRFAEMKQPGEVRDQRLWTDALAALTA

SEQ ID NO: 21283 - protein, 195 aa, Chlamydia muridarum
MGSLVGKQAPDFSGKAIVCGEEKEISLSDFRGKYVILFFYPKDFTYVCPTELHAFQDRLGDFEERGAVVIGCSVDDIETHSRWLAVERRAGGIQGTQYPLLADDSLEISKAFGVLNPEGSVALRATFLIDKDGVIRHAVINDLPLGRSIEEELRVLDSQIFFENHGMVCPANWQSGERGMVPSEEGLKEYFQTID

SEQ ID NO: 21284 - protein, 200 aa, SYNECHOCOCCUS SP. WH 8102
MTETGCLRVGQQAPDFTATAVVDQEFKEISLSQYRGKYVVLFFYPLDFTFVCPTEITAFSDRYADFSSKNTEVLGVSVDSQFSHLAWIQTPRNQGGLGDINYPLVADLKKEIATAYNVLDDAEGVALRGLFIIDPDGVIMHSTINNLPVGRNVDETLRVLQAFQYVQSNPDEVCPANWTPGEKTMKPDPKGSKEYFSAIG

SEQ ID NO: 21285 - protein, 198 aa, Helicobacter pylori 26695
MLVTKLAPDFKAPAVLGNNEVDEHFELSKNLGKNGAILFFWPKDFTFVCPTEIIAFDKRVKDFQEKGFNVIGVSIDSEQVHFAWKNTPVEKGGIGQVTFPMVADITKSISRDYDVLFEEAIALRGAFLIDKNMKVRHAVINDLPLGRNADEMLRMVDALLHFEEHGEVCPAGWRKGDKGMKATHQGVAEYLKENSIKL

SEQ ID NO: 21286 - protein, 198 aa, Helicobacter pylori J99
MLVTKLAPDFKAPAVLGNNEVDEHFELSKNLGKNGVILFFWPKDFTFVCPTEIIAFDKRVKDFHEKGFNVIGVSIDSEQVHFAWKNTPVEKGGIGQVSFPMVADITKSISRDYDVLFEEAIALRGAFLIDKNMKVRHAVINDLPLGRNADEMLRMVDALLHFEEHGEVCPAGWRKGDKGMKATHQGVAEYLKENSIKL

SEQ ID NO: 21287 - protein, 183 aa, Bacillus halodurans
MTDKRMVAKQAPRFEMDAVMPNKEFGKVSLEENMKNDKWTVLFFYPMDFTFVCPTEITSLSDRYDEFEDLDAEVIGVSTDTIHTHKAWINTSRDDNGLGDLKYPLAADTNHEVSREYGVLIEEEGIALRGLFIISPEGELMYSVVNHNNIGRDVDETLRVLQALQTGGLCPANWKPGQETLSV

SEQ ID NO: 21288 - protein, 200 aa, Salmonella enterica subsp. enterica serovar Typhi
MVLVTRQAPDFTAAAVLGSGEIVDKFNFKQHTNGKTTVLFFWPMDFTFVCPSELIAFDKRYEEFQKRGVEVVGVSFDSEFVHNAWRNTPVDKGGIGPVKYAMVADVKREIQKAYGIEHPDEGVALRGSFLIDANGIVRHQVVNDLPLGRNIDEMLRMVDALQFHEEHGDVCPAQWEKGKEGMNASPDGVAKYLAENISSL

SEQ ID NO: 21289 - protein, 187 aa, Salmonella enterica subsp. enterica serovar Typhi
MSLINTKIKPFKNQAFKNGEFIEVTEKDTEGRWSVFFFYPADFTFVCPTELGDVADHYEELQKLGVDVYSVSTDTHFTHKAWHSSSETIAKIKYAMIGDPTGALTRNFDNMREDEGLADRATFVVDPQGIIQAIEVTAEGIGRDASDLLRKIKAAQYVAAHPGEVCPAKWKEGEATLAPSLDLVGKI

SEQ ID NO: 21290 - protein, 219 aa, Xerophyta viscosa
MPGLTIGDTIPNLELDTTQGRIKIHDYVGNGYVILFSHPGDFTPVCTTELGKMAAYADEFSKRGVKLLGLSCDDVQSHKEWIKDIEAYTPGCHVKYPIAADPTREIIQQLNMVDPDETESSKCAVPSRALHIIGPDKRIKLSFLYPASTGRNMDEVLRAVESLQQAAKHKVATPANWKPGEPVVIKPDVSSEEAKKLFPQGYKSVDLPSKKDYLRFTNV

SEQ ID NO: 21291 - protein, 187 aa, Nitrosomonas europaea
MSLINTTVKPFKATAYHNGDFVEITDKTLKGKWSVIVFYPADFTFVCPTELEDLADNYDEFQKIGVEVYGVSTDTHFTHKAWHDTSSVVRKVRYPLVGDPTRELSRNFDVLIEDAGLALRGSFIINPEGEIKAFEVQDNNIGRNAAELLRKVKAAQYVSMHEGEVCPAKWTEGAATLKPSIDLVGKI

SEQ ID NO: 21292 - protein, 198 aa, Homo sapiens
MASGNARIGKPAPDFKATAVVDGAFKEVKLSDYKGKYVVLFFYPLDFTFVCPTEIIAFSNRAEDFRKLGCEVLGVSVDSQFTHLAWINTPRKEGGLGPLNIPLLADVTRRLSEDYGVLKTDEGIAYRGLFIIDGKGVLRQITVNDLPVGRSVDEALRLVQAFQYTDEHGEVCPAGWKPGSDTIKPNVDDSKEYFSKHN

SEQ ID NO: 21293 - protein, 198 aa, Homo sapiens
MASGNARIGKPAPDFKATAVVDGAFKEVKLSDYKGKYVVLFFYPLDFTFVCPTEIIAFSNRAEDFRKLGCEVLGVSVDSQFNHLAWINTPRKEGGLGPLNIPLLGDVTRRLSEDYGVLKTDEGIAYRGLFIIDGKGVLRQITVNDLPVGRSVDEALRLVQAFQYTDEHGEVCPAGWKPGSDTIKPNVDDSKEYFSKHN

SEQ ID NO: 21294 - protein, 197 aa, Homo sapiens
  unsure (1)..(197): unsure at all Xaa locations
XSGNARIGKPAPDFKATAVVDGAFKEVKLSDYKGKYVVLFFYPLDFTFVXPTEIIAFSNRAEDFRKLGCEVLGVSVDSQFTHLAWINTPRKEGGLGPLNIPLLADVTRRLSEDYGVLKTDEGIAYRGLFIIDGKGVLRQITVNDLPVGRSVDEALRLVQAFQYTDEHGEVCPAGWKPGSDTIKPNVDDSKEYFSKHN

SEQ ID NO: 21295 - protein, 199 aa, Homo sapiens
MSSGNAKIGHPAPNFKATAVMPDGQFKDISLSDYKGKYVVFFFYPLDFTFVCPTEIIAFSDRAEEFKKLNCQVIGASVDSHFCHLAWVNTPKKQGGLGPMNIPLVSDPKRTIAQDYGVLKADEGISFRGLFIIDDKGILRQITVNDLPVGRSVDETLRLVQAFQFTDKHGEVCPAGWKPGSDTIKPDVQKSKEYFSKQK

SEQ ID NO: 21296 - protein, 271 aa, Homo sapiens
MEALPLLAATTPDHGRHRRLLLLPLLLFLLPAGAVQGWETEERPRTREEECHFYAGGQVYPGEASRVSVADHSLHLSKAKISKPAPYWEGTAVIDGEFKELKLTDYRGKYLVFFFYPLDFTFVCPTEIIAFGDRLEEFRSINTEVVACSVDSQFTHLAWINTPRRQGGLGPIRIPLLSDLTHQISKDYGVYLEDSGHTLRGLFIIDDKGILRQITLNDLPVGRSVDETLRLVQAFQYTDKHGEVCPAGWKPGSETIIPDPAGKLKYFDKLN

SEQ ID NO: 21297 - protein, 198 aa, Homo sapiens
MASGNARIGKPAPDFKATAVVDGAFKEVKLSDYKGKYVVLFFYPLDFTFVCPTEIIAFTTVKRTSAKLGCEVLGVSVDSQFTHLAWINTPRKEGGLGPLNIPLLADVTRRLSEDYGVLKNDEGIAYRGLFIIDGKGVLRQITVNDLPVGRSVDEALRLVQAFQYTDEHGEVCPAAWKPGRDTIKPNVDDSKEYFSKHN

SEQ ID NO: 21298 - protein, 199 aa, Homo sapiens [sequence omitted]

SEQ ID NO: 21299 - protein, 256 aa, Homo sapiens
MAAAVGRLLRASVARHVSAIPWGISATAALRPAACGRTSLTNLLCSGSSQAKLFSTSSSCHAPAVTQHAPYFKGTAVVNGEFKDLSLDDFKGKYLVLFFYPLDFTFVCPTEIVAFSDKANEFHDVNCEVVAVSVDSHFSHLAWINTPRKNGGLGHMNIALLSDLTKQISRDYGVLLEGSGLALRGLFIIDPNGVIKHLSVNDLPVGRSVEETLRLVKAFQYVETHGEVCPANWTPDSPTIKPSPAASKEYFQKVNQ

SEQ ID NO: 21300 - protein, 256 aa, Homo sapiens
MAAAVGRLLRASVARHVSAIPWGISATAALWPAACGRTSLTNLLCSGSSQAKLFSTSSSCHAPAVTQHAPYFKGTAVVNGEFKDLSLDDFKGKYLVLFFYPLDFTFVCPTEIVAFSDKANEFHDVNCEVVAVSVDSHFSHLAWINTPRKNGGLGHMNIALLSDLTKQISRDYGVLLEGSGLALRGLFIIDPNGVIKHLSVNDLPVGRSVEETLRLVKAFQYVETHGEVCPANWTPDSPTIKPSPAASKEYFQKVNQ

SEQ ID NO: 21301 - protein, 164 aa, Homo sapiens
GKYVVLFFYPLDFTFVCPTEIIAFSNRAEDFRKLGCEVLGVSVDSQFTHLAWINTPRKEGGLGPLNIPLLADVTRRLSEDYGVLKTDEGIAYRGLFIIDGKGVLRQITVNDLPVGRSVDEALRLVQAFQYTDEHGEVCPAGWKPGSDTIKPNVDDSKEYFSKHN

SEQ ID NO: 21302 - protein, 252 aa, Homo sapiens
MSFYLKPAIPFVAHNFYNLYGLYTMYLIMKSTEERGRNREKGDQVISGFEFENHPGNQNNYHSVLFLPGVGGLFSEACVRTADRKMSSGNAKIGHPAPNFKATAIMPDKNIAFSDTEEFKKFNCQVIGASVDSHFCQLAWIHTPKKQGGLGPRNIPLASDPKCTIAQDYGILKAEEGISFRGLFIVDDMGILRQITVNDLPVDCSVDETLRLVQAFQFTDKHREVCPAGWKPGSDTIKTDVQKSKEYLSKQE

SEQ ID NO: 21303 - protein, 220 aa, Homo sapiens
MRVQIFQLENKVLPGFPWACRVDLYGQIGFDAAAQCLSLSVSKAEPLVKKAPPELREQLARKTLSSDNLKYLFDNKDIMKVKQSKKKKEHSFRKNNGCIKPAPDFKATAVIIAFSDHAEDFRKLGCEVLGISVDSQFTHLAWINNPQREGDLGPLNIPLLAEITVNDLPVGRSVDEALRLVQAFQYAEEHAEVCPAGWKPGTDTIKLNVGDSKENLSKHN

SEQ ID NO: 21304 - protein, 127 aa, Sus scrofa
  unsure (1)..(127): unsure at all Xaa locations
LFFYPLDFTFVCPTEIIAFSDRAEEFHQLGCEVLGVSVDXQXTHLAWINTPRKEGGLGPLKIPLLADVTRNLSLDYGVLKEDEGIAYRGLFIIDGKGVLRQITVNDLPVGRXVDEALRLVQGXQYTD

SEQ ID NO: 21305 - protein, 209 aa, Cytophaga hutchinsonii
MSLVGKKAPSFVAPAVLNGYEVVEAFSLDQYLGKKYVVFYFYPKDFTFVCPTEILAFQEKLAAFEAKDTVVVGCSTDTENSHFAWLSMPKNKGGIQGVKYPLVADTAKTIATNYGVLGGNFDIDDNGQMIFVGAPIAYRGTFLIDKEGIVRHETVNDFPLGRNIDETLRMVEALQHVEKFGEVCPANWGEGKEAMKATVEGVSDYLAKN

SEQ ID NO: 21306 - protein, 185 aa, Cytophaga hutchinsonii
MQNRILSVGSAFPAFKKTAVVSIEKGKEFTEISSENLVNEDNQWTVMFWWPKDFTFVCPTEIAEFNNAFGDFRDRDTTLIGASTDSEFVHAAWRRDHEDLRGLKFPMLADTSKSLAEELGILEAAEKVALRATFIIDPQGIIRWVSVNDLNVGRNVKEVIRVLDALQTDELCPCNWEKGQETIHA

SEQ ID NO: 21307 - protein, 199 aa, Bos taurus
MACVCKAHVGKPAPEFQATAVVDGAFKEVKLSDYKGKYVVLFFYPLDFTFVCPTEIVAFSDRAAEFHKLNCEVLGVSVDSQFTHLAWINTPRKEGGLGPLNIPLLADVTRKLSSDYGVLKEDEGIAYRGLFVIDGKGVLRQVTINDLPVGRSVDEALRLVQAFQYTDEHGEVCPAGWTPGSDTIKPNVDDSKEYFSKHN

SEQ ID NO: 21308 - protein, 274 aa, Bos taurus
MEAPPPPPPLPATTLAPGRSRKLLLLPLLLFLLRAEAVRGFEAEERPRTREEECHFYAGGQVYPGEVSRVSVAEHSLHLSKAKISKPAPYWEGTAVINGEFKELKLTDYRGKYLVFFFYPLDFTFVCPTEIIAFGDRIDEFRSINTEVVACSVDSQFTHLAWINTPRRQGGLGSINIPLLADLNHQISKDYGVYLEDSGHTLRGLFIIDDKGILRQITLNDLPVGRSVDETLRLVQAFQYTDKHGEVCPAGWKPGSETIIPDPAGKLKYFDKLN

SEQ ID NO: 21309 - protein, 199 aa, Bos taurus
MSSGNAKIGHRAPQFKATAVMPDGQFKDISLADYKGKYVVFFFYPLDFTFVCPTEIIAFSDRAEEFKKLNCQVIGASVDSHFCHLAWINTPKKQGGLGPMNIPLISAPKRTIAQDYGVLKADEGISFRGLFIIDDKGILRQITINDLPVGRSVDETLRLVQAFQFTDKHGEVCPAGWKPGSDTIKPDVQKSKEYFSKQK

SEQ ID NO: 21310 - protein, 257 aa, Bos taurus
MAATAGRLFRASLIRHVSAIPWGISASAALRPAASRRMCLTNALWSGSDQAKFAFSTSSSYHAPAVTQHAPYFKGTAVVSGEFKEISLDDFKGKYLVLFFYPLDFTFVCPTEIIAFSDKASEFHDVNCEVVAVSVDSHFSHLAWINTPRKNGGLGHMNIALLSDLTKQISRDYGVLLEGPGLALRGLFIIDPNGVIKHLSVNDLPVGRSVEETLRLVKAFQFVEAHGEVCPANWTPESPTIKPHPTASREYFEKVNQ

SEQ ID NO: 21311 - protein, 195 aa, Bos taurus
  unsure (1)..(195): unsure at all Xaa locations
APAVTQHAPYFKGTAVVSGEFKEISLDDFKGKYLVLFFYPLDFTFVXPTEIIAFSDKASEFHDVNCEVVAVSVDSHFSHLAWINTPRKNGGLGHMNIALLSDLTKQISRDYGVLLEGPGLALRGLFIIDPNGVIKHLSVNDLPVGRSVEETLRLVKAFQFVEAHGEVCPANWTPESPTIKPHPTASREYFEKVNQ

SEQ ID NO: 21312 - protein, 141 aa, Bos taurus
MSSGNAKIGHRAPQFKATAVMPDGQFKDISLADYKGKYVVFFFYPLDFTFVCPTEIIAFSDRAEEFKKLNCQVIGASVDSHFCHLAWINTPKKQGGLGPMNIPLISDPKRTIAQDYGVLKADEGISFRGLFIIDDKGILRQ

SEQ ID NO: 21313 - protein, 105 aa, Bos taurus
VCPTEIIAFSDRAEEFKKLNCQVIGASVDSHFCHLAWINTPKKQGGLGPMNIPLISDPKRTIAQDYGVLKADEGISFRGLFIIDDKGILRQITINDLPVGRSVDE

SEQ ID NO: 21314 - protein, 672 aa, Mus musculus
MDSVILMKAAERVVREIPFWEDRDTAEEFQPSFFGSDETQIPVLGIEWLLKWMMRRSESISGRLGCGCRSCPVDQTFVQTKVAETCSSTLLIARCFQEMQNLGILPPDFKATAVVPDGQFREIGLNPKCTIAQDYGVLKADGGISFRGLFIIDDESILRQVTINDLSVGCSVDKILRPAQAFQFTDVCPAAWKPSSDNIKPNVPKSEEYFFKVEVSTEPFFLPGSIEQPEENLLYSCLNIRCNVIQDRPFLQIWGWKYCLSLGVIAGQPIPVLGCVSVFHTSGVSVFFSQPNVAVNYVVLSVSSLTLKSYLLSKQGKIHEARNCGSVRVIGVGTSHTNTVTQTQGSLSAFRLPRSVEASLERTGEALTAGIGEGVELEKKKILVKTWQPWILEMTGHKEGSPPRSFKGLRLSKVAGHNDKSRPVMLTEDLGSSQALGSQFPLITVGNDFRATLIDVSKTVLSSFSLSSPVQTLDFQWNSLNGTMVLVTHRKSYFCNNPSYTQKPTPNSTKDPSGKCSRDTSESFDRVHKLILLPDFHFPLRHTAYSDGKLPFPHSSVGGQGEAQGRAPAVVGATGRKLEHFQPEKQCEKKAKAPPGSSPWQQCTTPSLKTWSSQMKLVGERIRVKLDGSRLIKVHLDKAQQNNSQHKVGTFSGVSKKLTRKDVNLGFPKFRL

SEQ ID NO: 21315 - protein, 131 aa, Mus musculus
MGLKERLTRVISHGLQQHAHQKPAPDFTVTAAADGVLKEIRLSDYRGKYVVLFFYLLDFTFVCPTEIITFSDHDKDFQKLGFESIVKALCLVQAFQYIDEHGEVCPAGWKPGSDTIKPSVDDRKEYFSKHN

SEQ ID NO: 21316 - protein, 78 aa, Rattus norvegicus
MKVISFRGLFLIDDKGILRQMTINDLPVGRSVDEILRLVQAFQFTDKHGEVCPAGWKPGSDTIKPDVNKSKEYFSKQK

SEQ ID NO: 21317 - protein, 165 aa, Rattus norvegicus
MPSYVLMAVFVWETCSLTLLIARCLQEMQKLGILLLTSVMPDGQFKDINLSEHKGKLTHPRNKEDWDPRTFPWYQIPSVPLLRIMESDEGISLRVLFIIDDKGILYHIMINDLPVGRSVDEICRLVQAFQFTEKHGEVCPASWKPGNDTIKPDINMNKEYFSKQK

SEQ ID NO: 21318 - protein, 223 aa, Rattus norvegicus
MWGATKRGLASDLKGEMVKIGKRRVLWVAIVIAARKSSEGAGEQHAMVQPSIMASRHGPMSHLRHMMRRSVSISGGCCGTSCPVDQIFVQTKVTCTKLLDPEIIAFSDRAEAFKRLNGQVMRVPVDSRFCHLAPINTPRTQGGVEPMGIPLAPDPMCAIAQDYGVQDINDLPVGHSANKILRPVQAFQLTDKCSEVCPASWKPSSDTIEPNVQKSKGCFLKQK

SEQ ID NO: 21319 - protein, 434 aa, Rattus norvegicus
MPGKTGSLRWGFHGHGSRWTDKCGANHSQLKPEWPWVCDPAMFHSALQVRRLDNQLPACVPTEVKGDIERAQMQDDMVIKGFCSKLTRPIDYSSMNVYTVGGAILENEAMEFHIGFAFSLGERVGEEGTAAEDREEGLRHTLKFFDGDSALSQHSQVQSYLALESRRRQSGGVSYGKLNRIKCVEPLEYDDCCRMHNHDLDPCEKGLEDPGLQTCHPEKIIDEMNHAHPSPLESWKICHDAKLKQNRKWKTTKIIWVPEHSGVRIFDQVGTNLQQSVWYNLRATVKFDEQAYQMNGGDKEQINLPWGFVVHTDPQAEGSEGRLKREKPTVNIRNVPSIDHMVSGADFRCWLLRLHADPKRTIAQDDGVLKADEGISFRGLFIIDDKSILRQIIINDLPVGLSVDEIRRLVQAFQFTDKHGEVCPAGWKPGCDTI

SEQ ID NO: 21320 - protein, 173 aa, Rattus norvegicus
MICMMSTWNRSLNPFLKVRVAGRTKKRNLNKPIALNIEDIVPSVPLSRSLAKHQLSKQCVIQTPTEIGLECNPRLITVVAEPESKILCLMFAAQQHTTGAPARGAYLKGQRSLRQITINDLPVDRSVDEILRLVQAFQFTDKHGEGCPAGWEPSSDTIKPDVDKSKEYFSKQK

SEQ ID NO: 21321 - protein, 200 aa, Synechocystis sp. PCC 6803; identical to SEQ ID NO: 597

SEQ ID NO: 21322 - protein, 182 aa, Burkholderia fungorum
MKTVGDKVEAFTVTAAKPGFNHHEENGVSAFEEITEQSFPGKWKIIYFYPKDFTFVCPTEIVEFAKLAKDFEERDAVLMGGSVDNEFVKLAWRREHKDLDKLNHYAFGDVKGELIDQLGVRDKEAGVALRATFIVDPDNTIQHVSVNNLNVGRNPEEVLRILDGLQTDELCPCNRAVGGATL

SEQ ID NO: 21323 - protein, 81 aa, Triticum aestivum
  unsure (1)..(81): unsure at all Xaa locations
XKTDEGIAYRGLFIIDGKGVLRQITVNDLPVGRSVDXALRVVQAFQYTDEHGEVCPAGWKPGSYTIKPNVDDSKEYFSKHN

SEQ ID NO: 21324 - protein, 216 aa, Pyrococcus horikoshii
MVVIGEKFPEVEVKTTHGVIKLPDYFTKQGKWFILFSHPADFTPVCTTEFYGMQKRVEEFRKLGVEPIGLSVDQVFSHIKWIEWIKDNLSVEIDFPVIADDRGELAEKLGMIPSGATITARAVFVVDDKGIIRAIVYYPAEVGRDWDEILRLVKALKISTEKGVALPHKWPNNELIGDKVIVPPASTIEEKKQREEAKAKGEIECYDWWFCYKKLE

SEQ ID NO: 21325 - protein, 220 aa, Plasmodium falciparum
MAYHLGATFPNFTATASNVDGVFDFYKYVGDNWAILFSHPHDFTPVCTTELAEFGKMHEEFLKLNCKLIGFSCNSKESHDQWIEDIKFYGNLDKWDIPMVCDESRELANQLKIMDEKEKDIKGLPLTCRCVFFISPDKKVKATVLYPATTGRNSQEILRVLKSLQLTNTHPVATPVNWKEGDKCCILPSVDNADLPKLFKNEVKKLDVPSQKAYLRFVQM

SEQ ID NO: 21326 - protein, 133 aa, Homo sapiens
MASGNMHIGKLTPDFKATAVVDGTYRECWGPRWAQFTHLAWINIPRKEGGFESLDTPLLADLSENYGVLKTDEGIIAVNDWPVGHFVDEALRLVQAFQYTDEHPEICPAGWKPGSDMIKPSVNDSKEYFSKHN

SEQ ID NO: 21327 - protein, 224 aa, Mus musculus
MPGGLLLGDEAPNFEANTTIGRIRFHDFLGDSWGILFSHPRDFTPVCTTELGRAAKLAPEFAKRNVKLIALSIDSVEDHLAWSKDINAYNGETPTEKLPFPIIDDKGRDLAILLGMLDPVEKDANNMPVTARVVFIFGPDKKLKLSILYPATTGRNFDEILRVVDSLQLTGTKPVATPVDWKKGESVMVVPTLSEEEAKQCFPKGVFTKELPSGKKYLRYTPQP

SEQ ID NO: 21328 - protein, 224 aa, Mus musculus
MPGGLLLGDEAPNFEANTTIGRIRFHDFLGDSWGILFSHPRDFTPVCTTELGRAAKLAPEFAKRNVKLIALSIDSVEDHLAWSKDINAYNGETPTEKLPFPIIDDKGRDLAILLGMLDPVEKDDNNMPVTARVVFIFGPDKKLKLSILYPATTGRNFDEILRVVDSLQLTGTKPVATPVDWKKGESVMVVPTLSEEEAKQCFPKGVFTKELPSGKKYLRYTPQP

SEQ ID NO: 21329 - protein, 224 aa, Mus musculus
MPGGLLLGDEAPNFEANTTIGRIRFHDFLGDSWGILFSHPRDFTPVCTTELGRAAKLAPEFAKRNVKLIALSIDSVEDHLAWSKDINAYNGETPTEKLPFPIIDDKGRDLAILLGMLDPVEKDDNNMPVTARVVFIFGPDKKLKLSILYPATTSRNFDEILRVVDSLQLTGTKPVATPVDWKKGESVMVVPTLSEEEAKQCFPKGVFTKELPSGKKYLRYTPQP

SEQ ID NO: 21330 - protein, 224 aa, Mus musculus
MPGGLLLGDEAPNFEANTTIGRIRFHDFLGDSWGILFSHPRDFTPVCTTELGRAAKLAPEFAKRNVKLIALSIDSVEDHLAWSKDINAYNGETPTEKLPFPIIDDKGRDLAILLGMLDPVEKDDNNMPVTARVVFIFGPDKKLKLSILYPATTGRNFDEILRVVDSLQLTGTKPVATPVDRKKGESVMVVPTLSEEEAKQCFPKGVFTKELPSGKKYLRYTPQP

SEQ ID NO: 21331 - protein, 224 aa, Mus musculus
MPGGLLLGEEAPDFEANTTIGRIRFHDFLGNSWGMLFSHPKDFTPVCTTELGRAAKLAPEFAKRNVKLIALSVDSVEDHLAWSKDINAYNGATPKEKLPFPIIDDKDRDISILFCMLDPVEKDANSMPLTARGVFIFGPDKKLKMSLLYPNSTGRNFDEILRVIDSLQLTETKPVATPVDWKKGESVMVLPDLPEEEAKRCFPKGISTTKLPSGKNYLRYTPQP

SEQ ID NO: 21332 - protein, 203 aa, Mus musculus
MPGGLLLGEEAPDFEANTTIGRIRFHDFLGNSWGMLFSHPKDFTPVCTTELGRAAKLAPEFAKRNVKLIALSVDSVEDHLAWSKDINAYNGATPKEKLPFPIIDDKDRDISILFCMLDPVEKDANSMPLTARGVFIFGPDKKLKMSLLYPNSTGRNFDEILRVIDSLQLTETKPVATPVDWKKGESVMVLPRPPRRGSQTMFP

SEQ ID NO: 21333 - protein, 161 aa, Mus musculus
MPEGLLPGNEAPNSETDTTTIRIYFHDFLGDSWDILFSHPRNFTPVCTTELGRAAKLSPEFAKRNVQLIALPVDSVEDHLAWSKDINAYSGTAPTEKLPFPIIDDEDRDLAILWASIMGRNFDEILRVIDSLQLTAAKPVDWKKGESMMVLPDLPEEEAKR

SEQ ID NO: 21334 - protein, 224 aa, Rattus norvegicus
MPGGLLLGDEAPNFEANTTIGHIRFHDFLGDSWGILFSHPRDFTPVCTTELGRAAKLAPEFAKRNVKLIALSIDSVEDHFAWSKDINAYNGAAPTEKLPFPIIDDKDRDLAILLGMLDPAEKDEKGMPVTARVVFIFGPDKKLKLSILYPATTGRNFDEILRVVDSLQLTASNPVATPVDWKKGESVMVLPTLPEEEAKQLFPKGVFTKELPSGKKYLRYTPQP

SEQ ID NO: 21335 - protein, 212 aa, Nostoc sp. PCC 7120
MALRLGDTVPNFTQASTHGDIDFYAWAGDSWVVLFSHPADYTPVCTTELGTVAKLKPEFDKRNVKAIALSVDDVESHNGWVGDIEETQSTTLNYPILADADRKVSDLYDMIHPNANAAVTVRSVFVIDPNKKLRLTFTYPPSTGRNFDELLRVIDSLQLTDNYSVATPADWKDGDKVVIVPSLKDPEVLKEKFPKGYEVVKPYLRLTPQPNK

SEQ ID NO: 21336 - protein, 212 aa, Sulfolobus tokodaii
MSEEKIPLIGEKFPEMEVITTHGKIKLPDYYQGKWFVLFSHPGDFTPVCTTEFYSFAKKYEEFKKLNTELIGLSVDSNISHIEWVMWIEKNLKVEIPFPIIADPMGNVAKRLGMIHAESSTSTVRAVFIVDDKGIVRLIMYYPMEIGRNIDEILRSIRALQLVDKSGVVIPANWPNNELIGNKVINPPPRTVKDAKLRINQPFDWWFTYKEI

SEQ ID NO: 21337 - protein, 215 aa, Sulfolobus tokodaii
MVKLYSKFPDVQVLTTKGPIDFYKDIFGKGKWLFLFAHPADFTPVCTTEFVAFSQKYEEFKKLGVELVGLSVDSIYSHIQWLMDIEQRYGVKVPFPVIADPDKKLARMLDALDEASGQTIRIVVLASPDGIIRFVAQYPMEFGRNIDELLRITKAAIVNYKAKVVLPANWQPGQDVIVPPPAIFDEAEMRIKLPNAKAWYLLFKKYEELPPDQKV

SEQ ID NO: 21338 - protein, 150 aa, Sulfolobus tokodaii
MPPNIGEQAPDFEAESTLGKIRLSDYKGKFVVLYFYPKSFTPGCTREIQRFSELYEEFKKLNAEVIGVSADSITTQKRFAEKYNAKFPVVADKEKKIIETYGVLNEKGTSAQRVTFIIDPEGKIIQILKNLKKAEEHADKALEIIKNKKS

SEQ ID NO: 21339 - protein, 211 aa, Synechocystis sp. PCC 6803
MALQLGDVVPDFTQESSQGPISFHEWAGDSWVVLFSHPADYTPVCTTELGTVAKLKPEFDKRNVKVIALSVDDVESHKGWICDIDETQNTTVNYPILADGDKKVSDLYGMIHPNALNNLTVRSVFIIDPAKKLRLTFTYPASTGRNFDEILRVIDSLQLTDYHQVATPANWQDGDKCVVVPSISTEDAKVKFPKGVEEIKPYLRLTPQPNK

SEQ ID NO: 21340 - protein, 221 aa, Thermoanaerobacter tengcongensis
METEAIENIPRVCLPQIGAPAPDFKANSTFGPIKLSDYRGKWVVLFSHPGDFTPVCTTEFIAFTQVYTSFVERNVQLIGLSVDSNPSHLAWVENIYKTTGVEIPFPIIEDKDMRIAKLYGMISPAETSTSAVRAVFIIDDKQILRLILYYPLEIGRNIQEIIRIIDALQTVDKYKVLAPANWYPGMPVIVPPPKTYPELKQRLKNVEGYTCTDWYLCYKKV

SEQ ID NO: 21341 - protein, 220 aa, Thermoanaerobacter tengcongensis
MEEIRMKLLGEKFPSMEVMTTHGVKRLPEDYAGKWFVLFSHPADFTPVCTTEFVEFARKAEEFKQLNTELIGLSVDQVFSHIKWVEWIKDNTGVQIPFPVIADELGRVSNQLGMIHPGKGTNTVRAVFIVDDKGVIRLIMYYPQEVGRNVDEILRALKALQTADQYGVALPEKWPNNYLIKDHVIVPPSTDEASANERKEKIKAKEIEAFDWWFVHKPLK

SEQ ID NO: 21342 - protein, 217 aa, Ralstonia metallidurans
MAIRLGEEAPDFTADTTEGKIHFHEWIGDSWAILFSHPKDFTPVCTTELGYMAKLKPEFDKRNTKIIGLSIDPVGDHSRWVKDIEETQGATVNYPMIGDHDLKVAKLYDMIHPEASGGPRTAADNATIRAVFMIGPDKKVKAMLVYPMSAGRNFDEVLRLLDSLQLNAKHTVATPVNWKPGDDVIIPTSVSDDDAKKKYPQGFKTLKPYLRTVAQPK

SEQ ID NO: 21343 - protein, 212 aa, Ralstonia metallidurans
MALRLGDIAPDFEQESSEGRIRFHDWLGDGWGVLFSHPADYTPVCTTELGLTARLKEEFAKRNVKAIALSVDSVESHHGWIQDINDTQSTTVNFPILADGDRKVSELYDMIHPNANETLTVRSLFVIDPKKKVRLIITYPASTGRNFNEILRVIDSLQLTDNHSVATPGNWQDGDDVVIVPSLKDEEVIRQKFPKGYKAVRPYLRLTPQPNK

SEQ ID NO: 21344 - protein, 246 aa, Burkholderia fungorum
MFVRHIPSLPYALSLQSAVGECSRGNVQTFRRCMMSLRLGDIAPDFEQQSSVGPIRFHEWLGDSWGVLFSHPADFTPVCTTELGLTAKLASEFEKRNVKTIALSVDSAESHKEWIKDINETQAANVGFPILADGDRKVSELYDMIHPNANETLTVRSLFVIDPKKKVRLIITYPASTGRNFDEVLRVIDSLQLTDSHSVATPGNWKQGDDVVIVPSLKDEEIIKQKFPKGYKALRPYLRMTPQPNK

SEQ ID NO: 21345 - protein, 224 aa, Burkholderia fungorum
MSVIYQVLKESIMSLRLGDIAPDFERQSSVGPIRFHEWLGDSWGVLFSHPADFTPVCTTELGLTAKLAGEFEKRNVKTIALSVDSAESHKEWIKDINETQAANVGFPILADGDRKVSELYDMIHPNANETLTVRSLFVIDPKKKVRLIITYPASTGRNFDEVLRVIDSLQLTDSHSVATPGNWKQGDDVVIVPSLKDEEIIKQKFPKGYKALRPYLRMTPQPNK

SEQ ID NO: 21346 - protein, 234 aa, Burkholderia fungorum
MDNIEEDFRAQRPPFLYEPAPDFEARSTMGMVSSADYRGKWLLFFSHPADFTPVCTSELIAFARIAPRFKELGCELLALSIDGLYSHLAWLRSIQERFNMDIPFPVVEDPSMAVAKAYGMLPPKAVSSSTVRGMFLIDPEGIIKAISWYPISTGRSVEEAFRLFQAVRMTWQENLYAPADWQPGSPCVVPPPKTIEDASKRLSEGDVLDWYYQTRQIAQDAPPERAPVKRGRRA

SEQ ID NO: 21347 - protein, 212 aa, Pseudomonas putida KT2440
MSLKLGDIAPDFEQDSSEGKIRFHEWLGNSWGVLFSHPADFTPVCTTELGLTAKLKDEFAKRGVKAIALSVDPVDSHHKWIDDINETQNTVVNFPIIADADRKVSDLYDLIHPNASDTLTVRSLFIIDPNKKVRLTITYPASTGRNFNEILRVIDSLQLTDNHKVATPGNWQDGDEVVIVPSLKDEEEIKQRFPKGYRAVKPYLRLTPQPNR

SEQ ID NO: 21348 - protein, 181 aa, Pyrobaculum aerophilum str. IM2
MKIPEDLCFNTDHGPKCFKDYKGKWLLLFSHPADFTPVCTTEFVAFSRKYEEFKKRGVELLGLSVDTNYSHIEWKRQIEQAFGVKVPFPIIADVDMKVASIFNAVPPGQNLTVRTVALIDPDLKLAWFAAYPYTNGRNIDEILRVIDAIQFSYKYGYATPADWKPGDPVIVPPPPTTEGAA

SEQ ID NO: 21349 - protein, 249 aa, Anopheles gambiae str. PEST
AHPVCAPFVIVRFRTKSISPVPASRKMSLNLGDPFPNFTADTTIGPIDFHQWIGDGWAILFSHPADYTPVCTTELAAVAKLVPEFTKRNVKPIALSCDTVESHRGWIEDIKAYGQLAAADPFPFPIIDDSKRELAVKLNMLDRDEIGSAGLPLTCRAVFVIDAGKKLRLSILYPATTGRNFAEILRTIDSIQLTDKRRVATPADWMPGDSCMVQPTVPADQLATLFPAGVDSVTLPSGKQYLRKTECPN

SEQ ID NO: 21350 - protein, 248 aa, Anopheles gambiae str. PEST
RSARAISTVLCFKPRAHESRQPRPFTIMRIGATIPNFQADSTKGPIDFYEWIGDSWCVLFSHPADFTPVCTTELGRIAVHQEHFEKRNVKVLAHSVDDLKCHVDWVNDIKSYCPDIIGNFPYPIIADPSRDLAVRFGMLDEKDKDNVELAQTVRALFIISPDKRVRLTMHYPTSTGRNVDEILRVIDSLQLTDRLKVIATPANWTPGTKVMILPSVSEEDADKLFPNGIERVSMPSGNVYVRTTTDYE

SEQ ID NO: 21351 - protein, 216 aa, Pyrococcus furiosus DSM 3638
MIVIGEKFPEVEVKTTHGVIKLPDHFTKQGKWFMLFSHPADFTPVCTTEFYGLQIRLEKFRELGVEPIGLSVDQVFSHLKWMEWIKEKLGVEIEFPVIADDRGDLAEKLGMIPSGSTITARAVFIVDDKGIIRAIVYYPAEVGRDWDEILRLVKALKISTEKGVALPHKWPNNELIGDKVIVPPASSVEQIKEREEAKAKGEIECYDWWFCYKKLE

SEQ ID NO: 21352 - protein, 219 aa, Methanosarcina acetivorans C2A
MPLIGDDAPSFTAVTTQGMINFPEDYKGKWVILFSHPADFTPVCTTEFMTFASMQEEFREMNTELIGLSIDSVFSHIAWLRRIEEKIEYKGMKNLEVKFPVIEDLKMEVAKKYGMLQPKTSTTQAVRAVFIIDPEAKIRTILYYPQSTGRNMQEIKRIVIALQKNSAEKVATPANWQPGDDVIIPPPNSMEAVKERLGTEEEGKCCLDWFLCLKKDSKK

SEQ ID NO: 21353 - protein, 160 aa, Methanosarcina acetivorans C2A
MAKTSLESGQPAPDFCLPDQEGNRTCLEKLRGKWVVLYFYPRDNTPGCSLEAKNFSCLKKDFEAENAVILGVSRDSEESHRKFIEKKELKIKLLSDEHAEVHGKYDVLHPKHFRGKDVISAVRTTFLINPEGIILKVWDNVKASGHAEKVLSELQKLKET

SEQ ID NO: 21354 - protein, 219 aa, Methanosarcina mazei Goe1
MPLIGDDAPSFTAVTTQGIIKFPDDYKGKWVILFSHPADFTPVCTTEFMTFASMQEEFRSMNTELIGLSIDSVFSHIAWLKRIEEKIEYKGMKNLEIKFPVIEDLKMDVAKKYGMVQPKASTTQAVRAVFIIDPEAKIRTILYYPQSTGRNMQEIKRIVVALQKNAAEKVATPANWQPGEDVIIPPPSSMEAVKERMGKEEEGKRCLDWFMCLKKDTQK

SEQ ID NO: 21355 - protein, 160 aa, Methanosarcina mazei Goe1
MPKTSLESGQVSPDFCLPNQEGNQICLENFKGQWAVLFFYPRDNTPGCSLEARSFSDLKKDFEAENAIILGVSRDGKESHRKFIEKKELKITLLSDEKAEIHEKYDVMHPKNFRGNEVISTVRTTFLINPEGKIEKVWNNVKAAGHAEKVLSELKTLKGK

SEQ ID NO: 21356 - protein, 211 aa, Chlorobium tepidum TLS
MPLLGDDFPELKVQTTHGPMNIPGDLKGSWFVLFSHPADFTPVCTTEFVAFQQRVEAFEKIGCKLIGMSVDQVFSHIKWVEWIKENLDVDITFPIVAANDRIANKLGMLHPGKGTNTVRAVFVGDPNGKVRLVLYYPQEIGRNMDEILRAVKVLQISDSNKVAMPADWPNNLLIKDHVIIPPANNVEDAKKRKEQQYDCYDWWFCHKPLDK

SEQ ID NO: 21357 - protein, 211 aa, Thermosynechococcus elongatus BP-1
MSLKLGDVVPNFTQASSMGNINFYEWAGDSWVVLFSHPADYTPVCTTELGEVARLRPEFEKRNVKVLALSVDSVESHLGWIKDIEEVNNVKVDYPILADEDKKVSTLYDMIHPNSLNNLTVRTVFIIDPQKRLRLTMTYPASTGRNFAEILRVIDSLQLTDNYSVATPANWQEGQECVIVPSLSDEEAKQKFPKGFNAVKPYLRLTPQPNK

SEQ ID NO: 21358 - protein, 212 aa, Trichodesmium erythraeum IMS101
MTLRLGDKVPDFTQDSSEGQISFYDWAGDSWVVLFSHPADFTPVCTTELGAVARLKPEFDKRGVKVIALSVDDAESHKGWVGDINETQKTTVNYPILADVDKKVSDLYDMIHPNSLNNLTIRSVFIIDSEKKLRLTFTYPASTGRNFNEILRVIDSLQLTDNHQVATPVDWKDGDDCVIVPSLKDPEVLKEKFPKGYTEVKPYLRMTPQPNK

SEQ ID NO: 21359 - protein, 258 aa, Pseudomonas syringae pv. syringae B728a
MRGFFCLFLIFLAGLLGALFILFNFSRQGAQWCYTKTFPIQTRSNTMTLRLGDIAPDFEQESSEGRIRFHEWLGDSWGVLFSHPADFTPVCTTELGFTAKLKDEFAKRGVKAIALSVDPVDSHIKWIDDINTTQNTLVNFPILADADRKVSDLYDLIHPNANDTLTVRSLFVIDPNKKVRLTITYPASTGRNFHEILRVIDSLQLTDNYKVATPANWVDGDDVVIVPSIKDEAEIKQRFPKGYKAVTPYLRLTPQPNR

SEQ ID NO: 21360 - protein, 212 aa, Pseudomonas fluorescens PfO-1
MSLRLGDIAPDFEQDSSAGKIRFHEWLGDSWGVLFSHPADFTPVCTTELGFTAKLKDEFTKRGVKAIALSVDPVDSHHKWIEDINETQNTIVNFPILADADRKVSDLYDLIHPNANDTLTVRSLFVIDPNKKIRLTITYPASTGRNFHEILRVIDSLQLTDNYKVATPANWQDGEEVVIVPSLKDEDEIKQRFPKGYRAVKPYLRLTPQPNK

SEQ ID NO: 21361 - protein, 231 aa, Desulfovibrio desulfuricans G20
MVSTRKPLLSSLEDTTMEEGKFVLIGDALPEMHVTTTRGPMTLPGDLKGKWFVLFSHPADYTPVCTTEFVAFQKRYDEFRKLNCELVGLSIDQVFSHIKWVDWIKEKIGVEIEFPIIADDMGQVASRLGMIHPGKGTNTVRAVFIVDDKGIVRIIFYYPQELGRNMDEILRAVKGMQVSDAQSVAIPAGWPENEIVRDHVIVPPPKSVQEAQKRLTEGHECYDWWFCHKKL

SEQ ID NO: 21362 - protein, 212 aa, Pseudomonas aeruginosa PAO1
MSLRLGDIAPDFEQDSSEGRIRLHEWLGDSWGVLFSHPADFTPVCTTELGFTAKLKDQFAQRGVKVLALSVDPVESHLKWIDDINETQDTRVNFPIIADADRKVSELYDLIHPNANDTLTVRSLFIIDPSKKVRLIITYPASTGRNFNEILRVIDSLQLTDEHKVATPANWEDGDEVVIVPSLKDEEEIKRRFPKGYRAVKPYLRLTPQPNR

SEQ ID NO: 21363 - protein, 223 aa, Clostridium tetani E88
MKDCKEEKHKCLNIGMKAPDFCATTTFGSIRLSDFRGKWVILFSHPGDFTPVCTTEFIGFAQCYPYFKKRNVQLLGLSIDSNPSHLAWVYNIYINTGIQIPFPIIADRDGSISRMYGMVSPYISSTETVRSVFIIDEDGIIRTILTYPLTNGRNIGEILRMVCALQTTDEEKVVTPANWIPGRPVMVPPPKTYNELINRRKDNPELCCIDWYWCYKKQNKNFA

SEQ ID NO: 21364 - protein, 222 aa, Methanocaldococcus jannaschii
MCEGKMPVIGEKFPEVEVKTTHGAIKLPDYYVEKGKWFVLFSHPADFTPVCTTEFVGFQKRYDEFRKLNTELIGLSIDQVFSHLKWVEWIKEKLNVEIEFPIIADDRGELAEKLGMISPYKGNNTVRAVFVVDNKGIIRAIIYYPQEVGRNLDEIVRLVKALQVSDEKGVAMPANWPENDLIGDKVIIPPASSVEEIKQRKEACEKGEIECLDWWFCYKKLD

SEQ ID NO: 21365 - protein, 217 aa, Methanocaldococcus jannaschii
MPVIGEKFPEVEVKTTHGAIKLPDYYVEKGKWFVLFSHPADFTPVCTTEFVGFQKRYDEFRKLNTELIGLSIDQVFSHLKWVEWIKEKLNVEIEFPIIADDRGELAEKLGMISPYKGNNTVRAVFVVDNKGIIRAIIYYPQEVGRNLDEIVRLVKALQVSDEKGVAMPANWPENDLIGDKVIIPPASSVEEIKQRKEACEKGEIECLDWWFCYKKLD

SEQ ID NO: 21366 - protein, 232 aa, Methanosarcina barkeri
MKNMEEVENEQIHMPLIGDDAPSFTAVTTQGQINFPDDYKGKWVILFSHPADFTPVCTTEFMTFASMQEEFREMNTELIGLSIDSVFSHIAWLKRIEEKIEYKGMKNLEIKFPVIEDLKMDVAKKYGMIQPKTSTTQAVRAVFIIDPEAKIRTILYYPQSTGRNMQEIKRVVAALQKNTAEKVATPANWQPGDDVIVPAPSSMEALKERTGKLEENMYCLDWFLCFKKDSKK

SEQ ID NO: 21367 - protein, 212 aa, Pseudomonas syringae pv. tomato str. DC3000
MTLRLGDIAPDFEQESSEGRIRFHEWLGNSWGVLFSHPADFTPVCTTELGFTAKLKDEFAKRGVKAIALSVDPVDSHIKWIDDINTTQNTQVNFPILADADRKVSDLYDLIHPNANDTLTVRSLFVIDPNKKVRLTITYPASTGRNFHEILRVIDSLQLTDNYKVATPANWVDGDDVVIVPSIKDEAEIKERFPKGYKAVTPYLRLTPQPNR

SEQ ID NO: 21368 - protein, 215 aa, Archaeoglobus fulgidus
MAPLLGDNFPEIEVVTTHGRMKLPEAFKGKWFVLFSHPADFTPVCTTEFVAFQNRYDEFRKLNCELIGLSIDQVFSHIKWIEWIKEKLDIEIEFPVIADDTGRVAEMLGLIHPAKGTNTVRAVFIVDPEAVIRAVIYYPQELGRNMDEILRAVKALQVSDQNGVAMPANWPNNELVGDAVIIPPPISEAEAKERLEKAKAGDISCYDWWFCYKKI

SEQ ID NO: 21369 - protein, 222 aa, Aquifex aeolicus VF5
MEVVSLPRLGEPAPAFEAQTTFGPVKFPDDFKGQWVVLFSHPADFTPVCTTEFVAFAKNYEEFKKRNVQLIGLSVDSNFSHIAWVMNIKEKFGIEIPFPIIADHNMEVAKKYGMIHPAQSTTFTVRALFVIDDKGILRAMIYYPLTTGRNIREVIRLVDALQTADREGVATPADWVPEPQTWEFTEENTKVIVPPPTTYEDAVKRLQEGYECADWYICKKKV

SEQ ID NO: 21370 - protein, 195 aa, Archaeoglobus fulgidus DSM 4304
MKLPEAFKGKWFVLFSHPADFTPVCTTEFVAFQNRYDEFRKLNCELIGLSIDQVFSHIKWIEWIKEKLDIEIEFPVIADDTGRVAEMLGLIHPAKGTNTVRAVFIVDPEAVIRAVIYYPQELGRNMDEILRAVKALQVSDQNGVAMPANWPNNELVGDAVIIPPPISEAEAKERLEKAKAGDISCYDWWFCYKKI

SEQ ID NO: 21371 - protein, 219 aa, Bradyrhizobium japonicum USDA 110
MTLPIGTTAPDFEAETTEGKIKFHDWIGNSWALLFSHPKDFTPVCTTELGALAKLKPEFDKRGVKLMGLSVDPVDRHAKWSEDIKETQGAAPNYPMIGDTDFNVSKLYEMLPASTSGDPLTRTPADNQTVRNVFIIGPDKKIKLVLVYPMTTGRNFQEILRVVDSLQLTAKHRVATPADWTQGEDVIIAGSVSNDEAKTIYPQGWKEPKPYIRIVPQPK

SEQ ID NO: 21372 - protein, 215 aa, Sulfolobus solfataricus
MSEERIPLIGERFPEMEVITTQGRIKLPDDYKGRWFVLFSHPGDFTPVCTTEFYSFAKKYEEFKKLNTELIGLSVDSNISHIEWIMWIEKNLKVEIPFPIIADPMGNVAKRLGMIHAQSSTATVRAVFVVDDKGVVRLILYYPMEIGRNIDEILRAIRALQLVDKAGVVTPANWPNNELIGDKVINPAPRTIKDAKMRLGQPFDWWFTYKEVKTT

SEQ ID NO: 21373 - protein, 149 aa, Sulfolobus solfataricus
MNVGEEAPDFEAESTLGKIKLSDFRGKKVILYFYPKSFTSGCTRELQRFTELYDEFKKLNAEVIGVSVDKIDTQKKFAEKYGAKFPIVADDQKTISKLYSVLNERGTSAQRVTFIIDENGKIVNILKNLKKAEEHADKSLEIIKRQNST

SEQ ID NO: 21374 - protein, 203 aa, Thermoplasma acidophilum
MPVTLGQKAPDFTVNTSKGPVTLSSYRGKWVLLFSHPGDFTPVCTTEFIAFTERYKDFQALGVELLGLSIDSVYSHIAWIRDIKEHFGIEIPFPIIADIDKEVARQYNLIDEKSGATVRGVFIIDPNQIVRWMIYYPAETGRNIDEIIRVIKALQFNWERKLATPANWQPGQEGIEGAPSTVDASLKRDGEPGVKTWYLKFVK

SEQ ID NO: 21375 - protein, 199 aa, Thermoplasma acidophilum
MGQKAPDFTVNTSKGPVTLSSYRGKWVLLFSHPGDFTPVCTTEFIAFTERYKDFQALGVELLGLSIDSVYSHIAWIRDIKEHFGIEIPFPIIADIDKEVARQYNLIDEKSGATVRGVFIIDPNQIVRWMIYYPAETGRNIDEIIRVIKALQFNWERKLATPANWQPGQEGIEGAPSTVDASLKRDGEPGVKTWYLKFVK

SEQ ID NO: 21376 - protein, 233 aa, Thermoplasma acidophilum
MPDENKFPLIGEKFPEMTVETTHGSMKLPDQYKGRWFMLFSHPGDFTPVCTTEFYSFARRFEDFQKINTDLIGLSVDSTISHIEWVNWIRDNLKIEVPFPIIGDSMGRVATRLGMIQAESSTSTVRAVFIVDPNSTVRLIMYYPLEIGRNVDELLRAIKALQMSDKYRGAMPANWPYNELIGEKMLNPAPKNVKDATGRLKEFKGYAWWLTYKDVPDNEVQETKKIVKMREEK

SEQ ID NO: 21377 - protein, 238 aa, Thermoplasma acidophilum
MSGENMPDENKFPLIGEKFPEMTVETTHGSMKLPDQYKGRWFMLFSHPGDFTPVCTTEFYSFARRFEDFQKINTDLIGLSVDSTISHIEWVNWIRDNLKIEVPFPIIGDSMGRVATRLGMIQAESSTSTVRAVFIVDPNSTVRLIMYYPLEIGRNVDELLRAIKALQMSDKYRGAMPANWPYNELIGEKMLNPAPKNVKDATGRLKEFKGYAWWLTYKDVPDNEVQETKKIVKMREEK

SEQ ID NO: 21378 - protein, 215 aa, Thermotoga maritima
MEGRIPLIGEEFPRVEVKTTHGKKVLPDDFRGKWFVLFSHPADFTPVCTTEFVAFQKRYDEFRKLNTELIGLSIDQVFSHIKWIEWIKEKLGVEIEFPVIADDLGEVSRRLGLIHPNKGTNTVRAVFIVDPNGIIRAIVYYPQEVGRNIDEILRAVKALQTSDEKGVAIPANWPSNELINDSVIVPPASSVEEARKRLESKDFECYDWWFCYKKV

SEQ ID NO: 21379 - protein, 216 aa, Pyrococcus abyssi
MVVIGEKFPEVEVKTTHGVIKLPDHFTKQGKWFILFSHPADFTPVCTTEFYGMQKRLEEFRKLGVEPIGLSVDQVFAHIKWMEWIKENLGVEIEFPIIADDRGELAEKLGMIPSGATITARAVFIVDDKGIIRAIVYYPAEVGRDWDEILRLVKALKISTENGVALPHKWPNNELIGDKVIIPPASTVEEKKQREEAKAKGEIECYDWWFCYKKLK

SEQ ID NO: 21380 - protein, 212 aa, Ralstonia solanacearum
MSLRLGDIAPDFEQDSSEGRIQFHTWLGNSWGVLFSHPADFTPVCTTELGLTAKLKDAFAKRNVKVIALSVDPVDSHKKWIDDINETQNTRVNFPIIADADRKVSQLYDMIHPNASETFTVRSLFVIDPNKKVRLTITYPASTGRNFDEVLRVIDSLQLTDHHSVATPGNWKDGDDVVIVPSLKDEEVIKQKFPKGYKAVRPYLRLTPQPNK

SEQ ID NO: 21381 - protein, 212 aa, Azotobacter vinelandii
MSIRLGDIAPDFEQDSSTGRIRFHEWLGDGWGILFSHPADFTPVCTTELGFTAKLKDEFAKRNVKAIALSVDPVDSHLKWIGDIEETQGVQVGFPIIADADRKVSDLYDLIHPNANDTLTVRSLFIIDPNKKVRLIITYPASTGRNFHEILRVIDSLQLTDNYKVATPANWKEGDEVVIVPSLQDPEELKQRFPKGFRAVKPYLRLTPQPNR

SEQ ID NO: 21382 - protein, 216 aa, Arabidopsis thaliana
MPGITLGDTVPNLEVETTHDKFKLHDYFANSWTVLFSHPGDFTPVCTTELGAMAKYAHEFDKRGVKLLGLSCDDVQSHKDWIKDIEAFNHGSKVNYPIIADPNKEIIPQLNMIDPIENGPSRALHIVGPDSKIKLSFLYPSTTGRNMDEVLRALDSLLMASKHNNKIATPVNWKPDQPVVISPAVSDEEAKKMFPQGFKTADLPSKKGYLRHTEVS

SEQ ID NO: 21383 - protein, 216 aa, Arabidopsis thaliana
MPGITLGDTVPNLEVETTHDKFKLHDYFANSWTVLFSHPGDFTPVCTTELGAMAKYAHEFDKRGVKLLGLSCDDVQSHKDWIKDIEAFNHGSKVNYPIIADPNKEIIPQLNMIDPIENGPSRALHIVGPDSKIKLSFLYPSTTGRNMDEVLRALDSLLMASKHNNKIATPVNWKPDQPVVISPAVSDEEAKKMFPQGFKTADLPSKKGYLRRTEVS

SEQ ID NO: 21384 - protein, 216 aa, Brassica napus
MPGITLGDTVPNLEVETTHKNFKLHDYFADSWTVLFSHPGDFTPVCTTELGAMGKYAHEFEQRGVKLLGLSCDDIQSHKDWIPDIEAFTPGSKVTYPIIADPNKEIIPQLNMIDPIENGPSRALHVVGPDCKIKLSFLYPSTTGRNMDEVLRALDSLLMAAKHKNKIATPVNWKPDEPVVISPAVSDEEAKKLFPQGFKTAKLPSKKGYLRVADVS

SEQ ID NO: 21385 - protein, 214 aa, Brassica napus
MPGITLGNTVPRVETTHKNFKLHDYFADSWTVLFSHPGDFTPVCTTELGAMGKYAHEFEQRGVKLLGLSCDDVQSHKDWIPDIEAFTPGSKVTYPIIADPNKEIIPQLNMIDPIENGPSRALHIVGPDCKIKLSFLYPSTTGRNMDEVLRALHSLLMAAKHKNRIATPVNWKPDEPVVISPAVSDEEAKKLFPQGFKTAELPSKKGYLRVADVS

SEQ ID NO: 21386 - protein, 278 aa, Glycine max
  unsure (1)..(278): unsure at all Xaa locations
MASYLSRAAPRAFSSSLRAAAAARPGLRTAQRPAAPLFRRFLQTPAEQPRLRLGSTAPNFTAKTTQGDIEFHKWIGDSWAILFSHPADFTPVCTTELGAFAKLKPEFEKRGVKMVGLSADDLSSHDKWVADINEVSSTNLQFPIIADADRKVAFLYDMVTEDDMRDIATKGLPFTIRSVFIIDPAKKIRLMMIYPASTGRNSAEVLRVIDALQLADKKGIATPIDWTQGEDVIVPPSVSTADAKKKFGEVRELKPYLRYTKAXKKARTASRQGGGILE

SEQ ID NO: 21387 - protein, 219 aa, Glycine max
  unsure (1)..(219): unsure at all Xaa locations
MPGLTIGDTIPDLQVETNQGKIKLHQFCADGWTILFSHPGDFTPVCTTELGKMAQYAKEFYQRGVKLLGLSCDDVQSHNEWIKDIEAYTPGAKVNYPIIADPKREIIKQLNMVDPDEKDSTXXNLPSRALHIVGPDLKIKLSFLYPATTGRNMDEVLRVIESLQKASKFKVATPANWKPGDPVVITPDVTNEQAKEMFPQGFESVKLPSKKEYLRLTKV

SEQ ID NO: 21388 - protein, 110 aa, Glycine max
  unsure (1)..(110): unsure at all Xaa locations
MPGLTIGDTVPNLELDSTHGKIWIHDYVGNGYVILFSHPGDFTPVCTTELAAMANYAKEFEKRGVKLLGISCDDVQSHKEWTKDIEAYKAGXSKVTYPIMADPDRSAIKX

SEQ ID NO: 21389 - protein, 218 aa, Hordeum vulgare
MPGLTIGDTVPNLELDSTHGKIRIHDYVGNGYVILFSHPGDFTPVCTTELAAMANYAKEFEKRGVKLLGISCDDVQSHKEWTKDIEAYKPGSKVTYPIMADPDRSAIKQLNMVDPDEKDAQGQLPSRTLHIVGPDKVVKLSFLYPSCTGRNMDEVVRAVDSLLTAAKHKVATPANWKPGECVVIAPGVSDEEAKKMFPQGFETADLPSKKGYLRFTKV

SEQ ID NO: 21390 - protein, 220 aa, Oryza sativa
MPGLTIGDTVPNLELDSTHGKIRIHDFVGDTYVILFSHPGDFTPVCTTELAAMAAYAKEFDKRGVKLLGISCDDVQSHKDWFKDIEAYKPGNRVTYPIMADPSREAIKQLNMVDPDEKDSNGGHLPSRALHIVGPDKKVKLSFLYPACVGRNMDEVVRAVDALQTAAKTRLATPVNWKPGEPFVIPPGVSDDEAKEKFPQGFDTADLPSGKGYLRFTKVG

SEQ ID NO: 21391 - protein, 220 aa, Oryza sativa
MPGLTLGDVVPDLELDTTHGKIRLHDFVGDAYVIIFSHPADFTPVCTTELSEMAGYAGEFDKRGVKLLGFSCDDVESHKDWIKDIEAYKPCRRVGFPIVADPDREAIRQLNMIDADEKDTVGGELPNRALHIVGPDKKVKLSFLFPACTGRNMAEVLRATDALLTAARHRVATPVNWKPGERVVIPPGVSDEEAKARFPAGFETAQLPSNKCYLRFTQVD

SEQ ID NO: 21392 - protein, 222 aa, Oryza sativa
  unsure (1)..(222): unsure at all Xaa locations
MPGLTIGDTVPNLELDSTHGKIRIHDFVGDTYVILFSHPGDFTPVCTTELAAMAXAYAKEFDKRGVKLLGISCDDVQSHKDWFKDIEAYKPGNRVTYPIMADPSREAIKQLNMVDPDEKDSNGGHLPSRALHIVGPDKKVKLSFLYPACVGRNMDEVVRAVDALQTAAKXTRLATPVNWKPGEPFVIPPGVSDDEAKEKFPQGFDTADLPSGKGYLRFTKVG

SEQ ID NO: 21393 - protein, 142 aa, Oryza sativa
  unsure (1)..(142): unsure at all Xaa locations
MPGLTIGDTVPNLELDSTHGKIRMDDXWVGDTYVILFSHPGDFTPVCTTELAAMAGYAKEFDKRGVKLLGISCDDVQSHKDWIKDIEAYKPGNRVTYPIMADPSREAIKQLNMVDPDEKDSNGGHLPSRALHIVGPDKKVKX

SEQ ID NO: 21394 - protein, 243 aa, Triticum aestivum
  unsure (1)..(243): unsure at all Xaa locations
AGRARDTSILFILHTQXMSAPAPLRLGSTAPNFQAETTKGNIDFHEFIGDNWVILFSHPEDYTPVCTTELGAFAKLQPEFTKRNVKLIGLSANTIQSHEGWIKDIGEVTGGNVEFPIIGDKERKVSLLYDMIDQQDATNVDEKGIAFTIRSVFIIDPKKTIRTIFSYPASTGRNAAEVLRVIDSLQTGDKYRITTPINWVPGEDVIVHPSVKNEEAKTLFPEFRIVKPYLRFTPLAKEKVLPQ

SEQ ID NO: 21395 - protein, 208 aa, Triticum aestivum
  unsure (1)..(208): unsure at all Xaa locations
XGDTAPDFEXQKTTKGDIRFHEFIGDNWTILFSHPADFTPVCTTELGIVAALQDEWDARNVKVIGLSANGLEEHEKWIADINEVSQVKLNFPLIADADRKVSALYDMLDPNVDATFTIRSVFIIDPKKTIRLILTYPASTGRNFDEILRVVDSLQLGDKYRITTPGNWKKGDDVIVHPSVSNELAQELFPKGIKVIKPYLRLTPSPFX

SEQ ID NO: 21396 - protein, 218 aa, Triticum aestivum
MPGLTIGDTVPNLELDSTHGKIWIHDYVGNGYVILFSHPGDFTPVCTTELAAMANYAKEFEKRGVKLLGISCDDVQSHKEWTKDIEAYKAGSKVTYPIMADPDRSAIKQLNMVDPDEKDAEGQLPSRTLHIVGPDKKVKLSFLYPSCTGRNMDEVVRAVDSLLTAAKHKVATPANWKPGECVVIAPGVSDDEAKKMFPQGFETADLPSKKGYLRFTKV

SEQ ID NO: 21397 - protein, 218 aa, Triticum aestivum
MPGLTIGDTVPNLELDSTHGKIRIHDYVGNGYVILFSHPGDFTPVCTTELAAMANYAKEFEKRGVKLLGISCDDVQSHKEWTKDIEAYKPGSRVTYPIMADPDRSAIKQLNMVDPDEKDGQGQLPSRTLHMVGPDKVVKLSFLYPSCTGRNMDEVVRAVDSLLTAAKHKVATPANWKPGECVVIAPGVSDDEAKKMFPQGFETADLPSKKGYLRFTKV

SEQ ID NO: 21398 - protein, 218 aa, Triticum aestivum
MPGLTIGDTVPNLELDSTHGKIRIHDYVGNGYVILFSHPGDFTPVCTTELAAMANYAKEFEKRGVKLLGISCDDVQSHKEWTKDIEAYKPGSRVTYPIMADPDRSAIKQLNMVDPDEKDGQGQLPSRTLHIVGPDKVVKLSFLYPSCTGRNMDEVVRAVDSLLTAAKHKVATPANWKPGECVVIAPGVSDEEAKKMFPQGFETADLPSKKGYLRFTKV

SEQ ID NO: 21399 - protein, 135 aa, Triticum aestivum
  unsure (1)..(135): unsure at all Xaa locations
VLQNYLLLGYRWPYFKAGGTQGRIIFHKWKEGKWAILFSHPGDYTPVCTTXLGMTAKLQPEFSKKNTLVIGLSVDNVDDHHWWVKDIXSTQNCTVNYPIVADPDRTVAETYCMIHPNSPRKLTVRTVWIIYPNNX

SEQ ID NO: 21400 - protein, 246 aa, Zea mays
  unsure (1)..(246): unsure at all Xaa locations
TSPSPHTPRQKYHHHNQQXAEGRSEPLRLGSTAPNFKAETTAGPIDFHEFIGDSWAILFSHPADRTPVCTTELGAFAKLEPEFARRNTKLIGLSADSIESHDEWVKDIDEVTGSNLKFPIIGDKERKVALLYDMLDHQDATNVDQKGIAFTIRSVFIIDPKKTIRLILSYPASTGRNTAEVLRVLDSLQTGDKHRVTTPINWVPGDDVIVHPSVSNEQAKDLFPDFRIVKPYLRFTPLAKEKTSAA

SEQ ID NO: 21401 - protein, 233 aa, Zea mays
  unsure (1)..(233): unsure at all Xaa locations
PAGVPLFSSFYTHKMSAPAPLRLGSTAPNFQAETTKGNIDFHEFIGDNWVILFSHPEDYTPVCTTELGAFAKLQPEFTKRNVKLIGLSANTIQSHEGWIKDIGEVTGGNVEFPIIGDKERKVSLLYDMIDQQDATNVDEKGIAFTIRSVFIIDPKKTIRTIFSYPASTGRNAAEVLRVIDSLQTGDKYRITTPINWXSLGEDVIXPPLRQERGGPDSVPRVPHRQALPPIHPS

SEQ ID NO: 21402 - protein, 264 aa, Zea mays
  unsure (1)..(264): unsure at all Xaa locations
MPEGEAGGTRLATRRPCIAPGCHFSARPIARKPRHVDRRTPPWPGLTIGDTVPNLELDSTHGKIRIHDYVGDGYAIIFSHPADFTPVCTTEMAAMAGYAKEFEKRGVKLLGISCDDVESHRQWTKDVEAYDTTTKVTFPILADPARDAIRQLNMVDPDEKDAAGRSMPSRALHVVGPDKAVKLSFLYPATTGRNMDEVLRAVDSLLTAAKHGGXKVATPANWKPGECAVIAPGVSDEEARKMFPQGFETADLPSKRXYXRFTKV

SEQ ID NO: 21403 - protein, 229 aa, Zea mays
MPGLTIGDTVPNLELDSTHGKIRIHDYVGDGYAIIFSHPADFTPVCTTEMAAMAGYAKEFEKRGVKLLGISCDDVESHRQWTKDVEAYGGKQQQQQATTTKVTFPILADPARDAIRQLNMVDPDEKDAAGRSMPSRALHVVGPDKAVKLSFLYPATTGRNMDEVLRAVDSLLTAAKHGGKVATPANWKPGECAVIAPGVSDEEARKMFPQGFETADLPSKKGYLRFTKV

SEQ ID NO: 21404 - protein, 229 aa, Zea mays; identical to SEQ ID NO: 21403

SEQ ID NO: 21405 - protein, 171 aa, Zea mays
  unsure (1)..(171): unsure at all Xaa locations
MPGHTIGDTVPKLELGSTHGKIRIHDYVGDGYAIIFSHPADFTPVGTTEMAAMAGXYAKEFXKRDAKLLDISCDDGESHRQRTKDVQAYEAPPNVTLAMLSDPMRDVIRQLNMVDPDXEKDAXGIMRGRALHVERPDKAVMLSLLYPATTDRNMDEVLRAVNSLLTVGKHX

SEQ ID NO: 21406 - protein, 209 aa, Zea mays
  unsure (1)..(209): unsure at all Xaa locations
MPGLTISDTVPNLELDSTHGKIRIHDYVGDGYAIIFSHPADFTPVCTTEMAVMGGYAKEFEKRGXVKLLGISCDDVESHRQWTKDVEAYWPTTKVTCPILEDPARDAIRQLNMVDPDXKDAMGRIVTLQRLHXAPEQTWTGQSLQRSRTAPSSGQFTXXPTTCKEASLQRLASSCTSPSWTCQAICXGAPXTRLDRKPHSPAPFXTCLX

SEQ ID NO: 21407 - protein, 214 aa, Sulfolobus metallicus
MKLYQKFPETQVLTTQGVIDFYKDIFGKGKWLFLFAHPADFTPVCTTEFVEFSKAYNDFANLGVQLVGLSVDSVYSHIEWLKDIQEKYGIKVPFPVIADPDKKFARLLDIVDEASGQTIRGVFLVSPDGVIRFIAYYPLEAGRKISELLRITKAMIVNYKAKVVLPANWEPGQDVIVPPPNVFDEATMRMKMPKAKSWYLLFKDYNELPQDQKV

SEQ ID NO: 21408 - protein, 215 aa, Sulfolobus metallicus
MKLYQKFPETQVITTKGPLDFYRDVFEKGKWLFLFAHPADFTPVCTTEFVGFSKVYEEFKRLNVELVGMSVDSIYSHIEWLKDIQERYGIQVPFPLIADPDKRLARLLDIIDEASGVTIRAVFLVNPEGIIRFMAYYPIEYGRKIEELLRITKAALVNYKAKVSLPVDWEPGQEVIVPAPSTIDEAQIRMKLPNAKTWYLTFKKYDELPQDQRVV

SEQ ID NO: 21409 - protein, 203 aa, Thermoplasma volcanium
MPVVLGQKAPDFTVNTSKGPITLSNYRGKWVLLFSHPGDFTPVCTTEFIAFTERYEDFQKLGVELIGLSIDSVFSHIAWIRDIKEHFGIDIPFPIIADIDKEVAREYNLIDEKSGATVRGVFIIDPNQIVRWMIYYPAETGRNIEEIIRVIKALQFNWDRKLATPANWQPGQEGIEPAPTTVDSSFKRDNEQGVKTWYLKFVK

SEQ ID NO: 21410 - protein, 243 aa, Candida albicans
MREKKQTKKKKSFFFATYTTMSQQPHLRLGSTAPDFKADTTNGPISFHEYIGDSWAILFSHPAARTSVCSTELSAFARLEPEFTKRGVKLLAISADPVEANSDWIDDMEDFSGSRVKFPIIADAERKVATLYDMIDHQDATNLDDKGLQLTIRAVFIIDPSKKIRLIMTYPASTGRNTAEVLRVLDSLQLVDKQKVITPINWVPGDDVLVHMGVPDDEARVLFPKYRAIKPYIRLTPLEKEDK

SEQ ID NO: 21411 - protein, 250 aa, Aeropyrum pernix
MPGSIPLIGERFPEMEVTTDHGVIKLPDHYVSQGKWFVLFSHPADFTPVCTTEFVSFARRYEDFQRLGVDLIGLSVDSVFSHIKWKEWIERHIGVRIPFPIIADPQGTVARRLGLLHAESATHTVRGVFIVDARGVIRTMLYYPMELGRLVDEILRIVKALKLGDSLKRAVPADWPNNEIIGEGLIVPPPTTEDQARARMESGQYRCLDWWFCWDTPASRDDVEEARRYLRRAAEKPAKLLYEEARTHLH

SEQ ID NO: 21412 - protein, 224 aa, Toxoplasma gondii
MLVLGSTFPDVHADASGVPGDKIKLYDFLGDSWGLLMSHPHDFTPVCTTELAQAARMAPEFAKRNCKLIGFSCDDVSSHKGWAKDVMSVAKLSGDLPFPIIADPERKLATDLGIMDPEEKDKAGIPVTCRAAIYIGPDRRVKGLILYPATVGRNFKEVLRALDALQLAEKYPVATPEGWFPGDKVMVQPTLTDEEAKAKLPKGFEKKECPSGKNYLRYAPDPSA

SEQ ID NO: 21413 - protein, 216 aa, Plasmodium falciparum
MAYHLGATFPNFTATASNVDGVLTFYKYVGDNWAILFSHPHDFTPVCTTELAEFGKMHEEFLKLNCKLIGFSCNSKESHDQWIEDIKFYGNLDKWDIPMVCDESRELANQLKIMDEKEKDIKGLPLTCDVFSFISPDKKFKATVLYPATTGRNSQEILRVLKSLQLTNTHPVATPVNWKEGDKCCILPSVDNADLPKLFKNEVKKLMYHPKRQSSL

SEQ ID NO: 21414 - protein, 231 aa, Caenorhabditis elegans
MKLGDTVPNFTFETDLRKNQTLHNYIGEQWLMLFSHPADFTPVCTTELAELVKLAPEFRKRHVQILAISIDSSETHRDWAKDINSVAQLSNCGSHLPFEIIADTDRSICTELGMIDPDEMNSEGICLSARAVMLFGPDKKLKSKILYPATFGRNFVEILRMVDGVQLGTKAPVATPANWIAGDNVIAQPSLSQERVIQELCGGDPDKCKTVPLPSGKSYLRVIEGDAYLQN

SEQ ID NO: 21415 - protein, 235 aa, Brugia malayi
MSKGILLGDKFPDFQAETSESFISSFHDWIGKDSWAILFSHPRDFTPVCTTELARLVQLEPEFKKRNVKLIGLSCDSVQSHRKWADDIIELCRMKSGDSNTCCSGNKLPFPIIADDNRSLASKLGMMDPDECDEKGAALTARCLFIIGPEKTLKLSILYPATTGRNFDEILRVVDSLQLTATKLVATPVDWQNGDDCVVVPTINDNEAKKLFGEKINTVELPSGKRYLRMVAHPK

SEQ ID NO: 21416 - protein, 232 aa, Onchocerca volvulus
MCAPSGPGNKFPDFQAETNEGFISSFYDWIGKDSWAILFSHPRDFTPVCTTELARLVQLAPEFKKRNVKLIGLSCDSADSHSKWADDILALYKMKCVGCDSEKKLPYPIIADEDRSLATELGMMDPDERDEKGNTLTARCVFIIGSDKTLKLSILYPATTGRNFDEILRVVDSLQLTAVKLVATPVDWKDGDDCVVLPTIDDNEAKKLFGEKIHTIDLPSGKHYLRMVPHPK

SEQ ID NO: 21417 - protein, 161 aa, Onchocerca volvulus
EFKKRNVKLIGLSCDSADSHSKWADDILALYKMKCVGCDSEKKLPYPIIADEDRSLATELGMMDPDERDEKGNTLTARCVFIIGSDKTLKLSILYPATTGRNFDEILRVVDSLQLTAVKLVATPVDWKDGDDCVVLPTIDDNEAKKLFGEKIHTIDLPSGK

SEQ ID NO: 21418 - protein, 235 aa, Dirofilaria immitis
MTKGILLGDKFPDFRAETNEGFIPSFYDWIGKDSWAILFSHPRDFTPVCTTELARLVQLAPEFNKRNVKLIGLSCDSAESHRKWVDDIMAVCKMKCNDGDTCCSGNKLPFPIIADENRFLATELGMMDPDERDENGNALTARCVFIIGPEKTLKLSILYPATTGRNFDEILRVVDSLQLTAVKLVATPVDWKDGDDCVVLPTIDDTEAKKLFGEKINTIELPSGKHYLRMVAHPK

SEQ ID NO: 21419 - protein, 235 aa, Dirofilaria immitis
MTKGILLGDKFPDFRAETNEGFIPSFYDWIGKDSWAILFSHPRDFTPVCTTELARLVQLAPEFKKRNVKLIGLSCDSAESHRKWVDDIMAVCKMKCNDGDTCCSGNKLPFPIIADENRFLATELGMMDPDERDENGNALTARCVFIIGPEKTLKLSILYPATTGRNFDEILRVVDSLQLTAVKLVATPVDWKGGDDCVVLPTIDDTEAKKLFGEKINTIELPSGKHYLRMVAHPK

SEQ ID NO: 21420 - protein, 212 aa, Nostoc punctiforme
MALRLGDTVPNFTQASTHGDIDFYQWAGDSWVVLFSHPADFTPVCTTELGTVAKLKPEFDKRNVKAIALSVDDVESHKGWVGDIEETQSTTLNYPILADADRKVADLYDMIHPNANAAVTVRSVFVIDPNKKLRLSFTYPPSTGRNFDELLRVIDSLQLTDNYSVATPADWKDGEDVVIVPSLKDPEVLKEKFPKGYEEIKPYLRMTPQPNK

SEQ ID NO: 21421 - protein, 185 aa, Nostoc punctiforme
MISRRTFLNILFASCISVISWLNFIPAADALGGKLPAINQPAPEFTLPTNTGDGKISLSDLRGKWLVLYFYPKDFTSGCTIEARRFQQDLPQYLAKNTQIIGVSADDIDSHAKFCDSEGLKFPLLADTDGSVSKAYGSWLGFLSMRHSFIIDPQGVLRETFVKVNPTVHSSEVLARLEKLQSTAS

SEQ ID NO: 21422 - protein, 222 aa, Drosophila melanogaster
MSGKALNIGDQFPNFTAETSEGRIDFYDWMQDSWAILFSHPADFTPVCTTELSRVAALIPEFQKRGVKPIALSCDTVESHKGWIEDIKSFGKLSSFDYPIIADDKRELALKFNMLDKDEINAEGIPLTCRAVFVVDDKKKLRLSILYPATTGRNFDEILRVIDSLQLTQTKSVATPADWKQGGKCMVLPTVKAEDVPKLFPDGIETIELPSGKSYLRITPQP

SEQ ID NO: 21423 - protein, 222 aa, Drosophila melanogaster
MSGKALNIGDQFPNFTAETSEGRIDFYDWMQDSWAILFSHPADFTPVCTTELSRVAALIPEFQKRGVKPIALSCDPVESHKGWIEDIKSFGKLSSFDYPIIADDKRELALKFNMLDKDEINAEGIPLTCRAVFVVDDKKKLRLSILYPATTGRNFDEILRVIDSLQLTQTKSVATPADWKQGGKCMVLPTVKAEDVPKLFPDGIETIELPSGKSYLRITPQP

SEQ ID NO: 21424 - protein, 222 aa, Drosophila melanogaster
MSGKALNIGDQFPNFTAETSEGRIDFYDWMQDSWAILFSHPADFTPVCTTELSRVAALIPEFQKRGVKPIALSCDTVKSHKGWIEDIKSFGKLSSFDYPIIADDKRELALKFNMLDKDEINAEGIPLTCRAVFVVDDKKKLRLSILYPATTGRNFDEILRVIDSLQLTQTKSVATPADWKQGGKCMVLPTVKAEDVPKLFPDGIETIELPSGKSYLRITPQP

SEQ ID NO: 21425 - protein, 220 aa, Drosophila melanogaster
MRLGQTVPNFEADTTKGPIKFHEWQGNSWVVLFSHPADFTPVCTTELGRIAVHQPEFAKRNTKCLAHSVDALNSHVDWVNDIKSYCLDIPGDFPYPIIADPTRDLAVTLGMLDEEQKKDPEVGKTIRALFIISPDHKVRLSMFYPMSTGRNVDEILRTIDSLQLTDRLKVVATPANWTPGTKVMILPSVTDDEAHKLFPKGFDKVSMPSGVNYVRTTENY

SEQ ID NO: 21426 - protein, 220 aa, Drosophila melanogaster
MRLGQTVPNFEADTTKGPIKFHEWQGNSWVVLFSHPADFTPVCTTELGRIAVHQPEFAKRNTKCLAHSVDALNSHVDWVNDIKSYCLDIPGDFPYPIIADPTRDLAVSLGMLDEEQKKDPEVGKTIRALFIISPDHKVRLSMFYPMSTGRNVDEILRTIDSLQLTDRLKVVATPANWTPGTKVMILPTVTDDEAHKLFPKGFDKVSMPSGVNYVRTTDNY

SEQ ID NO: 21427 - protein, 220 aa, Drosophila melanogaster
MRLGQTVPNFEADTTKGPIKFHEWQGNSWVVLFSHPADFTPVCTTELGRIAVHQPEFAKRNTKCLAHSVDALNSHVDWVNDIKSYCLDIPGDFPYPIIADPTRDLAVTLGMLDEEQKKDPEVGKTIRALFIISPDHKVRLSMFYPMSTGRNVDEILRTIDSLQLTDRLKVVATPANWTPGTKVMILPTVTDEEAHKLFPKGFDKVSMPSGVNYVRTTENY

SEQ ID NO: 21428 - protein, 220 aa, Drosophila melanogaster
MRLGQTVPNFEADTTKGPIKFHEWQGNSWVVLFSHPADFTPVCTTELGRIAVHQPEFAKRNTKCLAHSVDALNSHVDWVNDIKSYCLDIPGDFPYPIIADPTRDLAVSLGMLDEEQKKDPEVGKTIRALFIISPDHKVRLSMFYPMSTGRNVDEILRTIDSLQLTDRLKVVATPANWTPGTKVMILPTVTDEEAHKLFPKGFDKVSMPSGVNYVRTTDNY

SEQ ID NO: 21429 - protein, 220 aa, Drosophila melanogaster
MRLGQTVPNFEADTTKGPIKFHEWQGNSWVVLFSHPADFTPVCTTELGRIAVHQPEFAKRNTKCLAHSVDALNSHVDWVNDIKSYCLDIPGDFPYPIIADPTRDLAVSLGMLDEEQKKDPEVGKTIRALFIISPDHKVRLSMFYPMSTGRNVDEILRTIDSLQLTDRLKVVATPANWTPGTKVMILPTVTDEEAHKLFPKGFDKVSMPSGVNYVRTTENY

SEQ ID NO: 21430 - protein, 155 aa, Drosophila melanogaster
MRLGQTVPNFEADTTKGPIKFHEWQGNSWVVLFSHPADFTPVCTTELGRIAVHQPEFAKRNTKCLAHSVDALNSHVDWVNDIKSYCLDIPGDFPYPIIADPTRDLAVTLGMLDEEQKKDPRWVRPSAPCSSSVRTIRCASPCFTPCPLVATLTRF

SEQ ID NO: 21431 - protein, 220 aa, Plasmodium yoelii yoelii
MGYHLGATFPNFTAKASGIDGDFELYKYIENSWAILFSHPNDFTPVCTTELAELGKMHEDFLKLNCKLIGFSCNSKESHDKWIEDIKYYGKLNKWEIPIVCDESRELANKLKIMDEQEKDITGLPLTCRCLFFISPEKKIKATVLYPATTGRNAHEILRVLKSLQLTYTTPVATPVNWNEGDKCCVIPTLQDDEISKHFKNEITKVEMPSKKKYLRFVNL

SEQ ID NO: 21432 - protein, 110 aa, Pseudopleuronectes americanus
LGMLDPDEIDKDGLPLTARCVFVIGPDKKLKLSILYPATTGRNFDELLRVIDSLQLTAQKKVATPVDWKPGQKVMVIPSLSDNEAAALFPNGVTTKELPSGKKYLRYTQP

SEQ ID NO: 21433 - protein, 224 aa, Homo sapiens
MPGGLLLGDVAPNFEANTTVGRIRFHDFLGDSWGILFSHPRDFTPVCTTELGRAAKLAPEFAKRNVKLIALSIDSVEDHLAWSKDINAYNCEEPTEKLPFPIIDDRNRELAILLGMLDPAEKDEKGMPVTARVVFVFGPDKKLKLSILYPATTGRNFDEILRVVISLQLTAEKRVATPVDWKDGDSVMVLPTIPEEEAKKLFPKGVFTKELPSGKKYLRYTPQP

SEQ ID NO: 21434 - protein, 224 aa, Homo sapiens
  unsure (1)..(224): unsure at all Xaa locations
MPGGLLLGDVAPNFEANTTVGRIRFHDFLGDSWGILFSHPRDFTPVXTTELGRAAKLAPEFAKRNVKLIALSIDSVEDHLAWSKDINAYNSEEPTEKLPFPIIDDRNRELAILLGMLDPAEKDEKGMPVTARVVFVFGPDKKLKLSILYPATTGRNFDEILRVVISLQLTAEKRVATPVDWKDGDSVMVLPTIPEEEAKKLFPKGVFTKELPSGKKYLRYTPQP

SEQ ID NO: 21435 - protein, 187 aa, Homo sapiens
MPGGRLLGDVAPNFEANTTAGRVRFQDFLGNSLGILFSHPRDFTPVCTTELGRAAKLAPEFAKRNVNKDINAYNGEESTEKLPFRIIHDKNRDLFILLGMLDPAEKDEKDMPVTARVVFVIGPDKKPKLSIIYLATTGRNFDEILRVVTSLQLTAEKRVATPVDWKCKSTQVDSVGLSGKSAAATEA

SEQ ID NO: 21436 - protein, 204 aa, Ferroplasma acidarmanus
MAVYLGQKAPGFLVNTTKGPLSLEDYKGNWVILFSHPADFTPVCTTEFMAFARRYDEFKKINTELIGLSVDSIYSHIEWMKNIKEKFGIEIPFPVIADINKDVAREYNMMDEKTGSTVRGVFIIDPNMIVRLMIYYPAETGRNIDEIMRTLKALQMNWDRKLAAPVNWQPGNDGIVSAPGTLDEAINREKNGSKTWYLTYEAVR

SEQ ID NO: 21437 - protein, 231 aa, Ferroplasma acidarmanus
MENRMPLIGEKFPEMDVVTTQGSKKLPDDYKGKWFVLFSHPGDFTPVCTTEFFSFAQRNDEFTKLNTELIGLSVDSKISHMEWINWIHDNLKIDVKFPIIADPMGNVAKSLGMIHAESATSTVRAVFIVDDKAVVRAILYYPLEIGRNISEILRMIKALQMVDKYKIATPANWPDNELMKGRFIIPPPATMNDIPERLKKYKGYAWWLTYRDAPEEEVKEAKEVSRMKEAN

SEQ ID NO: 21438 - protein, 224 aa, Sus scrofa
MPGGLLLGDEAPNFEANTTIGRIRFHDFLGDSWGILFSHPRDFTPVCTTELGRAAKLAPEFAKRNVKMIALSIDSVEDHLAWSKDINAYNGEEPKETLPFPIIDDKSRDLAIQLGMLDPAEKDEQGMPVTARVVFIFGPDKKLKLSILYPATTGRNFDEILRVIISLQLTAEKRVATPVDWKNGDSVMVLPNIPEEEAKKLFPKGVFTKELPSGKKYLRYTPQP

SEQ ID NO: 21439 - protein, 211 aa, Cytophaga hutchinsonii
MSLRLGDIAPDFKADTTEGPISFHEWLGDKWGVLFSHPADYTPVCTTELGATAKLKSEFEKRNVKVAALSVDGLESHKGWIKDINETQNTTVNFPIIADEDRKVAELYDMIHPNASEKFTVRSLFIIGNDKKIKLIITYPASTGRNFTEILRVIDSLQLTANYSVATPANWKDGEDVVITPAVKDEDIAAKFPKGYTRVKPYLRTTPQPNK

SEQ ID NO: 21440 - protein, 224 aa, Bos taurus
MPGGLLLGDEAPNFEANTTIGRIRFHDYLGDSWGILFSHPRDFTPVCTTELGRAAKLAPEFAKRNVKMIALSIDSVEDHLAWSKDINAYNGEEPTEKLPFPIIDDKNRDLAIQLGMLDPAEKDEKGMPVTARVVFIFGPDKKLKLSILYPATTGRNFDEILRVIISLQLTAEKRVATPVDWKNGDSVMVLPTIPEEEAKKLFPKGVFTKELPSGKKYLRYTPQP

SEQ ID NO: 21441 - protein, 251 aa, Nostoc sp. PCC 7120
MFSNREGQRVPQVTFRTRQNNEWVNVTTDDLFAGKTVAVFSLPGAFTPTCSSTHLPGYNELAKVFKDNGVDEIVCISVNDAFVMNEWAKTQEAENITLIPDGNGEFTEGMGMLVDKTDLGFGKRSWRYSMLVKDGVIEKMFIEPDVPGDPFEVSDAQTMLKHINPQAAKPKLVSLFTKVGCPFCARAKAALQENGIEYEEITLGKGITTRSLRAVTGATTVPQVFIDGVLIGGSEALTDYLSTIKQEKVGV

SEQ ID NO: 21442 - protein, 224 aa, Rhodobacter sphaeroides
MLPSNFSALSFATSAAPACPAPTTTMSGMTLHSIALRQIDWPGVRRDPITRGIGNATRWGQEMVISVGDRLPEATLVRIGAEGPEQVQLSERLKGRNVVIFAVPGAFTPTCHSAHVPSFIRTKDQFAGKGVDEIICVSVNDPFVMKAWGESTGASGAGITMLADADGAFTKALGLAFDAPPVGLIGRSRRYALQAKDGVVAVIHLEESPGVCETSGGEALLAAI

SEQ ID NO: 21443 - protein, 161 aa, Rhodopseudomonas palustris
MTIKVGDRLPDAQFRVMTEDGVQVKTTDDIFKGKKVALFAVPGAYTGTCHKMHLPSIFLNAYAMKDKGVDTIAIVSVNDAFVMSAWKRDTDQRNEAIFLGDGNADFTKAIGMEMDGSGFGLGTRSLRYSMVVEDGVVKTLNLEPNPGKVEVSGGDTLLGQL

SEQ ID NO: 21444 - protein, 170 aa, Rhodospirillum rubrum
MSVTFGLWREFMIAVGDALPSGTLHHKTAAGIEAVDPAEFLGAGKAVLFAVPGAFTPTCSDSHVPGYIAQAQALRDKGVTKVACVAVNDAFVLAAWSKALGAEGTVEMLADGNGDYARALGLELDLTAKGLGKRFQRCALVLDNGKVTHLAVDEGGALDVSSAEAVLALL

SEQ ID NO: 21445 - protein, 168 aa, Ralstonia metallidurans
MIAIGQRVPDATLYEFFETESEGCVLGPNAFSVAELVKGRKIVVFGLPGAFTPTCSAKHVPSYLKEYDALRAAGVDEIWCHSVNDAFVMGAWGREQKATGKVRMMGDGAAQWARALGLDQDLSQRGLGVRAKRYAMVVDDGVVTHLFIEEPGEFKVSSAEWVLQALRA

SEQ ID NO: 21446 - protein, 245 aa, Neisseria meningitidis MC58
MALQDRTGQKVPSVVFRTRVGDTWKDVSTDDLFKGKKVVVFSLPGAFTPTCSSSHLPRYNELFGAFKENGVDAIYCVSVNDTFVMNAWAAEEESDNIYMIPDGNGEFTEGMGMLVGKEDLGFGKRSWRYSMLVNDGVVEKMFIEPEEPGDPFKVSDADTMLQFVAPDWKAQESVAIFTKPGCQFCAKAKQALQDKGLSYEEIVLGKDATVTSVRAITGKMTAPQVFIGGKYIGGSEDLEAYLAKN

SEQ ID NO: 21447 - protein, 202 aa, Burkholderia fungorum
MGDCRRAAERVVGFMPVFHCDTTTCERASHRCKGLSMIQTGDKLPDATLFELIEDERAGCTIGPNSFDVREQTAGKRVVIFGLPGAFTPTCSAKHVPGYVEHAGQLRALGIDEIWCVSVNDAFVMGAWGRDQHASGKVRMMADGSAAFTRALGLEQDLSARGMGIRSQRYAMVVDDGVVKTLNVEAAGNSKSAMQGYSRHVS

SEQ ID NO: 21448 - protein, 188 aa, Branchiostoma belcheri tsingtaunese
MLIPVTICSLARRLPSAIGARCAIYTATAYNMPIKVGDKLPGIDLYENTPGNKVNVSELFAGKKGVLFAVPGAFTPGCSKTHLPGYVGKAGDLKAKGVQVIACVSVNDPFVMEAWGKDQKAEGKVRMLADTGAEFTKAIGLDLDATGLLGNIRSKRYSMLVEDGEVKQLNVEPDGTGLTCSLAEGLKL

SEQ ID NO: 21449 - protein, 166 aa, Pseudomonas putida KT2440
MIKTGDQLPDVTLYQYNNDAGACAIGPKAFSIRERCKHKKVLIFALPGAFTPTCSERHVPGYVAAAPALFAAGIDEILCVSVNDAFVMNAWGNSLQVGDAVKMIGDGNGEFSEALGLTQDLSARGLGRRSQRYAMLVDDQVVQYIAVESPGKFEVSDAASLLAVLR

SEQ ID NO: 21450 - protein, 175 aa, Anopheles gambiae str. PEST
MFALILALHCVCCMFCCEWQCFAEGDKIPSIDLFEDSPANKVNMADLCAGKKVILFAVPGAFTPGCSKTHLPGYVEKAGDLKSSGATEIVCVSVNDPFVMSAWGKQHNATGKVRMLADPAAAFTKALELGADLPPLGGLRSKRYSMVLEDGVVKSLNVEPDGTGLSCSLADKIKL

SEQ ID NO: 21451 - protein, 153 aa, Anopheles gambiae str. PEST
LLQEGDKIPSIDLFEDSPANKVNMADLCAGKKVILFAVPGAFTPGCSKTHLPGYVEKAGDLKSSGATEIVCVSVNDPFVMSAWGKQHNATGKVRMLADPAAAFTKALELGADLPPLGGLRSKRYSMVLEDGVVKSLNVEPDGTGLSCSLADKI

SEQ ID NO: 21452 - protein, 150 aa, Anopheles gambiae str. PEST
LPAGEFTFITAEGKQQRDSQSLFGGKRVVLFAVPGAFTPTCSNAHLPGYVVLADKFKEKGVDAICCLSVNDAFVMKAWQDAQNAEAITMLADGDGSWTRALGLAKETGAFGGVRAQRFALIANDGVVEQLFVEAPGKFEVSDAQSLLAAL

SEQ ID NO: 21453 - protein, 161 aa, Agrobacterium tumefaciens str. C58 (Cereon)
MTIKIGEKLPSATFKEKTADGPVETTTDALFGGKKVVLFAVPGAFTPTCSLNHLPGYLENRDAILAKGVDDIAVVSVNDWHVMGAWAQSSGGQGKIHFLADWDASFTKALGLDADLSGGGLGVRSKRYSMLVEDGVVKSLNVEENPGQATVSAAAAMIEQL

SEQ ID NO: 21454 - protein, 160 aa, Xanthomonas campestris pv. campestris str. ATCC 33913
MTIQVGDRIPEVVLKHLREGIEAVDTHTLFTGRKVVLFAVPGAFTPTCSAKHLPGYVEQFEAFRKRGIEVLCTAVNDPFVMQAWGRSQLVPDGLHLVPDGNAELARALGLEIDASGSGMGLRSRRYALYADDGVVKALFVEEPGEFKVSAADYVLQHLPD

SEQ ID NO: 21455 - protein, 160 aa, Xanthomonas axonopodis pv. citri str. 306
MTIHVGDRIPEVVLKRLRDGIEAVDTHSLFAGRKVLLFAVPGAFTPTCSAKHLPGYVEHFEQFRKRGIEVLCTAVNDPFVMQAWGRSQLIPDGLHLLPDGNAELARALGLEIDASGSGMGLRSRRYALYADDAVVKALFVEEPGEFKVSAADYVLQHLPD

SEQ ID NO: 21456 - protein, 160 aa, Caulobacter crescentus CB15
MAIKVGDTLPAATFMTSTAEGPAPISTDDIFKGKTVALFAVPGAFTPTCSAKHLPGFKEKADELKAKGVDSIVCVSVNDVFVMKAWGKDQGIDGEVLLIADGNGDFTKAIGLDFDGSKFGMGARSQRYSLVAKDGVVTQLHVEDAGQFKVSSAEYLLEQL

SEQ ID NO: 21457 - protein, 99 aa, Coccidioides posadasii
GYIQKLPQLKEKGVDVVPVLAFNDAWVISAWGKANGVTGNDILFLSDPEVKFSKSIGWNPGKRTGRYAMIIDHGQVTYAEIKPGREVPVPGADPVISKL

SEQ ID NO: 21458 - protein, 161 aa, Brucella suis 1330
MTIKVGDRLPAATFKVKTADGVTEMTTDDVFKGRKVVLFAVPGAFTPTCSLNHLPGYLENRDAILAKGVDQIAVVAVNDPFVMGAWAQSTGGEGKILFLADGSATFTKAAGLDIDLSGGGLGVRSKRYSAIVEDGVVKSLNIEEQPGQAVTSAASALLAQL

SEQ ID NO: 21459 - protein, 240 aa, Haemophilus somnus 129PT
MTMEGKKVPQVTFRTRQGDQWVDVTTADLFDNKTVVLFSLPGAFTPTCSATHLPRYNELACEFKALGVDDIICVSVNDTFVMNAWKADQESENVTVIPDGNGEFTSGMGMLVDKTELGFGKRSWRYSMLVKNGVVEKMFIEPQEPGDPFKVSDADTMIKYLNPNWTEKPSVSIITKPGCPFCAKAKTLLKEKGYTFEEIILGRDASTISVRAITGKTSVPQVFIGGQYIGGSDDLAQYFA

SEQ ID NO: 21460 - protein, 158 aa, Shewanella oneidensis MR-1
MIAQGQKLPAATLSQLTKDGMVNHQVTELFAGKKVVLFAVPGAFTPTCSEAHLPGYVVLADELKAKGVDLIACVSVNDAFVMKAWGEAQNASELLMLADGDASFTKALGLEMDTAGFGGVRSQRYAMIIDNGVVTLLNVEAPKSFEVSKAEVVLAALS

SEQ ID NO: 21461 - protein, 243 aa, Yersinia pestis CO92
MFTSQEGKKVPQVTFHTRQGDQWIDVTTDDLFSNKTVIVFSLPGAFTPTCSSSHLPRYNELAGVFKQHGVDSILCVSVNDTFVMNAWKSDQHAENITFVPDGNGEFTKGMNMLVEKADLGFGPRSWRYSMLVRNGVVEKMFVEPNKPGDPFEVSDADTMLKYLAPDFKVQESVAVFTKPGCPFCAKAKQMLQDHGLQYEEIVLGKDATTVSLRAVSGRSTVPQIFIGGRHIGGSDDLEKYLPA

SEQ ID NO: 21462 - protein, 157 aa, Vibrio vulnificus CMCP6
MIAQGQTLPNATLSQLTKEGMVHHPVLELFAGKKVVLFAVPGAFTPTCSEAHLPGYIVLADQLKAKGVDLIACVSVNDAFVMKAWGEAQNAEEILMLADGDASFTKALGLEMDTAGFGGLRSQRYAMIIDNGVVTTLNVEAPKSFEVSNAETILAAL

SEQ ID NO: 21463 - protein, 157 aa, Vibrio parahaemolyticus RIMD 2210633
MIQQGQALPSATVSELTADGMVNHDVTELFANKKVVLFAVPGAFTPTCSEAHLPGYVVLADQLKAKGVDLIACVAVNDAFVMNAWGEAQNASEILMLGDGDASFTKALGLEMDTGGFGGVRSQRYAMIIENGVVTTLNVEKPSEFEVSNAETILAAL

SEQ ID NO: 21464 - protein, 242 aa, Vibrio parahaemolyticus RIMD 2210633
MFVSKEGQNVPQVTFPTRQGDTWVNVTSDDLFKGKTVIVFSLPGAFTPTCSSSHLPRYNELFPVFKEHGVDEILCISVNDAFVMNAWKHDQEAEHITFIPDGNGEFTDGMGMLVDKNDIGFGKRSWRYSMLVKDGVIEKMFIEPNEPGDPFKVSDADTMLNYIAPEYRTQESITVFTKPGCPFCMKAKQNLIDHGLQYEEVILGKDATSVSLRAITGRTTVPQVFIGGKHIGGSEELETYLG

SEQ ID NO: 21465 - protein, 161 aa, Bradyrhizobium japonicum USDA 110
MAIQTGDKLPEAKFRVMTAEGPQVKTTDDIFKGKKVALFAVPGAYTGTCHKMHLPSIFLNAYAIKDKGVDTIAIISVNDAFVMNAWKRDTDQRDEAVFLADGNADFTKAIGMELDASANGLGIRSKRYSMLVEDGVVKKLNLEAMPGKVEVSGGDTLLGQL

SEQ ID NO: 21466 - protein, 191 aa, Brucella melitensis 16M
MLRHGKSKVSHKQQADQTAISIRPALRRKSMTIKVGDRLPAATFKVKTADGVTEMTTDDVFKGRKVVLFAVPGAFTPTCSLNHLPGYLENRDAILAKGVDQIAVVAVNDPFVMGAWAQSTGGEGKILFLADGSATFTKAAGLDIDLSGGGLGVRSKRYSAIVEDGVVKSLNIEEQPGQAVTSAASALLAQL

SEQ ID NO: 21467 - protein, 166 aa, Ralstonia solanacearum
MIQPGQPLPDATLYEYFEVEKDGCALGPNAFSAADLAQGKTILIFGLPGAFTPTCSARHVPGYLAHYDALRTKGVDEIWCVSVNDAFVMGAWARAQGTDGRVRMLADGSAEFTRRLGLEQDLSKRGMGVRSQRYAMIVKNGVVTVLQVEAPGQFAVSNAESMLARL

SEQ ID NO: 21468 - protein, 166 aa, Lipomyces kononenkoae
VTDKFPEDVKFLYIAYTPAKADITACGIPIPLDFDKEFRDKTVVIVAIPGAFTPTCTANHIPPFVEKFTALKSAGVDAVIVLSANDPFVQSAFGKALGVTDEAFIFASDPGAEFSKSAGLSLDLPPAFGTRTARYAIIVSNGVVKYVEKDSEGVAGSGVDAVLAAL

SEQ ID NO: 21469 - protein, 162 aa, Arabidopsis thaliana
MAPITVGDVVPDGTISFFDENDQLQTVSVHSIAAGKKVILFGVPGAFTPTCSMSHVPGFIGKAEELKSKGIDEIICFSVNDPFVMKAWGKTYPENKHVKFVADGSGEYTHLLGLELDLKDKGSGISSGRFALLLDNLKVTVANVESGGEFTVSSAEDILKAL

SEQ ID NO: 21470 - protein, 162 aa, Arabidopsis thaliana
MAPITVGDVVPDGTISFFDENDQLQTVSVHSIAAGKKVILFGVPGAFTPTCSMSHVPGFIGKAEELKSKGIDEIICFSVNDPFVMKAWGKTYQENKHVKFVADGSGEYTHLLGLELDLKDKGLGIRSRRFALLLDNLKVTVANVENGGEFTVSSAEDILKAL

SEQ ID NO: 21471 - protein, 162 aa, Arabidopsis thaliana
MAPITVGDVVPDGTISFFDENDQLQTVSVHSIAAGKKVILFGVPGAFTPTCSMSHVPGFIGKAEELKSKGIDEIICFSVNDPFVMKAWGKTYPENKHVKFVADGSGEYTHLLGLELDLKDKGLGIRSRRFALLLDNLKVTVANVESGGEFTVSSAEDILKAL

SEQ ID NO: 21472 - protein, 162 aa, Arabidopsis thaliana
MAPITVGDVVPDGTISFFDENDQLQTVSVHSIAAGKKVILFGVPGAFTPTCSMSHVPGFIGKAEELKSKVIDEIICFSVNDPFVMKAWGKTYTENKHVKFVADGSGEYTHLLGLELDLKDKGLGIRSRRFALLLDNLKVTVANVENGGEFTVSSAEDILKAL

SEQ ID NO: 21473 - protein, 162 aa, Arabidopsis thaliana
MAPIAVGDVVPDGTISFFDENDQLQTASVHSLAAGKKVILFGVPGAFTPTCSMKHVPGFIEKAEELKSKGVDEIICFSVNDPFVMKAWGKTYPENKHVKFVADGSGEYTHLLGLELDLKDKGLGVRSRRFALLLDDLKVTVANVESGGEFTVSSADDILKAL

SEQ ID NO: 21474 - protein, 162 aa, Arabidopsis thaliana
MAPIAVGDVVPDGTISFFDENDQLQTVSVHSLAAGKKVILFGVPGAFTPTCSMKHVPGFIEKAEELKSKGVDDIICFSVNDPFLMKAWGKTYPENKHVKFVADGSGEYTHLLGLELDLKDKGLGIRSRRFALLLDNLKVTVANLESGGGFTVSSADDILEAL

SEQ ID NO: 21475 - protein, 201 aa, Arabidopsis thaliana
MAMSILKLRNLSALRSAANSARIGVSSRGFSKLAEGTDITSAAPGVSLQKARSWDEGVSSKFSTTPLSDIFKGKKVVIFGLPGAYTGVCSQQHVPSYKSHIDKFKAKGIDSVICVSVNDPFAINGWAEKLGAKDAIEFYGDFDGKFHKSLGLDKDLSAALLGPRSERWSAYVEDGKVKAVNVEEAPSDFKVTGAEVILGQI

SEQ ID NO: 21476 - protein, 201 aa, Arabidopsis thaliana
MAMSILKLRNLSALRAAANSARIGVSSRGFSKLAEGTDITSAAPGVSLQKARSWDEGVSSKFSTTPLSDIFKGKKVVIFGLPGAYTGVCSQQHVPSYKSHIDKFKAKGIDSVICVSVNDPFAINGWAEKLGAKDAIEFYGDFDGKFHKSLGLDKDLSAALLGPRSERWSAYVEDGKVKAVNVEEAPSDFKVTGAEVILGQI

SEQ ID NO: 21477 - protein, 199 aa, Arabidopsis thaliana
MSILKLRNLSALRSAANSARIGVSSRGFSKLAEGTDITSAAPGVSLQKARSWDEGVSSKFSTTPLSDIFKGKKVVIFGLPGAYTGVCSQQHVPSYKSHIDKFKAKGIDSVICVSVNDPFAINGWAEKLGAKDAIEFYGDFDGKFHKSLGLDKDLSAALLGPRSERWSAYVEDGKVKAVNVEEAPSDFKVTGAEVILGQI

SEQ ID NO: 21478 - protein, 234 aa, Arabidopsis thaliana
MATSLSVSRFMSSSATVISVAKPLLSPTVSFTAPLSFTRSLAPNLSLKFRNRRTNSASATTRSFATTPVTASISVGDKLPDSTLSYLDPSTGDVKTVTVSSLTAGKKTILFAVPGAFTPTCSQKHVPGFVSKVGELRSKGIDVIACISVNDAFVMEAWRKDLGINDEVMLLSDGNGEFTGKLGVELDLRDKPVGLGVRSRRYAILADDGVVKVLNLEEGGAFTNSSAEDMLKAL

SEQ ID NO: 21479 - protein, 234 aa, Arabidopsis thaliana
MATSLSVSRFMSSSATVISVAKPLLSPTVSFTAPLSFTRSLAPNLSLKFRNRRTNSASATTRSFATTPVTASISVGDKLPDSTLSYLDPSTGDVKTVTVSSLTAGKKTILFAVPGAFTPTCSQKHVPGFVSKAGELRSKGIDVIACISVNDAFVMEAWRKDLGINDEVMLLSDGNGEFTGKLGVELDLRDKPVGLGVRSRRYAILADDGVVKVLNLEEGGAFTNSSAEDMLKAL

SEQ ID NO: 21480 - protein, 164 aa, Arabidopsis thaliana
MAPITVGDVVPDGTISFFDENDQLQTVSVHSIAAADGFLDFDLRIGVFGFSEVSMSHVPGFIGKAEELKSKGIDEIICFSVNDPFVMKAWGKTYQENKHVKFVADGSGEYTHLLGLELDLKDKGLGIRSRRFALLLDNLKVTVANVENGGEFTVSSAEDILKAL

SEQ ID NO: 21481 - protein, 553 aa, Arabidopsis thaliana
MAPIDVGDFVPDGSISFFDDDDQLQTVSVHSLAAGKKVILFGVPGAFPPTCSMNHVNGFIEKAEELKSNGVDEIICLSGDDPFMITACSENKHVKFVEDGSGEYIQLLGLELEVKDKGLGVRSRGFALLLDNLKVIVVNVGSGGDCSLFQLMKMTTTTMSNLPTDLLEEIISRVPRKYMRAVRLTCKRWNGMFKSQSFTKMHIGKEEAATRELRQTRMIVMMDYNVYLMGIAVNEIPSIETLGKLTCLDDSEQVKISQVFCCEGLLLCILKDDDTKIVVWNPYLGQTRWIQTRLICCVSGWKKYALGYGNNSENRSCRSPKILRVTDNFNIFSENIPLQYEIYDFDSDVWTTLDVSPHWFIMSERGLSLKGNTYWGAKERHAYGSIDHIICFDFTRERFGPLLPLPFSAWGAQFASLSSVREDKITALFQNCRAYKLELWITTKIDVNNATWSKFFTMDTPYLHEILSLKTFFIDEENKIVVVSNKERDTKGDLTHDSIDIINGEARCLWKLGLGKPADKNCWPLVCPYVPSVVQIKQHKGGKTKEQSDYKRH

SEQ ID NO: 21482 - protein, 160 aa, Mesorhizobium loti
MTISVGDKLPEATFKTMTADGAKAITSAEIFPGKKVVLFGVPGAFTPTCSNNHLPGYLENHDAILARGVDTIAVVSVNDVHVMGAWARFTGGEDKILFLADGSADFAKAVGLDNDLSAGGMGLRSKRFSMIVDDGKVTALNIETKPGVDESGAAHILGQL

SEQ ID NO: 21483 - protein, 182 aa, Mesorhizobium loti
MTVKKKVPFVTFRTRVRDESIEGPNPYRWEDKTSDDYFSGKRIILFSLPGAFTPTCSTLQLPDFEMLYDEFEKEGIDAIYCVSVNDAFVMNAWGKALGLKKVQLIPDGSGEFTRKMGMLVAKDNLGFGMRSWRYAAVINNGVVEQCFEENGFCDNSEADPYGVSSPQNVLETLRAAKAVTAA

SEQ ID NO: 21484 - protein, 182 aa, Mesorhizobium loti
MTVKKKVPFVTFRTRVRDDSIEGPNPYRWEDKTSDDYFRGKRIILFSLPGAFTPTCSTLQLPDFEMLYDEFEKEGIDAIYCVSVNDAFVMNAWGKALGLQKVQLIPDGSGEFTRKMGMLVAKDNLGFGMRSWRYAAVINNGVVEQWFEEDGFCDNCEADPYGVSSPQNVLETLRAAKAVTAA

SEQ ID NO: 21485 - protein, 161 aa, Sinorhizobium meliloti
MTIAVGDKLPNATFKEKTADGPVEVTTELLFKGKRVVLFAVPGAFTPTCSLNHLPGYLENRDAILARGVDDIAVVAVNDLHVMGAWATHSGGMGKIHFLSDWNAAFTKAIGMEIDLSAGTLGIRSKRYSMLVEDGVVKALNIEESPGQATASGAAAMLELL

SEQ ID NO: 21486 - protein, 162 aa, Glycine max
MAPIGVGSTLPDGQLAWFDESDQMQQVSIHSLAAGKKVILFGVPGAFTPTCSNQHVPGFITQAEELKAKGVDEILLVSVNDPFVMKAWAKTYPDNKHVKFLADGAAAYTKALGLELDLTEKGLGLRSRRFALLADDLKVTVANVEEGGQFTISGAEEILKAL

SEQ ID NO: 21487 - protein, 163 aa, Glycine max
  unsure (1)..(163): unsure at all Xaa locations
MAPIAVGDVIPDGILAYLDEENKPQTVSIHSLAAGKKVIIFGVPGAFTPTCSLKHVPGFIERAEELKGKGVDEIICISVNDPFVMKXSWAKTFPENKHVKFLADGAAKYTHALGLELDLTDKGLGVRSKRFALLVEDLKVKVANVESGGEFTISSAEEIIKAL

SEQ ID NO: 21488 - protein, 238 aa, Glycine max
  unsure (1)..(238): unsure at all Xaa locations
EEVRKHNTNFIAECYFEYQHQCAPIAVGNVIPDGILAYLDEENKPQTVSIHSLATGKKVIIFGVPXGAFTPTCSLKHVPGFIERAEELKGKGVDEIICISVNDPFVMNSWAKXTFPENKHVKFLADGAAKYTHALGLELDLTDKGLGVRSKRFALLVEDLKVKVANVESGGEFTISSAEEIMQGPLKPLNPLVGCLTVFNVWCETLLMQEYTRNIFLFIDVIVLCALGRAMIWCILWK

SEQ ID NO: 21489 - protein, 163 aa, Glycine max
MAPIAVGNVIPDGILAYLDEENKPQTVSIHSLATGKKVIIFGVPGAFTPTCSLKHVPGFIERAEELKGKGVDEIICISVNDPFVMNSWAKTFPENKHVKFLADGAAKYTNALGLELDLTDKGLGVRSKRFALLVEDLKVMVAWIIGSRVLYFGCAKHLLQNFV

SEQ ID NO: 21490 - protein, 172 aa, Glycine max
  unsure (1)..(172): unsure at all Xaa locations
MAPIAVGDVIPDGILAYLDEENKPQTVSIHSLAAGKKVIIFGVPGAFTPTCSLKHVPGFIERAEELKGKGVDEIICISVNDPFVMNSWAKTFPENKHVKFLANGGGEFTISSAEEIIKALXTLESSCLLFCRLXCVXVTLLMPEHTRILSLFIDVIVLCALERTMIWCILWK

SEQ ID NO: 21491 - protein, 118 aa, Glycine max
  unsure (1)..(118): unsure at all Xaa locations
MAPIAVGDVVPEGTISFFDENDQLQSASVHTLAAGKKVILFGVPGAFTPTCSMQHVPGFIEKAEELKSKGVDEIICFSVNDPFVMKAWGKTYPENKHVKFVADGSGEYTQLLGLELDX

SEQ ID NO: 21492 - protein, 193 aa, Glycine max
  unsure (1)..(193): unsure at all Xaa locations
MASALARRAGGSPAAALWAAARGFASVGSDIVSAAPGVSLQKARSWDEGVATKFSTTPLKDIFHGKKVVIFGLPGAYTGVCSQSHVPSYKNNIDKLKAKGIDSVICVAVNDPYVLNGWAEKLQAKDAIEFYGDLDGSFHKSLDLEIDLSAALLGXRSHRWSAFVDDGKIKAFNVEKAPSDFKVSGAEVILDQI

SEQ ID NO: 21493 - protein, 249 aa, Glycine max
  unsure (1)..(249): unsure at all Xaa locations
GLPILFILHSSLFTPNPSQTQTIHSFSSVTHLTMAASITLSRLVSSTLTTASFFPPITLPSKLSSLRLPTRRXXPKPLRFSSSTITATISVGDKLPEATFSYLDSSGEVQTTTVSELTKGKKAVLFAVPGAFTPTCSQKHVPGFVEKSGELRAKGIDTIACISVNDAFVMKAWKEDLKVNEEVLLLSDGNGTFTKAIGVELDLSDKPVGLGVRSRRYALLAEDGVVKLFNLEEGGAFTFSGAQDILDVL

SEQ ID NO: 21494 - protein, 128 aa, Glycine max
  unsure (1)..(128): unsure at all Xaa locations
XKKVIIFGVPGAFPPTYSFKHVPGFFXKPKKLKGKGVDQIICIRGNDPFVKNSWAKTFPKNKHVKFLADGAAKNTNALGFELDLPHKGLGVRSKRFALLVEPPKVKVANVXSGGKFPLSSAEKIIKAL

SEQ ID NO: 21495 - protein, 201 aa, Glycine max
  unsure (1)..(201): unsure at all Xaa locations
KFVMASAMVNRGGSRIIKSVSAAXXGTRFYAKVATGTDIVSAAPNVSLQKARTWDEGLASKFSTTPLKDIFKDKKVVIFGLPGAYTGVCSNKHVPPYKENIDKFKAKGIDSVICVAINDPYTMNAWAEKLQAKDAIEFYGDFDGSFHKSLELVTDLSGALLGTRSERWSAYVVDGKVKALNVEEAPSDVKVSGADTILGQI

SEQ ID NO: 21496 - protein, 203 aa, Glycine max
  unsure (1)..(203): unsure at all Xaa locations
PGDLVMASVMANRGGSRIIKSVSAAXXGTRFFAKVATGTDIVSAAPNASLQKARTWDEGLASKFSTTPLKDIFKDKKVVIFGLPGAYTGVCSNKHVPPYKENIDKFKAKGIDSVICVAINDPYTMNAWAEKLQAKDAIEFYGDFDGSFHKSLELVTDLSGALLGTRSERWSAYVVDGKVKALNVEEAPSDVKVSGADTILGQI

SEQ ID NO: 21497 - protein, 198 aa, Oryza sativa (japonica cultivar-group)
MASALLRKATVGGSAAAAAARWASRGLASVGSGSDIVSAAPGVSLQKARSWDEGVATNFSTTPLKDIFHGKKVVIFGLPGAYTGVCSQAHVPSYKNNIDKLKAKGVDSVICVSVNDPYALNGWAEKLQAKDAIEFYGDFDGSFHKSLDLEVDLSAALLGRRSHRWSAFVDDGKIKAFNVEVAPSDFKVSGAEVILDQI

SEQ ID NO: 21498 - protein, 225 aa, Oryza sativa (japonica cultivar-group)
MAAPTAAALSTLSTASVTSGKRFITSSFSLSFSSRPLATGVRAAGARAARRSAASASTVVATIAVGDKLPDATLSYFDPADGELKTVTVAELTAGRKAVLFAVPGAFTPTCSQKHLPGFIEKAGELHAKGVDAIACVSVNDAFVMRAWKESLGLGDADVLLLSDGNLELTRALGVEMDLSDKPMGLGVRSRRYALLADDGVVKVLNLEEGGAFTTSSAEEMLKAL

SEQ ID NO: 21499 - protein, 162 aa, Capsicum annuum
MAPIAVGDVIPDGTVSYFDEQDQLQSVSVHSLAKGKKVIMFAVPGAFTPTCSTKHVPGFIEKADLLKSKGVEEILCVSVNDPFVMKAWAKTFPENKHVKFLADGAGKYTHALGLELDLSEKGLGVRSRRYALLVDDLKVKVANVESGGEFTVSGADEILKAL

SEQ ID NO: 21500 - protein, 162 aa, Oryza sativa
MAPVAVGDTLPDGQLGWFDGEDKLQQVSVHGLAAGKKVVLFGVPGAFTPTCSNQHVPGFINQAEQLKAKGVDDILLVSVNDPFVMKAWAKSYPENKHVKFLADGLGTYTKALGLELDLSEKGLGIRSRRFALLADNLKVTVANIEEGGQFTISGAEEILKAL

SEQ ID NO: 21501 - protein, 162 aa, Oryza sativa; identical to SEQ ID NO: 21500

SEQ ID NO: 21502 - protein, 162 aa, Oryza sativa; identical to SEQ ID NO: 21500

SEQ ID NO: 21503 - protein, 198 aa, Oryza sativa; identical to SEQ ID NO: 21497

SEQ ID NO: 21504 - protein, 225 aa, Oryza sativa
MAAAASTLASLSATAAAAAGKRLLLSSPSRSLSLSPVMPHLRAGILSAAPRRAVSASAPAAATIAVGDKLPDATLSYFDSPDGELKTVTVRDLTAGKKVVLFAVPGAFTPTCTQKHVPGFVAKAGELRAKGVDAVACVSVNDAFVMRAWKESLGVGDEVLLLSDGNGELARAMGVELDLSDKPAGLGVRSRRYALLAEDGVVKVLNLEEGGAFTTSSAEEMLKAL

SEQ ID NO: 21505 - protein, 226 aa, Oryza sativa
  unsure (1)..(226): unsure at all Xaa locations
MAAPTAAALSTLSTASVTSGKRFITSSFSLSFSSRPLATGVRAAGARAARRSAASASTVVATIAVGDKLPDATLSYFDPADGELKTVTVAELTAGRKAVLFAVPGAFTPTCSQKHLPGFIEKAGELHAKGVDAIACVSVNDAFVMRAWKESLGLGDADVLLLSDGNLELTRXALGVEMDLSDKPMGLGVRSRRYALLADDGVVKVLNLEEGGAFTTSSAEEMLKAL

SEQ ID NO: 21506 - protein, 167 aa, Triticum aestivum
  unsure (1)..(167): unsure at all Xaa locations
MPELKVGADFPEGVFFSYVQPTPEIAEFSTCGAPTNYNASQEFKSKKVVLISVPGAFTPTCSASHVPSYVENIEQIKAKGVDQVIVVAVNDAFVMHGWAKANGITDDKILFMSDHNAKFSTSIGWNLGERTGRFAVVIDHGKITYASSXXEPGSIEKSGALGVLPHL

SEQ ID NO: 21507 - protein, 162 aa, Triticum aestivum
MAPIGVGSTLPDGQLAWFDENDQMQQVSIHSLAAGKKVILFGVPGAFTPTCSNQHVPGFITQAEELKAKGVDEILLVSVNDPFVMKAWAKTYPDNKHVKFLADGAAAYTKALGLELDLTEKGLGLRSRRFALLADDLKVTVANVEEGGQFTISGAEEILKAL

SEQ ID NO: 21508 - protein, 162 aa, Triticum aestivum; identical to SEQ ID NO: 21486

SEQ ID NO: 21509 - protein, 123 aa, Triticum aestivum
  unsure (1)..(123): unsure at all Xaa locations
MAPIAVGNVIPDGILAYLDEENKPQTVSIHSLATGKKVIIFGVPGAFTPTCSLKHVPGFIERAEELKGKGVDEIIXISVNDPFVMNSWAKTFPENKHVKFLADGAAKYTNALGLELDLTDKGL

SEQ ID NO: 21510 - protein, 241 aa, Triticum aestivum
MADSPPVHPVTGKKTYSAAPSRAPSQLSSAARQRNPIQDNNTHSQPSVAMAALARRAGGSPAAALWAAARGFASVGSDIVSAAPGVSLQKARSWDEGVATKFSTTPLKDIFHGKKVVIFGLPGAYTGVCSQSHVPSYKNNIDKLKAKGIDSVICVAVNDPYVLNGWAEKLQAKDAIEFYGDLDGSFHKSLDLEIDLSAALLGRRSHRWSAFVDDGKIKAFNVEKAPSDFKVSGAEVILDQI

SEQ ID NO: 21511 - protein, 232 aa, Triticum aestivum
  unsure (1)..(232): unsure at all Xaa locations
PPSMATSALATLSATAAAAGARRVLLSRGPASSLSFASRRLAPAASAPGPCPARRRGSXSATASPAATTTIAVGDRLPDATLSYFDAPDGELKMVTVRDLTAGKKVVLFAVPGAFTPTCTQKHLPGFVARAGELRAKGVDTVACVSVNDAFVMRAWKESLGVGDEVLLLSDGNGELTRAMGVELDLSDKPVGLGVRSRRYALLADDGVVKVLNLEEGGAFTNSSAEDMLKAL

SEQ ID NO: 21512 - protein, 251 aa, Triticum aestivum
  unsure (1)..(251): unsure at all Xaa locations
TPPPRSSQGRTDSISSNTSPRPSSMATASLSALSSAAAAAGKRFVISSPSLSFASRRIAAPARLRAAAVPGARRFAASAASASTVVATIAVGDKLPDATLSYFDPADGELKTVTVGELTAGKKVVLFAVPGAFTPTCSQKHLPGFIEKAGELRAKGVDTVACVSVNDAFVMKAWKESLGLGXXDVQLLSDGNLELTRALGVEMDLSDKPMGLGVRSRRYALLADDGVVKVLNLEEGGAFTTSSAEEMLKAL

SEQ ID NO: 21513 - protein, 218 aa, Triticum aestivum
  unsure (1)..(218): unsure at all Xaa locations
LPNIAQQLSTCTHSNRTIYLTNRLNTHLAMSLRAPLRRVAFARPTSSIAVAARSFHSTPRASVRVGQEIPNTDVLLEDSPGNKVNLAEEFKTSNGYIVGVPAAFSGTCSSKHIPSYINHPKLKQAGQVFVVSVNDPFVMKAWSDQLDPAKRIRFLGDPTGEFTKALDLGFEAYAVFGGMRGKRYALKVEDGKVSKAYVEPDNTGSAVSMADQVLDXVL

SEQ ID NO: 21514 - protein, 167 aa, Zea mays; identical to SEQ ID NO: 21506
  unsure (1)..(167): unsure at all Xaa locations

SEQ ID NO: 21515 - protein, 162 aa, Zea mays; identical to SEQ ID NO: 21486

SEQ ID NO: 21516 - protein, 162 aa, Zea mays
MAPIAVGDALPDGQLGWFDENDQLQQVSVHALAAGKKVILFGVPGAFTPTCSNQHVPGFITQAEQLKAKGVDEILLISVNDPFVMKAWAKTYPENKHVKFLADGSGAYTKALDLELDLTDKGLGVRSKRFALLADDLTVTVANIEEGGQFTISGAEEILKAL

SEQ ID NO: 21517 - protein, 162 aa, Zea mays; identical to SEQ ID NO: 21516

SEQ ID NO: 21518 - protein, 163 aa, Zea mays
  unsure (1)..(163): unsure at all Xaa locations
MAPIAVGDALPDGQLGWFDENDQLQQVSVHALAAGKKVILFGVPGAFTPTCSNQHVPGFITQAEQLKAKGVDEILLISVNDPFVMKAWAKTYPENKHVKFLADGSGAYTKALDLELDLTDKGXLGVRSKRFALLADDLTVTVANIEEGGQFTISGAEEILKAL

SEQ ID NO: 21519 - protein, 193 aa, Zea mays
MAATLARRAGRSAATTLWGAARGFASVGSDIVSAAPGVSLQKARSWDEGVATKFSTTPLKDIFYGKKVVIFGLPGAYTGVCSQAHVPSYKKNIDKLKAKGIDSVICVAVNDPYVLDGWAKKLDAKDTIEFYGDFDGSFHKSLDLEIDLSAALLGRRSHRWSAFVDDGKIKSFNVEEAPSDFKVSGAEVILDQI

SEQ ID NO: 21520 - protein, 248 aa, Zea mays
IQKPPAPGQFLDRIATHPISMATSALAALSATAAAAGKRILLSRPASSSSLSFASRRLAAGVLGAPIRAVASSASAAPAAAAKTIAVGDRLPDATLSYFDTSSPDGELKTVTVRDLTAGKKVVLFAVPGAFTPTCTQKHLPGFVAKAGELRAKGVDTVACVSVNDAFVMRAWKESLGIGDEVLLLSDGNGELARAMGVELDLSDKPVGLGVRSRRYALLAEDGVVKVINLEEGGAFTNSSAEDMLNAL

SEQ ID NO: 21521 - protein, 161 aa, Zea mays
  unsure (1)..(161): unsure at all Xaa locations
XKXIQKPPAPGQFLDRIATHPISMAIRDLTAGKKVVLFAVPGAFTPTCTQKHLPGFVAKAGELRAKGVDTVACVSVNDAFVMRAWKESLGIGDEVLLLSDGNGELARAMGVELDLSDKPVGLGVRSRRYALLAEDGVVKVINLEEGGAFTNSSAEDMLNAL

SEQ ID NO: 21522 - protein, 291 aa, Zea mays
  unsure (1)..(291): unsure at all Xaa locations
IQKPPAPGQFLDRIATHPISMATSALAALSATAAAAGKRILLSRPASSSSLSFASRRLAAGVLGAPIRAVASSASAAPAAAAKTIAVGDRLPDATLSYFDTSSPDGELKTVTVRDLTAGKKVVLFAVPGAFTPTCTQKHLPGFVAKXAGELRAKGVDTVACVSVNDAFVMRAWKESLGIGDEVLLLSDGNGELARAMGVELDLSDKPVGLGVRSRRYALLAEDGVVKVINLEEGGAFTNSSAEDMLNAQLNSRRHGWFVSSGKSWFLFPENNRDGNGGLCYCRHCCDRRCY

SEQ ID NO: 21523 - protein, 193 aa, Zea mays
  unsure (1)..(193): unsure at all Xaa locations
XRPSRHPPHLHXXTSALAALSAPAAAAKTIAVGDRLPDATLSYFDTSSPDGELKTVTVRDLTAGKKVVLFAVPGAFTPTCTQKHLPGFVAKAGELRAKGVDTVACVSVNDAFVLFAWKESLGIGDEVLLLSDGNGELARAMGVELDLSDKPVGLGVRSRRYALLAEDGVVKVINLGEGGAFTNSSAEDMLNAL

SEQ ID NO: 21524 - protein, 128 aa, Zea mays
  unsure (1)..(128): unsure at all Xaa locations
MAPIAVGDVVPDGTISFFDENDQLQTASVHSLAAGKKVILFGVXXGAFXSTCSMKHVPGFIEKAEELKSKGVDEIICFSVNDPFVMKAWGKTYPENKHVKFVADGSGEYTHLLGLELDLKDKGLGVRX

SEQ ID NO: 21525 - protein, 196 aa, Zea mays
  unsure (1)..(196): unsure at all Xaa locations
MAATLARRAGRSAATTLWGAARGFASVGSDIVSAAPGVSLQKARSWDEGVATKFSTTPLKDIFYGKKVVIFGLPGAYTGVCSQAHVPSYKKNIDKLKAKGIDSVICVAVNDPYVLDGWAKKLDAKDTIEFYGDFDGSFHKSLDLEIDLSAALLGRRSHRLXWTQLAXDYQTAAFILQLXRIVLCSLILSYLSHCLI

SEQ ID NO: 21526 - protein, 162 aa, Populus tremula x Populus tremuloides
MAPIAVGDVLPDGKLAYFDEQDQLQEVSVHSLVAGKKVILFGVPGAFTPTCSLKHVPGFIEKAGELKSKGVTEILCISVNDPFVMKAWAKSYPENKHVKFLADGSATYTHALGLELDLQEKGLGTRSRRFALLVDDLKVKAANIEGGGEFTVSSAEDILKDL

SEQ ID NO: 21527 - protein, 159 aa, Novosphingobium aromaticivorans
MTIAVGDKLPDVKIVKATAEGPEAVQSAEYFKGKKVALFSVPGAFTPTCSAKHLPGYVEKAADLKAKGIDEVACTAVNDPFVMKAWGAANGSSDVTMLADGNGDLAEALGLTMDGSGFGLGKRGQRFSMVVNDGVVEQLFVEAPGDFKVSSAEHMLENL

SEQ ID NO: 21528 - protein, 156 aa, Schizosaccharomyces pombe
MVAVGSTLPKVTLWENKPEEVVEFPSQGKFIIVGVPGAFTPPCSSQVPGYIANEKQFAAKGISGIYVVAVNDVFVTKAWKKSFDGGEQSGVHFVADWNGEFTKAFDAGFDASGLLGPLRSKRYAAVVENGKVVKVFIENEVTDVDISSADKVLSSL

SEQ ID NO: 21529 - protein, 156 aa, Schizosaccharomyces pombe
MVAVGSTLPKVTLWENKPEKVVEFPSQGKFIIVGVPGAFTPPCSSQVPGYIANEKQFAAKGISGIYVVAVNDVFVTKAWKKSFDGGEQSGVHFVADWNGEFTKAFDAGFDASGLLGPLRSKRYAAVVENGKVVKVFIENEVTDVDISSADKVLSSL

SEQ ID NO: 21530 - protein, 167 aa, Penicillium citrinum
MSLKAGDSFPEGVTFSYIPWAEDASEITSCGIPINYNASKEFANKKVVLFALPGAFTPVCSANHVPEYIQKLPELRAKGVDQVAVLAYNDAYVMSAWGKANGVTGDDILFLSDPEAKFSKSIGWADEEGRTYRYVLVIDNGKIIYAAKEAAKNSLELSRADHVLKQL

SEQ ID NO: 21531 - protein, 168 aa, Aspergillus fumigatus
MSGLKAGDSFPSDVVFSYIPWSEDKGEITACGIPINYNASKEWADKKVILFALPGAFTPVCSARHVPEYIEKLPEIRAKGVDVVAVLAYNDAYVMSAWGKANQVTGDDILFLSDPDARFSKSIGWADEEGRTKRYALVIDHGKITYAALEPAKNHLEFSSAETVLKHL

SEQ ID NO: 21532 - protein, 162 aa, Brassica rapa subsp. pekinensis
MAPIAVGDVVPDGSISFFDENDQLQTVSVHSLAAGKKVILFGVPGAFTPTCSMKHVPGFIEKAEELKSKGVDEIICFSVNDPFVMKAWGKTYPENKHVKFVADGSGEYTKLLGLELDLKDKGLGVRSRRFALLIDNLKVTVANVESGGEFTVSSADDILKAL

SEQ ID NO: 21533 - protein, 138 aa, Neurospora crassa
MSALKAGDSFPEAFANKKVVLVAVPGAFTPTCQQQHVPSYLAKLEEFKSKGVDQIIFIASNDAWVMAAWGKANGVKDESILFMSDADCKFSKSIGWTQGDRTKRYAIVIDHGKVTYAELDEVPKSIANTGADGVLAKL

SEQ ID NO: 21534 - protein, 196 aa, Neurospora crassa
MFARTALRATASASPIARVSASAAPVAAASRFFSSSPARLVKIGELLPEGELLQEGSPGNKVDLRKEAESARNMLIIGVPAAFSPACSASHIPSYIQHPKTQEFDVKAVVSVNDAFVMKAWKENLDPAGESGIRFLADPSGSFTKALDLTFDSKAIFGNDRSKRYAMIVEDGKVTKIAVEPDNTGTAVSLADKVLG

SEQ ID NO: 21535 - protein, 167 aa, Candida boidinii
MAPIKRGDRFPTTDDVYYIPPEGGEPGPLELSKFVKTKKFVVVSVPGAFTPPCTEQHLPGYIKNLPRILSKGVDFVLVISQNDPFVLKGWKKELGAADAKKLVFVSDPNLKLTKKLGSTIDLSAIGLGTRSGRLALIVNRSGIVEYAAIENGGEVDVSTAQKIIAKL

SEQ ID NO: 21536 - protein, 167 aa, Candida boidinii
MAPIKRGDRFPTTDDVYYIPPEGGEPGAFELSKFVKTKKFVVVSVPGAFTPPCTEQHLPGYIKNLPRILSKGVDFVLVITQNDPFVLKGWKKELGAADARKLIFVSDPNLKLTKKLGSTIDLSSIGLGTRSGRLALIVNRSGIVEYAAIENGGEVDVSTAQKIIAKL

SEQ ID NO: 21537 - protein, 167 aa, Candida boidinii
MAPIKRGDRFPTTDDVYYIPPEGGEPGAFELSKFVKTKKFVVVSVPGAFTPPCTEQHLPGYIKNLPRILSKGVDFVLVITQNDPFVLKGWKKELGAADAKKLIFVSDPNLKLTKKLGSTIDLSSIGLGTRSGRLALIVNRSGIVEYAAIENGGEVDVSTAQKIIAKL

SEQ ID NO: 21538 - protein, 166 aa, Malassezia furfur
EIGSTIPNATFAYVPYSPELEDHKVCGMPTSFQSHERWKGKKVVIVAVPGAFTPTCTANHVPPYVEKIQELKSKGVDEVVVISANDPFVLSAWGITEHAKDNLTFAQDVNCEFSKHFNATLDLSSKGMGLRTARYALIANDLKVEYFGYDEGEPKQSSAATVLSKL

SEQ ID NO: 21539 - protein, 166 aa, Malassezia furfur
EIGSTIPNATFAYVPYSPELEDHKVCGMPTSFQSHERWKGKKVVIVAVPGAFTPTCTANHVPPYVEKIQELKSKGVDEVVVISANDPFVLSAWGITEHAKDNLTFAQDVNCEFSKHFNATLDLSSKGMGLRTARYALIANDLKVEYFGIDEGEPKQSSAATVLSKL

SEQ ID NO: 21540 - protein, 177 aa, Malassezia furfur
MPGDPTATAKGNEIPDTLMGYIPWTPELDSGEVCGIPTTFKTRDEWKGKKVVIVSIPGAYTPICHQQHIPPLVKRVDELKAKGVDAVYVIASNDPFVMAAWGNFNNAKDKVVFATDIDLAFSKALGATIDLSAKHFGERTARYALIIDDNKIVDFASDEGDTGKLQNASIDTILTKV

SEQ ID NO: 21541 - protein, 175 aa, Plasmodium falciparum
MDRYINIDVRNMNNISDTDGSPNDFTSIDTHELFNNKKILLISLPGAFTPTCSTKMIPGYEEEYDYFIKENNFDDIYCITNNDIYVLKSWFKSMDIKKIKYISDGNSSFTESMNMLVDKSNFFMGMRPWRFVAIVENNILVKMFQEKDKQHNIQTDPYDISTVNNVKEFLKNNQL

SEQ ID NO: 21542 - protein, 244 aa, Nostoc punctiforme
MVANRRGQRVPNVTFHTRKDNQWVDVTTDQLFANKTVVVFSLPGAYTPTCSSTHLPGYNELAGIFKENGVDDIICISVNDAFVMNEWSKDQEAENITLIPDGNGEFTEGMGMLVDKSDLGFGKRSWRYSMLVRDGVINQMFIEPDEPGDPFKVSDAETMLRYINPQAVKPEVVSLFAKVGCPFCARAKAMLKEHGINYEEITLGKDITTRSLRAVTGATTVPQVFIDGKLIGGSEALEAYFAAK

SEQ ID NO: 21543 - protein, 157 aa, Vibrio cholerae
MIQIGQTLPDVQLSQRTSEGTLTHSVTTLFANKKVVLFAVPGAFTPTCSEAHLPGYVVLADKFKEKGVDMIACVSVNDAFVMKAWGEAQNASEIAMLADGDASFTKALGLEMDTGNFGGVRSQRYAMVIENNVVTLLNVEPPKTFELSKAETVLASL

SEQ ID NO: 21544 - protein, 247 aa, Vibrio cholerae
MRNTMFTSKEGQTIPQVTFPTRQGDAWVNVTSDELFKGKTVIVFSLPGAFTPTCSSTHLPRYNELFPVFKEHGVDSILCVSVNDTFVMNAWKDDQNADNITFIPDGNGEFTDGMGMLVDKNDLGFGKRSWRYSMLVKDGVVEKMFIEPNEPGDPFKVSDADTMLKYIAPQYKVQESVTIFTKPGCPYCAKAKQALIDAGLQYEELILGKDATTVSLRAVSGRTTVPQVFIGGKHIGGSDDLEVYLNQ

SEQ ID NO: 21545 - protein, 185 aa, Pyrocoelia rufa
MRLLGVIKTLGRIVSIVPQRLILRSYLITAAMPIKEGESLPNIDLFEETPANKVNLNELSAGKKIIVFAVPGAFTPGCSKTHLPGYVKKAEELKLQGISEIACVAVNDPFVMSAWGKEHNVNGKIRMLADTQATFTKSIDLGQDLAPLGGYRSKRYSMVVENGKVQSLQVDPMVPDIMLVVELSV

SEQ ID NO: 21546 - protein, 241 aa, Haemophilus influenzae Rd
MSSMEGKKVPQVTFRTRQGDKWVDVTTSELFDNKTVIVFSLPGAFTPTCSSSHLPRYNELAPVFKKYGVDDILVVSVNDTFVMNAWKEDEKSENISFIPDGNGEFTEGMGMLVGKEDLGFGKRSWRYSMLVKNGVVEKMFIEPNEPGDPFKVSDADTMLKYLAPQHQVQESISIFTKPGCPFCAKAKQLLHDKGLSFEEIILGHDATIVSVRAVSGRTTVPQVFIGGKHIGGSDDLEKYFA

SEQ ID NO: 21547 - protein, 190 aa, Drosophila melanogaster
MRVLSCKFLGRVVNSALPQQIISLRSLSKTSAAMVKVGDSLPSVDLFEDSPANKINTGDLVNGKKVIIFGVPGAFTPGCSKTHLPGYVSSADELKSKQGVDEIVCVSVNDPFVMSAWGKEHGAAGKVRLLADPAGGFTKALDVTIDLPPLGGVRSKRYSLVVENGKVTELNVEPDGTGLSCSLANNIGKK

SEQ ID NO: 21548 - protein, 241 aa, Haemophilus influenzae
  unsure (1)..(241): unsure at all Xaa locations
XSSXEGKKVPQVTFRTRQGDKWVDVTTSELFDNKTVIVFSLPGAFTPTCSSSHLPRYNELAPVFKKYGVDDILVVSVNDTFVXNAWKEDEKSENISFIPDGNGEFTEGXGXLVGKEDLGFGKRSWRYSXLVKNGVVEKXFIEPNEPGDPFKVSDADTXLKYLAPQHQVQESISIFTKPGCPFCAKAKQLLHDKGLSFEEIILGHDATIVSVRAVSGRTTVPQVFIGGKHIGGSDDLEKYFA

SEQ ID NO: 21549 - protein, 245 aa, Plasmodium yoelii yoelii
MKRIIFLIFPILLNVYLCFKNLAHNKPLNFVSKRWNFNNRFSHKLGESKNIDLANDIKENDLIPNVKVMVDVGNIGIVNNFGEEEKKSSGEESPFRSIDTHELFKSKRILLISLPGAFTPLCTSKMIPEYEKEYDNFIRENKFDDIYCITNNDIYVLKSWFKSMDIKKIKYISDGNSSFTESMNMLVDKSNYFMGMRPWRYVAIVENNILIKIFQENEKQHNIQTDPYDISSVDHVKEFLKHNKI

SEQ ID NO: 21550 - protein, 172 aa, Malassezia sympodialis
MSATTGSQAPNTTFTYIPWAPELDSGKVCGVPQTFKAHDRWKGKKVVVVAIPGAFTPACHQNHIPGFVEKINELKAKGVDEVVVIAVNDAFVMSGWGVTVGGKDQIVYACDNDLAFSKALGGTLDLTSGGMGVRTARYAVVLDDLKITYFGMDEGNMGAPEKSSVDAVLAQL

SEQ ID NO: 21551 - protein, 219 aa, Bos taurus
MRLGWLRVLGCRPGSVVSRATIVEGASTTAAGTRGCLEGILEWTFGGVRGFRSAAVAMAPIKVGDAIPSVEVFEKGPGNKVNLAELFKGKKGVLFGLPGAFTPGCSKTHLPGFVEQADALKAKGIQVVACLTVNDVFVTEEWARTHKAEGKVRLLADPSGTFGKETDLLLDDSLLFLFGNHRLKRFSMVIEDGIVKSLNVEPDGTGLTCSLAPNILSQL

SEQ ID NO: 21552 - protein, 151 aa, Clostridium acetobutylicum
MEIREGMKAPDFSLKGSDGKEHKLSDYIGKKVILYFYPKDNTQGCTKEACEFRDSSNKISDLNAVVLGVSKDSIKSHNNFIDKFKLPFVLLSDEEEVVCKLYDVIKEKSMYGRKYMGVERSTFIIDENGIVKSIFRKVRVNGHVENIIKSL

SEQ ID NO: 21553 - protein, 156 aa, Tropheryma whipplei str. Twist
MGGIVSNQVLPKGSFAPDFELVDQNGATVVLSEVAAKKDVVLFFFPLAFSGICTDELIQVRDSLDSFKSFEVFALSVDSKFTLRAYSESQGFSFALLSDFWPHGGVAKQFGAFLEDVGVASRSTFIVGKDLKIKASFFSGIHEPRDFSEIRAALAS

SEQ ID NO: 21554 - protein, 156 aa, Rickettsia montanensis
MTLELGKKVPDLSLHIGKDNVIKLSDLKGKFVILYFYPKDDTPGCTIEAQDFNKLKPEFDKLNTVIIGVSKDKLDSHDKFKEKYSLGFDLASDANSNLCEQLGVWIEKSMFGKKYMGIDRATFLLDKEGIVKHIWRSVNAKNHAQEVLEKLRTMLS

SEQ ID NO: 21555 - protein, 177 aa, Prochlorococcus marinus subsp. pastoris str. CCMP1378
MKSLFGLFVILISLIFNLKSAIAFDYAPEIGDSAPSFHLEGINKSIKSKKIWDSNELIGKWIVLYFYPKDFTAGCTLEAKGFSQLKNDFSKYNAEIIGISADNQDSHDSFCSEKSINYTLLSDPNGTISAKYGSWIPPYSDRNTFLISPEGKITYRWISVLPINHAKEVLNILKKNI

SEQ ID NO: 21556 - protein, 212 aa, Halobacterium sp. NRC-1
MQRGWGSERLAPRLSPGRAGSVISNDTDTPSMRCEGARAPAFELPGVSDGTQTRLGLTDALADNRAVVLFFYPFDFSPVCATELCAIQNARWFDCTPGLAVWGISPDSTYAHEAFADEYALTFPLLSDHAGAIADAFGVLQASAEDHDRVPERAVFLIDADRVIRYAWASSDLSESPDLGAVKAAIDDLQPDTAGVAPRTISDAHDDGTTDG

SEQ ID NO: 21557 - protein, 156 aa, Rickettsia rickettsii
MTLELGKKLPDLSLHIGQDNVIKLSDLKGKFVILYFYPKDDTPGCTIEAQDFNKLKPEFDKLNTVIIGVSKDKLDSHDKFKEKYSLGFDLASDANSNLCEQLGVWIEKSMFGKKYMGIDRATFLLDKEGIVKHIWRSVNAKNHAQEVLEKLRTMLS

SEQ ID NO: 21558 - protein, 195 aa, Ferroplasma acidarmanus
MLQIGEAAPEFDTETYFPEKKEIKKIKLSDYRGKWVILTFYPGDFTFVCATDIEALMGSYDKFLKEGAQVFGISEDSVFSHKAWCDTSPRVSKSKIPLIDDYTKEIAKNYGFLDSKGYQAQRGLVIIDPEGKIQYEAMFNDGLGKDVRHIYGAFMGLKVLHDTPEGEGHMCAIPADWTPGESPLDINVVRDIGKL

SEQ ID NO: 21559 - protein, 155 aa, Streptomyces coelicolor A3(2)
MSERLQPGDPAPAFTLPDADGNEVSLSDHQGRKVIVYFYPAALTPGCTKQACDFTDNLELLTGAGYDVIGISPDKPEKLAKFREAESLKVTLLADPDKKVLDAYGAFGEKKNYGKTYMGVIRSTIVVDEQGKVERALYNVRATGHVAKIIKDLGI

SEQ ID NO: 21560 - protein, 155 aa, Streptomyces coelicolor A3(2)
MSALPAVGDTVEDFTLPDETGTPRRLSELLADGPVVLFFYPAALTTGCTAEACHFRDLAAEFAAVGARPVGVSGDPVERQQEFAGRHTLGMPLLSDTDGAVRERFGVKRGFSLAPTKRVTFVVGQDRTLLEVVRSEIRMNTHADRALAALRAHRP

SEQ ID NO: 21561 - protein, 153 aa, Nostoc sp. PCC 7120
MPVKVGDSAPDFTLPAQNGSSVSLSDFRGKKAVVLYFYPKDDTPGCTAESCAFRDRYEVFQTAGAEIIGVSGDSNESHQKFASKYNLPFTLLSDKGDQVRKLYGATAAFGLFPGRVTYVIDQQGVVQYVFDSMFNFQGHVEEALKTLQQLASK

SEQ ID NO: 21562 - protein, 145 aa, Nostoc sp. PCC 7120
MPLAVGTDAPAFTVKDTNGNTVSLSDFAGKTVVLYFYPKDDTPGCTKQACSFRDAQSDYKNKDVVVLGVSADDEGSHQAFTQKYNLNFPLLADTNKTLISAYDVDGGGYAKRVTYVIGPDGKIVHVDASVNTTTHAGDVLAALGL

SEQ ID NO: 21563 - protein, 159 aa, Nostoc sp. PCC 7120
MSNIPQAGQPAPDFSTPDQNGNLVSLNDFQGQWVVIYFYPKDDTPGCTTEAKDFTGLHQEFNQLGAKILGVSPDSGKAHCKFIDKHNLSINLLSDPEHQLIEAYGAWRLKKFMGKEYMGVARSTFLISTDGIIAYAWPNVKTKGHAQAVLNKLQELINS

SEQ ID NO: 21564 - protein, 153 aa, Rhodobacter sphaeroides
MTDAGQTAPDFTLPRDGGSTVSLSGLRPGKVVVYFYPKDDTSGCTLEAQEFTALAPQFAEIGTTVIGISKDSVKSHDKFCAKHGLGIVLASDEGATTAEDYGVWKEKNMYGKTYMGIERSTFLIDGEGRIARVWRKVTARGHAAEVLEAARSL

SEQ ID NO: 21565 - protein, 241 aa, Rhodopseudomonas palustris
MFDPSKATKGRRMPKPTPKKPSKKTAKPAVEKTSKVTTKAAAKTTAAKTTAVKKAAAKSPAAKTPAAKTAATKAAAKTSATKSSATKPAGLAEGSVAPDFKLPRDGGGEISRADFAGRKLVLFFYPKANTPGCTREAIDFTRLAADFKACGTAVLGVSADSVKAQDSFRDKHQLATPLLSDPTHAMLEAYGAWGEKSLYGRKLQGIIRTTVLIDADGCVARVWRNVKVDGHAHQVLAAAQS

SEQ ID NO: 21566 - protein, 192 aa, Rhodopseudomonas palustris
MTKQPDLLKVDWSAIPAPDDDGAAAHLPGARIQPVALPATDGSSVTLSSLPGRTVLFIYPRTGVPGQISLVDDWDMIPGARGCTPQTCSFRDLFTDLKTAGADAVFGLSTQSSAYQSEMATRLHLPFPVLSDESLELTRALNMPTMQVAGMTLLKRMALIIDDGRISHVFYPVFPPDRNAGDVLEWLKANPR

SEQ ID NO: 21567 - protein, 1031 aa, Rhodospirillum rubrum
  unsure (1)..(1031): unsure at all Xaa locations
MDRGSDGGNDGQRRLAAQRDLAAFKAGDMKAGRQDFDPAQRHLAIKQSARRQGYRHHRQPGDQPVVGVAHHHADHPQIQRTLPATPGEFGAVDHHLEITLGVGKGVFDIRGQQGQRQRPLLQPPTEKGQKGERQQSQRAQNAEQHPHPTMNHGLFLRDNAYRHPLTAATPLPSVLGNNGAKMQEFLFPSATARFPLPADQGRLDRGLERWRALARDDSEGIAPSFVKNFLDDPRGNALLAAVFGNSPYLSAALIREPAFVETLALRGPDQVFPDLLEGMARAIAATSEATVVMQVLRVTKRRAALCIALADIARWWSLEQVTAALSALAERSLRAVVAHLLTRRAASGDLVLPHPEDPERDSGFFILGMGKLGGGELNYSSDIDLIVLFDAEKARYQGKRSLKECYVGLTRDLVRMMEERTAEGYVFRTDLRLRPDPGSTAVAISTEAAEIYYETMGQNWERAAMIKARPVAGDLVAGQAFLTHLRPFVWRKYLDFNAIQDIHSIKRQIDAVRGGAEIGVAGHNIKLGRGGIREIEFFAQTQQLIWGGRTPKLRSKSTCEALADLVEVGLVEAPAADELTEAYRYLRTLEHRLQMIDDEQTQTLPLEPDKLRHLALFMGEADAEALGVAVTTRLRRVESHYAGLFEDAPSLSQGGNLVFTGGEDDPETLATLRRMGFSNPEGISATIRGWHHGRYAATRSTRTRERLTELMPDLLXXXXXXXXXXXXXXXXXXXXWDVKLAPGGLVDIDFLAQFLQLRHAPRTPEVLAADTVGALRRLSEAGYLDPAICRFLCAHHRRNLGIQATLRHSIAGPPRDSDLTPGLKAKLARATGWDDFETLRAHMADDGARVRQIFTEIVDPTRPPPPPPLEKGPPMTEIPVAPGTAAPDFSLPTDGGGTLSLADLRGKKLVLYFYPKDATSGCTTEALGFKEQAEAFAEAGAVIVGVSKDSVKSHDGFKAKQGLPFTLASDAEGAVCQSYGVWVEKSMYGRTYMGIDRSTFLIDGEGIIRKIWRKVKVAGHVAAVLEEARAL

SEQ ID NO: 21568 - protein, 154 aa, Sulfolobus tokodaii
MKVGDKAPLFEGITDTGEKFSLADYIGKYNIVLYFYPKDDTPGCTREACAFRDNWNLLQGYDVVVIGISSDDVESHKKFKQKYNLPFILVSDPDKKIRELYGAKGFILPARITFVIDKKGIIRHIYNSQLNPENHVKEALKTLEMLKKEEESVS

SEQ ID NO: 21569 - protein, 155 aa, Sulfolobus tokodaii
MVEIGELAPDFELPDTELKKVKLSALKGKVVVLAFYPAAFTQVCTKEMCTFRDSMAKFNQVNAVVLGISVDPPFSNKAFKEHNKLNFTILSDYNREVVKKYNVAWEFPALPGYVLAKRAVFVIDKEGKVRYKWVSDDPTKEPPYDEIEKVVKSLS

SEQ ID NO: 21570 - protein, 184 aa, Synechocystis sp. PCC 6803
MTSKKFSWPKTIIALLLTLGLWLGLADLPTYALGGIQPELDQPAPLFTLPSTTGEGEVNLTDYRGQWVVLYFYPQDFTPGCTLEAQRFQRDLTKYQALNAQVIGVSVDDLDSHEAFCDAEGLKFPLLADSDGAVIKTYGSWLSGMALRHTYVIDPEGILRERFLGVRPATHSEEVLARLAELQA

SEQ ID NO: 21571 - protein, 160 aa, Synechocystis sp. PCC 6803
MATALETNQPAPTFSAPNAEGKTISSDDFLGQWLVLYFYPKDNTPGCTTEAIDFSEKLPEFTDLNAVVVGVSPDSEKSHGKFIDKHNLTVQLLSDPEHELAAAYGAWGPKKFMGKECEGILRSTFLINPQGNIAHIWPNVRVKGHAEKVLEKLQQLNSAD

SEQ ID NO: 21572 - protein, 157 aa, Thermoanaerobacter tengcongensis
MVEVGKKAPDFVLPDADGRQVSLSDFLGKNVVLYFYPKDNTPGCTKEAVAFRDSIKTIEDKNAVVIGISLDDEASHRKFIEKYSLPFVLLSDKEAKVSTEYGVYKEKNMYGKKKMGIERSTFIIDSKGIVRKIFRKVKVDGHVDQVLKALDEIKEGV

SEQ ID NO: 21573 - protein, 245 aa, Ralstonia metallidurans
MPHLQYPHGRGPQGCGGAAGGAGCLTCRSSASGNLMCQRVPPGPGFPPGSVYATLEVRRTAPICTRHGRKARGRHRAAAVTDDARHPRRATSMTVSLNKAIPDFQAPATGGDFRLADQRGKTTVLYFYPKDNTPGCTTEAMNFRDQYDDFEKAGAAVYGISRDSMKSHENFKAKLELPFELISDADEAICQLFDVIKMKKMYGKDVRGIERSTFILDAKGVLRHEMRGIKVPNHVDEVLEIVKGM

SEQ ID NO: 21574 - protein, 146 aa, Neisseria meningitidis MC58
MDVKYEFTLPSSSGADFHSAEHLPLVVYFYPKDSTLGCTTEGLDFNARLEQFEALGYTVVGISRDGVKAHQNFCAKQGFRFELLSDKDETVCRLFDVIKLKKLYGKESLGIERSTFVLNKDGEIAHEWRKVKVAGHAQEVLETLSR

SEQ ID NO: 21575 - protein, 167 aa, Neisseria meningitidis Z2491
MAIAAVRLRAVLNNGNIGSRTMDVKYEFTLPSSSGADFHSAEHLPLVVYFYPKDSTPGCTTEGLDFNARLEQFEALGYTVVGISRDGVKAHQNFCAKQGFRFELLSDKDETVCRLFDVIKLKKLYGKESLGIERSTFVLNKDGEIAHEWRKVKVAGHAQEVLETLSR

SEQ ID NO: 21576 - protein, 175 aa, Deinococcus radiodurans
MTDSDSQSPDTQPEVARLQPGDTFPDFSLPDAAGDLHSLGQYDGKYVVLYVYPKDDTPGCTREACDFRDHQLLRQHGAVILGVSRDDAASHQQFADKYSLPFPLLSDPDAEFLRAIGSYGPKTMYGKTSEGVKRQTFLIGPDGKLVKSWLAVQVDGHADAVAAAIDKDLQKKGQA

SEQ ID NO: 21577 - protein, 153 aa, Burkholderia fungorum
MPIAVDQPIPDFTAPATGGEITLSKLRGKKVVLYFYPKDNTPGCTTEGLQFRDLYPKFRKAGAEIIGVSRDSLRSHDNFKAKLELPFPLISDPEETLCALFNVIKMKKMYGKEVRGIERSTFLIDAGGVLRQEWRGVKVPGHVDDILEAVQEL

SEQ ID NO: 21578 - protein, 255 aa, Burkholderia fungorum
MSWRRGAAQVGRTVSAVSAAAACASFGRVLTYLVSTWSNSEVGPRSRERSGPGFVGRTACMNAWRNRQMKKKFISAVLAGAVSVGFAMHSLTASATLKPGDAAPAFTAQASLGGKTYTYSLADELKKGPVVLYFYPAAFTKGCTIEAHEFAEAVDEYKKYGATVIGVSHDNIDTLTKFSVSECRSKFPVAADADSKVIGEYDAGMPMHASMANRVSYVIAPDGKIIYEYTSLSPEKHVENTLKAVKEWAATHKQP

SEQ ID NO: 21579 - protein, 80 aa, Bacillus subtilis
MTIEIGQKAPDLELKGDHGETVKLSDYKGKYIVLYFYPKDMTPGCTTEACDFSGQSRKLRRTGCRHYRRQPGQPGKTRKI

SEQ ID NO: 21580 - protein, 156 aa, Escherichia coli O157:H7 EDL933
MNPLKAGDIAPKFSLPDQDGEQVNLTDFQGQRVLVYFYPKAMTPGCTVQACGLRDNMDELKKAGVDVLGISTDKPEKLSRFAEKELLNFTLLSDEDHQVCEQFGVWGEKSFMGKTYDGIHRISFLIDADGKIEHVFDDFKTSNHHDVVLNWLKEHA

SEQ ID NO: 21581 - protein, 159 aa, Xylella fastidiosa Ann-1
MNIGDTLNHSLLNHPLMLSGGTCKTLSDYTNQWLVLYFYPKDNTPGCTTEGLEFNLLLPQFKQINATVLGVSRDSVKSHDSFCAKQGFTFPLVSDSDAILCKAFDVIKEKTMYGRQIIGIERSTFLIGPTHRIVEAWRQVKVPGHAEEVLTKLKAHAEQ

SEQ ID NO: 21582 - protein, 153 aa, Magnetococcus sp. MC-1
MVLEIGASIPSLSLPDQSGEERSLKELLGEKGAVIYFYPKDNTPGCTTEAQDFEALKGEFAAKGYTIIGISKDSVKSHTNFISKYDLSFTLLADVEVKGCEAFGVWQEKKNYGKTYMGIVRSTFVVDGDGVVSHVYKKVQVKEHAQKVLAALG

SEQ ID NO: 21583 - protein, 151 aa, Staphylococcus aureus subsp. aureus Mu50
MLQKGEQFPIFKLENQDGTVITNDTLKGKKAIIYFYPRDNTPTCTTEACDFRDNLEMFNDLDVAVYGISGDSKKKHQNFIEKHGLNFDLLVDEDFKLAKETGVYQLKKSFGKESMGIVRTTFIIDEQGKVLDVIEKVKVKTQIEELKNILG

SEQ ID NO: 21584 - protein, 157 aa, Pseudomonas putida KT2440
MAVALDQPVADFQAQATSGQTVSLAELKGQQVVVYFYPKDSTPGCTTEGQGFRDQHDAFAAANTVIFGVSRDGIKSHENFKAKQGFPFELISDKDEALCQLFDVIKLKKLYGKEYMGVDRSTFLIDKDGVLRQEWRGVKVPGHVDAVLAAAQALNKA

SEQ ID NO: 21585 - protein, 162 aa, Propionibacterium freudenreichii subsp. shermanii
MSTLAPGDPAPEFALPDADGNIVRLSDHAARTVVVYFYPAALTPGCTVQAIDFTASLDEFTQSGVDVIGISPDTTDKLAKFRMRKNLRVTLLADPQHTAIDAYGVWGTKMIFGKPIDGIIRSTFVVDVDADGRGTVREALYDVRAAGHVDRLRKKLGIPAAV

SEQ ID NO: 21586 - protein, 152 aa, Staphylococcus epidermidis ATCC 12228
MISKGEQFPSFSLENQDGNFISNETIKGRKTILYFYPRDNTLTCTTEACEFRDHIEDFNQLDVDIYGISADSKKKHQNFIKKHQLNFDLLVDKDYQLANKVGVYQLKKSFGKENMGIVRTTFILDENGNIIDVIEKVKVKTQIETIKNILEG

SEQ ID NO: 21587 - protein, 161 aa, Mycobacterium leprae
MTETTRLAPGDQAPAFSLPDADGRIVSLGDYRGQRVTVYFYPAALTPGCTKQACDFRDNLHDLNDAGLDVVGISPDPLTKLAEFRDAEALTFPLLSDHDCKVLSAWGAYGKKQIYGKTVLGVIRSTFVVDEKGKIVLAQYNVKATGHVAKLRRDLSLLECC

SEQ ID NO: 21588 - protein, 155 aa, Agrobacterium tumefaciens str. C58 (Cereon)
MTDLTIGSPAPDFTLPRNGEGTVTLSKLQGKAVILYFYPKDDTSGCTVEAIDFSALGGEFEAANAVVIGISPDSVKSHDKFAAKHSLSVMLASDEERKVLEAYGVWKEKSMYGKKYMGVERTTVLIAPDGKIAEIWNKVKVAGHAQAVLEAAKKL

SEQ ID NO: 21589 - protein, 159 aa, Xylella fastidiosa Temecula1
MNIGDTLNHSLLNHPLMLSGGTCKTLSDYTNQWLVLYFYPKDNTPGCTTEGLEFNVLLPQFKQINATVLGVSRDSVKSHDSFCAKQGFTFPLVSDSDALLCKAFDVIKEKTMYGRQIIGIERSTFLIGPTHRIVEAWRQVKVPGHAEEVLTKLKAHAEQ

SEQ ID NO: 21590 - protein, 149 aa, Pyrococcus furiosus DSM 3638
MKIGDKAPDFVLKDQHGKEFKLSDFRGKKILLSFHPLAWTKICEKQMKALEENYEKFESLNVIPVGISVDPIPSKKAWAEHMGLKKLRILSDFWPHGEVAKLYGVFREKDGFSERANILIDEEMKIIFYKVYPIRELPDLNEIFDILKI

SEQ ID NO: 21591 - protein, 157 aa, Yersinia pestis KIM
MMSPLKAGDIAPKFSLPDQDGEQISLADFQGQRVLVYFYPKAMTPGCTVQACGLRDNMDELKSAGVEVLGISTDKPEKLSRFAEKELLNFTLLSDEHHEVAEQFGVWGEKSFMGKTYNGIHRISFLIDADGKVEHVFDNFKTNNHHDIVMDYLRQNA

SEQ ID NO: 21592 - protein, 227 aa, Magnetospirillum magnetotacticum
MVGGADRAAPDHRRGLRRGQRAQGPKGCPGPRRRFDRFQESGRPHGRLRLGRSSGLLAPRRSTRRRPQGTGDRIMTTALGTSAPDFIMECDDGKAALADYKGKVLVLYFYPKDDTSGCTSEAKAFRDAMPEYQAAGVEILGVSKDSVASHAKFRTKHSLPFRLGSDPEGTVCEAYGVWKKKSMYGREYMGIERSTFLIDQNGVLRAEWRKVKVTGHVDAVLKAAKEL

SEQ ID NO: 21593 - protein, 155 aa, Magnetospirillum magnetotacticum
MPLEPGDAAPLFSLPGAGGETISLETLRGHKIVLYFYPKDDTSGCTLEAQGFNAQAEAFAEAGARVIGVSPDSVKSHDKFRAKYGLTFPLASDETKSMLEAYGVWVEKSMYGRKYMGVERTTLLIDREGGIARIWRKVKVPGHVEEVLEAVRALA

SEQ ID NO: 21594 - protein, 159 aa, Leptospira interrogans serovar lai str. 56601
MSELKTGAKAPGFSALNEKGEKVKLSDLSGPKGTVLYFYPKDQTPGCTTEACDFRDNFSRIKKTGFNVVGVSKDSVKSHQKFIEKQELNFTLISDEDGKICEDYGVWQMKKFMGREFMGIVRTTFLIGADGKILKVYPKVSVKGHVDEILSDIKTLEKK

SEQ ID NO: 21595 - protein, 163 aa, Leptospira interrogans serovar lai str. 56601
MEEIEMSDPLLGTNLPEISLESTEGKRVKLPEDIQGSWTLLYFYPKDDTPGCTKQACNYRDNMGEFKKIGAKVYGISLDALDSHGQFIQKYSLNFPLLSDPDHKLSEALGVYGDQEWKGKVFKGLSRDSFLVSPDGKIQKVWRKVDPTTTVQDTLQEISKSIV

SEQ ID NO: 21596 - protein, 160 aa, Xanthomonas axonopodis pv. citri str. 306
MTDAVFELPAATFDLPLALSGGTQTTLRDYAGKWLVLYFYPKDSTPGCTTEGLDFNALLPQFKKAGAMVLGVSRDSVKSHDNFCAKQGFTFPLISDSDEALCRAFDVIKEKNMYGKQVLGIERSTFLLSPEGHVVLEWRKVKVAGHAEAVLAAVKAHAKQ

SEQ ID NO: 21597 - protein, 153 aa, Caulobacter crescentus CB15
MLQPGDKAPDFDLPTDTGRVSLSALKGKNVVLYFYPKDDTAGCTSEALQFSSEVEEFQKLGAVIIGVSKDSAASHAKFRAKHDLTIELAADTLGDVVESYGAWVEKSMYGRKYMGIDRSTFLIDREGVIREIWRKVKVPGHIKAVMNAAKAIK

SEQ ID NO: 21598 - protein, 173 aa, Bacillus anthracis str. A2012
MKKNRLLFRVIILLILSGAVGFTLYQGFFADKEKMQIGKEAPNFVVTDLEGKKIELKDLKGKGVFLNFWGTWCKPCEKEMPYMNELYPKYKEKGVEIIALDADETDIAVKNFVNQYGLKFPVAIDKGQKIIGTYGVGPLPTSFLIDKDGKVVEQIIGEQTKEQLEGYLKKITP

SEQ ID NO: 21599 - protein, 151 aa, Campylobacter jejuni subsp. jejuni NCTC 11168
MSLNIGDKAPQFELLNQDGVKIALKDFIGKKVILYFYPKDNTPGCTTEACDFSANYDKFGGKNAVIIGISPDSVASHEKFISKFDLKHILLSDSEKEVAKAYGALGLKKNYGKEYEGLIRSTFVIDETGKIAQIYSNVRVKDHALKVLESL

SEQ ID NO: 21600 - protein, 156 aa, Chlorobium tepidum TLS
MALLQAGQKAPEFTAKDQDGKEVSLRDYTGRKVVLYFYPKDDTPGCTKEACAFRDNLPNFEKVDAVVLGVSVDGQKAHRKFADKYELPFTLLVDDEKKIVEAYGVWGLKKFMGREYMGTNRVTYLIDEQGTIEKVWSKVKPETHTAEVLDWLQQKT

SEQ ID NO: 21601 - protein, 148 aa, Chlorobium tepidum TLS
MIEEGKIAPDFTLPDSTGKMVSLSEFKGRKVLLIFYPGDDTPVCTAQLCDYRNNVAAFTSRGITVIGISGDSPESHKQFAEKHKLPFLLLSDQERTVAKAYDALGFLGMAQRAYVLIDEQGLVLLSYSDFLPVTYQPMKDLLARIDAS

SEQ ID NO: 21602 - protein, 155 aa, Clostridium perfringens str. 13
MSIEINKLAPDFKLMGSDGKEHSLSDYKGKNIVLYFYPKDNTAGCTTEACDFRDNIQNFHDLNAIILGVSRDSLASHDKFITKLSLPFVLLSDPDETVCKLYDVIKEKNMCGKKYMGVERSTFLINKEGILIEEFRKVRVKGHIEKVLDKLKEIN

SEQ ID NO: 21603 - protein, 190 aa, Corynebacterium efficiens YS-314
MKTRYCGPILLNSSPERTPIPENTTAPAIVEVMTDARRLDVGDTPPAFTLPNDSGSTTSLSDFAGERVVVYFYPKANTPGCTKEACDFRDSLAQLNDLGVKVIGISPDPVDKLVKFREDHDLNFPLLSDEDKAVMTAWGAFGEKKNYGKIVQGVIRSTFVIEPDGTVGLAKYNVRATGHVARILRDLEAA

SEQ ID NO: 21604 - protein, 155 aa, Corynebacterium glutamicum ATCC 13032
MKRLDVGDTPPAFSLPNDSGSTTSLSDFAGKQVLVYFYPKANTPGCTKEACDFRDSLSNLNDLDIAVVGISPDPVDKLVKFREDHELNFPLLSDEDKSVMTAWGAFGEKKNYGKIVQGVIRSTFLINADGTVGMAKYNVRATGHVERIVREITAA

SEQ ID NO: 21605 - protein, 158 aa, Corynebacterium glutamicum ATCC 13032
MTEVKRLDVGDTPPAFSLPNDSGSTTSLSDFAGKQVLVYFYPKANTPGCTKEACDFRDSLSNLNDLDIAVVGISPDPVDKLVKFREDHELNFPLLSDEDKSVMTAWGAFGEKKNYGKIVQGVIRSTFLINADGTVGMAKYNVRATGHVERIVREITAA

SEQ ID NO: 21606 - protein, 145 aa, Thermosynechococcus elongatus BP-1
MALAVGTPAPPFTAKDTQGNTISLSDFAGKTVVLYFYPKDDTPGCTKEACSFRDNYAAYQGKNIVVLGVSADDETSHQKFTAKFNLPFPLLADVDRSIIKAYDVDGGGYAKRVTYVIDGNGIISHVYTSVKTDTHATDILADLGL

SEQ ID NO: 21607 - protein, 156 aa, Thermosynechococcus elongatus BP-1
MSLTAGAIAPPFELADATGQLVRLADFQGQWVILYFYPRDNTPGCTTEACAYRELSATLGDRNVVILGISPDSVTSHAKFQQKLDLPFRLLADVDAKVAQAYGSYGPKKFMGKEYLGVYRDTFLIDPTGKIAAIYRRVKPAAHVAQVLADLERLQG

SEQ ID NO: 21608 - protein, 179 aa, Thermosynechococcus elongatus BP-1
MFLRSVLVALLSLILFLSPSAPSWALGGELPPLNAPAPDFSLPSSVNGQLISLKDYRGKWVVLYFYPKDFTSGCTLEAQRFQRDIEQFHAHNAEVIGVSADSVDSHQDFCDSEGLTFPLLSDPDGQVSKAYGSWLGFVSLRHSFIIDPEGILRERYRKVNPAIHSQEVLARLEELQQQG

SEQ ID NO: 21609 - protein, 158 aa, Buchnera aphidicola str. Sg (Schizaphis graminum)
MTTLKPGDIAPKFILPNCIDKSIKLSDFLGKKVLVYFYPKAMTPGCTVQACNIRDNLELFKSKKVEVLGISPDNTNKLLTFVEKKMLNFTLLSDKQNIVSKKFGVWGEKIFMGKKYFGIYRTSFLINSSGFIDKIFFKFKCKDHHKIILTYLNSKKSD

SEQ ID NO: 21610 - protein, 134 aa, Thermobifida fusca
MTLSEVLKDHDRVVVYFYPAAMTPGCTTQACDFRDNLHDFNKAGLTVLGISPDSLTRLAKFAEQEGLTFPLLSDPDRSVMTSYGAFGEKKNYGRIVQGVIRSTFVISAGRTVERAYYNVRATGHVERLKRDLGL

SEQ ID NO: 21611 - protein, 150 aa, Clostridium thermocellum ATCC 27405
MLEVGTKAPDFELPDQNGKMHKLSDYRGKKVILYFYSKDNTAGCTKQACGYSERYPQFVEKGAVVLGVSKDTVASHKKFEEKHGLAITLLSDPECKAIEAYDVWKEKKVCGKVCMGVVRTTYLIDEEGIIVKANDKVKAEDDAERMLAEL

SEQ ID NO: 21612 - protein, 158 aa, Microbulbifer degradans 2-40
MALPKVGAKAPAFTLRNQAGEKVRLSSFAGEKNVVVYFYPKAMTPGCTVQACGLRDSKKELEDVDAVVFGISPDPVSRLEKFIEKQELNFDLLSDEDHAIAEKYGVWGLKKFMGREFMGILRTTFIVGKDGKIKHVFDKVKTKTHHDDVLAVLKDLAD

SEQ ID NO: 21613 - protein, 185 aa, Microbulbifer degradans 2-40
MNRLMAFLFIVFSIQAFAQEQIEVGVKVGEKAPELSVVDAQGKPQTLASLTGEQGLVVVFFRSADWCPFCKRHLIEIKDWVKPLGEKGFNVVGVSYDSPATLAAFSKAKDINFTLLADQNVATVKAYNIVNSGYKPGDDNYGIPYPGAVIIDKAGVVRYSYFYEGYKKRVQWQTIEPALNTLTAK

SEQ ID NO: 21614 - protein, 154 aa, Trichodesmium erythraeum IMS101
MKIQVGDQAPEFTLPSQEGTEVSLSDFRGKKNVVLYFYPKDDTPGCKIQACTFRDQYTIFKNVDAEIIGISGDSKQSHKQFSTKYSLPFTLLCDTDNKVRQLYDVPPTLWILPGRATYVIDKEGIIRYICDSTFDFEVHSKEALKALRKLRVTV

SEQ ID NO: 21615 - protein, 149 aa, Trichodesmium erythraeum IMS101
LPELDQPAPEFTLPTNIGDREISLSDYRGQWVVLYFYPKDFTSGCTIEARRFQQDLPKYRERNTQILGVSADDINSHQEFCDSEGLKFPLLADTDGTVSKAYGSWLNFFSMRHTFIINPGGILQEIFLGVKPTIHSQEVLSSLDNLQQI

SEQ ID NO: 21616 - protein, 183 aa, Trichodesmium erythraeum IMS101
MRSRRHFQTIFLVICLALITWLNFIPNAWALGGKLPELDQPAPEFTLPTNIGDREISLSDYRGQWVVLYFYPKDFTSGCTIEARRFQQDLPKYRERNTQILGVSADDINSHQEFCDSEGLKFPLLADTDGTVSKAYGSWLNFFSMRHTFIINPGGILQEIFLGVKPTIHSQEVLSSLDNLQQT

SEQ ID NO: 21617 - protein, 154 aa, Brucella suis 1330
MAHPQVGDMAPDFTLPSDHGEITLSSLKGHPVVVYFYPKDDTSGCTREAIAFSQLKAEFDRIGVRVIGLSPDSATKHARFRTKHALTVDLVADEDRVALEAYGVWVEKSMYGRKYMGVERTTFLIGADGRIAQVWNKVKVDGHAQAVLEAARRL

SEQ ID NO: 21618 - protein, 182 aa, Bifidobacterium longum DJO10A
MMGIMTTTVDSSDSMPERLQEGSVAPDFTLPAVIPGFTESGSINLSDVLDAGRRVVLYFYPAAMTPGCTTEACDFRDNLARLASKNVTVLGVSKDSLDKLRKFAQRDHLTFPLLSDPDLTVHKLYGAYGEKKLYGKVHVGVIRSTLVINPDGSVAIARYNVRAKGHVDSLLKALEKLEKLEK

SEQ ID NO: 21619 - protein, 158 aa, Haemophilus somnus 129PT
MKTLKAGDFAPHFSLLNQNNEQVSLENFHGKKVLVYFYPKALTPGCTTQACGLRDSKAELENKGVVILGISPDSPKKLANFIEKKALNFDLLSDEQHIVAEQFGVWGEKKFMGRTFDGIHRISFLIDEQGKIEQVFDKFKTTDHHQIVLDYLNSLEQR

SEQ ID NO: 21620 - protein, 157 aa, Pseudomonas syringae pv. syringae B728a
MTVTVDHPVPDFQAPATSGQTVELSALKGQQVVIYFYPKDNTPGCTTQGQDFRDHIAQFQAANTVVLGVSRDSLKTHENFKAKQSFPFELISDKDEAVCQLFDVIKLKKLYGKEYLGVDRSTFLIDKEGVLRQEWRGVKVPGHVAEVLAQAEALNKG

SEQ ID NO: 21621 - protein, 157 aa, Pseudomonas fluorescens PfO-1
MAVVIDQPVTDFEAPATSGQTVSLSALKGKQVVIYFYPKDSTPGCTTEGQGFRDQYTAFKAANTEIFGISRDSLKSHENFKCKQEFPFELISDKDEAVCQLFDVIKLKKLYGKEYLGVDRSTFLIDKNGVLRQEWRGVKVPGHVDAVLAAAQALNKA

SEQ ID NO: 21622 - protein, 195 aa, Bifidobacterium longum NCC2705
MMGIMTTTVDSSDSMPERLQEGSAAPDFTLPAVIPGFTESGSINLSDVLDAGRRVVLYFYPAAMTPGCTTEACDFRDNLARLESQNVVVLGVSKDSLDKLRKFAERDHLTFPLLSDPDLTVHKLYGAYGEKKLYGKVHVGVIRSTLVINPDGSVAIARYNVRAKGHVDSLLKALEKVGEAGEVVRSRCSDTVVRA

SEQ ID NO: 21623 - protein, 163 aa, Desulfovibrio desulfuricans G20
MSVTPAGMPAEGSPAPDFALADKDGTTHTLQSFNGRWLVLYFYPRANTPGCTREGKDFTDLLPRFEALGCTVAGVSPDSLKSLCNFAQKQELAVTLLSDKEKDAASAYGVYRMKKSYGKESPGIVRSTFLIDPAGILRRVWSPVTVDGHAAAVLDALELLADS

SEQ ID NO: 21624 - protein, 157 aa, Pseudomonas aeruginosa PAO1
MPVAIDKPVPDFTAPATSGKEVTLSALKGKQVVLYFYPKDSTPGCTTEGQGFRDQYAAFQKANTEVFGISRDGLKSHENFKCKQEFPFELISDKDEAVCQLFDVIKLKKLYGKEYMGVDRSTFLIDRDGVLRQEWRGVKVPGHVDAVLAAAQALNGA

SEQ ID NO: 21625 - protein, 156 aa, Shewanella oneidensis MR-1
MNTLTAGAKAPLFTLQDQQGNTVSLQECLTRGPVLVYFYPKASTPGCTVQACGLRDSKAELDSHSVTALGISPDPVAKLAKFAEKQSLNFTLLSDEDHSVADAFGVWGEKKFMGKIYDGIHRLSFLINTDGTIAHVFDKFKTSDHHQVVLAQIAGQ

SEQ ID NO: 21626 - protein, 215 aa, Shewanella oneidensis MR-1
MLSLLQRFLLTISLLLGSFSTLAQTIAKDEYSVSPLLNGEQIPAITLQDMNGQNVDLVKLTAQKPTIFFFYRGGWCPFCNNQMGQLKAIEPKLIEMGFQLVGISPDTPAQLKASSAKNELKYLLLSDEKMLASQAFGLAFYTSKQVTESYTNRLQLENPLWTTPEGDKGLVLPVPAIYIADKKGLIHFQYINPNYKVRPAPKLILTAASLVGSPE

SEQ ID NO: 21627 - protein, 157 aa, Yersinia pestis CO92
MMSPLKAGDIAPKFSLPDQDGEQISLADFQGQRVLVYFYPKAMTPGCTVQACGLRDNMDELKSAGVEVLGISTDKPEKLSRFAEKELLNFTLLSDEHHEVAEQFGVWGEKSFMGKTYNGIHRISFLIDADGKVEHMFDNFKTNNHHDIVMDYLRQNA

SEQ ID NO: 21628 - protein, 156 aa, Vibrio vulnificus CMCP6
MNMLQAGSPAPEFSLPDQNGNLVSLKDLKGKKVLFYFYPKAMTPGCTVQAQGLRDVHSELAKHNVVVLGVSIDPVKRLGKFIERDSLNFTLLSDEDHAVAEQFGVWGEKKFMGKVYDGLHRISFLINEEGVIEHVFDKFKTKDHHEVVLNYLEQSK

SEQ ID NO: 21629 - protein, 157 aa, Pseudomonas syringae pv. tomato str. DC3000
MAVTVDQPVPDFQAPATSGQTVELSAFKGQQVVIYFYPKDNTPGCTTQGQDFRDHIAQFQAANTVVLGVSRDSLKTHENFKAKQSFPFELISDKEEALCQLFDVIKLKKLYGKEYLGVDRSTFLIDKEGVLREEWRGVKVPGHVADVLAKAQALNKG

SEQ ID NO: 21630 - protein, 156 aa, Vibrio parahaemolyticus RIMD 2210633
MNTLTAGSPAPAFSLLDQDGNTVTLDDFKGKKVLFYFYPKAMTPGCTTQAKGLRDVKAELDAHNVVVLGVSIDPVKRLGKFIERDELNFTLLSDEDHAVAEQFGVWGEKKFMGKVYDGLHRISFLINEEGVIEHVFNKFKTKDHHEVVLNYLNENA

SEQ ID NO: 21631 - protein, 157 aa, Bacillus subtilis subsp. subtilis str. 168
  unsure (1)..(157): unsure at all Xaa locations
MTIEIGQKAPDLELKGDHGETVKLSDYKGKYIVLYFYPKDMTPGCTTEACDFSGQSRKLRRTGCRHYRRQPGQPGKTRKIXEKHNLPFLLLVDDEHKLAEAFDVWKLKKNFGKEYMGIERSTFLIDKEGRLIKEWRKVKVKDHVAEALQTLKDMSEK

SEQ ID NO: 21632 - protein, 161 aa, Aquifex aeolicus VF5
MLKEGDKVPSFCLPGIDEEVNEREICIDEFKGKKVILYFYPKDNTPGCTQEACDFRDNLNLLKEMGYVVIGVSPDSTASHKKFKEKYGLNFILLSDKDKKVAEMFGVYGEKKAYGKVTKGIIRSTFLIDEEGRIIKEWRNVKAKGHVAKVIETLKSLEEKQ

SEQ ID NO: 21633 - protein, 167 aa, Aquifex aeolicus VF5
MKEFLIKILVLLGLAQPGNAIQEGQPAYLFSLNNHEDKVVNLSDYKGKWVVLYFYPKADTPGCTTQAKEYTKLMPEFEKLNVKVFGISTDSVEKIRRFREKYGLTVEFLSDPEGIVAKAYGVTLIAGLCSRDTVIINQNLIVEKIYRGVSPSADPHKVLEYIKQRAS

SEQ ID NO: 21634 - protein, 228 aa, Bradyrhizobium japonicum USDA 110
MSKKSQKKSSKTPSGTTAAKKKASKTRAATQTKSAKTQRTPASKSTGSIAKAASHGAASKQLNSSRSAPASAARQVLAEGQKAPAFRLPRDGGGAVTLSDYAGRKLVLFFYPRADTPGCTREAIDFTRLADAFAAAGTAVIGISADSLKAQEKFRDKHSLGIPLISDEKHEMLEAYGAWGEKSMYGKSFLGILRTTVLVGSDGKVARIWRNVRVDGHADQVLEAATSL

SEQ ID NO: 21635 - protein, 154 aa, Brucella melitensis 16M
MAHPQVGDMAPDFTLPSDHGEITLSSLKGHPVVVYFYPKDDTSGCTREAIAFSQLTAEFDRIGVRVIGLSPDSATKHARFRTKHALTVDLVADEDRVALEAYGVWVEKSMYGRKYMGVERTTFLIGADGRIAQVWNKVKVDGHAQAVLEAARRL

SEQ ID NO: 21636 - protein, 151 aa, Bacteroides thetaiotaomicron VPI-5482
MKNIGDKAPEVLGINEKGEEIRLSAYKGKKIVLYFYPKDSTSGCTAQACSLRDNYSELRKAGYEVIGVSVDSEKSHQKFIDKNNLPFTLIADTDKKLVEEFGVWGEKKLYGRAYMGTFRTTFLINEEGIIERIITPKEVKTKEHASQILNQ

SEQ ID NO: 21637 - protein, 154 aa, Bacillus cereus ATCC 14579
MITMITVGEMAPEFTLEGSNGEEVRLADFRGKNVVLYFYPKDMTPGCTTEACDFRDAYGVFQEKDTVILGVSPDSANRHLKFIEKHELPFTLLVDEDHKVAELYDVWKLKKNFGKEYMGIERSTFLINKDGELVKEWRKVKVKGHIEDVLSYIK

SEQ ID NO: 21638 - protein, 173 aa, Bacillus cereus ATCC 14579
MKKNRLLFRVIILLILCGAVGFTLYQGFFANKEKMQIGKEAPNFIVTDLEGKKIELKDLKGKGVFLNFWGTWCKPCEKEMPYMNELYPKYKEKGVEIIALDADETDIAVKNFVNQYGLKFPVAIDKGQKIIGTYGVGPLPTSFLIDKDGKVVEQIIGEQTKEQLEGYLKKITP

SEQ ID NO: 21639 - protein, 151 aa, Coxiella burnetii RSA 493
MSIEVGQKAPIFTLPTDEGEMLSLDDLKGKKVILYFYPKDDTPGCTKEACGFRDVWSQLSKAGVVVLGISKDSVKAHQSFKQKYNLPFTLLSDKDNTVCEQYGVMVDKNRFGKKYKGIERTTFLIDEEGVISAVWPKVKVDGHVAEVVGRL

SEQ ID NO: 21640 - protein, 155 aa, Streptomyces avermitilis MA-4680
MSERLQPGDTAPAFTLPDADGNEVSLADHKGRKVIVYFYPAALTPGCTKQACDFTDNLELLAGAGYDVIGVSPDKPEKLAKFREQENLKVTLVGDPDKQVLEAYGAFGEKKLYGKTVVGVIRSTVVVDEEGKVERALYNVKATGHVAKIIKDLGI

SEQ ID NO: 21641 - protein, 155 aa, Streptomyces avermitilis MA-4680
MTRRVDVGDKVEDFVLPDETGTPRQLSDLVADGPVVLFFYPAALTAGCTAEACHFRDLAAEFAAAGARPVGISGDPVDRQQEFAGQHTLGFPLLSDEDGTIRERFGVKRGFSLAPTKRVTFVIAEDRTVLEVVRSELRMSAHADRALTALRAHRS

SEQ ID NO: 21642 - protein, 153 aa, Sulfolobus solfataricus
MVKVGDKAPLFEGIADNGEKISLSDYIGKHNIVLYFYPKDDTPGCTREACAFRDNWDLLKDYDVVVIGVSSDDINSHKRFKEKYKLPFILVSDPDKKIRELYGAKGFILPARITFVIDKKGIIRHIYNSQMNPANHVNEALKALKQIKEEEIS

SEQ ID NO: 21643 - protein, 156 aa, Sulfolobus solfataricus
MVEIGEKAPEIELVDTDLKKVKIPSDFKGKVVVLAFYPAAFTSVCTKEMCTFRDSMAKFNEVNAVVIGISVDPPFSNKAFKEQNKINFTIVSDFNREAVKAYGVAGELPILKGYVLAKRSVFVIDKNGIVRYKWVSEDPTKEPNYDEIKDVVTKLS

SEQ ID NO: 21644 - protein, 153 aa, Thermoplasma acidophilum
MELLNVGDIAPDFETVDQYGKTVKLSSYRGKPVVLYFYPKDNTPGCTTEACNFRDNFNSFKDSGVEVIGVSVDSPESHKKFAEKYNLNFTLASDKSKDIVKKYGVLGLATAKRVTYIIDPDGKIAYVYPKVTPKDHALEVMNKLKDLGLVKNN

SEQ ID NO: 21645 - protein, 157 aa, Thermoplasma acidophilum
MAVKVGDKAPDFEAPDTNLKMRKLSDFKGQKVVLAFFPGAITSVCTKEMCTFRDSMANFNKVNAKVIGISVDSPFSLAEFAKKNNLTFDLLSDSNREISKKYGVLHENFVNVPGLTASKRSVFVIDKDGIVRYAWVSDDPGKEPNYKEVQDFVSKLN

SEQ ID NO: 21646 - protein, 157 aa, Thermotoga maritima
MLKSGDKAIDFELVNTDLKMVKLSDFSGKNVVLAFYPGAFTSVCEKELCTFRDSLSKFNRLNAVVLGISVDSPFANKAFAEKNHITFDLLSDFGGRVASQYGGVHENFLNIPGYTAAKRAVYVVDGGGTIVYSWVSEDPGKEPPYEEIEEALERLSK

SEQ ID NO: 21647 - protein, 154 aa, Ralstonia solanacearum
MPVTLDQPLPDFSAPATSGLTFSLAGQRGKVVVLYFYPKDNTPGCTTEAMNFRDQYDAFEAADAVVFGISRDSLKSHENFKAKLELPFELLSDADEAVCALFDTIKMKKMYGKDVRGIERSTFLIDRKGVLRQEWRGVKVPNHVDEVLGAVRAL

SEQ ID NO: 21648 - protein, 158 aa, Azotobacter vinelandii
MPVVLEQPVPDFQAQATGGQTVSLAALRGRQVVLYFYPKDSTPGCTTEGQGFRDRHDEFQAANTLVFGVSRDGLKSHENFKSKQAFPFELISDKEEQLCRLFDVIKLKKLYGKEYLGIDRSTFLIDEDGVLRQEWRGVKVPGHVDAVLAAARALQQSR

SEQ ID NO: 21649 - protein, 216 aa, Arabidopsis thaliana
MAASSSSFTLCNHTTLRTLPLRKTLVTKTQFSVPTKSSESNFFGSTLTHSSYISPVSSSSLKGLIFAKVNKGQAAPDFTLKDQNGKPVSLKKYKGKPVVLYFYPADETPGCTKQACAFRDSYEKFKKAGAEVIGISGDDSASHKAFASKYKLPYTLLSDEGNKVRKDWGVPGDLFGALPGRQTYVLDKNGVVQLIYNNQFQPEKHIDETLKFLKAA

SEQ ID NO: 21650 - protein, 155 aa, Mesorhizobium loti
MADLDVGDLAPQFDLPQDGGGSFSLAASAGKPVVLYFYPQDDTTSCTQEAISFSQLKPEFEKAGAVVIGLSPDNVKKHDKFKSKYNLTVDLAADEERKVIEAYHLWVEKSMYGRKYMGVERATFLIDRDGRIARIWRKVRVKGHAEDVLEAVRAL

SEQ ID NO: 21651 - protein, 155 aa, Sinorhizobium meliloti
MAGLGQGDVAPEFELPRDGGGSISLAALRGKPIVLFFYPKDDTKACTEEAISFSALAKEFQEAGIALVGISPDSAKSHDRFTQKHGLTVALGADEDKAAANAYGVWVEKSMYGRKYMGVERTTFLIDRQGVISRVWEKVKVPGHADEVLAAAKTL

SEQ ID NO: 21652 - protein, 153 aa, Dictyostelium discoideum
MTKLKVGDQAPDFTASDKDGKSYSLKDFADKVLVLYFYPKDSTPGCTKEACSFRDNYEQFTEAGAVVVGVSSDDAESHSKFSAKYRLPFTLLTDNKGEMAKKYGVKKELLLIPGRSTFIIDKNQKIALIHSSLLNAESHITESLKVIEQLKSQ

SEQ ID NO: 21653 - protein, 263 aa, Oryza sativa
  unsure (1)..(263): unsure at all Xaa locations
PLLWTPSTAAFRRGALSATTTPTPARAALPSTTGRNRIVCGKVTTTNNYPSSCRSRRSTMMHAAAWLLLQQLSPAAARVARAVDDDSSVQVSKGSAAPNFTLRDQDGRAVSLSKFKGRPVVVYFYPADETPGCTKQACAFRDSYEKFKKAGAEVIGISGDDXRLQKEFKKKYKLPFTLLSDEGNKVRKEWGVPADLFGTLPGRQTYVLDKNGVVQYIYNNQFQPEKHIGETLKILQSLXFSSSSSSFFNYNLSCMIHHSIPRN

SEQ ID NO: 21654 - protein, 219 aa, Triticum aestivum
  unsure (1)..(219): unsure at all Xaa locations
MAFAASTACCKPSVLLAPRASSSSSSSQARLCRPSTSAAFHGLRAPASAFALTPAPRRRAASTGIVCGKVSKGSVPPNFTLKDQDGKTVSLSKFKGKPVVLYFYPADETPGCTKQACAFRDSYEKYKKAGAEVIGISGDDAASHKAFAKKYRLPFTLLSDEGNKVRKEWGVPSDLFGTLPGRQTYVLDKKGVVQYIYNNQFQPEKHIGETLKIIQNLXI

SEQ ID NO: 21655 - protein, 252 aa, Triticum aestivum
  unsure (1)..(252): unsure at all Xaa locations
MAFAASTACCKPSVLLAPRASSSSSSSQARLCRPSTSAAFHGLRAPASAFALAPAPRRRAAYAGIVCGKVNFTLKDHDGTPVSLSKIKGKPVVLYFXPVVLYFYPADEAPGCTKQACAFRDGXXRETIGSSRDYAASHKAFAKKYRLPFKQLTDDRXTMLSDEGNKVRKEWGXVPSDLFGRVPGRQTYVLHKKGVVQYIYNNQFQPEKHIGETLKIIQNLXLIDRFEDRTTIFLPFPMPNISAPPVSTLHTC

SEQ ID NO: 21656 - protein, 138 aa, Triticum aestivum
  unsure (1)..(138): unsure at all Xaa locations
XTKQACASRDSYKKYKKAGAEVIGISGDDAASHKAFAKKYRLPFTLLSDEGNKVRKEWGVPSDLFGTLPGRQTYVLDKKGVVQYIYNNQFQPEKHIGETLKIIQNLXLIDRFEDRTTIFLPFPMPNISAPPVSTLHTC

SEQ ID NO: 21657 - protein, 256 aa, Zea mays
  unsure (1)..(256): unsure at all Xaa locations
MAFTPATACCKASLALAPRASPRGPAACAQAALLCTPSTSVFRGLRAPXIRRAGPAPAPLGGVHGHSLXARHAKGSVPPNFTLKDQNGKPVSLNKFKGKPXSWVYFYPADETPGCTKQACAFRDSYEKFKKAGXAEVIGISGXTTAASHKAFAQKYRLPFTLLSDEGNRVRKEWGVPSDLFGTLPGRQTYVLDKQGVVQYVYNNQFQPEKHIGXETLKILQTLXSDQPPHCSGPCSAIRRCKSTGLCSSVVYVTKS

SEQ ID NO: 21658 - protein, 140 aa, Zea mays
  unsure (1)..(140): unsure at all Xaa locations
MASSSSFFTFSSQTTLHSHPSQKXTFLTKTQFPVPTKSSESNFFGLRLSPSTSRSPLSPCSFKSSIFAKVNKGQSAPDFTLKDQNGKPVSLKKYKGKPVVVYFYPADETPGCTKQACAFRDSYEKFKKAGAEVXGISGDX

SEQ ID NO: 21659 - protein, 86 aa, Zea mays
  unsure (1)..(86): unsure at all Xaa locations
FIDKGTPVPKKWGVPLALFGTLPGAQKYVLDKKGVVQYVYNTQFQPEKPIGETLKIFQPLXSDHPPPCFGPCFAFVAVKGPAYVVV

SEQ ID NO: 21660 - protein, 157 aa, Novosphingobium aromaticivorans
MSERIGVGEAFPDIAMTTPDGGSVKASDFAGRKLVVFFYPKDDTPGCTTENKDFSSLHADFEAAGIAVLGVSKDPPKKHLKFAEKHALTAPLASDAEEGGVSDALGIWTEKSMYGRTYMGMERTTYLVGADGKIAQIWNKVKVKDHAAQVLAAAKAL

SEQ ID NO: 21661 - protein, 184 aa, Novosphingobium aromaticivorans
MTKLALTAVTAAFALILSAPASAELPTGARAPDFAAPGALAGKPFSFKLHQALKKGPVVLYFYPKAFTQGCTLEAHAFAEASADFRAAGATVIGMSNDDVATLQKFSTEACRDKFAVASASANLIKAYDVDLKKPDGTSTGLTKRTSYVIGRNGRIVMVHSDMDYRDHVRLTLAAVRKLKGGKG

SEQ ID NO: 21662 - protein, 195 aa, Schizosaccharomyces pombe
MDAPRRSSRLAAKIANVLDSKGTIIPEAAPVMLKKPAKDESVDSTIQVGDVIPDITLPDEDGTSIRLRDITANKGLVIFAYPKASTPGCTKQGCGFRDNYPKIQASDYEVLGLSFDTSKAQKAFKDKQNFPYHLLSDPKGELIKKLGAEKPGGGKLFRSHWIFEKGTGKCIVKEIDISPLVSVDKAFAVITDSEP

SEQ ID NO: 21663 - protein, 215 aa, Saccharomyces cerevisiae
MGEALRRSTRIAISKRMLEEEESKLAPISTPEVPKKKIKTGPKHNANQAVVQEANRSSDVNELEIGDPIPDLSLLNEDNDSISLKKITENNRVVVFFVYPRASTPGCTRQACGFRDNYQELKKYAAVFGLSADSVTSQKKFQSKQNLPYHLLSDPKREFIGLLGAKKTPLSGSIRSHFIFVDGKLKFKRVKISPEVSVNDAKKEVLEVAEKFKEE

SEQ ID NO: 21664 - protein, 152 aa, Thermoplasma volcanium
MELLKVGDQAPDFETVDQSGSKVRLSDFKGQPVVLYFYPKDNTPGCTTEACNFRDNFNSFKEAGIKVIGVSVDSPESHKRFAEKYQLNFTLASDKEKEICKKYGVLGLATAKRVTYIIDRDGKIVYVYPKVTPKDHAVEVMNKIKELGLIPS

SEQ ID NO: 21665 - protein, 154 aa, Thermoplasma volcanium
MYMELLKVGDQAPDFETVDQSGSKVRLSDFKGQPVVLYFYPKDNTPGCTTEACNFRDNFNSFKEAGIKVIGVSVDSPESHKRFAEKYQLNFTLASDKEKEICKKYGVLGLATAKRVTYIIDRDGKIVYVYPKVTPKDHAVEVMNKIKELGLIPS

SEQ ID NO: 21666 - protein, 157 aa, Thermoplasma volcanium
MSPKVNEKAPDFEAPDTALKMRKLSEFRGQNVVLAFFPGAFTSVCTKEMCTFRDSMANFNKFKAKVIGISVDSPFSLAEFAKKNNLTFDLLSDSNREISKKYDVLHQNFAGVPGLTASKRSVFIIDGDGIVRYAWVSDDPGKEPDYKAIQEFLSKMN

SEQ ID NO: 21667 - protein, 163 aa, Aeropyrum pernix
MPGVGEQAPDFEGIAHTGEKIRLSDFRGRIVVLYFYPRAMTPGCTREGVRFNELLDEFEKLGAVVIGVSTDSVEKNRKFAEKHGFRFKLVSDEKGEIGMKYGVVRGEGSNLAAERVTFIIDREGNIRAILRNIRPAEKHADLALEEVKKLVLGKKAERAGEVI

SEQ ID NO: 21668 - protein, 110 aa, Aeropyrum pernix
MLSVGDPAPDIEIQLIDGSTIRLSQLRGRSVVLYFYPKAFTPGCTREAIGFNGLYEEFKKLGAEVIGVSMDPPGRNRRFAQNYGVRFRLASDVEGEAFKSFWGAQRPRTD

SEQ ID NO: 21669 - protein, 164 aa, Aeropyrum pernix
MKGLVELGEKAPDFTLPNQDFEPVNLYEVLKRGRPAVLIFFPAAFSPVCTKELCTFRDKMAQLEKANAEVLAISVDSPWCLKKFKDENRLAFNLLSDYNREVIKLYNVYHEDLKGLKMVAKRAVFIVKPDGTVAYKWVTDNPLNEPDYDEVVREANKIAGELVA

SEQ ID NO: 21670 - protein, 182 aa, Prochlorococcus marinus subsp. pastoris str. CCMP1378
MLRHLVHLLSHETRFLVFYIHSYLIMSMALKVGDKAPEFNLKDSFEKDVSLKDFKGKRIILYFYPKDNTPGCTKEACNFKENWDLLKQNNFVVLGISKDSAASHQKFIEKFDLPFVLLTDPEPYKTSSDYDSYGLKKFMGKEYMGMMRNTFLIDVDGKVEKIYLKVKAAIMADHIISDLGLR

SEQ ID NO: 21671 - protein, 152 aa, Nostoc punctiforme
MPIKVGDTAPNFTLPAQNGSTVSLQDFRGTKAVVLYFYPKDDTPGCTAESCAFRDQYEVFKSVGAEVVGVSADSSESHQKFAAKYNLPFTLLTDKGDQVRKLYGATAAFGLFPGRVTYVIDQQGVVQYVFDSMLNFKGHVEEALKTLQQIAK

SEQ ID NO: 21672 - protein, 145 aa, Nostoc punctiforme
MPLAVGTDAPAFTAKDTNGNTVSLSDFAGKTVVLYFYPKDDTPGCTKQACSFRDAQSEYQGKDIVVLGVSADDEVSHQAFTQKYNLNFPLLADYDKSLITAFDVDGGGYAKRVTYVIDPNGKITHVDNAVNTTTHASDILAALGL

SEQ ID NO: 21673 - protein, 159 aa, Nostoc punctiforme
MTNIPQIGQPAPDFSTPDQNGNSVTLDDFSSQWVILYFYPKDDTPGCTTEAKDFTELYQDFSALGAKILGVSPDLGKSHCKFISKHNLSITLLSDPEHILTEAYGAWRLKKFMGKEYMGVARSTFLISPDKIIAYTWPNVKAKGHAQAVLTKLQELAAT

SEQ ID NO: 21674 - protein, 154 aa, Halobacterium sp. NRC-1
MLSEGTTAPDFSLANQDDETVSLSSFAGQHVVVYFYPRADTPGCTSEACEFRDNWGRYDDAGVPVVGISDDPVSELAAFKDKYNLPFDLLSDAGGEVATAYESYDEQEITGELMDVTLRNTYVIGPDGTITAAFEGVDPEGHADEVLAAIEDAA

SEQ ID NO: 21675 - protein, 155 aa, Vibrio cholerae
MNTLTAGTPAPAFSLPDQNGNPVTLADFAGKKVLLYFYPKAMTPGCTVQAQGLRDIQAELQGHNVVVLGVSTDPVKRLGKFIERDNLNFSLLSDEDHQVAEQFGVWGEKKFMGKVFDGLHRISFLINEQGVIEQVFDKFKTSNHHEVVLAYLSGK

SEQ ID NO: 21676 - protein, 155 aa, Haemophilus influenzae Rd
MNPLSVGNQAPAFTLLNQQEKFVSLSDFRGKKVLIYFYPKALTPGCTTQACGLRDSKSELDVLGLVVLGISPDAPKKLAQFIEKKELNFTLLSDPDHQVAEQFGVWGEKKFMGRTYDGIHRISFLINESGTIMQVFDKFKIKDHHQMIIDYLRSL

SEQ ID NO: 21677 - protein, 153 aa, Prochlorococcus marinus str. MIT 9313
MALQVGDKAPAIDLVDQNGNKRRSNDLKGKVLVLFFYPKDDTPGCTAEACSFRDNYSVFENLGSEVWGVSGDDDISHRQFAERHGLPYALLSDKDNTLRRAFEVPRTLGMLPSRVTYVIDGQGTIRHIFNNLLDGPAHMREACRVVEEIKKKR

SEQ ID NO: 21678 - protein, 160 aa, Prochlorococcus marinus str. MIT 9313
MEAASMTLKIGDPAPDFNLPNQDGTLVQLASLRGQRVVIYFYPKDDTPGCTKEACNFRDQWERFEANDIKVLGISKDGATSHTKFIKKYQIPFTLLSDAEPCPVASSYESYGLKKFMGREYMGMMRHSFVVDPKGNLELIYLKVKAATMADQILKDLGLD

SEQ ID NO: 21679 - protein, 187 aa, Prochlorococcus marinus str. MIT 9313
MKRSELLRVITGAAVLSISQCLGRPSQALAMEGKLPALDAQAPDFELEAAAQEGALAEKLQRDAFLGSWLVLYFYPRDFTSGCTLEARGFQRDLSDFKAAGAAVVGVSADGTEEHVSFCSSEGLGYTLLSDPGGVVSERYGSWSSPFSQRHTFLIDPDGILRARWKDVSPSRHSQDVLRALKELQQS

SEQ ID NO: 21680 - protein, 155 aa, Pasteurella multocida
MKTLSIGESAPQFSLLNQCKENISLNQFAGKKVLVYFYPKALTPGCNTQACGLRDSKTELEKHGVVILGISPDSPEKLSKFSEKKALNFHLLADEDHQVAEQFGVWGEKKFLGKTYDGIHRISFLIDEQGNVEQVFRQFKTSNHHQVVLDYLTQK

SEQ ID NO: 21681 - protein, 156 aa, Rickettsia conorii
MTLELGKKLPDLSLHIGQDNVIKLSDLKGKFVILYFYPKDDTPGCTIEAQDFNKLKPEFDKLNTVIIGVSKDKLDSHDKFKEKYSLGFDLASDANSNLCEQLGVWIAKSMFGKKYMGIDRATFLLDKEGIVKHIWRSVNAKNHAQEVLEKLRTMLS

SEQ ID NO: 21682 - protein, 157 aa, Mycobacterium tuberculosis H37Rv
MTKTTRLTPGDKAPAFTLPDADGNNVSLADYRGRRVIVYFYPAASTPGCTKQACDFRDNLGDFTTAGLNVVGISPDKPEKLATFRDAQGLTFPLLSDPDREVLTAWGAYGEKQMYGKTVQGVIRSTFVVDEDGKIVVAQYNVKATGHVAKLRRDLSV

SEQ ID NO: 21683 - protein, 154 aa, Mycobacterium tuberculosis H37Rv
MKTGDTVADFELPDQTGTPRRLSVLLSDGPVVLFFYPAAMTPGCTKEACHFRDLAKEFAEVRASRVGISTDPVRKQAKFAEVRRFDYPLLSDAQGTVAAQFGVKRGLLGKLMPVKRTTFVIDTDRKVLDVISSEFSMDAHADKALATLRAIRSG

SEQ ID NO: 21684 - protein, 151 aa, SYNECHOCOCCUS SP. WH 8102
MAIGVGDSLPSFCLDDQDGVQRTPETARGRWLVLFFYPKDDTPGCTAEACGFRDSSAAFQELGAEVWGISGDDAISHRRFATRHGLNFPLLVDRNNSLRRSLGVPKALGLVPGRVTYVVDGEGVIRHVFSNLLDGPAHVREAERVISSLQG

SEQ ID NO: 21685 - protein, 230 aa, SYNECHOCOCCUS SP. WH 8102
MVPATAPWLDQPRSSRRGSAASRAGSGGTQRPETWPCHPSNPLPQARVPHRTGDPDVPGSATVPLRFGSQAAAAPVALQIGDPAPDFSLPNQDGDLVQLSSLRGQRVVIYFYPKDDTPGCTKEACNFRDRWDRFEQHGIKVLGISKDNATSHTKFISKHELPFTLLTDVEPCEVASSYESYGLKKFMGREYMGMMRHTFVVDADGKLERIYLKVKSATMADTILSDLELA

SEQ ID NO: 21686 - protein, 186 aa, SYNECHOCOCCUS SP. WH 8102
MRRRDLFIKSGLLLTALSITPTKAWSLGGVVLEQGAEVPSFDLPGSSRREPDRDRWSSDDLRGRWLAVYFYPRDFTGGCTIEARGFESLHSDFLAAGAEVVGISADSVDDHASFCESEGLSFPLLSDPDGAVSKAYGSWMAPYSLRHTFLIDPSGILRQRWVAVRPSGHAQEVLDAITDLQNNTSI

SEQ ID NO: 21687 - protein, 152 aa, Helicobacter pylori 26695
MEKLEVGQLAPDFRLKNSDGVEISLKDLLHKKVVLYFYPKDNTPGCTLEAKDFSALFSEFEKKNAVVVGISPDNAQSHQKFISQCSLNVILLCDEDKKAANLYKAYGKRMLYGKEHLGIIRSTFIINTQGVLEKCFYNVKAKGHAQKVLESL

SEQ ID NO: 21688 - protein, 152 aa, Helicobacter pylori J99
MEKLEVGQLAPDFRLKNSDGVEISLKDLLHKKVVLYFYPKDNTPGCTLEAKDFSALFSEFEKKNAVVVGVSPDNSQSHQKFISQCSLNVILLCDEDKKVANLYKAYGKRMLYGKEHLGIIRSTFIINTQGVLEKCFYNVKAKGHAQKVLESL

SEQ ID NO: 21689 - protein, 154 aa, Bacillus halodurans
MLEGKQAPDFSLPASNGETVSLSDFKGKNIVLYFYPKDMTPGCTTEACDFRDRVEDFKGLNTVILGVSPDPVERHKKFIEKYSLPFLLLADEDTKVAQQYDVWKLKKNFGKEYMGIERSTFVIDKDGTVVKEWRKVRVKDHVEEALAFIKENLE

SEQ ID NO: 21690 - protein, 156 aa, Salmonella enterica subsp. enterica serovar Typhi
MNPLKAGDIAPKFSLPDQDGEQVNLTDFQGQRVLVYFYPKAMTPGCTVQACGLRDNMDELKKAGVDVLGISTDKPEKLSRFAEKELLNFTLLSDENHQVCEQFGVWGEKSFMGKTYDGIHRISFLIDADGKIEHVFNDFKTSNHHDVVLNWLKENA

SEQ ID NO: 21691 - protein, 153 aa, Nitrosomonas europaea
MSDDLIPDFELASTGNKQFRLSDVKSRYLVIFFYPKDDTPGCTSESQQFRDLYPEFVQIGCEIVGISRDNLKSHDKFRGKYDLPYDLLSDSDEVVCELFGVMKMKNMYGKQVRGIERSTFVLDRDGKVYKAWRGVKVPGHAEEVLAFIKSVTA

SEQ ID NO: 21692 - protein, 163 aa, Ferroplasma acidarmanus
MALKIGDKAPDFKANDELGKTVSLADFRGKSPVVLYFYPKAETPGCTAEAKCFRDNWDAIKPLGAIVLGVSSDSEEKQKSFKDHYKLQFTLLSDKNKSIREAYDAKGFLIPARITYIIDKQGIIRGVHNSQMDPKSHIDFAIKTLKEISSTQEKNSPEASAQE

SEQ ID NO: 21693 - protein, 149 aa, Ferroplasma acidarmanus
METLKIGEQAPDFETIDQDGKNVKLSDFKDSVVVLYFYPKDNTPGCTMEAKNFRDNIDMFTEKGVKVFGVSVDSSESHKKFQEKYNLNFTLLSDKQKDIVKKYGVLGLATAKRVTYIIKDGKIVYVYPKVSPGEHAKEVYEKLQELKLI

SEQ ID NO: 21694 - protein, 159 aa, Ferroplasma acidarmanus
MNDMVEEGELAPDFEALDTGLKSKKLSDYKGNVTVLAFFPGAFTSVCTKEMCTFRDSMANFNKFNAKVVGISVDSPFSLKEFATKNKLQFDLLSDGNREISGKYGALYKSFLNINGLTASKRSVFVLDKTGKIVYKWVSEDAGKEPDYKKIEEVISKYN

SEQ ID NO: 21695 - protein, 149 aa, Cytophaga hutchinsonii
MTLTAGDKAPVFKGTDQDGNTISLKDFAGKKVVLYFYPKDNTPGCTKQACDLRDNYNALLKAGYVVIGVSTDSEKSHQKFIKKFELPFPLIADEDKTIHEQYGVWGEKSMYGKTYMGTLRTTFVIDEKGKIEEVISKVKTDDHTAQILK

SEQ ID NO: 21696 - protein, 171 aa, Cytophaga hutchinsonii
MRKLVLICTLLFFISSSVYAQTQLKAGDKAPAFSAKDQNGKIVSLTSFKGRKLVLYFYPKDNTPGCTKEACNLRDYKDTLAAQGYTILGVSTDDAFSHQQFIKQYNLPYDLLVDSDAAINKAYGVWVQKEREGKVFYGTARTTFIINESGVITKVIDAVKVDAHAEQILTK

SEQ ID NO: 21697 - protein, 134 aa, Burkholderia fungorum
MEDFVHDPFAARGALERWFGDFSSSRFQPRIDVVDEGKILRVTIELPGMEREDLSVSVEDGALVLRGEKKQDVHSEEDGCYRLERAYGVFTRTIPMPDNADPDHALAKFDKGVLTLTVPKREQLRSASRTIDIG

SEQ ID NO: 21698 - protein, 185 aa, Burkholderia fungorum
MNIELSKWNPFKFLRKAQNGREKPSSNPPTTKNWLTEWPDASRLFSSDPWRVMRELLHDPFAGGALERWFGDFSSSWFQPRIDVVDDGDVLRITAELPGMDRGDLQTSIEEGVLVLRGEKKQDTRSEENGCYRLERSYGAFTRTIPLPDGVDVDKVDAKFDKGVLTVRLPKTDSARPTIRKVEIK

SEQ ID NO: 21699 - protein, 137 aa, Enterococcus faecium
MANVPSIRDMFPDFNDVFSPAFNDFLGVSSYPKVDLVENEKEYKLTADMPGCDKEDTTVEYSDNTLTISANHESHTEDKEDGNYVRKERHSVSYKRSFYLPNVDEEKITGTFKNGVLKLVLPKTAYQPKETKKIELN

SEQ ID NO: 21700 - protein, 169 aa, Magnetospirillum magnetotacticum
MSVRDLIPWGRSNGNQVPSVLRDGDRDPFLSLHREVNRLFDDVFRGFGSNLPSLVGASAFSGGWPNVEISDGEKEIKVTAEVPGLEEKDIEVLLDDGVLTLKGEKRSETEDKDRQFSERFYGRFERRIPLGYEVKDDKVDARFRNGVLTVTLPKSEKAQSQVKRIAIKS

SEQ ID NO: 21701 - protein, 142 aa, Chlorobium tepidum TLS
MALTLYGKDPLKMFEDVFNERLTPFISSMGSMMAPAFKVDISEDEKAIYLSADIPGVKKEDVKVSIEDDVISISAERTQEEEEKKKNYHRVERSWGSLSRSFTIGDNVDSDNITANYDNGVLKVVIPKKEPEQKKSKEIAVS

SEQ ID NO: 21702 - protein, 184 aa, Thermobifida fusca
MRYVVDASTAGPQWAARSSRILSAPNRKVIAMALPVTRRRERLIPTQWGAFPEFEELYDRMGRLLESAFGEPIISPTTWTPFADLLEDDKSYIVEAEVPGMSKDDINIQVSGNELIISGKVEEQEKEGVRAHRRMRRYGEFEYRTVLPGEIDAEGVRAKLDNGVLTVTAPKSAHERPRHVAIES

SEQ ID NO: 21703 - protein, 140 aa, Archaeoglobus fulgidus DSM 4304
MGMLIDPFEELRRMQERFNRLLEEFGRFPEVKEFRVTMPVDVIDEGEQIRVVADLPGFSKEDLEIYFEDGDLVIKAEKKEEFEEKKGEYLRRERRMGKVYRRIALPAGLDIDAVKAKYNNGVLEITIPKLKKDRKAVQIE

SEQ ID NO: 21704 - protein, 238 aa, Funaria hygrometrica
MASSTAKSGFHTFMEALTGAGREPVTAVSCRPPCYGFRRLAVVSSSQQENASENSDRSLTQLPRQDGGSRSPGPRRPMGLRRGDTRRDLTSSLFDIWDPFIGDRSLKQMLNTVDRLFADPFFGSPPSATALDLRTPWDVKEDADAYKLRFDMPGLSKEEVKVSVEDGDLVIRGEHNAEDQKEDSWSSRSYGSYNTRMALPEDALFEDIKAELKNGVLYVVVPKSKKDAQKKVLDINVQ

SEQ ID NO: 21705 - protein, 243 aa, Funaria hygrometrica
MAARTLSRVVASPARSFLSTFRDTFLMQGRSPLPRQAPFSVAQRMAVSGSAQTVSDDDYESRSQLEKMQNESNASQKRSQGGLRRVVPRDLAASFFDVWDPFLGNKSLRQMLNTVDRLFDDPFFSAAPSRPTGIALDFRTPWDVKEDNESFRLRFDMPGLGKDEVKVYVEDGDLVIKGAHRAEEQKENNWSSRSYGSYNTRMTLPENVKIDEVKAELKNGVLQVVVPKSKEEPKKNVIDINVE

SEQ ID NO: 21706 - protein, 157 aa, Chlamydomonas reinhardtii
MALSNYVFGNSAADPFFTEMDRAVNRMINNALGVAPTSAGKAGHTHAPMDIIESPTAFELHADAPGMGPDDVKVELQEGVLMVTGERKLSHTTKEAGGKVWRSERTAYSFSRAFSLPENANPDGITAAMDKGVLVVTVPKREPPAKPEPKRIAVTGA

SEQ ID NO: 21707 - protein, 227 aa, Arabidopsis thaliana
MASTLSFAASALCSPLAPSPSVSSKSATPFSVSFPRKIPSRIRAQDQRENSIDVVQQGQQKGNQGSSVEKRPQQRLTMDVSPFGLLDPLSPMRTMRQMLDTMDRMFEDTMPVSGRNRGGSGVSEIRAPWDIKEEEHEIKMRFDMPGLSKEDVKISVEDNVLVIKGEQKKEDSDDSWSGRSVSSYGTRLQLPDNCEKDKIKAELKNGVLFITIPKTKVERKVIDVQIQ

SEQ ID NO: 21708 - protein, 160 aa, Malus x domestica
MSLIPNSRRGSSSVFDPFSLNLWDPFKDFPFPSSSSLSAFPEFSRENSAFVNTRVDWKETPEAHVFKADVPGLKKEEVKVEVEDDRVLKISGERNVEEEDKNDKWYRVERSSGKFLRRFQLPENAKVDQIKAAMENGVLSVTVPKAELKNVDVRAIEISG

SEQ ID NO: 21709 - protein, 169 aa, Mesorhizobium loti
MSVRDLIPWSRGGGPAPSIYRGDDMDPFLSLHRNVNRLFDEVFRGFDTPSVLGRMAPLNGTWPGVEFSETDEEIRLTAEIPGLDENDVEVMLDDGVLTLRGEKKAETEDKDRQFSERYYGRFERRFGLGREVEDDKVAATFKNGVLTVTLPKTKRAQANAKRIAINGNK

SEQ ID NO: 21710 - protein, 168 aa, Sinorhizobium meliloti
MNVRDLIPWGRAQGQVPASYRDNDRNPFLALHREMNRLFDDAFRSFETRLPISGFSGFAGGWPSVEVSDRDKEIKVTAELPGLDEKVVELSLSDGVLSLRGEKRAETEDQENQFSERYYGRFERRIALGYEVDESKVNATFRNGVLTVTLPKTEQAQSKAKRIAINGR

SEQ ID NO: 21711 - protein, 231 aa, Glycine max
MAQALSTSSLLLSQKTGSYVKPQNNVIVPCMASFPSRKEFPRLGRVRAQASGDNKDNSVEVQHVSKGDQGTAVEKKPRRTAMDISPFGILDPWSPMRSMRQILDTMDRVFEDTMTFPGRNIGGGEIRAPWDIKDEEHEIRMRFDMPGLAKEDVKVSVEDDMLVIKGGHKSEQEHGGDDSWSSRTYSSYDTRLKLPDNCEKDKVKAELKNGVLYITIPKTKVERKVIDVQVQ

SEQ ID NO: 21712 - protein, 181 aa, Glycine max
GGDNKDNSVEVQHVSKGDQGTAVEKKPRRTAMDISPFGILDPWSPMRSMRQILDTMDRVFEDTMTFPGRNIGGGEIRAPWDIKDEEHEIRMRFDMPGLAKEDVKVSVEDDMLVIKGGHKSEQEHGGDDSWSSRTYSSYDTRLKLPDNCEKDKVKAELKNGVLYITIPKTKVERKVIDVQVQ

SEQ ID NO: 21713 - protein, 158 aa, Medicago sativa
MSLIPSFFGGRRSNVFDPFSLDVWDPFKDFPFNNSALSASFPRENSAFVSTRVDWKETPEAHVFKADLPGMKKEEVKVEIEDDRVLQISGERSVEKEDKNDQWHRLERSSGKFMRRFRLPENAKMDQVKAAMENGVLTVTVPKEEVKKPEVKTIDISG

SEQ ID NO: 21714 - protein, 232 aa, Pisum sativum
MAQSVSLSTIASPILSQKPGSSVKSTPPCMASFPLRRQLPRLGLRNVRAQAGGDGDNKDNSVEVHRVNKDDQGTAVERKPRRSSIDISPFGLLDPWSPMRSMRQMLDTMDRIFEDAITIPGRNIGGGEIRVPWEIKDEEHEIRMRFDMPGVSKEDVKVSVEDDVLVIKSDHREENGGEDCWSRKSYSCYDTRLKLPDNCEKEKVKAELKDGVLYITIPKTKIERTVIDVQIQ

SEQ ID NO: 21715 - protein, 235 aa, Lycopersicon esculentum
MAYTSLTSSPLVSNVSVGGTSKINNNKVSAPCSVFVPSMRRPTTRLVARATGDNKDTSVDVHHSSAQGGNNQGTAVERRPTRMALDVSPFGVLDPMSPMRTMRQMIDTMDRLFEDTMTFPGRNRASGTGEIRTPWDIHDDENEIKMRFDMPGLSKEDVKVSVENDMLVIKGEHKKEEDGRDKHSWGRNYSSYDTRLSLPDNVVKDKIKAELKNGVLFISIPKTEVEKKVIDVQIN

SEQ ID NO: 21716 - protein, 234 aa, Lycopersicon esculentum
MAYTSLTSSPLVSNVSVGGTSKINNNKVSAPCSVFVPSMRRPTTRLVARATGDNKDTSVDVHHSSAQGGNNQGTAVERRPTRMALDVSPFGVLDPMSPMRTMRQMIDTMDRLFEDTMIPGRNRASGTGEIRTPWDIHDDENEIKMRFDMPGLSKEDVKVSVENDMLVIKGEHKKEEDGRDKHSWGRNYSSYDTRLSLPDNVVKDKIKAELKNGVLFISIPKTEVEKKVIDVQIN

SEQ ID NO: 21717 - protein, 205 aa, Nicotiana sylvestris
LTCSAASPLSNVVNVSAASSRSNNRVTAPCSVFFPSACNVKRPASRLVAQATGDNKDTSVDVHVSSGQGGNNNQGSTSVQRRPRKMALDVSTFGLLDPMSPMRTMRQMMDTMDRLFEDTMTFPGSNRASTGEIRAPWDIKDDENEIKMRFDMPGLSKEDVKVSVENDVLVIKGEHKKEESGDDNSWGRNYSSYDTRLSLPDNVEK

SEQ ID NO: 21718 - protein, 240 aa, Nicotiana tabacum
MACKTLTCSAASPLVVNGVTASSRSNNRVAAPFSVFFPSTCNVKRPASRLVVEATGDNKDTSVDVHVSSGQGGNNNQGSTSVDRRPRKMSLDVSPFGLLDPMSPMRTMRQMMDTMDRLLEDTMTFPGRNRSSAVGEIRAPWDIKDDENEIKMRFDMPGLSKDEVKVSVEDDLLVIKGEYKKEETGDDNSWGRNYSSYDTRLSLPDNVEKDKIKAELKNGVLFISIPKTKVEKKVIDVQIN

SEQ ID NO: 21719 - protein, 204 aa, Nicotiana tabacum
LTCSAASPLVVNGVTASSRSNNRVAAPFSVFFPSTCNVKRPASRLVVEATGDNKDTSVDVHVSSGQGGNNNQGSTSVDRRPRKMSLDVSPFGLLDPMSPMRTMRQMMDTMDRLLEDTMTFPGRNRSSAVGEIRAPWDIKDDENEIKMRFDMPGLSKDEVKVSVEDDLLVIKGEYKKEETGDDNSWGRNYSSYDTRLSLPDNVEK

SEQ ID NO: 21720 - protein, 241 aa, Petunia x hybrida
MACKTLTCSASPLVSNGVVSATSRTNNKKTTTAPFSVCFPYSKCSVRKPASRLVAQATGDNKDTSVDVHVSNNNQGGNNQGSAVERRPRRMALDVSPFGLLDPMSPMRTMRQMMDTMDRLFEDTMTFPGSRNRGTGEIRAPWDIKDDENEIKMRFDMPGLSKEEVKVSVEDDVLVIKGEHKKEESGKDDSWGRNYSSYDTRLSLPDNVDKDKVKAELKNGVLLISIPKTKVEKKVTDVEIK

SEQ ID NO: 21721 - protein, 244 aa, Hordeum vulgare
MAAATAPFALVSRLSPAARLPIRAWRAARPAPLWTGRTRPLSVASAAQENTDSSVDVQVSQDRNAGNQQGNAVQRRPRRAAGFDISPFGLVDPMSPMRTMKQMLDTMDRLFDDAVGFPTAGRSPAAAAGEMPRMPWDIMEDDKEVKMRFDMPGLSREEVKVMVEDDALVIRGEHKKEAGEGQGEAAGGGDGWWKERSVSSYDMRLALPDECDKSQVRAELKNGVLLVSVPKRETERKVIDVQVQ

SEQ ID NO: 21722 - protein, 243 aa, Hordeum vulgare
MAAATAPFALVSRLSQAARLPIRAWRAARPAPLWTGRTRPLSVASAAQEDRDNSVDVQVSQARNAGNQQGNAVQRRPRRAGFDISPFGLVDPMSPMRTMKQMSDTMDRLFDDAVGFPTARRSPAAAAGEMPRMPWDIMEDDKEVKMRFDMPGLSREEVKVMVEDDALVIRGEHKKEAGEGQGEAAGGGDGWWKERSVSSYDMRLALPDECDKSQVRAELKNGVLLVSVPKRETERKVIDVQVQ

SEQ ID NO: 21723 - protein, 239 aa, Oryza sativa
MAAPFALVSRVSPAARLPIRAAWRSEPTVGLPSSGRARQLAVASAAQENRDNTAVDVHVNQDGGNQQGNAVQRRPRRSSAFGRHLPFGLVDPMSPMRTMRQMLDTMDRMFDDVALGFPATPRRSLATGEVRMPWDVMEDDKEVRMRFDMPGLSREEVKVMVEDDALVIRGEHKKEEGEGAEGSGDGWWKERSVSSYDMRLALPDECDKSKVRAELKNGVLLVTVPKTEVERKVIDVQVQ

SEQ ID NO: 21724 - protein, 241 aa, Oryza sativa
  unsure (1)..(241): unsure at all Xaa locations
MAAPFALVSRVSPAARLPIRAAWRRARPTVGLPSSGRARQLAVASAAQENRDNTAVDVHVNQDGGNQQGNAVQRRPXRRSSAFGRHLPFGLVDPMSPMRTMRQMLDTMDRMFDDVALGFPATPRRSLATGEVRMPWDVMEDDKEVRMRFDMPGLSREEVKVMVEDDALVIRGEHKKEEGEGAEGSGDGWWKERSVSSYDMRLALPDECDKSKVRAELKNGVLLVTVPKTEVERKVIDVQVQ

SEQ ID NO: 21725 - protein, 205 aa, Oryza sativa
  unsure (1)..(205): unsure at all Xaa locations
TVGPFALVTRVSPVACLPIRAAWRSXXSGNXNGGNQQGNVVQRAXSALNNISPFALVDLXSPMRLIRXMLDMIDXMFNNVTLGFPVALWRSPATGKVRICWDIMDDDKRGEIRFDMLGLSREDVKVMVEDNMLVIRGEHSKXGEGTGGSDDGWWKERSMSSYNMRLVLPNVGDKSKVRAELKNGVLFVIVPKTEVKHKVIEGAEQ

SEQ ID NO: 21726 - protein, 227 aa, Oryza sativa
  unsure (1)..(227): unsure at all Xaa locations
MVDATSPTISISMLLISSLFGSATVGPFALVTRVSPVACLPIRAAWRSXXSGNXNGGNQQGNVVQRAXSALNNISPFALVDLXSPMRLIRXMLDMIDXMFNNVTLGFPVALWRSPATGKVRICWDIMDDDKRGEIRFDMLGLSREDVKERSMSSYNMRLVLPNVGDKSKVRAELKNGVLFVIVPKTEVKHKVIEGAEQRGEGREEDGRKKVEDRKGRRWMKNVMAVA

SEQ ID NO: 21727 - protein, 150 aa, Pennisetum glaucum
MSLVRRGNVFDPFSMDLWDPFDNMFRSIVPSSSSSDTAAFANARIDWKETPEVHVFKADLPGVKKEEVKVEVEDGNVLVISGQRSKEKEDKNDRWHRVERSSGQFVRRFRLPEDAKTDQVNAGLENGVLTVTVPKAEGKKPEVKAIEISG

SEQ ID NO: 21728 - protein, 238 aa, Triticum aestivum
MAAANAPFALVSRLSPAARLPIRAWRAARPAPLSTGGRTRPLSVASAAQENRDNSVDVQVSQAQNAGNQQGNAVQRRPRRAGFDISPFGLVDPMSPMRTMRQMLDTMDRLFDDAVGFPTRRSPAARARRRMPWDIMEDEKEVKMRFDMPGLSREEVRVMVEDDALVIRGEHKKEAGEGQGEGGDGWWKERSVSSYDMRLALPDECDKSQVRAELKNGVLLVSVPKRETERKVIDVQVQ

SEQ ID NO: 21729 - protein, 240 aa, Triticum aestivum
MAAANAPFALVSRLSPAARLPIRAWRAARPAPLSTGGRTRPLSVASAAQENRDNSVDVQVSQAQNAGNQQGNAVQRRPRRAGFDISPFGLVDPMSPMRTMRQMLDTMDRLFDDAVGFPTARRSPAAASETPRMPWDIMEDEKEVKMRFDMPGLSREEVRVMVEDDALVIRGEHKKEAGEGQGEGGDGWWKERSVSSYDMRLALPDECDKSQVRAELKNGVLLVSVPKRETERKVIDVQVQ

SEQ ID NO: 21730 - protein, 240 aa, Triticum aestivum; identical to SEQ ID NO: 21729

SEQ ID NO: 21731 - protein, 243 aa, Triticum aestivum
MADANAPFALVSRLSPAARLPIRAWRAARPAPLSTGGRTRPLSVASAAQENRDNSVDVQVSQAQNAGNQQGNAVQRRPRRAGFDISPFGLVDPMSPMRTMRQMLDTMDRLFDDAVGFPTARRSLAAASEMPRMPWDIMEDDKEVKMRFDMPGLSREEVKVMVEGDALVIRGEHKKEAGEGQGEAAEGGDGWWKERSVSSYDMRLALPDECDKSQVRAELKNGVLLVSVPKRETERKVIDVKVQ

SEQ ID NO: 21732 - protein, 243 aa, Triticum aestivum; identical to SEQ ID NO: 21731

SEQ ID NO: 21733 - protein, 243 aa, Triticum aestivum
MAAANAPFALVSRLSPAARLPIRAWRAARPAPLSTGGRTRPLSVASAAQENRDNSVDVHVSQAQDAGNQQGNAVQRRPRRAGFDISPFGLVDPMSPMRTMRQMLDTMDRLFDDAVGFPTARRSPAAASETPRMPWDIMEDDKEVKMRFDMPGLSREEVRVMVEGDALVIRGEHKKEAGEGQGEAAEGGDGWWKERSVSSYDMRLALPDECDKSQVRAELKNGVLLVSVPKRETERKVIDVQVQ

SEQ ID NO: 21734 - protein, 238 aa, Triticum aestivum
MAAANAPFALSRLSPAARLPFRAWRAARPAPVWTGRTRPLSVASAAQENRDNSVDVQVSQAQNAGNQQGNAVQRRPRRAGFDISPFGLVDPMSPMRTMRQMLDTMDRLFDDAVGFPTARRSPAAASETPRMPWDIMEDEKEVKMRFDMPGLSREEVRVMVEDDALVIRGEHKKEAGEGQGEGGDGWWKERSLSSYDMRLALPDECDKSQVRAELKNGVLLVSVPKRETERKVIDVQVQ

SEQ ID NO: 21735 - protein, 238 aa, Triticum aestivum; identical to SEQ ID NO: 21734

SEQ ID NO: 21736 - protein, 238 aa, Triticum aestivum
MAAANAPFALSRLSPAARLPIRAWRAARPAPVWTGRTRPLSVASAAQENRDNSVDVQVSQAQNGGNQQGNAVQRRPRRAGFDISPFGLVDPMSPMRTMRQMLDTMDRLFDDAVGFPTARRSPAAASEMPRMPWDIMEDDKEVKMRFDMPGLSRKEVKVMVEGDALVIRGEHKKEAGEGQVEGGDGWWKERSVSSYDMRLALPDECDKSQVRAELKNGVLLVSVPKRETERKVIDVQVQ

SEQ ID NO: 21737 - protein, 238 aa, Triticum aestivum; identical to SEQ ID NO: 21736

SEQ ID NO: 21738 - protein, 237 aa, Triticum aestivum
MAAANAPFALSRLSPAARLPFRAWRAARPAPVWTGRTRPLSVASAAQENRDNSVDVQVSQAQNAGNQQGNAVQRRPRRAGFDISPFGLVDPMSPMRTMRQMLDTMDRLFDDAVGFPTARSPARRAKTPRMPWDIMEDEKEVKMRFDMPGLSREEVRVMVEDDALVIRGEHKKEAGEGQGEGGDGWWKERSLSSYDMRLALPDECDKSQVRAELKNGVLLVSVPKRETERKVIDVQVQ

SEQ ID NO: 21739 - protein, 237 aa, Triticum aestivum; identical to SEQ ID NO: 21738

SEQ ID NO: 21740 - protein, 241 aa, Triticum aestivum
MAAANAPFALSRLSPAARLPIRAWRAARPAPLSTGRTRPLPPVAPAEEKRDNSVDVQVSQAQNAGNQQGNAVQRRPRRAGFDISPFGLVDPMASATTTMRQMLDMDRLFEDAVGFPAARRPLAAGNEMPRMSWVMMEDEKEVMRRFELPLLSREEVMVVVEGDALVIRGEHKKEAGEGQGEAAEGGDGWWKERSVSSYDMRLALPDECDKSQVRAELKNGVLLVSVPKRETERKVIDVKVQ

SEQ ID NO: 21741 - protein, 158 aa, Retama raetam
MSLIPSVFGTGRRTNVFDPFSLDIWDPFQDFPLRTIAPSGFDTETAAVANTRIDWKETPEAHVFKADLPGLKKEEVKVEVEEGRVLQISGERTKEKEDKNDTWHRVECSAGRFLRRFRLPENAKVEQVKASLENGVLTVTVPKEEVKKPDVKPVQITG

SEQ ID NO: 21742 - protein, 243 aa, Agrostis stolonifera var. palustris
MAAANAPFALVSRLSSPAARLPIRAWRAASPAPLGAGRARPLTTASASQDNRDNSVDVQVSQNGGGNQQGNAVQRRPRRTGFDVAPFGLVDPMSPMRTMRQMLDTMDRLFDDAVGFPTTRRSPAAASEAPRMPWDIVEDDKEVKMRFDMPGLSRDEVKVMVEDDTLVIRGEHKKEVSEGQGDGAEGQGDGWWKERSVSSYDMRLALPDECDKSQVRAELKNGVLLVSVPKTETERKVIDVQVQ

SEQ ID NO: 21743 - protein, 243 aa, Agrostis stolonifera var. palustris
MAAANAPFALVSRLSSPAARLPIRAWRAARPAPLGAGRARPLTTASASQDNRDNSVDVQVSQNGGGNQQGNAVQRRPRRAGFDVAPFGLVDPMSPMRTMRQMLDTMDRLFDDAVGFPTTRRSPAAASEAPRMPWDIVEDDKEVKMRFDMPGLSRDEVKVMVEDDTLVIRGEHKKEVSEGQGDGAEGQGDGWWKERSVSSYDMRLALPDECDKSQVRAELKNGVLLVSVPKTETERKVIDVQVQ

SEQ ID NO: 21744 - protein, 242 aa, Agrostis stolonifera var. palustris
MAAANAPFALVSRLSSPATRLPARAWRAARPAPVAAGRTRPLTTASASQENRDNSVDVQVSQNGGNQQGNAVQRRPRRAGFDISPFGLVDPMSPMRTMRQMLDTMDRLFDDTVGFPTTRRSPATASEVPRMPWDIMEDDKEVKMRFDMPGLSRDEVKVMVEDDTLVIRGEHKKEAGEGQGDGAEGQGDGWWKERSVSSYDMRLTLPDECDKSQVRAELKNGVLLVTVPKTETERKVIDVQVQ

SEQ ID NO: 21745 - protein, 235 aa, Agrostis stolonifera var. palustris
MAAANAPFALVSRLSSPATRLPARAWRAARPAPVAAGRTRPLTTASASQENRDNSVDVQVSQNGGNQQGNAVQRRPRRAGFDISPFGLVDPMSPMRTMRQMLDTMDRLFDDTVGFPTTRRSPATASEAPRMPWDIMEDDKEVKMRFDMPGLSRDEVKVMVEDDTLVIRGEHKKEAGEGQGDGWWKERSVSSYDMRLSLPDECDKSQVRAELKNGVLLVTVPKTETERKVIDVQVQ

SEQ ID NO: 21746 - protein, 233 aa, Agrostis stolonifera var. palustris
MAAANAPFALVSRLSSPATRLPARAWRAATQRRGAGRTRPLTTASASQENRDNSVDVQVSQNGGNQQGNAVQRRPRVPDLTSLRSGWWTRCHPCEPCGRCWTRWTGCSTTPWGSPRQPFSGDGERAPRMPWDIMEDDKEVKMRFDMPGLSRDEVKVMVEDDTLVIRGEHKKEVGEGQGDGWWKERSVSSYDMRLSLPDECDKSQVRAELKNGVLLVTVPKTETERKVIDVQVQ

SEQ ID NO: 21747 - protein, 67 aa, Agrostis stolonifera var. palustris
MAAANAPFVLVSRLSSPATRLPARAWRAARPAPVAAGRTRPLTTASASQENRDNSVDVQVSQNGGNQ

SEQ ID NO: 21748 - protein, 143 aa, Chloroflexus aurantiacus
MTNLTRWDPFREMTQLLDDTFFTGFTGVLPRNGSLVPALDLSETADAYHIEMAVPGMTADQLNITFENNVLTISGEITQSSDRKERQYHVTERRFGRFSRSIRLPNQIHPDRIEARLENGVLTVTVPKAEEIKPRKIAVNVAQ

SEQ ID NO: 21749 - protein, 145 aa, Thermoanaerobacter tengcongensis
MSLMRRGRDWWDWPFDINIRNLPSIFDINFPSLSGLFSRPRVDIVESETEIVATAELPGVDKKDIEINVYDNILEIKGQTSVDEEKEDKNYYIRERYYGSFARRIELPAEVDPERTTAKFENGILKITMPKLHPSKPKKRRIDIE

SEQ ID NO: 21750 - protein, 182 aa, Deinococcus radiodurans
MSAGGSTPELHSQEEQHMMRFDPFREIEELTQRMDRAFASGGAQTTRFAPPVDVHEDEQGLELTLDIPGVKPEDIQIEAENQTLTVQAERRYSRGEGRTAHRVERAYGTFTRTFSVPAKYDLTKVEADFDHGTLNLRVPRSEAAQKRSISVRSGGQLAQPKTVEAEQPEPTVQPSADTAATE

SEQ ID NO: 21751 - protein, 166 aa, Deinococcus radiodurans
MARDSLRAATCYPPAMSQSNNESGKPVLARLQQLMTLREEVETLAQGGPWTPAADWRDAGTHLDLLLDVPGVDAGTLALAEDGGQLTVSGERPGTEHLLRSERPSGRFVRELAFPEPVRPASGVASLAGGVLTVRFEKLRPTIDVTARPAPGDPEASTETSPDEDR

SEQ ID NO: 21752 - protein, 150 aa, Corylus avellana
MSIVPNNERERSVSNPSSRDLWDVFRSFRENHLQDPFSDLPFASTLSTLFPHSPFGSSVNTRLDWRETPRAHVLKASLPGFVDEDVLVELQDDRVLQVSVESGKFVSRFKVPDDAMLDQLKASMHNGVLTVTIPKAEASRPTVRTIEISG

SEQ ID NO: 21753 - protein, 145 aa, Bacillus subtilis
MSLVPYDPFRQLSNMRREFDRFFSELPISFDNEHGIGGIRVDVHETENEVVATCDLPGLEKKEDVDIDIQNNRLSISGSIKRTNEIKEENMLKKERYTGRFQRMITLPSPVSHDGVKATYKNGILEITMPKVAKDVKKKIDVSFQ

SEQ ID NO: 21754 - protein, 191 aa, Xylella fastidiosa Ann-1
MASPCLSVALKALCFRGASTHLSINRVRRLSMNVVRYTPWPGQAVLQNEIKQVFDRFFEHNGDTDESAVVTAQWVPRVDIKEEPNQFVLYADLPGIDPADIEVQMDKGILSIKGERKTESSSQTEHFSRIERRYGSFHRRFALPDSADADGITASGSHGVLRILIPKQAATTPRRIQVGNAVSSDVALQSM

SEQ ID NO: 21755 - protein, 146 aa, Magnetococcus sp. MC-1
MAALMEYDPFRNVRTLQNEINRLFDHNWEEPNGQMAKWPMRVDIREDENQIMIKADLPGMTQQDISVDVDNGTLTISGERKFDDEQNRDGYHRIERAYGRFSRSFQLPNTTDTGNIAAKYQNGVLEVTLPKLDEAKPRSIQVEVLN

SEQ ID NO: 21756 - protein, 231 aa, Pseudomonas putida KT2440
MTRIKPAGGRDFTLLIKIKWGAAPRRMIEASPWEALLIHSFEEGAMSDVAKKVPVTPVASQPTEGSPPSVEPSELWRPFQQLRRQIDSLFEDFGRRPMRMPFSHTPFDVEPFWRRDLFTHGMPAMDISELAEEYRISAELPGVDAKDIEIKLVNGNLLIRGEKKEEVDEKRKEYHLSERHYGSFERVFQLPRGVDAEKIDAQFDKGVLLVHLPKRAEAIHPEKVIPIKSGK

SEQ ID NO: 21757 - protein, 160 aa, Xylella fastidiosa 9a5c
MNVVRYTPWPGQAALQNEIKQVFDRFFEHNGDTDESAVVTAQWVPRVDIKEEPNQFVLYADLPGIDPADIEVQMDKGILSIKGERKTESSSQTEHFSRIERRYGSFHRRFALPDSADADGITASGSHGVLSIFIPKRAATTPRRIQVGNAVSNDVALQSM

SEQ ID NO: 21758 - protein, 160 aa, Xylella fastidiosa Temecula1
MNVVRYTPWPGQAALQNEIKQVFDRFFEHNGDTDESAVVTAQWVPRVDIKEEPNQFVLYADLPGIDPADIEVQMDKGILSIKGERKTESSSQTEHFSRIERRYGSFHRRFALPDSADADGITASGSHGVLRILIPKQAATTPRRIQVGNAVSSDVALQSM

SEQ ID NO: 21759 - protein, 140 aa, Magnetospirillum magnetotacticum
MLYPTYLRRSDPFALMRSMMRDLDRGFWPPARAAFPAVNVWQGPEAVGVTAELPGIEPGDIEISVKDNVLTLSGERKAPEVLDGARWHRNERSFGRFSRTIRLPFAASDDKVEARMTNGVLRIVISRPEEEKPKKIEGIL

SEQ ID NO: 21760 - protein, 125 aa, Magnetospirillum magnetotacticum
GENPRVGQFEWPWGSGEAKSDMVETDNAIEVSIELPGMEMKDIEVTVNDDMLTVKGEKKIERQVEKKGYYLSERSYGAIYRTIPLPPGVDGEKAQASFKNGVLTIKLPQTPEAQAKIKRIDVKNG

SEQ ID NO: 21761 - protein, 158 aa, Xanthomonas campestris pv. campestris str. ATCC 33913
MNIVRYPQWPTHALQNEIKQVFDRFFEQSGDTDESAVVTAQWVPRVDIKEEANQFVLYADLPGIDPSQIEVQMDKGILSIKGERKSESSSETERFSRIERRYGSFHRRFALPDSADADGITADGRNGVLEIRIPKRPAATPRRIQVGGGQDGGGTTVQ

SEQ ID NO: 21762 - protein, 158 aa, Xanthomonas axonopodis pv. citri str. 306
MNIVRYPQFPTHALQNEIKHVFDRFFEQNGDTDESAVVTAQWVPRVDIKEEVNHFVLYADLPGIDPSQIEVQMDKGILSIRGERKSESSTETERFSRIERRYGSFHRRFALPDSADADGITAAGRNGVLEIRIPKRPAATPRRIQVGNGQNTSGSTVQ

SEQ ID NO: 21763 - protein, 132 aa, Chlorobium tepidum TLS
MLMKIAKDPMRLFDDIWSGSQMAVAPSFKVDISEDENAYHLDAELPGIAKEQIALNIEDDVLTIKAERTHKEEEKKKNYHRVERTYGSFSRSFNIGEIIDQEHIGATYDNGVLHVTLPKTQPAKKTKEIPIN

SEQ ID NO: 21764 - protein, 220 aa, Thermobifida fusca
MLSTSRLQLGLVGRPAPPPPVTRNTLNKVEFMGLKFGDDHRRKAARPPHLNPPPPGGHQRVRGGTDMALPVVRSSQPTTGWDPFRELNELHTQLHRWMDSVLERTSGLTADPLSWSPLADLSETEDAYLVEVEVPGVSREDISIDLSGTELVITGERKEREREGWFRHRTRSVGRFHYAVTLPRDIDPDGVDATLSQGVLTVRIPKSKALKPRRIAITER

SEQ ID NO: 21765 - protein, 145 aa, Clostridium thermocellum ATCC 27405
MICMSLISWNPFREVDSISRDMETFFERSPFGFFSRATAPRVDVFETEKDVVVKAEIPGVSKEDLNVYVDENSIRLSGETKRDTEYKNEHIYRTERYYGSFSRTIPLPVEVKSEQAKAEYKDGILTVTVPKVETTQMKGKKIDIH

SEQ ID NO: 21766 - protein, 202 aa, Desulfovibrio desulfuricans G20
MSESLQFFFWRCDMDIDFKKLAPWNWFKKEQEEQQSTASLPMQRNDLPVAGGPVSPILQLHREIDRLFDDAFRGFGFPALAMPRWPSDWPGLLKPALDIQETDKLYKISLEVPGVEEKDIQITLDNDVLLVRGEKRQEQETKDGGFHRVERSYGSFQRALNLPADANQDTIKAAFKNGVLTITMEKREACAPKQGRSIPING

SEQ ID NO: 21767 - protein, 142 aa, Desulfovibrio desulfuricans G20
MVDSMFSGFGMPSPRRLFDAASPMLGKSVIKPKVDIYGTDKEYVVEVDLPGIEEKDLSVELKDDVLILSAEKKHEEKTEEKGYYRVERSYGSFRRVLNVPDDADKEGINAKLNKGVLRITMPRNKAIETESRKIAIESSKED

SEQ ID NO: 21768 - protein, 154 aa, Castanea sativa
MALSLFGGRRSNVFDPFSLDIWDPFEGFSAVANVPPSARETTAFATARIDWKETPEAHIFKADLPGLKKEEVKVEVEDGNVLQISGERSKEHEEKNDKWHRVERSCGKFLRRFRLPENAKVEQVKANMENGVLTVIVPKEEQKKTEVKSIEISG

SEQ ID NO: 21769 - protein, 175 aa, Bradyrhizobium japonicum USDA 110
MANETKLPVTKKTNEPAFGGETWRPFEALRKEVDRLFEDFGTDDFWRRPFRSLAGFERNLAQKLVSTPAVDVTESDKAYEITAELPGMDEKDIEVNVANDGLTIKGEKKFEREEKQKDYYVSERRYGSFERHFGLPKDVEADKIEASFRNGVLKVTLPKTAEAQKPAKKIEVKAA

SEQ ID NO: 21770 - protein, 173 aa, Bradyrhizobium japonicum USDA 110
MATETKLPVTKSPTAPAVAGETWRPFQALRNEIDQIFDDFGNGFWNRPFRSLARLERDFSKSISAPAVDVAESDKAYEITAELPGLDEKNIDIKVANGGLTIKGEKREETEEKNKDYYVSERRYGTFERYFTLPESVNADKIEATFKNGVLKVVLPKTEEAQKPAKTINVKAA

SEQ ID NO: 21771 - protein, 166 aa, Bradyrhizobium japonicum USDA 110
MGIKDLIPWNNGGREVGIHRGADVNPFLTLHREMNRMFDEVFRGFDLAPFGSSRGLSGLGWPQIDIDETDKEVRITAELPGLEEKDVSLEIANGVLSISGEKKSESEDKARRFSERYYGRFERRIPLEGIDEDKVSAAFKNGVLTITVPKSAEAKNVRRIAINRNG

SEQ ID NO: 21772 - protein, 163 aa, Bradyrhizobium japonicum USDA 110
MALRELIPWNNGSRNLPARRTEVDNPFLSLHREMNRLFDDVFRGVDIGQFAPPATMGWPSVEFNETDKEVKVIAELPGIEQKDVEVELADGVLTISGEKKSETKDKERRFSERYYGRFERRIPVDDVDQDKVAASFKDGILTVTLPKSPTEQRKVKRIAINGK

SEQ ID NO: 21773 - protein, 119 aa, Bacteroides thetaiotaomicron VPI-5482
MVKANATAPAINVFETEKEYKVELAAPGMTKEDFNVRIDEDNNLVISMEKKTENKEEKKEGRYLRREFSYSKFQQTMILPDNVDKEKISAAVENGVLSVQLPKISEEEVKKAEKQIEVK

SEQ ID NO: 21774 - protein, 151 aa, Coxiella burnetii RSA 493
MAKAVQKYPHSMLSHLQQDINRLFEPFGWATGGELWDAFSSEWSPHIDIKDEGQNYLICADIPGVDPKKIQVSMENNILTIKGERETEAKEKSEGYLRIERTKGAFLRQFTLPESVDAESIKAKSKHGVLEITIPKAQPPRTKKIEIEEQE

SEQ ID NO: 21775 - protein, 144 aa, Nitrosomonas europaea ATCC 19718
MAITRYEPWGLLTQLQRELERARDDMATEGASAIAEWAPAVDIKEESDKFIVHADLPGVKPEAIDVTTENGVLTIKGEKQTEARTEKEGYKRVERTHGSFYRRFSLPDTADLGAISAVTKDGVLVVTIPKREAVQPKKVSVTAQ

SEQ ID NO: 21776 - protein, 147 aa, Thermotoga maritima
MLLGRREDIFRPFRELQREIDRLFDDFFRTEVRPAKEFFAPDMDVYETDDEVVIEVEIPGIDRKDVKITVEENILKISGEKKLEREQKGKNYYYVERSAGKFERAIRLPDYVDVEKIKAEYKNGVLTIRVPKKEERKKKVIEVEVQE

SEQ ID NO: 21777 - protein, 142 aa, Thermotoga maritima
MLLGRREDIFRPFRELQREIDRLFDDFFRTEVRPAPDMDVFETDDEVVIEVEIPGIDRKDVQITVEENILKISGEKKLEREQKGKNYYYVERSAGKFERAIRLPDYVDVEKIKAEYKNGVLTIRVPKKEERKKKVIEVEVQE

SEQ ID NO: 21778 - protein, 147 aa, Geobacter metallireducens
MAIVKYTPFGDLRNLQEQMNRLLDMAWSRESGEELREGVWQPPVDIFEDENGVVIKAELPGIDQKDIEVKIEDNTLTIRGERKHDQEVKKENYHRVERYYGSFMRSFSLPTTIDRDTVKAVCDKGILTITLPRREETKPKQINVEVK

SEQ ID NO: 21779 - protein, 153 aa, Funaria hygrometrica
MALSLFGGRGSSILDPFEFGSVWDPFSVLENGPSRRFASDAHAVANTRIDWRETPEAHVFKADLPGLKKEEVKVQVVEGRTLEISGERKKEEVQKGDTWHRVERAQGSFMRRFRLPEGTNVDEVKAQVQDGVLTVTIPKLQKPKPQVRQIEIA

SEQ ID NO: 21780 - protein, 153 aa, Funaria hygrometrica
MALSLFGGRGNSVFDPFEFGSVWDPFTVLESGPSRQLASDVQAVASTRIDWRETPEAHIFKADLPGLTKEEVKVQVLEGRTLEICGERKKEEVQKSDTWHRMERAQGSFMRRFRLPEGTNTDDVKAQVQDGVLTVTVPKVQKPKPQVRQIEIA

SEQ ID NO: 21781 - protein, 96 aa, Ginkgo biloba
LDMPGLKSNDIKVQVENENVLNITGERRRDEKADADAKYIRMERRVGKFMRQFTLPSDANLEGISATCYDGVLTVTVPKIPPPEPKKPKTIEVIAS

SEQ ID NO: 21782 - protein, 151 aa, Picea abies
MAMDPLLSTVQQLLGVPDDLERILHAPTRSYMRDTEATASTPVDVKEYPNSYVFIVDMPGLKSNDIKVQVEDENVLNISGERKRNEKEEGEVKYIRMERRVAKFMRKFSLPADCNLEAISAACQDGVLTVTVPKLPPPEPKKPKTIAVKIG

SEQ ID NO: 21783 - protein, 151 aa, Picea abies
MAMDPLLSTVQQLLGVPDDLERILHAPTRSYMRDTEATASTPVDVKEYPNSYVFIVDMPGLKSNDIKVQVEDENVLNISGERKRNEKEEGAVKYIRMERRVAKFMRKFTLPADCNLEAISAACQDGVLTVTVPKLPPPEPKKPKTIAVKIG

SEQ ID NO: 21784 - protein, 151 aa, Picea glauca
MAMDPLLNTVQQLLVVPDDLERILHAPTRSYMRDTEATASTPVDVKEYPNSYVFIVDMPGLKSNDIKVQVEDENILNISGERKRNEKEEGEVKYIRMERRVGKFMRKFSLPADCNLEAISAACQDGVLTVTVPKLPPPEPKKPKTIAVQIG

SEQ ID NO: 21785 - protein, 151 aa, Picea glauca
MAMDPLLSTVQQLLGVPDDLERILHAPTRSYTRDTEATASTPVDVKEYPNSYVFIVDMPGLKSNDIKVQVEDENVLNISGERKRNEKEEGEVKYIRMERRVAKFMRKFSLPADCNLEAISAACQDGVLTVTVPKLPPPEPKKPKTIAVKIG

SEQ ID NO: 21786 - protein, 152 aa, Picea glauca
MAMDPSLITVQHLLGVPDDLEKLLNAPTHSYMRDTKAMASTPVDVKEYPNSYVFIIDMPGLKSNDIKVQVEDENVLNISGERKRNEKDEEGEVKYIRMERRVGKFMRKFTLPADCNLEAISAACQDGVLTVTVPKLPPPEPKKPKTIEVKIG

SEQ ID NO: 21787 - protein, 161 aa, Pseudotsuga menziesii
MSIIPSFFGRRSSSAFDPFSLDVWDPFRAFTDLAAGGPSGQFVNEASAVANTQIDWKETPEAHIFKADLPGLKKEEVKIELEEGQRILQISGERSKEEEQKNDKWHRIERSHGKFLRRFRLPDNAKVEEIKAAMENGVLTVTVPKEPEPQPPQPKSIEISG

SEQ ID NO: 21788 - protein, 161 aa, Pseudotsuga menziesii
MSIIPSFFGRRSSSAFDPFSLDVWDPFRAFTDLSGGGPSGQFVNEASAVANTQIDWKETPEAHIFKADLPGLKKEEVKIELEEGQRILQISGERSKEEEQKNDKWHRIERSRGKFLRRFRLPDNAKVEEIKAAMENGVLTVTVPKQPEPQPPQPKSIEISG

SEQ ID NO: 21789 - protein, 161 aa, Pseudotsuga menziesii
MSIIPSFFGRRSSSAFDPFSLDVWDPFRAFTDLAAGGPSGQFVNEASAIANTQIDWKETPEAHIFKADLPGLKKEEVKIELEEGQRILQISGERSKEEEQKNNKWHRIERSRGKFLRRFRLPDNAKVEEIKAAMENGVLTVTVPKQPEPQPPQPKSIEISG

SEQ ID NO: 21790 - protein, 161 aa, Lilium sp.
FLRSISMGSKLTREEYNTLLAAFHKLMVRLEVASVPKDATPADIKNLPDAYLYFIDMPGVRTGEIKVEVEDDSDLVISGGRKREEEEKYQIMERWTGRRMRKFELPKNADTKAVSAVWKNGVLAVTVGKLLAWEVAGLFFNIERLPVPLPTKTKSIEVKIA

SEQ ID NO: 21791 - protein, 210 aa, Papaver somniferum
MSIIPSFFSNQRSNVFDPFSLDIWDPFQGFPFSTGALTANWQGGSDTARETSQLANTRIDWKETPEAHVFRADLPGVTKEEVKVEVEEGRVLQISGERRSRESEEKNDKWHRVERSSGKFLRRFRLPENTKMDEVKATMENGVLTVCVPKVEQRRPEVKSIEISGASEGSTQVPMETPVLRLHKTRLLRDVAMTGNLQASYVVSCLVLFS

SEQ ID NO: 21792 - protein, 248 aa, Azotobacter vinelandii
MAREYYPFHAERWPAFRRLPWAGNRIRPVMCLTEMRLNFPFPSNHMEEIIMAQANQNVPVNRERQSQRPAASSGDLWRPLTSLRQQIDHLFEDFDRISPFWPMGRSAFGSLMEPFGRAGREMASMPAVDIVDQDKAILISAELPGMDEQNIELKVCNGNLMLKGEKREEREENSQGLYLSERSYGAFQRSFALPDSVDADNIEAHFDKGVLTITLPKRPEAQQSERAIEIRRGEAAAQQQDTTQATTH

SEQ ID NO: 21793 - protein, 155 aa, Ipomoea nil
MDLRLMGFDHPLFHHIMDYAGDDKSSNSSAPSRTFMLDAKAMAATPADVKEYPNSYVFIIDMPGLKSGDIKVQVDGDNVLSISGERKREAEEKEGAKYVRMERRVGKLMRKFVLPENANKEKITAVCQDGVLTVTVENVPPPEPKKPRTIEVKIG

SEQ ID NO: 21794 - protein, 167 aa, Ipomoea nil
MDLRNFGLSNFGLEPQLLSTIQDMLDFADDHDRAGRAPPEQPIRAYVRDAKAMAATPADVKEYPNSYVFIADMPGVKAAEIKVQVEDDNVLVVSGERTEREKDEKDGVKYLRMERRVGKFMRKFVLPENANVEAINAVYQDGVLQVTVEKLPPPEPKKPKTVEVKVA

SEQ ID NO: 21795 - protein, 195 aa, Arabidopsis thaliana
MMKHLLSIFFIGALLLGNIKTSEGSLSSALETTPGSLLSDLWLDRFPDPFKILERIPLGLERDTSVALSPARVDWKETAEGHEIMLDIPGLKKDEVKIEVEENGVLRVSGERKREEEKKGDQWHRVERSYGKFWRQFKLPDNVDMESVKAKLENGVLTINLTKLSPEKVKGPRVVNIAAEEDQTAKISSSESKEL

SEQ ID NO: 21796 - protein, 157 aa, Brassica oleracea
MSLIPSFFGGRRTNVFDPFSLDLYDPFEGFLTPSGMTNTTSKDVAAFTNAKVDWRETAEAHVFKADLPGLKKEEVKVEVEDGNILKISGERSSENEEKSDKWHRVERSSGKFMRRFKLPENAKVDEVKASMENGVLSVTVPKMPERKPEVKSMDISG

SEQ ID NO: 21797 - protein, 156 aa, Fragaria x ananassa
MALSLFGNSRRSNVFDPFSLDTWDPFQGFGPLMNSSSTAGDTSAFAQTRIDWKETPEAHVFKADLPGLKKEEVKVELEEGNVLQISGERSKEQEEKNDKWHRVERSSGKFVRRFRLPDNAKVDQVKAAMENGVLTVTVPKAPEPKPQVKSIDISGA

SEQ ID NO: 21798 - protein, 156 aa, Prunus dulcis
MDVRIAGLDSPLFSTLQHIMDFTDEPDKSFNAPTRTYVRDAKAMASTPADVKEYPNSYVFVVDMPGLKSGDIKVQVEDDNVLLITGERKREEEKEGAKYVRMERRVGKFMRKFVLPENANVEAISAVCQDGVLTVTVEKLPPPEPKKSKTIEVKIA

SEQ ID NO: 21799 - protein, 165 aa, Mesorhizobium loti
MGDEERRWPCSRKSEGVAGRLSEDETMIARMLFGADPYRNMRRLQDEVSRLEFPAVNAFVNQDGVIITAELPGVRSEDLDILIHRDSVTLSGERQAEAEDARRGYHRRERRQGRFVRTVSLPFLVDPNNVGANLINGLLTLGLPRAEEDKPKRIHVNASKEARHG

SEQ ID NO: 21800 - protein, 175 aa, Sinorhizobium meliloti
MAEPATKLPIKSEEKGVERRAESWLPFESLRSEIDRLFDDFAPSLWHRPLASALMRRVPRLSELDVAPAVDLAETEKTYEITCELPGMEEKDIEVAISNGTLTIRGEKQEEKKENKKEYVLSERRYGSFQRTFRMPDGVDTEKIAAKFSKSVLSITLPKTPEAQQNERKIQIKVT

SEQ ID NO: 21801 - protein, 192 aa, Glycine max
MRLQQLNLFFLLLCVAKANGSLLPFMDPPITLLADLWSDRFPDPFRVLEHIPFGVDKDEASMAMSPARVDWKETPEGHVIMLDVPGLKREEIKVEVEENRVLRVSGERKKEEEKKGDHWHRVERSYGKFWRQFRLPQNVDLDSVKAKLENGVLTLTLDKLSPGKIKGPRVVSIAGEDHQQGNLNNDGAKQEL

SEQ ID NO: 21802 - protein, 192 aa, Glycine max; identical to SEQ ID NO: 21801

SEQ ID NO: 21803 - protein, 197 aa, Glycine max
MRHFLVLVPLILLVFAGFPSKAKGSLLPFTNHPNTLLADLWSNHFPDPFRVLEQIPFGVDKDETFTALSSHARVDWKETPEGHVIMLDVPGLKRDEIKIEVEGNRVLRVSGERKREEEKEGDHWHRVERSYGKSWRQFKVPDNVDLDSVKAKMENGVLTLTMNKLSPDKVKGPRLVSIAGDDEQAPKLKGNEDKQEL

SEQ ID NO: 21804 - protein, 197 aa, Glycine max
MRHFLVLVPLILLVFAGFPSKAKGSLLPFTNHPNTLLADLWSNHFPDPFRVLEQIPFGVDKDETFTALSSHARVDWKETPEGHVIMLDVRGLKRDEIKIEVEGNRVLRVSGERKREEEKEGDHWHRVERSYGKSWRQFKVPDNVDLDSVKAKMENGVLTLTMNKLSPDKVKGPRLVSIAGDDEQAPKLKGNEDKQEL

SEQ ID NO: 21805 - protein, 197 aa, Glycine max; identical to SEQ ID NO: 21804

SEQ ID NO: 21806 - protein, 75 aa, Phaseolus vulgaris
RVLQISGQRTKEKEDKNEKWHRVERSSGSFLRRFRLPENAKVNEVKAAMETGVLTVTVPKEEVKKRDVKPVQITG

SEQ ID NO: 21807 - protein, 197 aa, Pisum sativum
MSLKPLNMLLVPFLLLILAADFPLKAKGSLLPFIDSPNTLLSDLWSDRFPDPFRVLEQIPYGVEKHEPSITLSHARVDWKETPEGHVIMVDVPGLKKDDIKIEVEENRVLRVSGERKKEEDKKGDHWHRVERSYGKFWRQFKLPQNVDLDSVKAKMENGVLTLTLHKLSHDKIKGPRMVSIVEEDDKPSKIVNDELK

SEQ ID NO: 21808 - protein, 197 aa, Pisum sativum
MSLKPLNMLLVPFLLLILAADFPLKAKASLLPFIDSPNTLLSDLWSDRFPDPFRVLEQIPYGVEKHEPSITLSHARVDWKETPEGHVIMVDVPGLKKDDIKIEVEENRVLRVSGERKKEEDKKGDHWHRVERSYGKFWRQFKLPQNVDLDSVKAKMENGVLTLTLHKLSHDKIKGPRMVSIVEEDDKPSKIVNDELK

SEQ ID NO: 21809 - protein, 157 aa, Daucus carota
MSIIPSFFGGRRSNVFDPFSLDVWDPFKDFPLVTSSASEFGKETAAFVNTHIDWKETPQAHVFKADLPGLKKEEVKVELEEGKVLQISGERNKEKEEKNDKWHRVERSSGKFLRRFRLPENAKVDEVKAAMANGVLTVTVPKVEIKKPEVKAIDISG

SEQ ID NO: 21810 - protein, 157 aa, Daucus carota
MSIIPSFFGGRRSNVFDPFSLDVWDPFKDFPLVTSSASEFGKETAAFVNTHIDWKETPQAHVFKADLPGLKKEEVKVELEEGKVLQISGERNKEKEEKNDKWHRVERSSGKFLRRFRLPENAKVDEVKAAMANGVVTVTVPKVEIKKPEVKAIDISG

SEQ ID NO: 21811 - protein, 159 aa, Daucus carota
MSIIPSFFGSRRSNVLNPFSLDIWDPFQDYPLITSSGTSSEFGKETAAFANTHIDWKETPQAHVFKADLPGLKKEEVKVEVEEGKVLQISGERNKEKEEKNNKWHRVEFSSGKFLRRFRLPENANVDEVKAGMENGVLTVTVPKVEMKKPEVKSIHISG

SEQ ID NO: 21812 - protein, 153 aa, Daucus carota
  unsure (1)..(153): unsure at all Xaa locations
DPKHLRRPQQRLRPLLPRHLRPLPRLPQRSLHRYRGRTERSHGTCNMRIDWKETPDDVFKADMPXLKKEEVKVEVEEGRVLQISGERSREQEEKNDKYHRVERSSGKFLRRFRLPENVKMEEVKACMENGVLTVTVRKWRRRSRNVKAIDISG

SEQ ID NO: 21813 - protein, 92 aa, Daucus carota
DLPGLKKEEVKVEVEEGKVLQISGERNKEKEEKNDKWHPLEVSSGKFLRRFRLPENANVDEVKAGMENGVLTVTVPKVEMKKPEVSVIDISG

SEQ ID NO: 21814 - protein, 158 aa, Petroselinum crispum
MDFRLMGFNHPLLNTLSPHCDEDNQDSSNKNKSEQARSYVRDAKAMATTPADVKEYPNSYVFVVDMPGLKSGDIKVQVEEDNVLVVSGERKREEEKEGVKYVRMERKVGKFMRKFVLPENADLENINAVCQDGVLSVTVQKLPPPEPKKPKTIEVKIA

SEQ ID NO: 21815 - protein, 190 aa, Lycopersicon esculentum
MRVISKLTLLIISIACIFQVSSLSADGSSLVPLIIDQMISSNPANTFLDPFKVLEQIPFGLENTLLARVDWKETAKGHVISVEVPGLNKDDIKIEIEENRVLRVSGERKKEEEKNDEENHWHCVERSHGKFWRQFRLPENADIDTMKAKLENGVLTISFAKLSADRIKGPKVVSIESKQQGKESSVREEL

SEQ ID NO: 21816 - protein, 169 aa, Stigmatella aurantiaca
MADLSVRRGTGSTPQRTREWDPFQQMQELMNWDPFELANHPWFANRQGPPAFVPAFEVRETKEAYIFKADLPGVDEKDIEVTLTGDRVSVSGKREREKREESERFYAYERSFGSFSRAFTLPEGVDGDNVRADLKNGVLTLTLPKRPEVQPKRIQVASSGTEQKEHIKA

SEQ ID NO: 21817 - protein, 188 aa, Stigmatella aurantiaca
MADLSVRRGTGSTPQRTREWDPFQQMQELMNWDPFELANHPWFANRQGPPAFVPAFEVRETKEAYIFKADLPGVDEKDIEVTLTGDRVSVSGKREREKREESERFYAYERTFGSFSRAFTLPEGVDGDNVRADLKNGVLTLTLPKRPEVQPKRIQVASSGTEQKEHIKAYPAPAEPGLAAPLGWPGFS

SEQ ID NO: 21818 - protein, 197 aa, Solanum tuberosum
MRVISKLTLLIISIGCIFQVSSLGADASSLLPLILDQMIGSNPANTFLDPFKVLEQIPFGLENREETTLPLSIARVDWKETAEGHVISIDVPGLKKDDIKIEIEENRVLRVSGERKKEEEKNDEQNHWHCVERSYGKFWRQFRLPENADIDTMKAKLENGVLTISFAKLSADRIKGPKVVSIESKQEGKESSVREEL

SEQ ID NO: 21819 - protein, 69 aa, Populus alba
FKADLPGIKKDEVKVEIEDDRVLQISGERSVEKEDRNDTWHRVERSSGKFLRRFKLPENARTDQVKAGM

SEQ ID NO: 21820 - protein, 151 aa, Hordeum vulgare
MSIVRRSNVLDPFADLWADPLDTFRSIFPAISGGNSETAVRERRMDWKGRRLEAHVFKADLPGVKKEEVKVEVEDGNVLIVSGERTKEKEDKNDKWHRVERRSGKFVRPFRLPEDGKVDEVKAGLENGVLTVTVPKAEVKKPEVKAIEISG

SEQ ID NO: 21821 - protein, 160 aa, Hordeum vulgare
MTGRRAVAHVFKADLPGVKKEEVKVEVEDGNVLVVSGERTKEKEDKNDKWHRVERSSGKFVRPFRLPEDAKVEEVKAGLENGVLTVTVPKTEVKKPEVKAIEISGCVFESEPFWLMCVRVLQPKYSCDLFLSSLVEASLYRVSFLGRLCTCVIAMNKCST

SEQ ID NO: 21822 - protein, 108 aa, Oryza sativa
RVKHNGVFRINGQRRREKTRAGAHWPREERSYGRFWRQLRLPDNADLDSIAASLDNGVLTVRFRKLAPDQIKGPRVVGIASAGGDDGGKKSIGGAGEGQNQQAKKVEL

SEQ ID NO: 21823 - protein, 211 aa, Triticum aestivum
  unsure (1)..(211): unsure at all Xaa locations
MSTRCFLALGCIAVAAMSLAVAPADGAILPFVDPAMTLASPLQDVALPDPFRILEHVPFGFDRDDVAMXXSMARVDWRETSDSHEIVVDVPGMRKEDLKVEIEENRVLRISGERRREVEERKGDHWHREERSYGKFWRQMRLPDNADLDSIAASLDAGVLTVRFRKLAPEQIKGPRVVRIAGGDDGAAAKKTIGDAGAAGGEERQTKKVEL

SEQ ID NO: 21824 - protein, 156 aa, Ananas comosus
MSLVRRSNIFDPFSLDLWEPFEGFPFGGALSFPRPSASFPAETASFAGARIDWKETPEAHVFKADLPGVKKEEVKVEVEEGNVLQISGERTREKEEKNDTWHRVERSSGKFLRRFRLPDNAKVDQVKAAMENGVLTVTVPKEDVKKPQVKSVQISG

SEQ ID NO: 21825 - protein, 203 aa, Lilium longiflorum
QSSQSMESAMITLDLPVIAAYRQLMEIPGETSNSLGDPSQSYALDAPTLTYALDAPTRSYVLDAPTLSYAHDAPTLTYALGAPASTYALDAGAMASTAADVKDLPAAYVFVVDMPGVGSGDLKVKVEGDNVLLISGERKREEEGVYLCIERRVGKLTKMFVLPENANTEAVSAVCKDGVLTVTVEKRPPQEPKKPKVIEVKVA

SEQ ID NO: 21826 - protein, 155 aa, Lilium longiflorum
MGSKLTREEYDTLLAAFHKLTVRLEVASVPKDATPADIKNLPDAYLYFIDMPGVRTGEIKVEVEDDSALVIIGERKREEEEKYQMMERWTGKRMRKFELPENADTKAVSAVWKNGVLAVTVRKLPAWEVAGISFNIERLPVPLPTKTKSIEVKIA

SEQ ID NO: 21827 - protein, 153 aa, Lilium longiflorum
LKPLKSMDSKFEVDHSLIAKLNQLTEFLANRNQPLRAPFVPDARAMPAAATDIKDMPGAYVFIIDMPGVESEEIKIDVEEGNMLVISGERKREEEEERYLEMQRRMGKMMRKFKLLENANSGAISAVCKNGVLTVTVEKLPSQEPKAIEIKIA

SEQ ID NO: 21828 - protein, 146 aa, Desulfitobacterium hafniense
MRIMALIPNDPFRMFNHYWDEMERNYLRGRGKEELSQFLYRVDVEETADQVFVTAEIPGLEKREDLHIEVDEKLLTISGEIKRAASTSERSSHHTERYYGKFSRTLTLPAVVKADGSHASYKNGILELSFLKDRHPAARTIEVDFH

SEQ ID NO: 21829 - protein, 154 aa, Quercus suber
MALSLFGGRRSNVFDPFSLDIWDPFEGFSAVASVPPSARETTAFATARIDWKETPEAHIFKADLPGLKKEEVKVEVEDGNVLQISGERSKEHEEKNDKWHRVERSCGKFMRRFRLPENAKVDQVKANMENGVLTVMVPKEEQKKPAVKAIEISG

SEQ ID NO: 21830 - protein, 110 aa, Quercus suber
SLDIWDPFEGFSAVASVPPSARETTAFATARIDWRETPEAHIFKADLPGLKKEEVKVEVEDGNVLQISGERSKEHEEKNDKWHRVERSCGKFMRRFRLPENAKVDQVKAN

SEQ ID NO: 21831 - protein, 110 aa, Quercus suber
SLDIWVPFEGFSAVASVPPSARETTAFATARIDWKETPEAHIFKADLPGLKKEEVKVEVEDGNVLQISGERSKEHEEKNDKWHRVERSCGKFMRRFRLPENAKVDQVKAN

SEQ ID NO: 21832 - protein, 110 aa, Quercus suber
SLDIWDPFEGFSAVASVPPSARETTAFATARIDWKETPEAHIFKADLPGLKKEEVKVEVEDGNVLQISGERSKEHEEKNDKWHRVERSCGKFMRRFRLPENAKVDQVKAN

SEQ ID NO: 21833 - protein, 104 aa, Quercus suber
SLDIWDPFDGLFTSVRETSSFSNVRIDWKETPEAHVFKADLPGLKKEEVKVEVEEGRVLQISGERSKEQEEKNEKWHRVERSSGKFLRRFRLPQNAKIDEVKAS

SEQ ID NO: 21834 - protein, 110 aa, Quercus suber
SLDVWDPFEGFAQLSSHSNFPSETSSFAAAKVDWKETPNAHVFKADVPGLKKEEVKVEIEEGRVLQISGERSQEQEEKSDTWHRVERSSGRFSRRFRLPENAKVEEVKAA

SEQ ID NO: 21835 - protein, 110 aa, Quercus suber
SLDIWDPFEGFSAVASVPPSARETTAFATARIDWKETPEAHIFNADLPGLKKEEVKVEVEDGNVLQISGERSKEHEEKNDKWHRVERSCGKFMRRFRLPENAKVDQVKAN

SEQ ID NO: 21836 - protein, 110 aa, Quercus suber
SLDIWDPFEGFSAVASVPPSARETTAFATARIDWKETPEAHIFKADLPGLKKEEVKVEVEDVNVLQISGERSKEHEEKNDKWHRVERSCGKFMRRFRLPENAKVDQVKAN

SEQ ID NO: 21837 - protein, 110 aa, Quercus suber
SLDIWDPFEGFSAVASVPPSARETTAFATARIDWKETPEAHIFKADLPGLKKEEVKVEVEDGNVLQISGERSKEHEEKNDKWHRVERSCGKFMRRFRLPESAKVDQVKAN

SEQ ID NO: 21838 - protein, 110 aa, Quercus suber
SLDIWDPFEGFSAVASVPPSARETTAFATARIDWKETPEAHIFKADLPGLKKEEVKVEVEDGNVSQISGERSKEHEEKNDKWHRVERSCGKFMRRFRLPENAKVDQVKAN

SEQ ID NO: 21839 - protein, 110 aa, Quercus suber
SLDIWDPFEGFSAVASVPPSARETTAFATARIDWKETPEAHIFKADLPGLKKEEVKVEVEDGNVLQISGERSKEHEEKIDKWHRVERSCGKFMRRFRLPENAKVDLVKAN

SEQ ID NO: 21840 - protein, 110 aa, Quercus suber
SLDIWDPFEGFSAVASVPPSARETTAFATARIDWKETPEAHIFKADLPGLKKEEVKVEVEDGNVLQISRERSKEHEEKNDKWHRVERSCGKFMRRFRLPENAKVDQVKAN

SEQ ID NO: 21841 - protein, 105 aa, Quercus suber
SLDIWDPFEGFSAVASVPPSARETTAFATARIDWKETPEAHIFKADLPGLKKEEVKVEVEDGNVLQISGERSKEHEEKNDKWHRVERSCGKFMRRFRLPENAKVD

SEQ ID NO: 21842 - protein, 110 aa, Quercus suber
SLDIWDPFEGFSAVASVPPSARETTAFATARIDWKETPEAHIFKADLPGLKKEEVKVEVEDGNVLQISGERSKEHEEKNDKWHRVERSCGKFMRRFRLLENAKVDQVKAN

SEQ ID NO: 21843 - protein, 88 aa, Quercus suber
SLDIWDPFEGFSAVASVPPSARETTAFATARIDWKETPEAHIFKADLPGLKKEEVKVEVEDGNVLQISGERSKEHEEKNDKWHRVERS

SEQ ID NO: 21844 - protein, 92 aa, Quercus suber
SLDIWDPFEGFSAVASVPPSARETTAFATARIDWKETPEAHIFKADLPGLKKEEVKVEVVDGNVLQISGERSKEHEEKNDKWHRVRGAVASL

SEQ ID NO: 21845 - protein, 150 aa, Agrostis stolonifera var. palustris
MSIVRWSNVFDPFSLDLWADPFDAFRSILPAASGNHDTAAFVNARMDWKETPEAHVFKADLPGVKKEEVKVEVEGGNVLVVSGERKGEGGQERQVATLERSSGKFVRRFRLPENAKVEEVKAGLENGVLTVTVPKAEVKKPEVKAIEISG

SEQ ID NO: 21846 - protein, 157 aa, Cuscuta japonica
MSLIPSFFEGRRSNAFDPFSLELWDPFFSNTVANLSGSSSAREASAFANARIDWKETPEAHIFKADVPGLKKEEVKVEVEEGKVLQISGERSKEKEEKNDTWHRVERSSGKFLRSFRLPENAKVDQVKAAMENGVLTVTVPKVEEKKAEVKSIQISG

SEQ ID NO: 21847 - protein, 145 aa, Bacillus halodurans
MSLTPYEPFRHLDQMRREFDRFFPDFPIDLPNRHLTLSPKMDVHETDHEVILECDIPGLESKEDLQIDVEPRSVRIEGRIKRSKEVHDERFYRREREIGHFRRVVPLPAEVAEDDIRAAYRNGVLEVRMRKRLDDRRRTIDVEFH

SEQ ID NO: 21848 - protein, 153 aa, Nitrosomonas europaea
MFVIYVEAIMAITRYEPWGLLTQLQRELERARDDMATEGASAIAEWAPAVDIKEESDKFIVHADLPGVKPEAIDVTTENGVLTIKGEKQTEARTEKEGYKRVERTHGSFYRRFSLPDTADLGAISAVTKDGVLVVTIPKREAVQPKKVSVTAQ

SEQ ID NO: 21849 - protein, 379 aa, Oryza sativa
TNGFRSLDQSEERSACVLIVVMSMVVASYAPASRSPVTRASSGARRVSHTQSWRPPPPPFFPASAAVKCRRPTLPVARSVGPPEKHRPVLNIPPTALLYQVPPPEGKERWEIKDDEGNVQLWLQVPGLTEDDLEITTTDELLEIKRKAGRGDPRRLDDVQGVGSFHLRLLLTKEFVSSQVTAELKAGMLEVTIPKNTNLRRTVVRIGQQSQSPAAVRTAQPKVVDPPPANSPPKNNNLVRNTSVQSRIDPPAEESRPKNDLGVGISVQPNDSPAREPPKNNLAGGRNVPTKDDPPARELPKNNLAGGRNVPPKDDPPAREPPKNNLAGGRNVAPKDDPPANEAPRNNLAGGTGVPTKDPPRNANEPPKNPPGTREANLG

SEQ ID NO: 21850 - protein, 329 aa, Oryza sativa
TNGFRSLDQSEERSACVLIVVMSMVVASYAPASRSPVTRASSGARRVSHTQSWRPPPPPFFPASAAVKCRRPTLPVARSVGPPEKHRPVLNIPPTALLYQVPPPEGKERWEIKDDEGNVQLWLQVPGLTEDDLEITTTDELLEIKRKAGRGDPRRLDDVQGVGSFHLRLLLTKEFVSSQVTAELNAGMLEVTIPKNTNLRRTVVRIGQQSQSPAAVRTAQPKVVDPPPANSPPKNNNHRRAESVQSKKDISVEPDCLSCERATGSTILPEVEMCQRRMKLLQGSGRNMPTTDDPTARELPKNNLAGGRNVPPKDDPIAREPPKNNLDRR

SEQ ID NO: 21851 - protein, 356 aa, Oryza sativa
MADTDRTRQTVARTYYKAQIMQHPLIHRRIMLYVPKQLPGLRVCVDCRNVDGCGLLRSGEPVAGDAGVLRRTAALLYQVPPPEGKERWEIKDDEGNVQLWLQVPGLTEDDLEITTTDELLEIKRKAGRGDPRRLDDVQGVGSFHLRLLLTKEFVSSQVTAELKAGMLEVTIPKNTNLRRTVVRIGQQSQSPAAVRTAQPKVVDPPPANSPPKNNNLVRNTSVQSRIDPPARESPKNDLGVGISVQPNDSPAREPPKNNLAGGRNVPTKDDPPARELPKNNLAGGRNVPPKDDPPAREPPKNNLAGGRNVAPKDDPPANEAPRNNLAGGTGVPTKDPPRNANEPPKNPPGTREANLG

SEQ ID NO: 21852 - protein, 219 aa, Triticum aestivum
  unsure (1)..(219): unsure at all Xaa locations
XELACIKPTFSLLQSIVPAFRSSIRIRQXXMQVSVAXXSNVDGCCVLHPYESLARSAVFFRHAAALLYPVQPPDSKERWDIKEEEKHVKIWLQVPGLSENDLEITAGEDMLEIKRKAGTGAGGREEPPVEVHGVGSFHVRLLMTKEYNSEDVTAELKAGMLEITIGKADNRXHKKTSRVWEEKHGPEHASPRQAELKQXPPKVMAPXPKNQNIVRSFQX

SEQ ID NO: 21853 - protein, 150 aa, Hordeum vulgare subsp. vulgare
MSIVRRSNAFDPFADLWADPFDTFRSIVPAFSGNSETAAFANARVDWKETPEAHVFKADLPGVKKEEVKVEVEDGNVLVVSGERTKEKEDKNDKWHRVERSSGKFVRRFRLPEDAKVEEVKAGLENGVLTVTVPKTEVKKPEVKAIEISG

SEQ ID NO: 21854 - protein, 145 aa, Thermosynechococcus elongatus BP-1
MALVRWEPFREIDAIQRQMNRLFDELIPLTERRSDLSFLPAAELEETPEALLLKVELPGMDPKDIDVQVTAEAVSISGERKSETKTETEGMKRTEFRYGKFQRVIPLPVRIQNTSVKAEYKDGILHLTLPKAEEEKNRVVKVSLA

SEQ ID NO: 21855 - protein, 142 aa, Bacteroides thetaiotaomicron VPI-5482
MVPVKTNQNWLPSIFNDFFDNEWMARANATAPAINVIENEKDYKVELAAPGMTKNDFKVSVDESNNLVICMEKKDEKKEEKKDGKYLRREFSYSRFQQSILLPDNVEKDKISAKVEHGVLFIDIPKVVDKKVQETTKTIDVK

SEQ ID NO: 21856 - protein, 147 aa, Funaria hygrometrica
MDFPLFQILSFPDELEKSLNPQSQKYVRDTKAMVSTAVDVKELPDAYIFVADMPGLKSADMKVQLENDNVLVIGGTRKREEPDPKVKYIRMERNSGSFMRKFTLPQNSNLDKIAASCVDGILTVTVPKIPPPEPAKPRTIEVTMGNQ

SEQ ID NO: 21857 - protein, 147 aa, Funaria hygrometrica
MDFPLFQILSFPDELEKSLNPQSQKYVRDTKAMVSTAVDVKELPDAYIFVADMPGLKSADVKVQLENDNVLVIGGTRKREEPDPKVKYIRMERNSGSFMRKFTLPQNSNLDKIAASCVNGILTVTVPKIPPPEPAKPRTIEVTMGNQ

SEQ ID NO: 21858 - protein, 161 aa, Funaria hygrometrica
MDFVVFDTDPFLTTLHQLVHEPGSDLERKIKRQRRNHHDEPRHVTIATPVDVKEIKDAYLFVADVPGLQKTDIEVQVENENVLTMRGKRKLDEKVNEKEEDTKFIRMERSPVKLLRKFTLPSDANADAITANCVDGVLTVTVPKIPPPEPAKSKTVQIAVD

SEQ ID NO: 21859 - protein, 85 aa, Lilium sp.
GEIKVEIEDDRVLVISGERKRQEEMYQKTERWMGKLTRKFQLAENANPNAVSAVWRDGELTVTVEKLPEGDVEGLTLTVESPGRR

SEQ ID NO: 21860 - protein, 161 aa, Chenopodium rubrum
MSLIPNNWFNTGRRSNIFDPFSLDEIWDPFFGLPSTLSTVPRSETAAETAAFANARIDWKETPEAHVFKADLPGVKKEEVKVEVEDGNVLRISGQRAREKEEKNDTWHRVERSSGQFMRKFRLPENAKVDQVKAGMENGVLTVTVPKNEAPKPQVKAINVY

SEQ ID NO: 21861 - protein, 211 aa, Plasmodium falciparum 3D7
MSENNLSKDNNKNKRNEALENAGMLDTFFESMYDHMNRLDQYHSDMNRMMNSLRGYYMNNDFFRFFPNRRSLTDYDINRNRNHDLLLSKPFSSMFRRDGYSNVPAMDVLDKEKHLEIKMDVPGLNKEDVQINLDDGKLEISGEFKKSHEQKDEQQRYYIKERCESSFYRSFTLPENVSEDEIKATFKDGVLKIDIPKKDIPDKKKKKIEID

SEQ ID NO: 21862 - protein, 155 aa, Arabidopsis thaliana
MDLGRFPIISILEDMLEVPEDHNNEKTRNNPSRVYMRDAKAMAATPADVIEHPNAYAFVVDMPGIKGDEIKVQVENDNVLVVSGERQRENKENEGVKYVRMERRMGKFMRKFQLPENADLDKISAVCHDGVLKVTVQKLPPPEPKKPKTIQVQVA

SEQ ID NO: 21863 - protein, 156 aa, Arabidopsis thaliana
MDLEFGRFPIFSILEDMLEAPEEQTEKTRNNPSRAYMRDAKAMAATPADVIEHPDAYVFAVDMPGIKGDEIQVQIENENVLVVSGKRQRDNKENEGVKFVRMERRMGKFMRKFQLPDNADLEKISAACNDGVLKVTIPKLPPPEPKKPKTIQVQVA

SEQ ID NO: 21864 - protein, 156 aa, Arabidopsis thaliana
MDLEFGRFPIFSILEDMLEAPEEQTEKTRNNPSRAYMRDAKAMAATPADVIEHPDAYVFAVDMPGIKGDEIQVQIENENVLVVSGKRQRDNKENEGVKFVRMERRMGKFMRKFQLPDNADLEKISPACNGGVLEVTNPKLPPPEPRNPRQNKVQFA

SEQ ID NO: 21865 - protein, 159 aa, Arabidopsis thaliana
MDLGRFPIISILEDMLEVPEDHNNEKTRNNPSRVYMRDAKAMAATPADVIEHPNAYAFVVDMPGIKGDEIKVQVENDNVLVVSGERQRENKENEGVKYVRMERRMGKFMRKFQLPENADLDKISAVCHDGVLKVTVQNFLLRNQRNQRQFKFKLLEFVL

SEQ ID NO: 21866 - protein, 159 aa, Glycine max
MDFRVMGLDSPLFHTLQHMMDMSEDAAGDNKTYSAPTRSYVRDAKAMAATPADVKEYPNSYVFEIDMPGLKSGDIKVQVEDDNVLLISGERKRDEEKEGVKYLRMERRVGKFMRKFVLPENANTDAISAVCQDGVLSVIVQKLPPPEPKKPKTIEVKVA

SEQ ID NO: 21867 - protein, 159 aa, Glycine max
MDFRVMGLEPPLFHTLQHMMDMSEDAAGENKTYSAPTRSYVRDAKAMAATPADVKEYPNSYVFEIDMPGLKSGDIKVQVEDDNVLLISGERKRDEEKEGVKYLRMERRVGKFMRKFVLPENANTDAISAVCQDGVLSVTVQKLPPPEPKKPRTIEVKVF

SEQ ID NO: 21868 - protein, 159 aa, Glycine max
MDFRVMGLESPLFHTLQHMMDMSEDGAGDNKTHNAPTWSYVRDAKAMAATPADVKEYPNSYVFEIDMPGLKSGDIKVQVEDDNVLLICGERKRDEEKEGAKYLRMERRVGKLMRKFVLPENANTDAISAVCQDGVLSVTVQKLPPPEPKKPRTIQVKVA

SEQ ID NO: 21869 - protein, 159 aa, Glycine max
MDFRVMGLESPLFHTLQHMMDMSEDGAGDNKTHNAPTWSYVRDAKAMAATPADVKEYPNSYVFEIDMPGLKSGDIKVQVEDDNLLLICGERKRDEEKEGAKYLRMERRVGKLMRKFVLPENANTDAISAVCQDGVLSVTVQKLPPPEPKKPRTIQVKVA

SEQ ID NO: 21870 - protein, 159 aa, Glycine max
  unsure (1)..(159): unsure at all Xaa locations
MDMRLMDLDSPFFNTLHRIMDLTEDXXEKNLNAPTRTYVRDAKAMAATPADVKEYPNSYVFVIDMPGLKSGDIKVQVEDDNVLLISGERKREEEKEKEGGKYLRMERRLGKLMRKFTLPENANTDAISAVCQDGVLTVTVNKLPPPQPKKPRTIEVKIA

SEQ ID NO: 21871 - protein, 121 aa, Glycine max
  unsure (1)..(121): unsure at all Xaa locations
MAGMVFGLDAPMMAALQHLLDIPDGEAXEQPPXEKQGPTRAYVRDARAMAATPADVKELPGAYAFVVDMPGLGSGDIKVQVEDERVLVISGERRREEKEDAKYLRMERRMGKLMRKFVLPE

SEQ ID NO: 21872 - protein, 117 aa, Glycine max
  unsure (1)..(117): unsure at all Xaa locations
QLSLSTQEKNRKWISGXWIWTLHCSTLCTXIMDLTEDDNVLLISGERKREEDKEKEGAKYLRMERRVGKFMRKFTLPENANTDAISAVCQDGVLTVTVNKLPPPQPKKPKTIKVKIA

SEQ ID NO: 21873 - protein, 160 aa, Medicago sativa
MDFRLMGLMLQCYTALHQMMDLSDENVEKSSSHNAPTRSYVRDAKAMAATPADVKENPNSYVFVIDMPGLKSGDIKVQVEDDNVLVISGERKREEEKEGGAKYLRMERRVGKFMRKFVLPENPNTDAVSPVCQDGVLTVTVQKLPPPRPKKPRTIEVQIA

SEQ ID NO: 21874 - protein, 157 aa, Pisum sativum
MDFRLMDLDSPLFNTLHHIMDLTDDTTEKNLNAPTRTYVRDAKAMAATPADVKEHPNSYVFMVDMPGVKSGDIKVQVEDENVLLISGERKREEEKEGVKYLKMERRIGKLMRKFVLPENANIEAISAISQDGVLTVTVNKLPPPEPKKPKTIQVKVA

SEQ ID NO: 21875 - protein, 152 aa, Pisum sativum
MDLDSPLFNTLHHIMDLTDDTTEKNLNAPTRTYVRDAKAMAATPADVKEHPNSYVFMVDMPGVKSGDIKVQVEDENVLLISGERKREEEKEGVKYLKMERRIGKLMRKFVLPENANIEAISAISQDGVLTVTVNKLPPPEPKKPKTIQVKVA

SEQ ID NO: 21876 - protein, 208 aa, Oryza sativa (japonica cultivar-group)
MGEYCDWRRSEAIKRQDREATNPSAIRGRRRRRRRRRRGDREMESAMFGLETPLMTALQHLLDIPDGEGGAAGKQGATGGPTRAYVRDARAMAATPADVKDLPGAYAFVVDMPGLKSSDIKVQVEEERLLVISGERRRGGGEEEKEESCKYLRMERRMGKFMRKFVLPDNADVDKISAVCQDGVLTVTVEKLPPPEPKKPKTIEVKVA

SEQ ID NO: 21877 - protein, 162 aa, Daucus carota
MDLRFMGIDHPLFDTLYHILDDDEHDTTDTGNTKRNKSRHERRYVRDAKAMATTAADVKEYPNAYLFVVDMPGLKSGDIKVQVEDGNVLVVNGERKREEEEGVKYLSMGRKVGRFLKKFVVPENANLENIKAVCQDGVLSVTVEKLPPPEPKKPKTIEVQIA

SEQ ID NO: 21878 - protein, 158 aa, Lycopersicon esculentum
MDLRLLGIDNTPLFHTLHHMMEAAGEDSDKSVNAPSRNYVRDAKAMAATPADVKEYPNSYVFVVDMPGLKSGDIKVQVEEDNVLLISGERKREEEKEGAKFIRMERRVGKFMRKFSLPENANTDAISAVCQDGVLTVTVQKLPPPEPKKPKTIEVKVA

SEQ ID NO: 21879 - protein, 155 aa, Lycopersicon esculentum
MDLRLMGIDNTPLFHTLQHMMEAAGEDSVNAPPKKYVRDAKAMAATPVDVKEYPDSYVFVVDMPGLKSGDIKVQVEEDNVLLISGERKREEEKEGVKFIRMERRVGKFMRKFSLPENANTDAISAVCQDGSLTVTVQKLPPPEPKKSKTIQVKVA

SEQ ID NO: 21880 - protein, 155 aa, Lycopersicon peruvianum
MDLRLLGIDNTPLFHTLHHMMEAAGEDSVNAPSKIYVRDAKAMAATPADVKEYPNSYVFVVDMPGLKSGDIKVQVEEDNVLLISGERKREEEKEGAKFIRMERRVGKFMRKFSLPENANTDAISAVCQDGVLTVTVQKLPPPEPKKPKTIEVKVA

SEQ ID NO: 21881 - protein, 160 aa, Helianthus annuus
MDIDSLMGFDPLLRNLHYILEATDDNTTGNKSNNSGPSRAYVRDARAMAATPADVKECPNSYVFIVDMPGLKSGDIKVQVERDNVLVISGKRNREEEKEGVKYVRMERRMGKFMKKFALPEDANTDKISAICQDGVLTVTVEKLPPPEPKKPKTIQVQVA

SEQ ID NO: 21882 - protein, 275 aa, Oryza sativa
SCQTPPYDKWVPLEPTVRPPTQTRSPLAPKISTSLDLSRRKRPSAPASPRPFHHLSEPSTPFQTPPPRHPYLNPSSHRAIKRQDREATNPSAIRGRRRRRRRRRRGDREMESAMFGLETPLMTALQHLLDIPDGEGGAAGKQGATGGPTRAYVRDARAMAATPADVKDLPGAYAFVVDMPGLKSSDIKVQVEEERLLVISGERRRGGGEEEKEESCKYLRMERRMGKFMRKFVLPDNADVDKISAVCQDGVLTVTVEKLPPPEPKKPKTIEVKVA

SEQ ID NO: 21883 - protein, 162 aa, Triticum aestivum
MEGRMFGLETPLMTALQHLLDVPDGESGGAGNAGGEKQGPTRAYVRDARAMAATPADVKELPGAYAFVVDMPGLGSGDIKVQVEDERVLVISGERRREEKEDAKYLRMERRMGKLMRKFVLPENADMEKISAVCRDGVLTVSVEKLPPPEPKKPKTIQVQVA

SEQ ID NO: 21884 - protein, 162 aa, Triticum aestivum
MEGRMFGLETPLMTALQHLLDVPDSESGGAGNAGGERQGPTRAYVRDARAMAATPADVKELPGAYAFVVDMPGLGSGDIKVQVEDERALVISGERRREEKEDARYLRMERRMGKLMRKFVLPENADMEKISAVCRDGVLTVTVEKLPPPEPKKPKTIQVQVA

SEQ ID NO: 21885 - protein, 162 aa, Triticum aestivum
MEGRMFGLETPLMTALQHLLDVPDGEAGGPGNAAGEKQGPTRAYVRDARAMAATPADVKELPGAYAFVVDMPGLGSGDIKVQVEDERVLVISGERRREEKEDAKYLRMERRMGKMMRKFVLPENADMEKISAVCRDGVLTVSLEKLPPPETKKPKTIQVQVA

SEQ ID NO: 21886 - protein, 160 aa, Triticum aestivum
  unsure (1)..(160): unsure at all Xaa locations
MAGMVFGLDAPMMAALQHLLDIPDGEAXEPPPXEKQGPTRAYVRDARAMAATPADVKELPGAYAFVVDMPGLGSGDIKVQVEDERVLVISGERRREEKEDAKYLRMERRMGKLMRKFVLPENADMEKISAACRDGVLTVTVDKLPPPEPKKPKTIQVQVA

SEQ ID NO: 21887 - protein, 157 aa, Triticum aestivum
MAGMVFGLDAPMMAALQHLLDIPDGEAEPPPEKQGPTRAYVRDARAMAATPADVKELPGAYAFVVDMPGLGSGDIKVQVEDERVLVISGERRREEKEDAKYLRMERRMGKLMRKFVLPENADMEKISPCRDGVLTVTVDKLPPPEPKKPKTIQVQVA

SEQ ID NO: 21888 - protein, 162 aa, Triticum aestivum
MAGMVFGLENPMMTALQHLLDIPDGEAGGAGAPRGEKQGPTRAYVRDARAVAAAPADVKELPGAYAFVVDMPGLGSGDIKVQVEDERVLVISGERTREEEEDPKYLRMEPRMGKLMRKFVLPENADMEKISPACRDGVLPVPVEKLPPPEPKKPKPIQVQVA

SEQ ID NO: 21889 - protein, 156 aa, Triticum aestivum
  unsure (1)..(156): unsure at all Xaa locations
MAGMVFGLDAPMMAALQHLLDIPDGEAXEPPAXEKQGPTRAYVRDARAMAATPADVKELPGAYAXWVVDMPGLGSGDIKVQVEGEGVLVIGGERGREEKEDAKYRRMERRRKFVLPENADMEKISAVCRDGVLTVTVHKLPAPEPKKPKTIQVQVA

SEQ ID NO: 21890 - protein, 156 aa, Nostoc punctiforme
MALVRWEPFREVESLQRQLNRLFDEIAPTGRREEEGIAFIPSAEIQETPDAVHLKVEIPGVDPKDLDVQVSPEAVSISGERKSEIKTEERGITRTEFRYGRFQRVIPLPSRVQHDKVEAEYKDGILKLRLPKAEEDRNKVVKVNLGDGHRGNGQGQ

SEQ ID NO: 21891 - protein, 142 aa, Streptococcus thermophilus
MLNKIQPRNSDTYSMTPFDFFEDFSRNLFNDFKSNLIKTDIHETDNEYLVEAELPGIPKENIQVTYEDGVLTISGQQQIDTVDEDKKGKLIRSERSSTSLRRQYLLENVKEDEIKASYSDGILKVTLPKDSNKEIKKSIPIE

SEQ ID NO: 21892 - protein, 142 aa, Streptococcus thermophilus
MLNKIQQRNSDTYSMTPFDFFEDFSRNLFNDLRSNLIKTDIHETDNEYIVEAELPGISKDNIQVTYEDGVLTISGQQQIDTVDEDKKGKLIRSERSLTSVRRQYLLENVKEDEIKASYSDGILKVTLPKDSNKEIKKSIPIE

SEQ ID NO: 21893 - protein, 142 aa, Streptococcus thermophilus
MLNKIQHRNLNTYSVTPFDFFEEFSRNLFNDFKPNFIKTDIHETDNEYLVEAELPGIPKENIQVTYENGVLTISGQRQIDAVNEDKKGKLIRSERSLTSVQRQYLLENVKEDEIKASYSDGVLKVTLPKDSNKEIKKSISIE

SEQ ID NO: 21894 - protein, 154 aa, Streptococcus thermophilus
MLNKIQQRNSDIYSMTPFNFFEDFRRNLFNDFFEDFSHNLFNDLKSNLIKTDIHETDNEYVVEAELPGIPKEDIQVNYENGVLTISGQRQIDAAIEDKKGKLIHSERSLTSVRRQYLLENVKEDEIKASYSDGILKVTLPKDSNKEIKTSIPIE

SEQ ID NO: 21895 - protein, 142 aa, Streptococcus thermophilus
MLNKIQHRNLNTYSVTPFDFFEEFSRNLFNDFKPNFIKTDIHETDNEYLVEAELPGIPKEDIQVTYENGVLTISGQQQIDAVNEDKKGKLIRSERSLTSVQRQYLLENVKEDEIKASYSDGVLKVTLPKDSNKEIKKSISIE

SEQ ID NO: 21896 - protein, 154 aa, Streptococcus thermophilus
MLNKIQQRNSDTYSVTPFNFFEDFRRNLFNDFFEDFSHNLFNDFKPNLIKTDIHETDNEYFVEAELPGIPKEDIQINYENGVLTISGQRQIDAATEDKKGKLIRNERSLTSVRRQYLLENVKEDEIKASYSDGILKVTLPKDSNKEIKTSIPIE

SEQ ID NO: 21897 - protein, 142 aa, Streptococcus thermophilus
MLNKIQHRNLNTYSVTPFDFFEEFSRNLFNDFKPNFIKTDIHETDNEYLVEAELPGIPKENIQVTYENGVLTISGQQQIDAVNEDKKGKLIRSERSLTSVQRQYLLENVKEDEIKASYSDGVLKVTLPKDSNKEIKKSISIE

SEQ ID NO: 21898 - protein, 142 aa, Streptococcus thermophilus
MLNKIQQRNSDIYSMTPFNFFEDFRRNLFNDLKSNLIKTDIHETDNEYVVEAELPGIPKEDIQVNYENGVLTISGQRQIDAAIEDEKGKLIHSERSLTSVRRQYLLENVKEDEIKASYSDGILKVTLPKDSNKEIKTSIPIE

SEQ ID NO: 21899 - protein, 150 aa, Streptococcus thermophilus
MLNKIQHRNLNTYSVTPLDFYSVTPLNFFEDFSRSLFNDFKPHFIKTDIHETDNEYLVEAELPGIPKEDIQVTYENGVLTISGQQQIDAVNEDKKGNLIRSERNLTSVRRQYLLENVKEDEIKASYSDGVLKVTLPKDSNKEIKKSISIE

SEQ ID NO: 21900 - protein, 55 aa, Coffea arabica
KRVERSSGQFMRRFRLPENAKMDQIKAAMENGVLTITIPKEEAKKTDVRAIQISG

SEQ ID NO: 21901 - protein, 142 aa, Burkholderia fungorum
MSNLTRFDPFPLEPMSELFQGLFRPLRGAGGEAPLADIKVDVTESDSAYTVKAELPGVDKKDIDVKIDGNLVSISAKVERNQEMKEGERVIRRERYAGAVSRAFSLASEVDESAAAAEYKDGVLSLTLPKKAASERKRLQIN

SEQ ID NO: 21902 - protein, 177 aa, Burkholderia fungorum
MFRSVCRRIRPVAGELERVVRFASFYRGSQTMSDPYFSTDLFGGIDRLQQQMASVFGGFSTSLRAARLGAFPEINIGSTDDTIEIVAFAPGLDPAQLDVSIDKGLLIISGERKNLERSRNDEVRSYVQERFSGSFRRVIELPQQADPDKVEARYTNGCLKISVGKLEASKPRAITVQ

SEQ ID NO: 21903 - protein, 167 aa, Pyrococcus furiosus DSM 3638
MVRRIRRWDIWDPFDLIREIQEEIDAMFDEFFSRPRLWTYRRWSEPAMYEERVGEVWREPFVDIFDNGDEFVITAELPGVRKEDIKVRVTEDTVYIEATVKREKELEREGAVRIERYFTGYRRAIRLPEEVIPEKAKAKYNNGVLEIRVPKKHPTKKESEGFEVKVE

SEQ ID NO: 21904 - protein, 145 aa, Methanothermobacter thermautotrophicus str. Delta H
MFEKRRLMAEKMMEDMIKNMREMQKEFEKKIAEYAENIPEKLSMDVMETDDAIIIKTDLPGVKKEDINIELTENTISISAVFEEEVEIKEADFIKKERKYGEAKREMRLPEKIRVEDASAKFENGVLTVELPKVEVKKKQTLKVE

SEQ ID NO: 21905 - protein, 153 aa, Methanosarcina acetivorans C2A
MKWPAKRSVSGPARWDPFEEIRRTQERLNQLFEDFMPMEEWGGGKVYTPAIDIMEEDDKLVVTTDLPGINKEDVEINLKEDMLEISAKTGEEKETEEEGYLRKERAYTQFYRAVRLPVGVKEEGSTAKMENGVLTISLPKAQIEEPKKKIEIE

SEQ ID NO: 21906 - protein, 152 aa, Methanosarcina acetivorans C2A
MKFPIKRPSRDVCNWDPFDEIRGMQEYMEQMMRTFPALESRYAGGTFAPLTDVAEEDNKVIVTTDLPGINRENIELSLKDNFLVISASKGKEEENEKEGYLRKERSFMRYYREIPLPKGVTEEGATAQLKNGVLTVTMPKTEALTEKRIPIE

SEQ ID NO: 21907 - protein, 130 aa, Leptospira interrogans serovar lai str. 56601
MTNAVLNEKNHSVTSEETKKERVRILAPRVDIYSDEENIYLLADLPGVEEKDVQVQLEKDQLIISGKTSNKDIQGELRYSEFRTGEYKRTFTLTESVEEDRISAVYKNGVLNLTLPKRKPLTKKIEVRSE

SEQ ID NO: 21908 - protein, 153 aa, Methanosarcina mazei Goe1
MRWPAKRSFSGPARWDPFEEIKRTQERLNQLFEDFMPMEEWGGGKVYTPAIDIKEEDDKLLVTTDLPGINKEDVEINLKEDMLEISAKSGKEKESEEEGYLRRERAYTQFYRAVRLPSSVREEGACAKMDNGVLTIMLPKAKIEEPKKKIEIE

SEQ ID NO: 21909 - protein, 152 aa, Methanosarcina mazei Goe1
MKLPIKRPSRDVYSWDPFDEIKRMQEYMEQMMRAFPALENRYVSDTLSPLTDVAEEDNKVIVTTDLPGIDKENVELNLRENLLVISAQKGKEEETEKEGYLRKERSFMRYYREIPLPDNVTEDGATAQLKNGVLTVTLPKTKDVTEKRIQIE

SEQ ID NO: 21910 - protein, 152 aa, Clostridium thermocellum ATCC 27405
MLFMFGIVPFGRRGMGVSRRGRDLFDIDSFFDDFFDDRFFPAFYGGNQIKVDIRENDKEYILEADIPGVDKENITVEVNGDVLTISAKWDEQTEIKKENYLRRERRASSMSRSFTLENVDSDRITAKHENGVLTLILPKKEPRSRGRRINIS

SEQ ID NO: 21911 - protein, 215 aa, Microbulbifer degradans 2-40
MRILMFDSQQSNSMEVVFMNLQTLNPWNWFKHEEAAKQHAAAPAIHSAENSETSAPQLNSLIQLHQQMDKLFDDVFSSFGFPSLGARFADANLLTNRANSLLGGYRPTVDVSGDKTHYHISLDVPGLSESDISIDVSNDVLTIRGSKEEKAEQNEKHVYRMERRYGSFQRTLSLPSDANTDDITAQLKDGVLNLVIAKKDVPPEDVKRIPINSVH

SEQ ID NO: 21912 - protein, 167 aa, Bifidobacterium longum DJO10A
MAMFPALMNDTMFSDLFDDPFFEGWRNTDNTMSAVMPANMMTTDVRETDKGYDVDIDMPGFKKEDINLELNNGYLTVSASRCSEHEDKAPAAEDEASDSKCACASDSGKWLRRERYMGSCSRSFYVGEDVKESDIHASYRNGTLCIQVPKMQAQPQVESKHQIAIEG

SEQ ID NO: 21913 - protein, 146 aa, Clostridium tetani E88
MFDMIPFKRNNSMKRDSYFDEFFDNFFNNDFLVPIKFPKNNFRADLKETNNEYIIEADLPGISKDAVKVNYSNNNLVISAKREDIIENKDENYIRRERSYGEFKRAFYVDNVDENNIKASFKNGVLRINLTKLEDTTKARKQIEIE

SEQ ID NO: 21914 - protein, 153 aa, Methanosarcina barkeri
MRWPMRRSFSGPARWDPFDEIRRTQERLNQLFEDFMPMEEWGGGKVYTPAIDIKEEDDKLLVTTDLPGINKEDVQINLKEDILEISAKTGKEKETEEEGYLRRERAYTQFYRAVRLPASVKEEGSTAKMENGVLTITLPKMQLEELTKKIAIE

SEQ ID NO: 21915 - protein, 152 aa, Methanosarcina barkeri
MKFPMKRTDRDMYSWDPFDEIRRMQNYMENMFRTFPALESRFGNEAFSPLTDVMEEDEKVVVTTDLPGVDREDVELNLRDNVLVISAGKGKEEEAEKEGYLRKERSFMRYYREIPLPDGVTEEGTTAQLKNGVLTVTLPKTKSVAGKRIEIE

SEQ ID NO: 21916 - protein, 144 aa, Aquifex aeolicus VF5
MDRRSMIVWRPFEEVERLRRDFERLLEEFVPRRAEQETLVPPVEVYETDKEVVIKMDLPGVKKEDIEITVKENAVHVRAERKEEKEEKTENIIRAERFYGVIERVIPLPVEVDPEKAEAKYENGVLEIRIPKVHVEKEKKIKLA

SEQ ID NO: 21917 - protein, 165 aa, Pyrococcus abyssi
MVRRRRWDIWDPFDIIREIQEEIDAMFDEFFSRPRLWTYRRWREPEVYEESREVWREPFVDIFDRGDEFVVIAELPGVRKEDIKVRVTEDSVYIEATVRREKELEEEGAVRIERYYSGYRRVIRLPEEVIPEKAKAKYNNGVLEIRIPKKQPTKKEGEGFEVKIE

SEQ ID NO: 21918 - protein, 146 aa, Funaria hygrometrica
MALSLFGRGSGSFFDPFDLSLLESGPSRQFARDAHAVANTQIDWRETPEAHIFKADLPGLKKEEVKVQLVDGKTLEISGERRKEEVHKDDTWHRVERAHGSFLRRFRLPDNSNVEAVEAQVQDGVLTVTIPKIQKPKPQVRQIEIA

SEQ ID NO: 21919 - protein, 146 aa, Funaria hygrometrica
MALSLFGRGSGSFFDPFDLSLLESGPSRQFARDAHAVPNTQIDWRETPEAQSSKADLPGLKKEEVKVQLVDGKTLEISGERRKEEVHKDDTWHRVERAHGSFLRRFRLPDNSNVEAVEAQVQDGVLTVTIPKIQKPKPQVRQIEIA

SEQ ID NO: 21920 - protein, 149 aa, Funaria hygrometrica
MAIYVNRRNNIWNMPDPMDIMMNFFEDTPARSIARDAHALASTNVDWKETPTEHVIKADLPGLKKEEVHVQVEGDRTLSISGQRKHEEVQKTDTWHRVERSSGQFMRKFRLPENANLEQISAQVQDGVLTVKIPKLEKQKPHSRTIEIG

SEQ ID NO: 21921 - protein, 155 aa, Laccaria bicolor
MSVFYYEPYYDFDRLLDGIFTPRTARNGVHKRALQSDATPEGAVRALKPRMDLHEDKEKNLVTATFEFPGSKKEDVHLEIHNGRLVVSVENKISEEHDESGYAVRERRYGKFSRTLQLPQGVKDDEIKAGMEDGVLTVTFPKSGAELAPKKISIS

SEQ ID NO: 21922 - protein, 140 aa, Ralstonia solanacearum
MSQLRRYDPFAIEPAGDIFQGLLRSFRGGMDSALPFKVDVTESDTAYSVVAEIPGAKKEDIDVTVDRGTVMISAKVERQSEKKEGERVIRSERYSGSMQRMFTLEAGVDENKVEATYESGLLRVTLPKKEVSPQQRITIR

SEQ ID NO: 21923 - protein, 46 aa, Pseudotsuga menziesii
LRRFRLPDNAKVEEIKAAMENGVLTVTVPKQPEPQPPQPKSIEISG

SEQ ID NO: 21924 - protein, 161 aa, Arabidopsis thaliana
MSLIPSIFGGRRSNVFDPFSQDLWDPFEGFFTPSSALANASTARDVAAFTNARVDWKETPEAHVFKADLPGLKKEEVKVEVEDKNVLQISGERSKENEEKNDKWHRVERASGKFMRRFRLPENAKMEEVKATMENGVLTVVVPKAPEKKPQVKSIDISGAN

SEQ ID NO: 21925 - protein, 157 aa, Arabidopsis thaliana
MSLIPSIFGGRRTNVFDPFSLDVFDPFEGFLTPSGLANAPAMDVAAFTNAKVDWRETPEAHVFKADLPGLRKEEVKVEVEDGNILQISGERSNENEEKNDKWHRVERSSGKFTRRFRLPENAKMEEIKASMENGVLSVTVPKVPEKKPEVKSIDISG

SEQ ID NO: 21926 - protein, 403 aa, Arabidopsis thaliana
MAWNSERSIRECINRRQVHGPSMLPTLNLTGDVILAEHLSHRFGKIGLGDVVLVRSPRDPKRMVTKRILGLEGDRLTFSADPLVGDASVSVLVKQHGIANLGLRVKRCMIDELGWSRRFRKVMFGFREITCMLQLIHVILGLYLTVSLKEKLFYGNHLFACLGLATRILWVIEMTIIYTYTFSNRRKAMVLILFLKPELQYQMLRFILLVSKKLLYEPTRSKEFIAKQSFKTEQTQRVAITRGSETMSLIPSIFGGRRTNVFDPFSLDVFDPFEGFLTPSGLANAPAMDVAAFTNAKVDWRETPEAHVFKADLPGLRKEEVKVEVEDGNILQISGERSNENEEKNDKWHRVERSSGKFTRRFRLPENAKMEEIKASMENGVLSVTVPKVPEKKPEVKSIDISG

SEQ ID NO: 21927 - protein, 161 aa, Arabidopsis thaliana
MSLIPSIFGGRRSNVFDPFSQDVWDPFEGFFTPSSALANASTARDVAAFTNARVDWKETPEAHVFKADLPGLKKEEVKVEVEDKNVLQISGERSKENEEKNDKWHRVERASGKFMRRFRLPENAKMEEVKATMENGVLTVVVPKAPEKKPQVKSIDISGAN

SEQ ID NO: 21928 - protein, 156 aa, Arabidopsis thaliana
MSLVPSFFGGRRTNVFDPFSLDVWDPFEGFLTPGLTNAPAKDVAAFTNAKVDWRETPEAHVFKADVPGLKKEEVKVEVEDGNILQISGERSSENEEKSDTWHRVERSSGKFMRRFRLPENAKVEEVKASMENGVLSVTVPKVQESKPEVKSIDISG

SEQ ID NO: 21929 - protein, 156 aa, Arabidopsis thaliana
MSLVPSFFGGRRTNVFDPFSLDVWDPFEGFLTPGLTNAPAKDVAAFTNAKVDWRETPEAHVFKADVPGLKKEEVKVEVEDGNILQISGERSSENEEKSDTWHRVERSSGKFMRRFRLPENAKVEEVKASMENGVLSVTVPKVQESKPEVKSVDISG

SEQ ID NO: 21930 - protein, 156 aa, Arabidopsis thaliana
MSLVPTFFGGRRTNVFDPFSLDVWDPFEGFLTPGLTNAPAKDVAAFTNAKVDWRETPEAHVFKADVPGLKKEEVKVEVEDGNILQISGERSSENEEKSDTWHRVERSSGKFMRRFRLPENAKVEEVKASMENGVLSVTVPKVQESKPEVKSVDISG

SEQ ID NO: 21931 - protein, 153 aa, Arabidopsis thaliana
MSMIPSFFNNNRRSNIFDPFSLDVWDPFKELTSSSLSRENSAIVNARVDWRETPEAHVFKADLPGLKKEEVKVEIEEDSVLKISGERHVEKEDKNDTWHRVERSSGQFTRRFRLPENVKMDQVKAAMENGVLTVTVPKAETKKADVKSIQISG

SEQ ID NO: 21932 - protein, 157 aa, Arabidopsis thaliana
MSLIPSFFGNNRRSNSIFDPFSLDVWDPFKELQFPSSLSGETSAITNARVDWKETAEAHVFKADLPGMKKEEVKVEIEDDSVLKISGERHVEKEEKQDTWHRVERSSGQFSRKFKLPENVKMDQVKASMENGVLTVTVPKVEEAKKKAQVKSIDISG

SEQ ID NO: 21933 - protein, 155 aa, Arabidopsis thaliana
MSLIPSFFGNNRRINNNIFDPFSLDVWDPFKELQFPSSSSSAIANARVDWKETAEAHVFKADLPGMKKEEVKVEIEDDSVLKISGERHVEKEEKQDTWHRVERSSGGFSRKFRLPENVKMDQVKASMENGVLTVTVPKVETNKKKAQVKSIDISG

SEQ ID NO: 21934 - protein, 155 aa, Arabidopsis thaliana
MSLIPSFFGNNRRINNNIFDPFSLDVWDPFKELQFPSPSSSAIANARVDWKETAEAHVFKADLPGMKKEEVKVEIEDDSVLKISGERHVEKEEKQDTWHRVERSSGGFSRKFRLPENVKMDQVKASMENGVLTVTVPKVETNKKKAQVKSIDISG

SEQ ID NO: 21935 - protein, 157 aa, Brassica rapa
MSLIPSFFGGRRTNVFDPFSLDLYDPFEGFLTPSGMTNATSKDVAAFTNAKVDWRETPEAHVFKADLPGLKKEEVKVEVEDGNILQISGERSSENEEKSDRWHRVERSSGKFMRRFKLPENAKVDEVKASMENGVLSVTVPKMAERKPEVKSIDISG

SEQ ID NO: 21936 - protein, 128 aa, Brassica oleracea
DPFEGLLTPSSARDMAAFTNARVDWKETPEAHVFKADLPGLMKEEVKVEVEDKNILQISGERSKENEEKNDKWHRLERASGKFMRRFKLPENAKMEEVKATMENGVLTVTVPKAPEKKPEVKSIDISG

SEQ ID NO: 21937 - protein, 83 aa, Citrus maxima
MSLIPSIFGGRRTNVFDPFSLDVWDPFDGFLSSALTNAPSSARETSQFANARIDWKADLVHVFKADLPGLRKEEVKVEVEECR

SEQ ID NO: 21938 - protein, 161 aa, Glycine max
MSLIPNFFGGRRNNVFDPFSLDVWDPFKDFPFPNTLSSASFPEFSRENSAFVSTRVDWKETPEAHVFKADIPGLKKEEVKVQIEDDKVLQISGERNVEKEDKNDTWHRVERSSGKFMRRFRLPENAKVEQVKASMENGVLTVTVPKEEVKKPDVKAIEISG

SEQ ID NO: 21939 - protein, 154 aa, Glycine max
MSLIPGFFGARRSNVFDPFSLDIWDPFKDFHVPTSSVSAENSAFVSTRVDWKETPEAHVFKADIPGLKKEEVKVQIEDDRVLQISGERNVEKEDKNDTWHRVERSSGKFVRRFRLPENAKVNEVKASMENGVLTVTVPKEEVKKPDVKAIEISG

SEQ ID NO: 21940 - protein, 154 aa, Glycine max
MSLIPGFFGGRRSNVFDPFSLDMWDPFKDFHVPTSSVSAENSAFVSTRVDWKETPEAHVFKADIPGLKKEEVKVQIEDDRVLQISGERNVEKEDKNDTWHRVERSSGKFTRRFRLPENAKVNEVKASMENGVLTVTVPKEEVKKPDVKAIEISG

SEQ ID NO: 21941 - protein, 154 aa, Glycine max; identical to SEQ ID NO: 21940

SEQ ID NO: 21942 - protein, 154 aa, Glycine max
MSLIPGFFGGRRSNVFDPFSLDMWDPFKDFHVPTSSVSAENSAFVSTRVDWKETPEAHVFKADIPGLKKEEVKVQIEDDRVLQISGERNVEKEDKNDTWHRVERSSGKFTRRFRLPENAKVNEVKASMENGVLTVTVPKEEVKKPNVKAIEISG

SEQ ID NO: 21943 - protein, 153 aa, Glycine max
MSLIPSFFGGRRSSVFDPFSLDVWDPFKDFPFPSSLSAENSAFVSTRVDWKETPEAHVFKADIPGLKKEEVKLEIQDGRVLQISGERNVEKEDKNDTWHRVERSSGKLVRRFRLPENAKVDQVKASMENGVLTVTVPKEEIKKPDVKAIDISG

SEQ ID NO: 21944 - protein, 153 aa, Glycine max; identical to SEQ ID NO: 21943

SEQ ID NO: 21945 - protein, 161 aa, Glycine max
MSLIPNFFGGRRSNVFDPFSLDVWDPFKDFPFPNTLSSASFPEFSRENSAFVSTRVDWKETPEAHVFKADIPGLKKEEVKVQIEDDKVLQISGERNVEKEDRNNTWHRVERSSGKFMRRFRLPENAKVDKVKASMENGVLTVTVPKEEVKKADVKNIQISG

SEQ ID NO: 21946 - protein, 153 aa, Glycine max
MSLIPSIFGGRRSNVFDPFSLDVWDPFKDFHFPTSLSAENSAFVNTRVDWKETPEAHVFEADIPGLKKEEVKVQIEDDRVLQISGERNLEKEDKNDTWHRVERSSGNFMRRFRLPENAKVEQVKASMENGVLTVTVPKEEVKKPDVKAIEISG

SEQ ID NO: 21947 - protein, 153 aa, Glycine max; identical to SEQ ID NO: 21946

SEQ ID NO: 21948 - protein, 153 aa, Glycine max
MSLIPSFFGGRRSSVFDPFSLDVWEPFKDFPFPSSLSAENSAFVSTRVDWKETPEAHVFKADIPGLKKEEVKLEIQDDRVLQISGERNVEKEDKNDTWHRVERSSGKFMRRFRLPENAKVDQVKASMENGVLTVTVPKEEIKKPDVKAIDISG

SEQ ID NO: 21949 - protein, 153 aa, Glycine max
MSLIPSIFGGRRSNVFDPFSLDVWDPFKDFHFPTSLSAENSASVNTRVDWKETPEAHVFKADIPGLKKEEVKVEIEDDRVLQISGERNLEKEDKNDTWHRLERSSGKFMRRFRLPENAKVEQVKASMENGVLTVTVPKEEVKKPDVKAIEISG

SEQ ID NO: 21950 - protein, 150 aa, Glycine max
MSLIPSFFGGRRSNVFDPFSLDVWDPFKDLSFPSAEDSAFLKTRVDWKETPEAHVFKADIPGLKKEQVKVEIEDDKVLQISGERSVEKEDKNDKWHRVDRSSGKFLRKFRLPENAKVDQVKASIENGVLTVTVPKEEVKKPDVKAVQISG

SEQ ID NO: 21951 - protein, 160 aa, Glycine max
  unsure (1)..(160): unsure at all Xaa locations
MSLIPSFFGTGRRTNVFDPFSLDVWDPFHGFPXXTTALSAPRSETAAFANTRIDWKETAEAHVFKADLPGLKKEEVKVEIEEEGRVLQISGQRTKEKEDKNDTWHRLERSSGSFLRRFRLPENAKLDQVKAGMENGVLTVTVPKVDVKKPDVKPVQITEG

SEQ ID NO: 21952 - protein, 163 aa, Glycine max
  unsure (1)..(163): unsure at all Xaa locations
MSLIPNFFGGRRNNVFDPFSLDVWDPFKDFPFPNTLSSASFPEFSRENSAFVSTRVXDWKETPEAHVFKADIPGLKKEEVKVQIEDDKVLQISGERNVEKEDKNDTWHRVERSSGXKFMRRFRLPENAKVEQVKASMENGVLTVTVPKEEVKKPDVKAIEISG

SEQ ID NO: 21953 - protein, 160 aa, Glycine max
MSLIPNIFGGRRSNVFDPFSLDMWDPFKDFPFPNSVSTSFPEFSRENSAFVSTRVDWKETPEAHVFKADIPGLKKEEVKVQIEDDKVLQISGERNVEKEDKNDTWHRVERSSGKFMRRFRLPENAKVNEVKASMENGVLTVTVPKEEVKNHDVKAIKISG

SEQ ID NO: 21954 - protein, 153 aa, Glycine max
MSLIPSFFSGPRSNVFDPFSLDVWDPFKDFHFPTSVSAENSAFVSTRVDWKETPEAHVLKADIPGLKKEEVKVQIEDDRVLQISGERNLEKEDKNDTWHRVERSSGKFMRRFRLPENAKVEQVKASMENGVLTVTVPKEEIKKPDVKAIEISA

SEQ ID NO: 21955 - protein, 157 aa, Glycine max
MSIIPNLFGGRRSNVFDPFSLDVWDPFEGFPFSTGHVPSSGGESSAIANTRVDWKETPAAHVFNVDLPGLKKEEVKVEVEDGRVLQISGERTKEQEQKDDRWHRVERSTGKFMRRFRLPENAKMDQVKAAMENGVLTVTVPKEEDKKPQVKSIQISA

SEQ ID NO: 21956 - protein, 153 aa, Glycine max
MSLIPNFFGGRRSNVFDPFSLEVWDPFKDFHFPSSVSAENLAFVSTRVDWKETPEAHVLKADIPGLKKEEVKVQIEDDRVLQISGERNLEKEDKNDTWHRVERSSGKFMRRFRLPENVKVEQVKASMENGVLTVTVPKKEVKKPDVKAIEISA

SEQ ID NO: 21957 - protein, 153 aa, Glycine max
MSLIPSFFGGRRSNVLDPFSLDVWDPFKDFPFPTSLSAENSAFVSTRVDWKETPEAHVFKADIPGLKKEEVKLEIQDDRILQISGERNVEKEDKNDTWHRVERSSGKFMRSFRLPDNAKVDQVKASMENGVLTVTVPKEEIKKPDVKAIEISG

SEQ ID NO: 21958 - protein, 153 aa, Glycine max
MSIIPNLFGGRRSNVFDPVSLDVWDPLEGFPFSTANAGESSAIANTRVDWKETPQAHVFSVDLPGLKKEDVKVEVEDGRVLQISGEKTKEQEQKDDRWHRIERSTGKFMRRFRLPENAKMDQVKAAMENGVLTVTVPKEEQKKPQVKSIQISG

SEQ ID NO: 21959 - protein, 154 aa, Glycine max
MSLIPSIFGGPRSNVFDPFSLDMWDPFKDFHVPTSSVSAENSAFVNTRVDWKETQEAHVLKADIPGLKKEEVKVQIEDDRVLQISGERNVEKEDKNDTWHRVERSSGKFMRRFRLPENAKVEQVKACMENGVLTVTIPKEEVKKSDVKPIEISG

SEQ ID NO: 21960 - protein, 154 aa, Glycine max
MSLIPSIFGGPRSNVFDPFSLDMWDPFKDFHVPTSSVSAENSAFVNTRVDWKETQEAHVLKADIPGLKKEEVKVQIEDDRVLQISGERNVEKEDKNDTWHRVDRSSGKFMRRFRLPENAKVEQVKACMENGVLTVTIPKEEVKKSDVKPIEISG

SEQ ID NO: 21961 - protein, 152 aa, Glycine max
MSLIPNIFGGRRSNVFDPFKDFPFPNSVSTSFPEFSRENSAFVSTRVDWKETPEAHVFKADIPGLKKEEVKVQIEDDKVLQISGERNVENEDKNDTWHRVERSSGKFMRRFRLPENAKVNEVKASMENGVLTVTVPKKEVKNHDVKAIEISG

SEQ ID NO: 21962 - protein, 145 aa, Glycine max
  unsure (1)..(145): unsure at all Xaa locations
MSLIPSLLSNRXXIMDPFSTNIWAPSDSDSEVSAFVNARVDWKETPESHVFKADLPGLKKEEVKVEVEEGRVLNISGERSVEKEDKNEKWHRVERGRGKFQRKFWLPEDAKVDEVKASMENGVLTVIVPKVPDKKPEVKTIEISG

SEQ ID NO: 21963 - protein, 110 aa, Glycine max
  unsure (1)..(110): unsure at all Xaa locations
MSIVRRSNVFDPFADLWADPFDTFRSIVPAISGGSSETAAFANARVDWKETPEAHVFKADLPGVKKEEVKVEVEDGNVLVVSGERTKEEEDKNDKWHRVERSSGKFVRRX

SEQ ID NO: 21964 - protein, 150 aa, Glycine max
  unsure (1)..(150): unsure at all Xaa locations
MSLIPSFFGGRRSNVFDPFSLDVWDPFKDLSFPSAEDSAFLKTRVDWKETPEAHVFKADIPGLKKEQVKVEIEDDMVLQISGDRSVEKQDKNDNWHRVYRTIGKISMNCTLPENSXFDRVNASIENGVLTVIVRHEQVKEPDVXAVHISG

SEQ ID NO: 21965 - protein, 102 aa, Glycine max
YNITAHVFKADIPGLKKEEVKVQIEDDKVLQISGERNVEKEDKNDTWHRVERSSGKFMRRFRLPENAKVEQVKASMENGVLTVTVPKEEVKKPDVKAIEISG

SEQ ID NO: 21966 - protein, 113 aa, Glycine max
  unsure (1)..(113): unsure at all Xaa locations
MSLIRRSNVFDPFSLDFFDPFDGFPFGSGSSNSGGSLVPRTSSDTAAFAGARIDWKETPEAHVFKADVPGLKKEEVKVEVEDGXILQISGERIKEQEEKTDTWHRVERSSGXF

SEQ ID NO: 21967 - protein, 143 aa, Medicago sativa
DPFSLDVWDPFKDFPFTNSALSASSFPQENSAFVSTRIDWKETPEAHVFKADLPGLKKEEVKVEIEDDRVLQISGERNVEKEDKNDQWHRVERSSGKFMRRFRLPENAKMDQVKAAMENGVLTVTVPKEEIKKPEVKSIEISS

SEQ ID NO: 21968 - protein, 155 aa, Pisum sativum
IIPRVFGTGRRTNAFDPFSLDLWDPFQNFQLARSATGTTNETAAFANAHIDWKETPEAHVFKADLPGVKKEEVKVEIEEDRVLKISGERKTEKEDKNDTWHRVERSQGSFLRRFRLPENAKVDQVKAAMENGVLTVTVPKEEVKKPEAKPIQITG

SEQ ID NO: 21969 - protein, 158 aa, Pisum sativum
MSLIPSFFSGRRSNVFDPFSLDVWDPLKDFPFSNSSPSASFPRENPAFVSTRVDWKETPEAHVFKADLPGLKKEEVKVEVEDDRVLQISGERSVEKEDKNDEWHRVERSSGKFLRRFRLPENAKMDKVKASMENGVLTVTVPKEEIKKAEVKSIEISG

SEQ ID NO: 21970 - protein, 158 aa, Pisum sativum
MSLIPSFFGNRRSNVYDPFSLDVWDPLKDFPFPSSALSASFPRENSAFVSTRVDWKETPEAHVFKADLPGLKKEEVKVEVEDDRVLQISGERSVEKEDKNDEWHRVERSSGKFLRRFRLPENAKMGQVKASMENGVLTVTVPKEEIKKPDVKSIEISG

SEQ ID NO: 21971 - protein, 149 aa, Oryza sativa (japonica cultivar-group)
MSLVRRSNVFDPFADFWDPFDGVFRSLVPATSDRDTAAFANARVDWKETPESHVFKADLPGVKKEEVKVEVEEGNVLVISGQRSKEKEDKNDKWHRVERSSGQFMRRFRLPENAKVDQVKASMENGVLTVTVPKAEVKKPEVKAIEISG

SEQ ID NO: 21972 - protein, 154 aa, Lycopersicon esculentum
MSLIPRIFGDRRSSSMFDPFSIDVFDPFRELGFPGTNSGESSAFANTRIDWKETPEAHVFKADLPGLKKEEVKVEVEEDRVLQISGERNVEKEDKNDKWHRVERSSGKFMRRFRLPENAKMDQVKASMENGVLTVTVPKEEVKKPEVKSIEISG

SEQ ID NO: 21973 - protein, 154 aa, Lycopersicon esculentum
MSLIPRIFGDRRSSSMFDPFSIDVFDPFRELGFPSTNSGESSAFANTRIDWKETPEAHVFKVDLPGLKKEEVKVEVEEDRVLQISGERNVEKEDKNDKWHRMERSSGKFMRRFRLPENAKMDQVKASMENGVLTVTVPKEEVKKPEVKSIEISG

SEQ ID NO: 21974 - protein, 154 aa, Lycopersicon esculentum
MSLIPRIFGDRRSSSMFDPFSIDVFDPFRELGFPSTNSGESSAFANTRIDWKETPEPHVFKVDLPGLKKEEVKVEVEEDRVLQISGERNVEKEDKNDKWHRMERSSGKFMRRFRLPENAKMDQVKASMENGVLTVTVPKEEVKKPEVKSIEISG

SEQ ID NO: 21975 - protein, 154 aa, Lycopersicon esculentum
MSLIPRIFGDRRSSSMFDPFSIDVFDPFRELGFPSTNSGESSAFANTRIDWKETPEAHVFKVDLPGLKKEEVKEEVEEDRVLQISGERNVEKEDKNDKWHRMERSSGKFMRRFRLPENAKMDQVKASMENGVLTVTVPKEEVKKPEVKPIEISG

SEQ ID NO: 21976 - protein, 154 aa, Lycopersicon peruvianum
MSLIPRIFGDRRSSSMFDPFSIDVFDPFRELGFPGTNSRETSAFANTRIDWKETPEAHVFKADLPGLKKEEVKVEIEEDRVLQISGERNVEKEDKNDTWHRVERSSGKFMRRFRLPENAKMDQVKASMENGVLTVTVPKEEVKKPDVKSIEISG

SEQ ID NO: 21977 - protein, 154 aa, Lycopersicon peruvianum
MSLIPRIFGDRRSTSVFDPFSIDVFDPFKELGFTVSNSGETSAFANTRIDWKETPEAHVFKADLPGLKKEEVKVEVEEDRVLQISGERNVEKEDKNDTWHRVERSSGKFMRRFRLPENAKMDQVKASMENGVLTVTVPKEEVNNPDVKSIEISG

SEQ ID NO: 21978 - protein, 154 aa, Lycopersicon peruvianum
MSLIPRIFGDRRSSSMFDPFSIDVFDPFRELGFPGTNSGETSAFANTRIDWKETPEAHVFKADLPGLKLEEVKVEVEEDRVLQISGERNMEKEDKNDKWQRVERSSGKFMRRFRLPENAKMDQVKASMENGVLTVTVPKEEMKKPDVKSIEISG

SEQ ID NO: 21979 - protein, 159 aa, Nicotiana tabacum
MSLIPSFFDGRRSNIFDPFSLNIWDPFEGFPFSGTVANIPTSTRETAAFSSARIDWKETPESHVFKVDLPGIKKEEVKVEVEEGRVLQISGERSREQEEKNDKWHSMERSSGKFLRRFRLPENIKMEEIKATMENGVLTVTVPKMEEKKPEVKAIDISG

SEQ ID NO: 21980 - protein, 159 aa, Nicotiana tabacum
MAMIPSFFGGRRSNIFDPFSLDIFDPFEGFPFSGTVANVPSSARETSAFANARIDWKETPDSHIFKMDVPGIKKEEVKVEVEEGRVLQISGERSREQEEKNDTWHRMERSSGKFMRRFRLPGNAKMEEIKAAMENGVLTVTVPKEEEKKSEVKAIDISG

SEQ ID NO: 21981 - protein, 155 aa, Helianthus annuus
MSIIPSLFAGRRSSVFDPFSLDVWDPFRDFPISSSSDVSRETSALVNARVDWKETPEAHVFKADLPGIKKEEVKVEVEDGNILQITGERNVEKEDKNDKWHRVERSSGKFTRRFRLPENAKMDQVKAAMENGVLTITVPKEEVKKPDVKSIEISG

SEQ ID NO: 21982 - protein, 157 aa, Helianthus annuus
MSIVSSLFGGRRSSVFDPFSLDVWDPFRDFPISSSSDVSRETSALVNARVDWKETPEAHVFKADLPGIKKEEVKVEVEDGNILKITGERNIEKEDKNDKWHRVERSSGKFTRRFRLPENAKMDQVKAAMENGVLTITVPKEEVKKPDVKSIGDLWLE

SEQ ID NO: 21983 - protein, 177 aa, Helianthus annuus
MSIVPSLFGSRRSSIFDPFSLYVWDPFRDFPISTSSEVSRETSALVNARVDWKETPEAHVFKADLPGIKKEEVKVEVEDGNILQITGERNVEKEDKNDKWHRVERSSGKFTRRFRLPENAKMDQVKAAMENGVLTITVPKEEAKKPDVKSIEISVKKIYEFARFIVLDRLYDLYVFI

SEQ ID NO: 21984 - protein, 163 aa, Helianthus annuus
MSIIPNFFGRRRTNCFDPFSLDVWDPFEGFPFNNNNFGSLSDQVRSSSETSSFVNANVDWRETNDAHVFKADVPGLKKEEVKVEVEDDRVLQISGERNKESEEKGDTWHRVERSSGKFVRRFRLPENAKVDQVKAAMENGVLTVTVPKVEVKKPDVKSIQISG

SEQ ID NO: 21985 - protein, 156 aa, Helianthus annuus
MSIIPSFFTGNGSNIFDPFSSEIWDPFQGLSSVINNLPESSRETTAIANTRIDWKETPEAHVFKADLPGLKKEEVKVEVEEGRVLQISGERSRENVEKNDKWHRMERSSGKFLRRFRLPENAKMDQVKAAMENGVLTVTVPKAEVKKPEVKAIDIS

SEQ ID NO: 21986 - protein, 153 aa, Helianthus annuus
MSIIPSFFTSKRSNIFDPFSLDTWDPFQGIISTEPARETAAIVNARIDWKETPEAHVLKADLPGMKKEEVKVEVEDGRVLQISGERCREQEEKDDTWHRVERSSGKFIRRFRLPENAKMDEVKAMMENGVLTVVVPKEEEEKKPMVKAIDISG

SEQ ID NO: 21987 - protein, 150 aa, Oryza sativa
MSLVRRSNVFDPFSLDLWDPFDSVFRSVVPATSDNDTAAFANARIDWKETPESHVFKADLPGVKKEEVKVEVEEGNVLVISGQRSKEKEDKNDKWHRVERSSGQFMRRFRLPENAKVDQVKAGLENGVLTVTVPKAEVKKPEVKAIEISG

SEQ ID NO: 21988 - protein, 150 aa, Oryza sativa; identical to SEQ ID NO: 21987

SEQ ID NO: 21989 - protein, 150 aa, Oryza sativa
MSLVRRSNVFDPFSLDLWDPFDSVFRSVVPATSDNDTAAFANARIDWKETPESHVFKADLPGVKKEEVKVEVEEGNVLVISGQRSKEKEDKNDKWHRVERSSGQFMRRFRLPENAKVDQVKAGMENGVLTVTVPKAEVKKPEVKAIEISG

SEQ ID NO: 21990 - protein, 150 aa, Oryza sativa; identical to SEQ ID NO: 21989

SEQ ID NO: 21991 - protein, 149 aa, Oryza sativa
MSLVRRSNVFDPFADFWDPFDGVLRSLVPATSDRDTAAFANARVDWKETPESHVFKADLPGVKKEEVKVEVEEGNVLVISGQRSKEKEDKNDKWHRVERSSGQFMRRFRLPENAKVDQVKASMENGVLTVTVPKAEVNKPEVKAIEISG

SEQ ID NO: 21992 - protein, 149 aa, Oryza sativa; identical to SEQ ID NO: 21991

SEQ ID NO: 21993 - protein, 151 aa, Triticum aestivum
MSIVRRSNVFDPFADLWADPFDTFRSIVPAISGGSSETAAFANARVDWKETPEAHVFKVDLPGVKKEEVKVEVEDGNVLVVSGERSREKEDKNDKWHRVERSSGKFVRRFRLPEDAKVEEVKAGLENGVLTVTVPKAEVKKPEVKAIEISG

SEQ ID NO: 21994 - protein, 151 aa, Triticum aestivum; identical to SEQ ID NO: 21993

SEQ ID NO: 21995 - protein, 151 aa, Triticum aestivum
MSIVRRSNVFDPFADLWADPFDTFRSIVPAISGGSSETAAFANARMDWKETPEAHVFKADLPGVKKEEVKVEVEDGNVLVVSGERTKEKEDKNDKWHRVERSSGKFVRRFRLPEDAKVEEVKAGLENGVLTVTVPKAEVKKPEVKAIEISG

SEQ ID NO: 21996 - protein, 151 aa, Triticum aestivum
MSIVRRSNVFDPFADLWADPFDTFRSIVPAISGGNSETAAFANARVDWKETPEAHVFKADLPGVKKEEVKVEVEDGNVLVVSGERTKEKEDKNDKWHRMERSSGKFVRRFRLPEDAKVEEVKAGLENGVLTVTVPKAEVKKPEVKAIEISG

SEQ ID NO: 21997 - protein, 151 aa, Triticum aestivum
MSIVRRSNVFDPFADLWADPFDTFRSIVPAISGGGSETAAFANARMDWKETPEAHVFKADLPGVKKEEVKVEVEDGNVLVVSGERTKEKEDKNDKWHRVERSSGKFVRRFRLLEDAKVEEVKAGLENGVLTVTVPKAEVKKPEVKAIQISG

SEQ ID NO: 21998 - protein, 151 aa, Triticum aestivum
  unsure (1)..(151): unsure at all Xaa locations
MSIVRRSSVFDPFADLWADPFDTFRSIIPAISGGNSETAAFANARMDWKETPEAHVFKADLPGVKKEEVKVEVEDGNVLVVSGERTKEKEDKNDKWHRVERSSGKFVRRFRLPEDAKVEEVKAGLENGVLTVTVPKAXVKKPEVKAIXISG

SEQ ID NO: 21999 - protein, 151 aa, Triticum aestivum
MSIVRRTNVFDPFADLWADPFDTFRSIVPAISGGGSETAAFANARMDWKETPEAHVFKADLPGVKKEEVKVEVEDGNVLVVSGERTKEKEDKNDKWHRVERSSGKFVRRFRLLEDAKVEEVKAGLENGVLTVTVPKAEVKKPEVKAIQISG

SEQ ID NO: 22000 - protein, 151 aa, Triticum aestivum; identical to SEQ ID NO: 21999

SEQ ID NO: 22001 - protein, 151 aa, Triticum aestivum
MSIVRRSNVFDPFADLWADPFDTFRSIVPAISCGSSETAAFANARVDWKETPEAHVFKADLPGVKKEEVKVEVEDGNVLVVSGERTKEEEDKNDKWHRVERSSGKFVRRFRLPEDAKVGEVKAGLENGVLTVTVPKAEVKKPEVKAIEISV

SEQ ID NO: 22002 - protein, 151 aa, Triticum aestivum
MSIVRRTNVFDPFADLWADPFDTFRSIVPAISGGTSETAAFANARVDWKETPEAHVFKADLPGVKKEEVKVEVEDGNVLVVSGERTKEEEDKNDKWHRVERSSGKFVRRFRLPEDAKVGEVKAGLENGVLTVTVPKAEVKKPEVKAIEISV

SEQ ID NO: 22003 - protein, 152 aa, Triticum aestivum
  unsure (1)..(152): unsure at all Xaa locations
MSIVRWSNVFDPFADLWADPFDTFRSIVPAISGGSSETAAFANARVDWKETPEAHVFKADLPGVKKEEVKVEVXEDGNVLVVSGERTKEKEDKNDKWHRVERSSGKFVRRFRLPEDAKVEEVKAGLENGVLTVTVPKAEVKKPQVKAIEISG

SEQ ID NO: 22004 - protein, 152 aa, Triticum aestivum
  unsure (1)..(152): unsure at all Xaa locations
MSIVRRSNVFDPFADLWADPFDTFRSIVPAISGGSSETAAFANARMDWKETPEAHVFKADLPGVKKEEVKVEVEDGNVLVVSGERTKEKEDKNDKWHRVERSSGKFVRRFRLXREDAKVEEVKAGLENGVLTVTVPKTEVKKPEVKAIEISG

SEQ ID NO: 22005 - protein, 143 aa, Schizosaccharomyces pombe
MSLQPFFGFPPTVNDLFSDFVSYSPRLNNQIPGELSPSIDVHEGKDTVSVDVELPGVKKEDVQVHYDSGKLTISGEVVNERKNESTEGNQRWSERRFGSFSRTITIPAKIDADRIEANFSNGLLTVTLPKVEKSQTKKQIAIK

SEQ ID NO: 22006 - protein, 154 aa, Desulfitobacterium hafniense
MLFMFDLVPFEGRNSGLPRKSRNLFDIDSIFENFFNDTLFPAFYNQSGQMRVDVRENEKEFIVEAELPGVNKEEIQIDCTEDRLTITVQKTESTEEQKDNYIRKERKASSMARSFAIANIRHEEITAKYENGLLTVTLPKHEKTAPKGKKIDIQ

SEQ ID NO: 22007 - protein, 229 aa, Toxoplasma gondii
MAPSASHPPGACPPGCTKHPATATAISPSGVCPMRAFHPAGPHSHFSCYDDLRNRLSHDKNVRPVASQQLDYLDEVSPFALAYYPPPFWGGVGLNPIDDMLFETALTANEMMEDITWRPRVDVEFDSKKKEMIILADLPGLQKDDVTIEVDNGAIVIKGEKTSKEAEKVDDGKTKNILTERVSGYFARRFQLPSNYKPDGISAAMDNGVLRVTIKVEDSGGAKQQISVK

SEQ ID NO: 22008 - protein, 229 aa, Toxoplasma gondii
MAPSASHPPGACPPGCTKHPATATAISPSGVCPMRAFHPAGPHSHFSCYDDLRNRLSHDKNVRPVASQQLDYLDEVSPFALAYYPPPFWGGVGLNPIDDMLFETALTANEMMEDITWRPRVDVEFDSKKKEMIILADLPGLQKDDVTIEVDNGAIVIKGEKTSKEAEKVDDGKTKNILTERVSGYFRARFQLPSNYKPDGISAAMDNGVLRVTIKVEDSGGAKQQISVK

SEQ ID NO: 22009 - protein, 73 aa, Quercus suber
SLDVWDPFEGFPPLSSHSNFPSETSSFAAAKLDWKETPNAHVFADVPGQKKEEVKVEIEDRRVLQISGERSQD

SEQ ID NO: 22010 - protein, 164 aa, Thermococcus sp. KS-1
MRKMVWRRDRYWDPFDIMREIQEEIDAIFRDFMRGPRLWSYREPGERIEVSETWREPFADIFDRGDRFVITVELPGVRKEDIKLRVTEDTVYIEAQMRREKELEQEGAIRIERYYSGYRRVIRLPEEVIPEKAKARYNNGVLEIEIPKKKPTKPEKEGVEVKIE

SEQ ID NO: 22011 - protein, 145 aa, Cytophaga hutchinsonii
MTIVKRNGHFPFIFDDFFNRQYNRGMADYSNTNTTIPAVNIKESAENFVIEVAAPGMNKKDFNVQVDGNVLTIRSEKTTEKEDANNEKYTTREFSYQSFVRTFNLPKDIADTDKIEAKYEDGVLHVLIPKKEKEKVKESRLVEVV

SEQ ID NO: 22012 - protein, 138 aa, Glycine max
  unsure (1)..(138): unsure at all Xaa locations
MSTVISCSLLSGRPAAAPSRSSSNRFPPTTGKAAAERQSRPSSVCCASNPKGDQHVPKTDLPPFSISPVALLRPGSPQGERWRIKEGPEAVSMWFEVPGLSKEDLVVELDEDVLVIRKMKAKAETAAGTTDAGGSASX

SEQ ID NO: 22013 - protein, 208 aa, Oryza sativa
LRNQAVPPQVDMSTVTSCTFLSIRPTVSSAGSLLSKKPAAFVSLASERKSRPLSPCFAISSNKPGDPKIDVSPFSISPVVLVNPVPVDGERWQVAENKDEVSLWFDVPGLSPADLIVEIDEDVLVIKKKKKASPKSNYNTPTSGAIADHQEATADEFSGGGIYARLLLPAGYSREGVQAKLTSGELKLTIGKVKESVRRKINVDISVK

SEQ ID NO: 22014 - protein, 197 aa, Oryza sativa
MSTVTSCTFLSIRPTVSSAGSLLSKKPAAFVSLASERKSRPLSPCFAISSNKPGDPKIDVSPFSISPVVLVNPVPVDGERWQVAENKDEVSLWFDVPGLSPADLIVEIDEDVLVIKKKKKASPKSNYNTPTSGAIADHQEATADEFSGGGIYARLLLPAGYSREGVQAKLTSGELKLTIGKVKESVRRKINVDISVK

SEQ ID NO: 22015 - protein, 163 aa, Oryza sativa
MSTVTSCTFLSIRPTVSSAGSLLSKKPAAFVSLASERKSRPLSPCFAISSNKPGDPKIDVSPFSISPVDLIVEIDEDVLVIKKKKKASPKSNYNTPTSGAIADHQEATADEFSGGGIYARLLLPAGYSREGVQAKLTSGELKLTIGKVKESVRRKINVDISVK

SEQ ID NO: 22016 - protein, 198 aa, Triticum aestivum
  unsure (1)..(198): unsure at all Xaa locations
MSTVISCSLLSGRPAAAPSRSSGNRFPPTTGKAAAERQSRPSSVCCASNPKGDQHVPKTDLPPFGISPVALLHPGSPQGERWGIQERADTVSMWFEVPGLSKEDLVVELDEDVLVIRKMKXXKAEIEAARADAVASGSSKDAAGAAAHDGDMYARLLVPAGYNKETIKAELASGVLKVHIRKVMECARRRINVNIAVK

SEQ ID NO: 22017 - protein, 205 aa, Vitis vinifera
QVVGTVVAVIVYVITAWWLMATIPNHCDTTMLPADSPWRCPMDNVFFDASVIWGLIGTRRIFGNLGAYSNVNWFFLLGAIAPLLVWLMHKAFPKKKWIPLIHMPVLLGSTAMMPPASAVNFTSWIIVGFLSGFVIFRLKPKLWERYNYVVSGGLDAGTAFMTILIFLTLGSGNVSIDWRGNNPEGCPLASCPTARGIVVDGCPVF

SEQ ID NO: 22018 - protein, 753 aa, Arabidopsis thaliana
MVGSLEVSKPPEHKVESKIVIADEEEEDENDSPIEEVRLTVPITDDPSLPVLTFRTWFLGMVSCVVLAFVNNFFGYRSNPLTVSSVVAQIITLPLGKLMATTLPTTKLRLPGTNWSCSLNPGPFNMKEHVLITIFANTGAGGAYATSILTIVKAFYHRNLNPAAAMLLVQTTQLLGYGWAGMFRKYLVDSPYMWWPANLVQVSLFRALHEKEEKREGKQTKLRFFLIVFFLSFTYYIVPGYLFPSISYLSFVCWIWTRSVTAQQIGSGLHGLGIGSFGLDWSTVAGFLGSPLAVPFFAIANSFGGFIIFFYIILPIFYWSNAYEAKKFPFYTSHPFDHTGQRYNTTRILNQKTFNIDLPAYESYSKLYLSILFALIYGLSFGTLTATISHVALFDGKFIWELWKKATLTTKDKFGDVHTRLMKKNYKEVPQWWFVAVLAASFVLALYACEGFGKQLQLPWWGLLLACAIAFTFTLPIGVILATTNQRMGLNVISELIIGFLYPGKPLANVAFKTYGSVSIAQALYFVGDFKLGHYMKIPPRSMFIVQLVATIVASTVSFGTTWWLLSSVENICNTDMLPKSSPWTCPGDVVFYNASIIWGIIGPGRMFTSKGIYPGMNWFFLIGFLAPVPVWFFARKFPEKKWIHQIHIPLIFSGANVMPMAKAVHYWSWFAVGIVFNYYIFRRYKGWWARHNYILSAALDAGTAVMGVLIYFALQNNNISLPDWWGNENTDHCPLANCPTEKGIVAKGCPVF

SEQ ID NO: 22019 - protein, 755 aa, Arabidopsis thaliana
MTSVFDEHKPSDDSHESKIVINGEEEVLEEENDNPIEEVRLTVPITDDPTLPVLTFRTWTLGLFSCILLAFVNQFFGFRSNQLWVSSVAAQIVTLPLGKLMAKTLPTKKFGFPGTNWSWSFNPGPFNMKEHVLITIFANTGAGGVYATSIITIVKAFYNRQLNVAAAMLLTQTTQLLGYGWAGIFRKFLVDSPYMWWPSNLVQVSLFRALHEKEDLQKGQQTRFRFFIIVFCVSFAYYIIPGYLFPSISAISFVCWIWKSSVTAQIVGSGLKGLGIGSFGLDWSTVAGFLGSPLAVPFFAIANFFGGFFIFLYIVLPIFYWTNAYDAQKFPFYTSHTFDQTGHTYNITRILNEKNFDINLDAYNGYSKLYLSVMFALLYGLSFGSLCATISHVALYDGKFIWGMWKKAKTATKDKYGDVHSRLMKKNYQSVPQWWFIAVLVISFAFALYACEGFDKQLQLPWWGLILACAIALFFTLPIGVIQATTNQQMGLNVITELIIGYLYPGKPLANVAFKTYGYISMSQALYFVGDFKLGHYMKIPPRSMFIVQLVATVVASTVCFGTTWWLITSVENICNVDLLPVGSPWTCPGDEVFYNASIIWGVIGPGRMFTKEGIYPGMNWFFLIGLLAPVPFWYLSKKFPEKKWLKQIHVPLIFSAVSAMPQAKAVHYWSWAIVGVVFNYYIFRRFKTWWARHNYILSAALDAGTAIMGVLIFFAFQNNDISLPDWWGLENSDHCPLAHCPLAKGVVVEGCPVF

SEQ ID NO: 22020 - protein, 729 aa, Arabidopsis thaliana
MATADEFSDEDTSPIEEVRLTVTNTDDPTLPVWTFRMWFLGLISCSLLSFLNQFFSYRTEPLVITQITVQVATLPIGHFLAKVLPKTRFGLPGCGSARFSLNPGPFNMKEHVLISIFANAGSAFGSGSAYAVGIITIIKAFYGRSISFIAGWLLIITTQVLGYGWAGLLRKYVVEPAHMWWPSTLVQVSLFRALHEKDDQRMTRAKFFVIALVCSFGWYIVPGYLFTTLTSISWVCWAFPRSVTAQQIGSGMRGLGLGAFTLDWTAVASFLFSPLISPFFAIANVFIGYVLLIYFVLPLAYWGFDSYNATRFPIFSSHLFTSVGNTYDIPAIVNDNFELDLAKYEQQGRINLSMFFALTYGLGFATIASTLTHVALFYGKEISERFRVSYKGKEDIHTRLMKRYKDIPSWWFYSMLAATLLISLALCVFLNDEVQMPWWGLVFASAMAFVFTLPISIITATTNQTPGLNIITEYAMGLIYPGRPIANVCFKVYGYMSMAQAVSFLNDFKLGHYMKIPPRSMFLVQFIGTILAGTINITVAWWQLNSIKNICQEELLPPNSPWTCPGDRVFFDASVIWGLVGPKRIFGSQGNYAAMNWFFLGGALGPVIVWSLHKAFPKRSWIPLVNLPVLLGATAMMPPATAVNYNSWILVGTIFNLFVFRYRKSWWQRYNYVLSAAMDAGVAFMAVLLYFSVGMEEKSLDWWGTRGEHCDLAKCPTARGVIVDGCPVK

SEQ ID NO: 22021 - protein, 729 aa, Arabidopsis thaliana
MATADEFSDEDTSPIEEVRLTVTNTDDPTLPVWTFRMWFLGLISCSLLSFLNQFFSYRTEPLVITQITVQVATLPIGHFLAKVLPKTRFGLPGCGSARFSLNPGPFNMKEHVLISIFANAGSAFGSGSAYAVGIITIIKAFYGRSISFIAGWLLIITTQVLGYGWAGLLRKYVVEPAHMWWPSTLVQVSLFRALHEKDDQRMTRAKFFVIALVCSFGWYIVPGYLFTTLTSISWVCWAFPRSVTAQQIGSGMRGLGLGAFTLDWTAVASFLFSPLISPFFAIANVFIGYVLLIYLVLPLAYWGFDSYNATRFPIFSSHLFTSVGKTYDIPAIVNDNFELDLAKYEQQGRINLSMFFALTYGLGFATIASTLTHVALFYGKEISERFRVSYKGKEDIHTRLMKRYKDIPSWWFYSMLAATLLISLALCVFLNDEVQMPWWGLVFASAMAFVFTLPISIITATTNQTPGLNIITEYAMGLIYPGRPIANVCFKVYGYMSMAQAVSFLNDFKLGHYMKIPPRSMFLVQFIGTILAGTINITVAWWQLNSIKNICQEELLPPNSPWTCPGDRVFFDASVIWGLVGPKRIFGSQGNYAAMNWFFLGGALGPVIVWSLHKAFPKRSWIPLVNLPVLLGATAMMPPATAVNYNSWILVGTIFNLFVFRYRKSWWQRYNYVLSAAMDAGVAFMAVLLYFSVGMEEKSLDWWGTRGEHCDLAKCPTARGVIVDGCPVK

SEQ ID NO: 22022 - protein, 766 aa, Arabidopsis thaliana
MEESEQVLPLLTNPKDLTNPSYASSSSSSSEPRDETEDLLLPISDENEEEEEENSPIRQVALTVPTTDDPSLPVLTFRMWVLGTLSCILLSFLNQFFWYRTEPLTISAISAQIAVVPLGRLMAAKITDRVFFQGSKWQFTLNPGPFNVKEHVLITIFANAGAGSVYAIHVVTVVKAFYMKNITFFVSFIVIVTTQVLGFGWAGIFRKYLVEPAAMWWPANLVQVSLFRALHEKEERTKGGLTRTQFFVIAFVCSFAYYVFPGYLFQIMTSLSWVCWFFPSSVMAQQIGSGLHGLGVGAIGLDWSTISSYLGSPLASPWFATANVGVGFVLVIYVLVPICYWLDVYKAKTFPIFSSSLFSSQGSKYNITSIIDSNFHLDLPAYERQGPLYLCTFFAISYGVGFAALSATIMHVALFHGREIWEQSKESFKEKKLDVHARLMQRYKQVPEWWFWCILVTNVGATIFACEYYNDQLQLPWWGVLLACTVAIIFTLPIGIITAITNQAPGLNIITEYIIGYIYPGYPVANMCFKVYGYISMQQAITFLQDFKLGHYMKIPPRTMFMAQIVGTLISCFVYLTTAWWLMETIPNICDSVTNSVWTCPSDKVFYDASVIWGLIGPRRIFGDLGLYKSVNWFFLVGAIAPILVWLASRMFPRQEWIKLINMPVLISATSSMPPATAVNYTTWVLAGFLSGFVVFRYRPNLWQRYNYVLSGALDAGLAFMGVLLYMCLGLENVSLDWWGNELDGCPLASCPTAPGIIVEGCPLYT

SEQ ID NO: 22023 - protein, 733 aa, Arabidopsis thaliana
MKDFTDTISESECDDEISIVPQVELTVPKTDDPTSPTVTFRMWVLGITACVLLSFLNQFFWYRTNPLTISSVSAQIAVVPIGHLMAKVLPTRRFFEGTRWSFTMNPGPFSTKEHVLITVFANSGSGAVYATHILSAVKLYYKRRLDFLPALLVMITTQVLGFGWAGLYRKHLVEPGEMWWPSNLVQVSLFRALHEKENKSKWGISRNQFFVITLITSFSYYLLPGYLFTVLTTVSWLCWISPKSILVNQLGSGSAGLGIGSFGLDWSTIASYLGSPLASPFFASANIAAGFFLVMYVITPLCYYLDLYNAKTFPIYSGKLFVASGKEYKVTSIIDANFRLDRQAYAETGPVHMSTFFAVTYGLGFATLSASIFHVLIFNGKDLWTQTRGAFGKNKKMDIHTKIMKRNYKEVPLWWFLSIFAVNLAVIVFICIYYKTQIQLPWWGAFLACLIAIFFTPLVGVIMATTNQAPGLNIITEYIIGYAYPERPVANICFKTYGYISMSQSLTFLSDLKLGTYMKIPPRTMFMAQVVGTLVAVIAYAGTAWWLMAEIPNLCDTNLLPPGSQWTCPSDRVFFDASVIWGLVGPRRMFGDLGEYSNINWFFVGGAIAPALVYLASRLFPNKKWISDIHIPVLIGATAIMPPASAVNFTSWLVMAFVFGHFVFKYRREWWQRYNYVLSGGMDAGTGFMSVLLFLALQRSEIAIDWWGNSGEGCPVAKCPTAKGVVVHGCPVF

SEQ ID NO: 22024 - protein, 734 aa, Arabidopsis thaliana
MAAIELHKPEINADDDDDESPVEQVRLTVSNHDDPSLPVWTFRMWFLGLLSCILLSFLNTFFGYRTQPLMITMISVQVVTLPLGKLMARVLPETKYKIGSWEFSFNPGPFNVKEHVLISMFANAGAGFGSGTAYAVGIVDIIMAFYKRKISFLASWILVITTQILGYGWAGIMRKLVVDPAQMWWPTSVLQVSLFRALHEKDNARMSRGKFFVIAFVCSFAWYIFPAYLFLTLSSISWVCWAFPKSITAQQLGSGMSGLGIGAFALDWSVIASYLGSPLVTPFFAIVNVLVGYVLVMYMVIPISYWGMNVYEANKFPIFSSDLFDKQGQLYNISTIVNNKFELDMENYQQQGRVYLSTFFAISYGIGFAAIVSTLTHVALFNGKGIWQQVRASTKAKMDIHTRLMKKYKDIPGWWFYSLLAISLVLSLVLCIFMKDEIQMPWWGLLLASFMALTFTVPVSIITATTNQTPGLNIITEYLMGVLLPGRPIANVCFKTYGYISMSQAISFLNDFKLGHYMKIPPRSMFLVQFIGTVIAGTVNISVAWYLLTSVENICQKELLPPNSPWTCPSDRVFFDASVIWGLVGPKRIFGRLGNYPALNWFFLGGLIGPVLVWLLQKAFPTKTWISQINLPVLLGATAAMPPATSVNFNCWIIVGVIFNYFVFKYCKKWWQRYNYVLSAALDAGLAFMGVLLYFSLTMNGISINHWWGAKGENCPLASCPTAPGVLVDGCPVF

SEQ ID NO: 22025 - protein, 736 aa, Arabidopsis thaliana
MGEIATEFTPVMDDDDDRCVVPEVELTVPKTDDSTLPVLTFRMWVLGIGACIVLSFINQFFWYRTMPLSITGISAQIAVVPLGHLMARVLPTKRFLEGTRFQFTLNPGAFNVKEHVLITIFANSGAGSVYATHILSAIKLYYKRSLPFLPAFLVMITTQILGFGWAGLFRKHLVEPGEMWWPSNLVQVSLFGALHEKEKKSRGGMSRTQFFLIVLVASFAYYIFPGYLFTMLTSISWVCWLNPKSILVNQLGSGEHGLGIGSIGFDWVTISAYLGSPLASPLFASVNVAIGFVLVMYIVTPVCYWLNIYDAKTFPIFSSQLFMGNGSRYDVLSIIDSKFHLDRVVYSRTGSINMSTFFAVTYGLGFATLSATIVHVLVFNGSDLWKQTRGAFQKNKKMDIHTRIMKKNYREVPLWWFLVILLLNIALIMFISVHYNATVQLPWWGVLLACAIAISFTPLIGVIAATTNQAPGLNIITEYVIGYIYPERPVANMCFKVYGYISMTQALTFISDFKLGHYMKIPPRSMFMAQVAGTLVAVVVYTGTAWWLMEEIPHLCDTSLLPSDSQWTCPMDRVFFDASVIWGLVGPRRVFGDLGEYSNVNWFFLVGAIAPLLVWLATKMFPAQTWIAKIHIPVLVGATAMMPPATAVNFTSWLIVAFIFGHFIFKYRRVWWTKYNYVLSGGLDAGSAFMTILLFLALGRKGIEVQWWGNSGDRDTCPLASCPTAKGVVVKGCPVF

SEQ ID NO: 22026 - protein, 741 aa, Arabidopsis thaliana
MDEIVEDSSRVMEIEGQNDDLDRCVVEEVELTVPKTDDPTLPVLTFRMWTLGLGACIILSFINQFFWYRQMPLTISGISAQIAVVPLGHLMAKVLPTRMFLEGSKWEFSMNPGPFNVKEHVLITIFANSGAGTVYATHILSAIKLYYKRSLPFLPAFLLMITTQFLGFGWAGLFRKHLVEPGEMWWPSNLVQVSLFSALHEKEKKKKGGMTRIQFFLIVLVTSFAYYILPGYLFTMITSISWICWLGPKSVLVHQLGSGEQGLGIGAIGIDWATISSYLGSPLASPLFATINVTIGFVVIMYVATPICYWLNIYKAKTYPIFSSGLFMGNGSSYDVLSIIDKKFHLDRDIYAKTGPINMSTFFAVTYGLGFATLSATIVHVLLFNGRDLWKQTRGAFQRNKKMDFHTRIMKKNYREVPMWWFYVILVLNIALIMFISFYYNATVQLPWWGVLLACAIAVFFTPLIGVIAATTNQEPGLNVITEYVIGYLYPERPVANMCFKVYGYISMTQALTFIQDFKLGLYMKIPPRSMFMAQVVGTLVSVVVYTGTAWWLMVDIPHLCDKSLLPPDSEWTCPMDRVFFDASVIWGLVGPRRMFGNLGEYAAINWFFLVGAIAPFFVWLATKAFPAHKWISKIHFPVILGATSMMPPAMAVNFTSWCIVAFVFGHFLYKYKRQWWKKYNYVLSGGLDAGTAFMTILIFLSVGRKGIGLLWWGNADDSTNCSLASCPTAKGVIMHGCPVL

SEQ ID NO: 22027 - protein, 737 aa, Arabidopsis thaliana
MDAEKATDKTNVHLSSDHERCPVEEVALVVPETDDPSLPVMTFRTWFLGLTSCVLLIFLNTFFTYRTQPLTISAILMQIAVLPIGKFMARTLPTTSHNLLGWSFSLNPGPFNIKEHVIITIFANCGVAYGGGDAYSIGAITVMKAYYKQSLSFICGLFIVLTTQILGYGWAGILRRYLVDPVDMWWPSNLAQVSLFRALHEKENKSKGLTRMKFFLVALGASFIYYALPGYLFPILTFFSWVCWAWPNSITAQQVGSGYHGLGVGAFTLDWAGISAYHGSPLVAPWSSILNVGVGFIMFIYIIVPVCYWKFNTFDARKFPIFSNQLFTTSGQKYDTTKILTPQFDLDIGAYNNYGKLYLSPLFALSIGSGFARFTATLTHVALFNGRDIWKQTWSAVNTTKLDIHGKLMQSYKKVPEWWFYILLAGSVAMSLLMSFVWKESVQLPWWGMLFAFALAFIVTLPIGVIQATTNQQPGYDIIGQFIIGYILPGKPIANLIFKIYGRISTVHALSFLADLKLGHYMKIPPRCMYTAQLVGTVVAGVVNLGVAWWMLESIQDICDIEGDHPNSPWTCPKYRVTFDASVIWGLIGPRRLFGPGGMYRNLVWLFLIGAVLPVPVWALSKIFPNKKWIPLINIPVISYGFAGMPPATPTNIASWLVTGTIFNYFVFNYHKRWWQKYNYVLSAALDAGTAFMGVLLFFALQNAGHDLKWWGTEVDHCPLASCPTAPGIKAKGCPVF

SEQ ID NO: 22028 - protein, 737 aa, Arabidopsis thaliana
MDAEKATDKTNVHLSSDHERCPVEEVALVVPETDDPSLPVMTFRAWFLGLTSCVLLIFLNTFFTYRTQPLTISAILMQIAVLPIGKFMARTLPTTSHNLLGWSFSLNPGPFNIKEHVIITIFANCGVAYGGGDAYSIGAITVMKAYYKQSLSFICGLFIVLTTQILGYGWAGILRRYLVDPVDMWWPSNLAQVSLFRALHEKENKSKGLTRMKFFLVALGASFIYYALPGYLFPILTFFSWVCWAWPNSITAQQVGSGYHGLGVGAFTLDWAGISAYHGSPLVAPWSSILNVGVGFIMFIYIIVPVCYWKFNTFDARKFPIFSNQLFTTSGQKYDTTKILTPQFDLDIGAYNNYGKLYLSPLFALSIGSGFARFTATLTHVALFNGRDIWKQTWSAVNTTKLDIHGKLMQSYKKVPEWWFYILLAGSVAMSLLMSFVWKESVQLPWWGMLFAFALAFIVTLPIGVIQATTNQQPGYDIIGQFIIGYILPGKPIANLIFKIYGRISTVHALSFLADLKLGHYMKIPPRCMYTAQLVGTVVAGVVNLGVAWWMLESIQDICDIEGDHPNSPWTCPKYRVTFDASVIWGLIGPRRLFGPGGMYRNLVWLFLIGAVLPVPVWALSKIFPNKKWIPLINIPVISYGFAGMPPATPTNIASWLVTGTIFNYFVFNYHKRWWQKYNYVLSAALDAGTAFMGVLLFFALQNAGHDLKWWGTEVDHCPLASCPTAPGIKAKGCPVF

SEQ ID NO: 22029 - protein, 722 aa, Arabidopsis thaliana
MAAIELHKPEINADDDDDESPVEQVRLTVSNHDDPSLPVWTFRMWFLGLLSCILLSFLNTFFGYRTQPLMITMISVQVVTLPLGKLMARVLPETKYKIGSWEFSFNPGPFNVKEHVLISMFANAGAGFGSGTAYAVGIVDIIMAFYKRKISFLASWILVITTQDNARMSRGKFFVIAFVCSFAWYIFPAYLFLTLSSISWVCWAFPKSITAQQLGSGMSGLGIGAFALDWSVIASYLGSPLVTPFFAIVNVLVGYVLVMYMVIPISYWGMNVYEANKFPIFSSDLFDKQGQLYNISTIVNNKFELDMENYQQQGRVYLSTFFAISYGIGFAAIVSTLTHVALFNGKGIWQQVRASTKAKMDIHTRLMKKYKDIPGWWFYSLLAISLVLSLVLCIFMKDEIQMPWWGLLLASFMALTFTVPVSIITATTNQTPGLNIITEYLMGVLLPGRPIANVCFKTYGYISMSQAISFLNDFKLGHYMKIPPRSMFLVQFIGTVIAGTVNISVAWYLLTSVENICQKELLPPNSPWTCPSDRVFFDASVIWGLVGPKRIFGRLGNYPALNWFFLGGLIGPVLVWLLQKAFPTKTWISQINLPVLLGATAAMPPATSVNFNCWIIVGVIFNYFVFKYCKKWWQRYNYVLSAALDAGLAFMGVLLYFSLTMNGISINHWWGAKGENCPLASCPTAPGVLVDDFTVFFFFLKIFVPFVNKNRLNDFLSMYLLY

SEQ ID NO: 22030 - protein, 691 aa, Arabidopsis thaliana
MDAEKATDKTNVHLSSDHERCPVEEVALVVPETDDPSLPVMTFRACHSPSQPSLMQIAGLPIGKFMARTLPTTSHNLLGWSFSLNPGPFNIKEHVIITIFANCGVAYGGGDAYSIGAITVMKAYYKQSLSFICGLFIVLTTQILGYGWAGILRRYLVDPVDMWWPSNLAQVSLFRALHEKENKSKGLTRMKFFLVALGASFIYYALPGYLFPILTFSSWVCWAWPNSITAQQVGSGYHGLGVGAFTLDWAGISAYHGSPLVAPWSSILNVGVGFIMFIYIIVPVCYWKFNTFDARKFPISSNQLFTTSGQKYDTTKILTPQFDLDIGAYNNYGKLYLSPLFALSIGSGFARFTATLTHVALFNGRDIWKQTWSAVNTTKLDIHGKLMQSYKKVPEWWFYILLAGSVAMSLLMSFVWKESVQLPWWGMLFAFALAFIVTLPIGVIQATTNQQPGYDIIGQFIIGYILPGKPIANLIFKIYGRISTVHALSFLADLKLGHYMKIPPPCMYTAQLVGTVVAGVVNLGVAWWMLESIQDICDIEGDHPNSPWTCPKYRVTFDASVIWGLIGPRRLFGPGGMYRNLVGFFLIGAVLPVPRVGAEQDLPKQEVDPSHQHSSYLLRLCRDASSHSNQHCQLVGHRNHLQLLCVQLPQEMVAEVQLRTLCSARCRDRVHGGALVLRPAECWTRPQMVGH

SEQ ID NO: 22031 - protein, 637 aa, Arabidopsis thaliana
MQIAGLPIGKFMARTLPTTSHNLLGWSFSLNPGPFNIKEHVIITIFANCGVAYGGGDAYSIGAITVMKAYYKQSLSFICGLFIVLTTQILGYGWAGILRRYLVDPVDMWWPSNLAQVSLFRALHEKENKSKGLTRMKFFLVALGASFIYYALPGYLFPILTFSSWVCWAWPNSITAQQVGSGYHGLGVGAFTLDWAGISAYHGSPLVAPWSSILNVGVGFIMFIYIIVPVCYWKFNTFDARKFPISSNQLFTTSGQKYDTTKILTPQFDLDIGAYNNYGKLYLSPLFALSIGSGFARFTATLTHVALFNGRDIWKQTWSAVNTTKLDIHGKLMQSYKKVPEWWFYILLAGSVAMSLLMSFVWKESVQLPWWGMLFAFALAFIVTLPIGVIQATTNQQPGYDIIGQFIIGYILPGKPIANLIFKIYGRISTVHALSFLADLKLGHYMKIPPPCMYTAQLVGTVVAGVVNLGVAWWMLESIQDICDIEGDHPNSPWTCPKYRVTFDASVIWGLIGPRRLFGPGGMYRNLVGFFLIGAVLPVPRVGAEQDLPKQEVDPSHQHSSYLLRLCRDASSHSNQHCQLVGHRNHLQLLCVQLPQEMVAEVQLRTLCSARCRDRVHGGALVLRPAECWTRPQMVGH

SEQ ID NO: 22032 - protein, 742 aa, Glycine max
  unsure (1)..(742): unsure at all Xaa locations
MAVAAKSSSTHAEKAANGESSAERCPENEVALQFPETDDPSLTVMTLLAWLLRIASCVLLIFLNTFFTLRTQPLTIXCLCMHIAVLPIGRFMGSTLPTKXYRFLGWSLTFNPGPFNMKEHVIITIFANCRVSFGGGDPYSIGAITVMKAYYKHRLSFLCALFIVLTTQMLRYGWAGILRRYLVDPVEMWWPANLAQVSLFRALHEKEPKSKGLTRMQFFLIAMGASFLYYALPGYLFMVLTFFSWICWAWPHNITAQQIGSGYHGLGIGAFTLDWAGISAYHGSPLVSPWSSIVNVGIGFIMFIYIIVPVCYWKFNTFDAHKFPIFSNQLFTASGHKYDTTKILTPEYDLNVDAYNKYSKLYLSPLFALSIGSGFARFTATLTHVALFYGRDIWRQSRSAMSNAKLDIHGRLMKAYKQVPEWWFLSILFGSMALSLLMAFVWKTDVQLPWWGMLFAFGLAFIVTLPIGVIQATTNQQPGYDIIAQFMIGYVLPGQPIANLLFKIYGRISTVHALSFLSDLKLGHYMKIPPRCMYTAQLVGTLVAGVVNLAVAWWMLDSIKDICMDDKVHHDSPWTCPKYRVTFDASVIWGLIGPKRLFGPGGLYRNLVWLFLIGAVLPVPIWVLSKIFPEKKWIPLINIPVITYGFAGMPPATPANIASWLVTGMIFNYFVFRYNKRWWQKYNYVLSAALDAGTAFMGVLIFFALQNAGHNLKWWGSELDHCPLATCPTAPGIEVEGCPVFK

SEQ ID NO: 22033 - protein, 441 aa, Glycine max
  unsure (1)..(441): unsure at all Xaa locations
XLIVYVVIPVSYWGLNVYNANRFPIFSSHLFTAQGQKYNIPKIVDNHFELNVAEYEKQGSSRFGSSFALTYGFGFATIASTLTHVVCFYGREIMERYRASSKGKEDIHTKLMRRYKDIPSWWFHSLLLVTLLVSLALCIFLKDQVQMPWWGLLFAGVLAFGFTLPISIITATTNQTPGLNIITEYVFGLIYPGRPIANVCFKTYGYISMAQAVSFLSDFKLGHYIIHFVHTCIYVXFIGTMLAGTINIGVAWWLLNSIKNICHDDLLPEGSPWTCPGDRVFFDASVIWGLVGPKRIFGSQGNYSAMNWFFLGGAVGPIIVWLLHKAFPKQSWIPLINLPVLLGATGXMMPPATPLNYNAWIFVGTIFNFFIFRYRKKWWQRYNYVLSAALDSGVAFMTVLLYFALGLENKSLNWWGNDGEHCPLAVCPTAKGVIVDGCPAN

SEQ ID NO: 22034 - protein, 440 aa, Glycine max
  unsure (1)..(440): unsure at all Xaa locations
XLIVYVVIPVSYWGLNVYNANRFPIFSSHLFTAQGQKYSSPKIVDNHFELNVAEYEKQGTSRLGVSFALTYGFGFATIASTLTHVVCFYGREIMERYRASSKGKEDIHTKLMRRYKDIPSWWFHSLLLVTLLVSLALCIFLKDQVQMPWWGLLFAGVLAFGFTLPISIITATTNQTPGLNIITEYVFGLIYPGRPIANVCFKTYGYISMAQAVSFLSDFKLGHXCIHFVHTCIYVXFIGTMLAGTINIGVAWWLLNSIKNICHDDLLPEGSPWTCPGDRVFFDASVIWGLVGPKRIFGSQGNYSAMNWFFLGGAVGPIIVWLLHKAFPKQSWIPLINLPVLLGATGMMPPATPLNYNAWIFVGTIFNFFIFRYRKKWWQRYNYVLSAALDSGVAFMTVLLYFALGLENKSLNWWGNDGEHCPLAVCPTAKGVIVDGCPAN

SEQ ID NO: 22035 - protein, 339 aa, Glycine max
  unsure (1)..(339): unsure at all Xaa locations
XDVHTRIMKRNYEQVPEWWFVSILLLMIVVALITCEGFGKQLQLPWWGVLMSLVIALVFTLPIGVIQATTNMQVGLNVITELIIGYIYPGRPLANVAFKTYGYISMSQALGFLQDFKLGHYMKIPPKSMFAVQLVGTIVASGVYLGTAWWLLTTIPDICDDANLPAGSPWTCPGDEVFYNASIIWGIVGPQRMFTKDGIYPGMNWFFLIGLLAPVPVWMLSRKFPNHKWIELINMPLIIAGSGGIPPARSVNYITWGMVGILFNFYVYNKFKAWWARHNYILSAALDAGVAFMGVILYFALQYYDIFGPTWWGQDADDHCPLAKCPTAPGIISHGCPVL

SEQ ID NO: 22036 - protein, 340 aa, Glycine max
  unsure (1)..(340): unsure at all Xaa locations
XDVHXTRIMKRNYEQVPEWWFVSILLLMIVVSLITCEGFGKQLQLPWWGVLMSLVIALVFTLPIGVIQATTNTQVGLNVITELIIGYIYPGRPLANVAFKTYGYISMSQALGFLQDFKLGHYMKIPPKSMFVVQLVGTIVASGVYFGTAWWLLTSIPHICDETSLPAGSPWTCPGDEVFYNASIIWGVVGPQRMFTKDGIYPGMNWFFLIGLLAPVPVWLLARKFPNHKWIELINMPLMIAGGGGIPPARSVNYITWGLVGIFFNFYVYSKFKAWWARHTYILSAALDAGVAFMGVILYFALQNYGVFGPIWWGQDADDHCPLAKCPTAPGIISHGCPVL

SEQ ID NO: 22037 - protein, 277 aa, Glycine max
  unsure (1)..(277): unsure at all Xaa locations
XNQQPGLNIITEYIIGYMYPERPVANMCFKVYGYISMVQALTFLQDFKLGHYMKIPPRTMFMAQVVGTILSVFIYTVTAWWLMRTIPHLCDTTMLDPDSPWTCPMDNVFFDASVIWGLLGPRRIFGDLGEYAKVNLFFLGGAIAPFLVWLAHKAFPEQRWITLIHMPVLLGATSMMPPATAVNFTSWILVGFLSGYIAYRYRQEWWKRCNYVLSGGLDAGTAFMTILLFLALNNNNIMLNWWGNNPEGCPLANCPTEKGIVVKGCPVHXSFSDDEKC

SEQ ID NO: 22038 - protein, 339 aa, Glycine max
  unsure (1)..(339): unsure at all Xaa locations
XDVHTRIMKRNYEQVPEWWFVSILLLMIVVSLITCEGFGKQLQLPWWGVLMSLVIALVFTLPIGVIQATTNTQVGLNVITELIIGYIYPGRPLANVAFKTYGYISMSQALGFLQDFKLGHYMKIPPKSMFVVQLVGTIVASGVYFGTAWWLLTSIPHICDETSLPAGRPWTCPSHQPDPSTTLXWGMVGXLVQFLRLQXVQGMVGXTQLHPFRLLLYWWLARKSFSILPFKLEHIRFNIAGGGGIPPARSVNYITWGFVGIFFNFYVYSKFKAWWARHTYILSAALDAGVAFMGVILYFALQNYGVFGPIWWGQDADDHCPLAKCPTAPGVIAHGCPLL

SEQ ID NO: 22039 - protein, 226 aa, Glycine max
  unsure (1)..(226): unsure at all Xaa locations
IXXXILGXGWAGLFRKFLVEPGEMWWPSNLVQVSLFSALHEKSKRPKGGTTRTQFFLLVLVSGLAYYVFPGYLFSMLTSFSWMCWLAPKSVLVQQLGSGLRGLGIAAFGIDWSTISAYLGSPLASPWFATANIAVGFFLVMYVMTPIAYWSNAYEAKTFPIFSSKLFMGNGSLYDISTIVNSEFHLDRXAYSIKRPXHLSTFFCMTYXXSIAALSATXCACLLFHG

SEQ ID NO: 22040 - protein, 208 aa, Glycine max
MSSDPEKRVTSEVVEDDELSPIEEVRLTGTNTDHPTRPVWTLRMWFLRLLSCSLLSFLNQFFAYRTVPLIITQITVHVATLPIGHFMAAFLPTTTFSIPGFGSKSFSFNPGPFNMKEHVLITIFANAGSAFGSGSPYAVGIVNIIKAFYGRSISFAASWLLIITTQVLGYGWAGLLRKYVVEPAHMWWPSTLVQVSLFRALHEKDDHR

SEQ ID NO: 22041 - protein, 259 aa, Glycine max
  unsure (1)..(259): unsure at all Xaa locations
SFSLGSIRFVENTYIHFHFQRNDHXXKNPRYTRSKPLSCXSNKEEDEVGSSTSHRQQNEENSPIKQVALTVPTTDDPSLPVLTFRMWVLGTLSCVLLSFLNQFFWYRIQPLTITAISAQIAVVPLGQLMAATITKRVFFRGTRWEFTLNPGPFNVKEHVLITIFANSGAGTVYAIHVVTAVKIFYHKHISFFVSLLVVITTQVLGFXGWAGIFRRYLVEPAAXMWWPANLVXQVSLFRALHEKDERPKGGLTRTQFFRX

SEQ ID NO: 22042 - protein, 163 aa, Glycine max
RVTFDASVIWGLIGPNRLFGPGGLYRNLVWLFMIGAVLPVPIWVLSKIFLQKKWIPLINIPVITYGFAGMPPATPANIASWLVTGMIFNYFVFRYNKRWWQKYNYVLSAALDAGTAFMGVLIFFALQNAGHNLKWWGSELDHCPLATCPTAPGIEVDGCPVFK

SEQ ID NO: 22043 - protein, 186 aa, Glycine max
  unsure (1)..(186): unsure at all Xaa locations
PDICKDTSSVWTCPSDTVFYDASVXWGLIGPRRIFGDLGTYEKVNWFFLGGAIAPLLVWLAARSFPQQEWIRLINMPVLIGATGMMPPATAVNYPSWIIAGFLSGFVVFRYKPEWWKRHNYVLSGALDAGLAFMGVLLYLCLGLEDISLNWWGNDLDGCTLAHCPTAKVVEEXQGCAVFHLNITVN

SEQ ID NO: 22044 - protein, 167 aa, Glycine max
  unsure (1)..(167): unsure at all Xaa locations
XYVFPGYIFQMLTSLSWICWLYPNNVLAQQLGSGLNGLGIGAIGLDWSTISSYLGSPLASPWFATANVAVGFVFVMYVLTPLCYWLDLYNAKTFPIFSDELFTEKGQVYNITAIIDSNFHLDLAAYERQGRLYISTFFAMTYGVGFAALTATIMHVALFHGREIWEX

SEQ ID NO: 22045 - protein, 178 aa, Glycine max
  unsure (1)..(178): unsure at all Xaa locations
MERGANNKKLSPLSSEQFISLTTPLVFLEKEAEASSTGVSQERVIEDAEKDEFQVDDCPIEQVRLTVPITDDPTQPALTFRTWVLGLASCVFLAFVNQFFGYRTNPLKISSVSAQIITLPLGKLMAATLSTKPIRVPFTKWSXSLNXGPFSLKEHVLITIFATSGSSGVYAISIITIV

SEQ ID NO: 22046 - protein, 128 aa, Glycine max
  unsure (1)..(128): unsure at all Xaa locations
XVGTVVASSVYFATAWWLLTSIENICDEELLPKGSPWTCPGDDVFYNASIIWGVVGPKRMFTKDGVYPGMNWXXLIGLLAPLPVWLLSXXFPNHKWIQLINFPIIIAGASNIPPFRSVNYITWGIVGX

SEQ ID NO: 22047 - protein, 167 aa, Glycine max
MASTFEGGSDSEKENTVESEEEECPVKQVELTVPKTDDPTMQLLTFRMWVLGVLSCVLLSFVNQFFWYRTQPLIVTSISAQIAVGPIGHFMARTLPTRVFFKDSRFEFSLNRGPFNIKEHVLITIFANSGAGTVYATHIVSAVKLMCKRRLNFLAALVVMLTTQILG

SEQ ID NO: 22048 - protein, 231 aa, Glycine max
  unsure (1)..(231): unsure at all Xaa locations
PRVRAKLNGLFWQQLKNXPHTRLMRRYRSAPHAEAXYIIVADNIALIISISEYYNESLQIPWRGVXIACAIDIFFTLTSGLINATTNQQPGLDIITEYIIAYMYTDRTVDNMCLKVYSYWHQRTXLSFCQDLNIATHMKIPPRTMDIAHVVRTILSAYIYTVSVWRMMRTIPHLCDTTMLDPDRRLTXPRDNVFYEASDIWXNLIGPRVTVRDLGEYAKVNSFXLGGAIAP

SEQ ID NO: 22049 - protein, 173 aa, Glycine max
  unsure (1)..(173): unsure at all Xaa locations
XLRLRSYWGLNVYNANTNPIFSXHLYTVQGQKYNIPKIVDDHIELNVAEYEKQGIIHLRVLFDLTYSFGFATITSTLTHAVCFYGKEIMERYRASSRGIEYMHTLLFIRYDDIPXRWYHSLLLETLLVTVALCMFIKDQVQMPWCGLLYAGVLAFGCTLPISLITATTYQTPG

SEQ ID NO: 22050 - protein, 146 aa, Glycine max
  unsure (1)..(146): unsure at all Xaa locations
XPWTCPGDDVFYNASIIWGVVGPKRMFTKDGVYPGMNWFFLIGLLAPLPVWLLSRKFPNHKWIQLINFPIIIACASNIPPFRSVSYITWGIVGIFFNFYVYRKFKASWAXNGIFGPTWWGLXXADHCHLAKCPTAPDVHAKGCPLL

SEQ ID NO: 22051 - protein, 786 aa, Oryza sativa (japonica cultivar-group)
MASSHQEDREEEEEHSHGDDEITAPFSQQDRRHRSLAHSFFRLVAALIGSCVYAVRPSTSRGSPELEEEENSPIEQVALTVPVSDEPETPVLTFRMWVLGTASCAVLSFLNQFFWYRKEPLTITAISAQIAVVPLGRLMAAALPERAFFRGRPWEFTLNPGPFNVKEHVLITIFANSGAGTVYAIHVITAVRVFYGKHISFFVSLLVVLTTQVLGFGWAGIFRRYLVEPAAMWWPSNLVQVSLFRALHEKEARSKGGLTRNQFFLVAFICSFAYYIFPGYLFQMLTSLSWICWVFPHSVLAQQLGSGLSGLGIGAIGLDWSTVSSYLGSPLASPWFATANVAAGFFFIMYIITPIAYWFNFYKAQNFPIFSDGLFTSTGQKYNISSIVDSHFHFDTKAYEKNGPLYLSTFFAVTYGVGFASLTATIVHVLLFHGSEIWQLSKSAFQEKRMDIHTKLMRRYKQVPEWWFVCILIANIAVTIFACEYYIEQLQLPWWGVLLACAIAFFFTLPIGIITATTNQTPGLNIITEYIMGYLYPGRPVANMCFKVYGYISMSQALTFLQDFKLGHYMKIPPRTMFMAQVVGTLIAAFVYIGTAWWLMETIPNICNTELLPSDSPWTCPGDHVFYDASVIWGLISPRRIFGDLGTYSAVNWFFLGGAIAPVLVWFAHKAFPNQNWILLINMPVLIGATGQMPPATAVNYTTWILVGFLSGYVVYRYRRDWWERHNYLLSGALDAGLAFMAVLIYLCLGLENISLNWWGNDLDGCPLASCPTAKGVVVDGCPVYT

SEQ ID NO: 22052 - protein, 755 aa, Oryza sativa (japonica cultivar-group)
MGEGEFVDVERGVVAEGALDDDASPIEEVRLTVPVTDDSSLPVWTFRMWTLGLLSCVLMSFLNQFFSYRTEPLIVTQITVQVASLPLGHILARVLPRRKFKAPALLGGGECSLNPGPFNMKEHVLVSIFANAGCAFGSGSAYAVMIVDIIRAFYGRSISLFPAWLLITTTQVLGYGWAGLMRRYVVEPAQMWWPGTLVQVSLFRALHGKGEEKEENKEGSGGGMSQAKFFLIALACSFLWYAVPGYLFPTLTSVSWVCWIFSKSVTAQQLGSGMKGLGLGAFTLDWTAVSAFLYSPLISPFFATANILAGYVLLMYVVVPVSYWGLDLYNARRFPIFSSHLFTATGSTYDITAIVNDRFEIDMDGYHRMGRINMSTFFALSYGLGFATIAATVTHVALFHGKEIYRRFRASQRDKPDVHTRLMKSYRDVPSWWFYAMLALSMAVSLLLCTVLRSAVQLPWWGLLFACAMAFVFTLPISIITATTNQTPGLNIITEYVIGLMLPGKPIANVCFKAYGYMSMSQAVSFLSDFKLGHYMKIPPKSMFLVKLVGTVVASTVNLVVAYWLLGSIPNICQDALLPADSPWTCPNDRVFFDASVIWGLVGPRRIFGPLGNYGALNWFFLAGAVGPVIVYLLHRAFPSKTWIPMINLPVLIGATSYMPPATAVNYNSWLIIGIIFNFFVFRYRKLWWKRYNYILSAALDAGVAFMAVLLYFSLSMENRSISWWGTAGEHCPLASCPTAKGINLGADSVCPVVL

SEQ ID NO: 22053 - protein, 769 aa, Oryza sativa (japonica cultivar-group)
MNMIAIHPIYGSSLLVLLAPGEVQDLVVVVLGVKLFVLLSVRSSMRLGSPEENSPVEQVALTVPVGDDPATPVLTFRIWVLGTASCVVLSFLNTFFWYRKEPLTVTAISAQIAVVPLGRLMAAALPERVFFRGRPWEFTLNPGPFNVKEHVLITIFANAGAGSVFAINVITAVRVFYGKRISFFVSLLVVLTSQVLGFGWAGIFRRYLVEPAAMWWPSNLVQVSLFRALHEKERRSKGGMTRTQFFLVAFVCSFAYYIFPGYLFQMLTSLSWICWIFPKSVLAQQLGSGLHGLGIGAIGLDWSSISSYLGSPLASPWFATANIAAGFFIYIYVITPIAYWINLYKAQNFPIFSDGLFTVTGQKYNISTIIDSQFHFDTKAYEKNGPLYISTFFSISYGLGFACLTATVVHVLLFHGSEIWQLSRSAFQDKKMDIHTKLMKRYKQVPEWWFISILIASVAITMFTCEYYIEQLQLPWWGVLLACALAIFFTLPIGIVTATTNQTPGLNIITEYIMGYLYPGRPVANMCFKVYGYIGPQQALAFLQDFKLGHYMKIPPRTMFMAQVVGTLIAAFVYLGTAWWLMDTIPNICNTELLPPGSPWTCPYDHLFYDASVIWGLIGPRRIFGDLGTYSAVNWFFLGGAIAPLLVWFAHKAFPGQKWILLVNMPVLIAGISQMPPATSVNYTAWIFVAFLSGYVVYKYRRDWWERHNYLLSGALDAGLAFMAVLLYLCLGLEKISLNWWGNDLDGCPLASCPIAEGITVQGCPVASA

SEQ ID NO: 22054 - protein, 753 aa, Oryza sativa (japonica cultivar-group)
MASSHHQEVQEQGHGDGEEEEQDNSQITSPLLRSSMRLGSPEENSPVEQVALTVPVGDDPATPVLTFRIWVLGTASCVVLSFLNTFFWYRKEPLTVTAISAQIAVVPLGRLMAAALPERVFFRGRPWEFTLNPGPFNVKEHVLITIFANAGAGSVFAINVITAVRVFYGKRISFFVSLLVVLTSQVLGFGWAGIFRRYLVEPAAMWWPSNLVQVSLFRALHEKERRSKGGMTRTQFFLVAFVCSFAYYIFPGYLFQMLTSLSWICWIFPKSVLAQQLGSGLHGLGIGAIGLDWSSISSYLGSPLASPWFATANIAAGFFIYIYVITPIAYWINLYKAQNFPIFSDGLFTVTGQKYNISTIIDSQFHFDTKAYEKNGPLYISTFFSISYGLGFACLTATVVHVLLFHGRSAFQDKKMDIHTKLMKRYKQVPEWWFISILIASVAITMFTCEYYIEQLQLPWWGVLLACALAIFFTLPIGIVTATTNQTPGLNIITEYIMGYLYPGRPVANMCFKVYGYIGPQQALAFLQDFKLGHYMKIPPRTMFMAQVVGTLIAAFVYLGTAWWLMDTIPNICNTELLPPGSPWTCPYDHLFYDASVIWGLIGPRRIFGDLGTYSAVNWFFLGGAIAPLLVWFAHKAFPGQKWILLVNMPVLIAGISQMPPATSVNYTAWIFVAFLSGYVVYKYRRDWWERHNYLLSGALDAGLAFMAVLLYLCLGLEKISLNWWGNDLDGCPLASCPIAEGITVQGCPVASA

SEQ ID NO: 22055 - protein, 766 aa, Oryza sativa (japonica cultivar-group)
MMLHHEASVQQAREEEEELDHHGDPMITSPLLRPSTSGSSPENGEEENSPVELVALTVPVSDEPETPVLTFRMWVLGTASCAVLSFLNQFFWYRKEPLTITAISAQIAVVPLGRLMAATLPEHAFFRGRPWEFTLNPGPFNVKEHVLITIFANSGAGTVYAIHVITGVRVFYGKTLSFFISLLVVLTTQYHQMLGFGWAGIFRRYLVEPASMWWPSNLVQVSLFSALHEKEARRKGGLTRNQFFLVAFVCSFAYYIFPGYLFQMLTSLSWICWVFPSSVLAQQLGSGLRGLGVGAIGLDWSSISSYLGSPLASPWFATVNVGVGFFIVMYIITPIAYWFNFYKAQNFPIFSDGLFTSTGQKYNVSSIVDSHFHFDTKAYEKNGPLYLSTSLLVTYGVGFATLAATIVHALLFHGSEIWLLSKSAFQEKRMDIHTKLMRRYKQVPEWWFICILIANIGTTIFACEYYNEELQLPWWGVLFACSIAFFFTLPIGIIKATTNQTPGLNVITEYIIGYLYPGRPVANMCFKVYGYISMKQALAFLEDFKLGHYMKIPPRTMFMAQVVGTSIAAFVYIGTAWWLMETIPNICNTELLPSDSPWTCPGDHVFYDASVTWGLISPRRIFGDLGTYSALNWFFLCGAIAPLLVWFAHKTFPGQNWILLIKTPVLIGATFQMPPATAVNYTTWILVGFLSGYVVYRYRRDWWERHNYLLSGALDAGLAFMAVLIYLCLGLEDISLNWWGNDLDGCPLASCPTAKGIVVKGCAVYT

SEQ ID NO: 22056 - protein, 726 aa, Oryza sativa (japonica cultivar-group)
MASLKSPVAAEEQAATAAAAAAKGEGERCPVEEVALVVPETDDPTTPVMTFRAWTLGLASCVVLIFLNTFFTYRTQPLTISGILAQILVLPAGQFMAAVLPSREVRLLGGRLGSFNLNPGPFNIKEHVIITIFANCGVSYGGGDAYSIGAITVMKAYYKQSLSFLCALLIVLTTQILGYGWAGMLRRYLVDPADMWWPSNLAQVSLFRALHEKEGGDGGKGSSSRGPTRMRFFLIFFFASFAYYALPGYLLPILTFFSWACWAWPHSITAQQVGSGYHGLGVGAFTLDWAGISAYHGSPLVAPWSSIANTAAGFVMFIYLIVPLCYWKFDTFDARKFPIFSNQLFTASGQKYDTTKVLTREFDLNVAAYESYGKLYLSPLFAISIGSGFLRFTATIVHVALFHGGDIWRQSRSAMSSAAAKMDVHAKLMRRYKQVPQWWFLVLLVGSVAVSLVMSFVYREEQPGYDIIAQFMIGYALPGKPIANLLFKIYGRISTVHALSFLADLKLGHYMKIPPRCMYTAQLVGTVVAGVVNLAVAWWMLGSIDNICDVEALHPDSPWTCPKYRVTFDASVIWGLIGPARLFGRHGLYRNLVWLFLAGAVLPVPVWLLSRAFPEKKWIALINVPVISYGFAGMPPATPTNIASWLVTGTIFNYFVFKYRKGWWQKYNYVLSAALDAGTAFMGVLIFFALQNAHHELKWWGTAVDHCPLASCPTAPGIAVKGCPVF

SEQ ID NO: 22057 - protein, 446 aa, Oryza sativa (japonica cultivar-group)
SGYHGLGVGAFTLDWAGISAYHGSPLVAPWSSIANTAAGFVMFIYLIVPLCYWKFDTFDARKFPIFSNQLFTASGQKYDTTKVLTREFDLNVAAYESYGKLYLSPLFAISIGSGFLRFTATIVHVALFHGGDIWRQSRSAMSSAAAKMDVHAKLMRRYKQVPQWWFLVLLVGSVAVSLVMSFVYREEVQLPWWGMLFAFALAFVVTLPIGVIQATTNQQPGYDIIAQFMIGYALPGKPIANLLFKIYGRISTVHALSFLADLKLGHYMKIPPRCMYTAQLVGTVVAGVVNLAVAWWMLGSIDNICDVEALHPDSPWTCPKYRVTFDASVIWGLIGPARLFGRHGLYRNLVWLFLAGAVLPVPVWLLSRAFPEKKWIALINVPVISYGFAGMPPATPTNIASWLVTGTIFNYFVFKYRKGWWQKYNYVLSAALDAGTAFMGVLIFFA

SEQ ID NO: 22058 - protein, 786 aa, Oryza sativa; identical to SEQ ID NO: 22051

SEQ ID NO: 22059 - protein, 745 aa, Oryza sativa
  unsure (1)..(745): unsure at all Xaa locations
MASSHHQEVQEQGHGDGEEEEQEXGAPEENSPVEQVALTVPVGDDPATPVLTFRIWVLGTASCVVLSFLNTFFWYRKEPLTVTAISAQIAVVPLGRLMAAALPERVFFRGRPWEFTLNPGPFNVKEHVLITIFANAGAGSVFAINVITAVRVFYGKRISFFVSLLVVLTSQVLGFGWAGIFRRYLVEPAAMWWPSNLVQVSLFRALHEKERRSKGGMTRTQFFLVAFVCSFAYYIFPGYLFQMLTSLSWICWIFPKSVLAQQLGSGLHGLGIGAIGLDWSSISSYLGSPLASPWFATANIAAGFFIYIYVITPIAYWINLYKAQNFPIFSDGLFTVTGQKYNISTIIDSQFHFDTKAYEKNGPLYISTFFSISYGLGFACLTATVVHVLLFHGSEIWQLSRSAFQDKKMDIHTKLMKRYKQVPEWWFISILIASVAITMFTCEYYIEQLQLPWWGVLLACALAIFFTLPIGIVTATTNQTPGLNIITEYIMGYLYPGRPVANMCFKVYGYIGPQQALAFLQDFKLGHYMKIPPRTMFMAQVVGTLIAAFVYLGTAWWLMDTIPNICNTELLPPGSPWTCPYDHLFYDASVIWGLIGPRRIFGDLGTYSAVNWFFLGGAIAPLLVWFAHKAFPGQKWILLVNMPVLIAGISQMPPATSVNYTAWIFVAFLSGYVVYKYRRDWWERHNYLLSGALDAGLAFMAVLLYLCLGLEKISLNWWGNDLDGCPLASCPIAEGITVQGCPVAS

SEQ ID NO: 22060 - protein, 769 aa, Oryza sativa; identical to SEQ ID NO: 22053

SEQ ID NO: 22061 - protein, 831 aa, Oryza sativa
SIDEAVVERRLRRRRVGFEEARGVTLDAGGEDSEEQRLQQAHPAAERARVQLLRLLHGTWETQGTVLVVSDTTTPAAREDAELTDGSGPEKSAGPKMRPSTSGSSPENGEEENSPVELVALTVPVSDEPETPVLTFRMWVLGTASCAVLSFLNQFFWYRKEPLTITAISAQIAVVPLGRLMAATLPEHAFFRGRPWEFTLNPGPFNVKEHVLITIFANSGAGTVYAIHVITGVRVFYGKTLSFFISLLVVLTTQYHQMLGFGWAGIFRRYLVEPASMWWPSNLVQVSLFSALHEKEARRKGGLTRNQFFLVAFVCSFAYYIFPGYLFQMLTSLSWICWVFPSSVLAQQLGSGLRGLGVGAIGLDWSSISSYLGSPLASPWFATVNVGVGFFIVMYIITPIAYWFNFYKAQNFPIFSDGLFTSTGQKYNVSSIVDSHFHFDTKAYEKNGPLYLSTSLLVTYGVGFATLAATIVHALLFHGSEIWLLSKSAFQEKRMDIHTKLMRRYKQVPEWWFICILIANIGTTIFACEYYNEELQLPWWGVLFACSIAFFFTLPIGIIKATTNQTPGLNVITEYIIGYLYPGRPVANMCFKVYGYISMKQALAFLEDFKLGHYMKIPPRTMFMAQVVGTSIAAFVYIGTAWWLMETIPNICNTELLPSDSPWTCPGDHVFYDASVTWGLISPRRIFGDLGTYSALNWFFLCGAIAPLLVWFAHKTFPGQNWILLIKTPVLIGATFQMPPATAVNYTTWILVGFLSGYVVYRYRRDWWERHNYLLSGALDAGLAFMAVLIYLCLGLEDISLNWWGNDLDGCPLASCPTAKGIVVKGCAVYT

SEQ ID NO: 22062 - protein, 794 aa, Oryza sativa
  unsure (1)..(794): unsure at all Xaa locations
MARSIPPESGDENVSASADEEGMEEEVNDHPIEEVRNTVPVTDDPSEPCLTFRVWVLGLSSCVFLAFVNEFFMYRTTQLSIGTVVVQIITLPIGRLMASTLPARRLRVGGWSFSLNPGPFSLKEHCLIIIFAGAGASGVYAMNIIAIVKVFYKRQISPYAAMLLAQTTQLLGYGWAGLFRKYLVDSAYMWWPSNLVQVTLFRAMHEEEKRNKGQLTRLQFFIMVMTCSFAYYIVPSYLFPAISTISVLCWLYRDSVTAQQIGSGASGLGVGSFGLDWNTVVGFLGNPLASPAFAIFNVMAGFALSTYVAVPILYWTDTYNAKRFPLVSSHVFNAAGGRYDTARILDPATFTLNLREYDAYGRINLSILFAINYGIGFAGLMSTLSHVALYHGKQATAXXQANGGGKERQDVHTRIMKRNYKAVPQWWFHLMLAIVMALSLYTCEGFGRQLQLPYWGLLLACAIAFTFTLPIGVISATTNMQPGLNIITELIIGYLYPGKPLANVVFKTYGYISMTQALTFVSDFKLGHYMKIPPRSMFMVQLAGTVVASTVHFATAWWLLTTVRNICDVDSLPLGSPWTCPGEDVFYNASIIWGVVGPLRMFGRLGNYWQMNYFFLVGVLAPVPVWLLSRRYPRSALLRDINLPLVLAGASGLLPARSVNFVMWGLVGFVFNHVVYRRCRAWWMRHNYVLAAGLDAGVAFMGVLTFVSLGYFDIYGVQWWGGAADDHCPLASCPTAPGASVGAIDAGEAVAQLPVRHGCVGRGSDELVANRHAALDMGLIMGGNLLQADLEATK

SEQ ID NO: 22063 - protein, 704 aa, Oryza sativa
  unsure (1)..(704): unsure at all Xaa locations
AAEEQAATAAAAAAKGEGERCPVEEVALVVPETDDPTTPVMTFRAXPLTISGILAQILVLPAGQFMAAVLPSREVRLLGGRLGSFNLNPGPFNIKEHVIITIFANCGVSYGGGDAYSIGAITVMKAYYKQSLSFLCALLIVLTTQILGYGWAGMLRRYLVDPADMWWPSNLAQVSLFRALHEKEGGDGGKGSSSRGPTRMRFFLIFFFASFAYYALPGYLLPILTFFSWACWAWPHSITAQQVGSGYHGLGVGAFTLDWAGISAYHGSPLVAPWSSIANTAAGFVMFIYLIVPLCYWKFDTFDARKFPIFSNQLFTASGQKYDTTKVLTREFDLNVAAYESYGKLYLSPLFAISIGSGFLRFTATIVHVALFHGGDIWRQSRSAMSSAAAKMDVHAKLMRRYKQVPQWWFLVLLVGSVAVSLVMSFVYREEVQLPWWGMLFAFALAFVVTLPIGVIQATTNQQPGYDIIAQFMIGYALPGKPIANLLFKIYGRISTVHALSFLADLKLGHYMKIPPRCMYTAQLVGTVVAGVVNLAVAWWMLGSIDNICDVEALHPDSPWTCPKYRVTFDASVIWGLIGPARLFGRHGLYRNLVWLFLAGAVLPVPVWLLSRAFPEKKWIALINVPVISYGFAGMPPATPTNIASWLVTGTIFNYFVFKYRKGWWQKYNYVLSAALDAGTAFMGVLIFFALQNAHHELKWWGTX

SEQ ID NO: 22064 - protein, 727 aa, Oryza sativa
  unsure (1)..(727): unsure at all Xaa locations
MASLKSPVAAEEQAATAAAAAAKGEGERCPVEEVALVVPETDDPTTPVMTFRAWTLGLASCVVLIFLNTFFTYRTQPLTISGILAQILVLPAGQFMAAVLPSREVRLLGGRLGSFNLNPGPFNIKEHVIITIFANCGVSYGGGDAYSIGAITVMKAYYKQSLSFLCALLIVLTTQILGYGWAGMLRRYLVDPADMWWPSNLAQVSLFRALHEKEGGDGGKGSSSRGPTRMRFFLIFFFASFAYYALPGYLLPILTFFSWACWAWPHSITAQQVGSGYHGLGVGAFTLDWAGISAYHGSPLVAPWSSIANTAAGFVMFIYLIVPLCYWKFDTFDARKFPIFSNQLFTASGQKYDTTKVLTREFDLNVAAYESYGKLYLSPLFAISIGSGFLRFTATIVHVALFHGGDIWRQSRSAMSSAAAKMDVHAKLMRRYKQVPQWWFLVLLVGSVAVSLVMSFVYREXXQPGYDIIAQFMIGYALPGKPIANLLFKIYGRISTVHALSFLADLKLGHYMKIPPRCMYTAQLVGTVVAGVVNLAVAWWMLGSIDNICDVEALHPDSPWTCPKYRVTFDASVIWGLIGPARLFGRHGLYRNLVWLFLAGAVLPVPVWLLSRAFPEKKWIALINVPVISYGFAGMPPATPTNIASWLVTGTIFNYFVFKYRKGWWQKYNYVLSAALDAGTAFMGVLIFFALQNAHHELKWWGTAVDHCPLASCPTAPGIAVKGCPVF

SEQ ID NO: 22065 - protein, 720 aa, Oryza sativa
  unsure (1)..(720): unsure at all Xaa locations
NILPASRPAGVRRSSTFRWTLQAVQQTTPKTSFTXXEGMEEEVNDHPIEEVRNTVPVTDDPSEPCLTFRVWVLGLSSCVFLAFVNEFFMYRTTQLSIGTVVVQIITLPIGRLMASTLPARRLRVGGWSFSLNPGPFSLKEHCLIIIFAGAGASGVYAMNIIAIVKVFYKRQISPYAAMLLAXQTTXQLLGYGWAGLFRKYLVDSAYMWWPSNLVQVTLFRAMHEEEKRNKGQLTRLQFFIMVMTCSFAYYIVPSYLFPAISTISVLCWLYRDSVTAQQIGSGASGLGVGSFGLDWNTVVGFLGNPLASPAFAIFNVMAGFALSTYVAVPILYWTDTYNAKRFPLVSSHVFNAAGGRYDTARILDPATFTLNLREYDAYGRINLSILFAINYGIGFAGLMSTLSHVALYHGKQIWGLWRKATAEQANGGGKERQDVHTRIMKRNYKAVPQWWFHLMLAIVMALSLYTCEGFGRQLQLPYWGLLLACAIAFTFTLPIGVISATTNMVSXQQPGLNIITELIIGYLYPGKPLANVVFKTYGYISMTQALTFVSDFKLGHYMKIPPRSMFMVQLAGTVVASTVHFATAWWLLTTVRNICDVDSLPLGSPWTCPGEDVFYNASIIWGVVGPLRMFGRLGNYWQMNYFFLVGVLAPVPVWLLSRRYPRSALLRDINLPLVLAGASGLLPARSVNFVMWGLVGFVFNHVVYRRCRAWAATRRLSMSX

SEQ ID NO: 22066 - protein, 891 aa, Oryza sativa
MADAYWRYAAAADAARHHHHHQLPLSAAPAAGMPAPPPAASQVAAAGQPLKRPRPADFSDVPGAPEMAGYYSRDEERPGYRPARDTEALNASYERFLRTGQIQSYGAGAGAGPGAESIRPAAGGNAGYPVEDRPMMAGGGMEARNIGFGDIFRPFVGFREVRLVSKEARHHDQSNPVSGHLKLFKVMYENRVIRTCNELVLCGVLGATNSMNMIAIHPIYGSSLLVLLAPGEVQDLVVVVLGVKLFVLLSVRSSMRLGSPEENSPVEQVALTVPVGDDPATPVLTFRIWVLGTASCVVLSFLNTFFWYRKEPLTVTAISAQIAVVPLGRLMAAALPERVFFRGRPWEFTLNPGPFNVKEHVLITIFANAGAGSVFAINVITAVRVFYGKRISFFVSLLVVLTSQVLGFGWAGIFRRYLVEPAAMWWPSNLVQVSLFRALHEKERRSKGGMTRTQFFLVAFVCSFAYYIFPGYLFQMLTSLSWICWIFPKSVLAQQLGSGLHGLGIGAIGLDWSSISSYLGSPLASPWFATANIAAGFFIYIYVITPIAYWINLYKAQNFPIFSDGLFTVTGQKYNISTIIDSQFHFDTKAYEKNGPLYISTFFSISYGLGFACLTATVVHVLLFHGSEIWQLSRSAFQDKKMDIHTKLMKRYKQVPEWWFISILIASVAITMFTCEYYIEQLQLPWWGVLLACALAIFFTLPIGIVTATTNQTPGLNIITEYIMGYLYPGRPVANMCFKVYGYIGPQQALAFLQDFKLGHYMKIPPRTMFMAQAFPGQKWILLVNMPVLIAGISQMPPATSVNYTAWIFVAFLSGYVVYKYRRDWKITENVNGRVNLQTYSFRSKINLVLDVYSEALSNTWWNTGDLECVMASSRACYAPASRVGIWTSTV

SEQ ID NO: 22067 - protein, 492 aa, Oryza sativa
  unsure (1)..(492): unsure at all Xaa locations
MMLHHEASVQQAREEEEELDHXXSGSSPENGEEENSPVELVALTVPVSDEPETPVLTFRMWVLGTASCAVLSFLNQFFWYRKEPLTITAISAQIAVVPLGRLMAATLPEHAFFRGRPWEFTLNPGPFNVKEHVLITIFANSGAGTVYAIHVITGVRVFYGKTLSFFISLLVVLTTQMLGFGWAGIFRRYLVEPASMWWPSNLVQVSLFSALHEKEARRKGGLTRNQFFLVAFVCSFAYYIFPGYLFQMLTSLSWICWVFPSSVLAQQLGSGLRGLGVGAIGLDWSSISSYLGSPLASPWFATVNVGVGFFIVMYIITPIAYWFNFYKAQNFPIFSDGLFTSTGQKYNVSSIVDSHFHFDTKAYEKNGPLYLSTSLLVTYGVGFATLAATIVHALLFHGSEIWLLSKSAFQEKRMDIHTKLMRRYKQVPEWWFICILIANIGTTIFACEYYNEELQLPWWGVLFACSIAFFFTLPIGIIKATTNQTPGLNVIX

SEQ ID NO: 22068 - protein, 298 aa, Oryza sativa
  unsure (1)..(298): unsure at all Xaa locations
XHEPWWGMLFAFALAFVVTLPIGVIQATTNQQPGYDIIAQFMIGYALPGKPIANLLFKIYGRISTVHALSFLADLKLGHYMKIPPRCMYTAQLVGTVVAGVVNLAVAWWMLGSIDNICDVEALHPDSPWTCPKYRVTFDASVIWGLIGPARLFGRHGLYRNLVWLFLAGAVLPVPVWLLSRAFPEKKWIALINVPVISYGFAGMPPATPTNIASWLVTGTIFNYFVFKYRKGWWQKYNYVLSAALDXAGTAFXMGVLIFFALQNAHHELKWWGTAVDHCPLASCPTAPGIAVKGCPVF

SEQ ID NO: 22069 - protein, 298 aa, Oryza sativa
  unsure (1)..(298): unsure at all Xaa locations
XQILGYGWAGMLRRYLKQSLSFLCALLIVLTTQILGYGWAGMLRRYLVDPADMWWPSNLAQVSLFRALHEKEGGDGGKGSSSRGPTRMRFFLIFFFASFAYYALPGYLLPILTFFSWACWAWPHSITAQQVGSGYHGLGVGAFTLDWAGISAYHGSPLVAPWSSIANTAAGFVMFIYLIVPLCYWKFDTFDARKFPIFSNQLFTASGQKYDTTKVLTREFDLNVAAYESYGKLYLSPLFAISIGSGFLRFTATIVHVALFHGGDIWRQSRSAMSSAAAKMDVHAKLMRRYKQVPQWWX

SEQ ID NO: 22070 - protein, 520 aa, Oryza sativa
  unsure (1)..(520): unsure at all Xaa locations
MRLGSPEENSPVEQVALTVPVGDDPATPVLTFRIWVLGTASCVVLSFLNTFFWYRKEPLTVTAISAQIAVVPLGRLMAAALPERVFFRGRPWEFTLNPGPFNVKEHVLITIFANAGAGSVFAINVITAVRVFYGKRISFFVSLLVVLTSQVLGFGWAGIFRRYLVEPAAMWWPSNLVQVSLFSFAYYIFPGYLFQMLTSLSWICWIFPKSVLAQQLGSGLHGLGIGAIGLDWSSISSYLGSPLASPWFATANIAAGFFIYIYVITPIAYWINLYKAQNFPIFSDGLFTVTGQXXNDKPGLNIITEYIMGYLYPGRPVANMCFKVYGYIGPQQALAFLQDFKLGHYMKIPPRTMFMAQVVGTLIAAFVYLGTAWWLMDTIPNICNTELLPPGSPWTCPYDHLFYDASVIWGLIGPRRIFGDLGTYSAVNWFFLGGAIAPLLVWFAHKAFPGQKWILLVNMPVLIAGISQMPPATSVNYTAWIFVAFLSGYVVYSEALSNTWWNTGDLEARGARGAGAGEVX

SEQ ID NO: 22071 - protein, 546 aa, Oryza sativa
  unsure (1)..(546): unsure at all Xaa locations
HSGSLAHWHSSQLLPLSIHGVLPSPRSTRARPXEMERKRNKIIAKSXXLHLRSSMRLGSPEENSPVEQVALTVPVGDDPATPVLTFRIWVLGTASCVVLSFLNTFFWYRKEPLTVTAISAQIAVVPLGRLMAAALPERVFFRGRPWEFTLNPGPFNVKEHVLITIFANAGAGSVFAINVITAVRVFYGKRISFFVSLLVVLTSQVLGFGWAGIFRRYLVEPAAMWWPSNLVQVSLFSFAYYIFPGYLFQMLTSLSWICWIFPKSVLAQQLGSGLHGLGIGAIGLDWSSISSYLGSPLASPWFATANIAAGFFIYIYVITPIAYWINLYKAQNFPIFSDGLFTVTGQXXNDKPGLNIITEYIMGYLYPGRPVANMCFKVYGYIGPQQALAFLQDFKLGHYMKIPPRTMFMAQVVGTLIAAFVYLGTAWWLMDTIPNICNTELLPPGSPWTCPYDHLFYDASVIWGLIGPRRIFGDLGTYSAVNWFFLGGAIAPLLVWFAHKAFPGQKWILLVNMPVLIAGISQMPPATSVNYTAWIFVAFLSGYVDX

SEQ ID NO: 22072 - protein, 419 aa, Oryza sativa
  unsure (1)..(419): unsure at all Xaa locations
RTGGTKTTTRENXEGSQHTQPXMLHHEAMRPSTSGSSPENGEEENSPVELVALTVPVSDEPETPVLTFRMWVLGTAXFFWYRKEPLTITAISAQIAVVPLGRLMAATLPEHAFFRGRPWEFTLNPGPFNVKEHVLITIFANSGAGTVYAIHVITGVRVFYGKTLSFFISLLVVLTTQYHQMLGFGWAGIFRRYLVEPASMWWPSNLVQVSLFSSVLAQQLGSGLRGLGVGAIGLDWSSISSYLGSPLASPWFATVNVGVGFFIVMYIITPIAYWFNFYKAQNFPIFSDGLFTSTGQKYNVSSIVDSHFHFDTKAYEKNGPLYLSTSLLVTYGVGFATLAATIVHALLFHGSEIWLLSKSAFQEKRMDIHTKLMRRYKQVPEWWFICILIANIGTTIFACEYYNEELQLPWDYQSNNKSX

SEQ ID NO: 22073 - protein, 188 aa, Oryza sativa
  unsure (1)..(188): unsure at all Xaa locations
XVIXVNQLSKKKGYEKNGPLYLSTFFAVTYGVGFASLTATIVHVLLFHGXXKFHLELDSLLHTKLMRRYKQVPEWWFVCILIANIAVTIFACEYYIEQLQLPWWGVLLACAIAFFFTLPIGIITATTNQTPGLNIITEYIMGYRTRGRPVANMCFKVYGYISMSQALTFLQXFKLGHYMKIPPRTMFX

SEQ ID NO: 22074 - protein, 343 aa, Triticum aestivum
  unsure (1)..(343): unsure at all Xaa locations
FKEEXRVDVHKRLXRRYKQVPEWWFICILTVNIAVTVFACEYYIEQLQLPWWGVLLACAIAFFFTLPIGIITATTNQTPGLNIITEYIMGYLYPGRPVANMCFKVYGYISMSQALTFLQDFKLGHYMKIPPRTMFMAQVVGTLIAAFVYLGTAWWLMDSIPNICDTELLPAGSPWTCPGDHVFYDASVIWGLISPRRIFGDLGTYSAVNWFFLGGAIAPLLVWFAHKAFPGQNWILLINMPVLIGSTGQMPPATAVNYITWIFVGFLSGYVVYRYRRDWWERHNYLLSGALDAGLAFMAVLIYLCLGLENISLNWWGNDLDGCPLASCPTAKGIFVEGCPVYT

SEQ ID NO: 22075 - protein, 279 aa, Triticum aestivum
  unsure (1)..(279): unsure at all Xaa locations
XRPGSLTVLAEFIGGSFVEGNALAMNYFKSFGYVTCAHAVMFSNDLKLAHYVKIPPRHTFFAQIIATFISTFVCVGVLNFQMTQIDGVCTEDARWKMTCPSVNTFFTASVLWGTVGPSKIFGKNGLYTEVLIGFPLGVVVVLVVWAINKRFPHWTWTRQIHPVAIMYGGIVWAPYNMSYVWPSVPIAYFSFYLKSRYLVSWSKYNFVLSAAWSCGIAIAGIIIFFSLQLEGTEFKWWGNTVGYTGCEDDACPLQPLXXGSDYFGPXEWRVSLSRRVLAS

SEQ ID NO: 22076 - protein, 213 aa, Triticum aestivum
  unsure (1)..(213): unsure at all Xaa locations
XPLFATANIAAGFFIYIXXPIAYWFNVYEAWNFPIFSDGLFTVTGQKYNISSIVDSEFHFDANAYEKNGPLYISTFFAVSYGLGFACLTATIVHVLLFHGSEIWELSKSAFQDRKMDVHTKLMRRYGQVPEWWFICILVASAAITVFTCEYYIEQLQLPWWGILLACALSIFYTLPIGIITATTNQTPGLNIITEYIMGYLYPGRPVANMCFX

SEQ ID NO: 22077 - protein, 213 aa, Triticum aestivum
PPRCMYTAQLVGTVVAGVVNLAVAWWMLDSIDNICDVEALHPDSPWTCPKYRVTFDASVIWGLIGPGRLFGQHGLYRNLVWLFVVGAVLPVPVWLLSRAFPEKKWIALVNVPVISYGFAGMPPATPTNIASWLVTGTVFPAVPFRYRKGWWQKYNYVLSAALDAGTAFMGVLIFFALQNAHHDLKWWGTEVDHCPLATCPTAPGIVVKGCPVF

SEQ ID NO: 22078 - protein, 149 aa, Triticum aestivum
  unsure (1)..(149): unsure at all Xaa locations
RVRPIGIITATTNQTPGLNIITEYIMGYLYPGRPVANMCFKVYGYISMTQALAFLQDFKLGHYMKIPPRTMFMAQVVGTLIAALVYIGTAWWLMDSVPNICSTELLPADSPWTCPMDHVFYDASVIWGLIGPRRIFGDLGTYSAGNWFX

SEQ ID NO: 22079 - protein, 158 aa, Triticum aestivum
  unsure (1)..(158): unsure at all Xaa locations
GQKYDTTKVLTADFDLNVAAYDSYGKLYLSPLFAISIGSGFLRFSATIVHVLLFHGADMWRQSRRAIGAAAKLDVHARLMQRYKQVPQWWFLVLLAGSIAVSLLMCFVWKEQVQLPWWGMLFAFAXLAFVVTLPIGVIQATTNQQPGYDIIAQFMIGY

SEQ ID NO: 22080 - protein, 199 aa, Triticum aestivum
  unsure (1)..(199): unsure at all Xaa locations
XIFGPHGNYEAVNWFFLIGAAGPVIVYIFHRIFPSQRWILMINLPVLIGATANMPPATAVNYNSWLLIGTIFNFFVFRYRKKWWQRYNYILSAALDAGVAFMAVLLYFTLTMENRTVNWWGTAGEHCPLASCPTAKGVDLGPDSVCPVFXAKSLSPSRYSYKISHDPFELCECNSMIIDFYCTLHQKRERTKLLDACKL

SEQ ID NO: 22081 - protein, 196 aa, Triticum aestivum
  unsure (1)..(196): unsure at all Xaa locations
XDHLXYXASVIXXLISPRRIFGDLGTYXAVNWFFLGGAIAPLLXWLAHKAFPGQKWILLVNMPVLLGGISHMPPATAVXXTXWICVAFLSGYVVYKYXHNWWKRXNYLLSGALDCGLAFMAVLIYLCLELDNITLNWWGNVSDGCPLASCPTAKGIIVHGCPVHNXEYSHASTAGLRIKLRAKKRRKKAARMGGFA

SEQ ID NO: 22082 - protein, 138 aa, Triticum aestivum
  unsure (1)..(138): unsure at all Xaa locations
XLLASGDYEDVHVRLMRAYPEVSEYWYFGVLVVAAATGMAGIDTYPTYTTIGVVPYGIILALLFVVPTGIIRAMTGVEVTLNVLAEFIGGMWVRGQXALAMNFFKSFGYVTCAHALSFSNDLKLAHYLKIAPRQTFAA

SEQ ID NO: 22083 - protein, 164 aa, Triticum aestivum
  unsure (1)..(164): unsure at all Xaa locations
XQEXEDHGDQITAPLLPNRPSTSRSSPEHHDEENSPIEQVALTVPVGDDLDTPVLTFRMWVLGMASCAVLSFLNQFFWYRKEPLTITAISAQIAVVPLGRLMAAALPERAFLRGTRWEFTLNPGPFNVKEHVLITXFANAXAGTVYAIHVVTAVRVFYGKTSLP

SEQ ID NO: 22084 - protein, 138 aa, Triticum aestivum
  unsure (1)..(138): unsure at all Xaa locations
XQVPTLLTMASSSHQGEEAENSPVEQVALTVPVGDDPSTPVLTFRMWVLGATACVALSFLNTFFGYRKEPLEITAISAQVAVVPLGRLMAAALPERAFFRGRRWEFTLNPGPFNVKEHVLITIFANAGAGSVFAINLX

SEQ ID NO: 22085 - protein, 744 aa, Zea mays
  unsure (1)..(744): unsure at all Xaa locations
MASRKSPVAAEERAGTGEGKGERCAVEEVALVVPETDDPSLPVMTFRAWALGLGSCVVLIFLNTFFTYRTQPLTISGILAQILVLPAGRFLAAVLPDREVRILGGRLGSFNLNPGPFNVKEHVIITIFANCGVSYGGGDAYSIGAITVMKAYYKQTLSFACALLIVLTTQILGYGWAGLLRRYLVDPAEMWWPSNLAQVSLFRALHEKEDKSRGPSRMRFFLIVFFASFAYYALPGYLLPILTFFSWACWAWPHSITAQQVGSGYHGLGVGAFTLDWAGISAYHGSPLVAPWASIANTAVGFVMFIYVIVPLCYWQFNTFDARRFPIFSNQLFTASGQKYDTTKVLTKDFDLNVAAYDSYGKLYLSPLFAISIGSGFLRFTATIVHVLLFHGSDMWKQSKSAMNAVKLDVHAKLMQRYRQVPQWWFLMLLLGSVVVSLLMSFVWKEEMQLPWWGMLFAFALAFVVTLPIGVIQATTNQQPGYDIIAQFMIGYALPGKPIANLLFKIYGRISTVHALSFLADLKLGHYMKIPPRCMYTAQLVGTVVAGVVNLAVAWWMLDNIENICDVEALHPDSPWTCPKYRVTFDASVIWGXLIGPGRLFGRHGLYRNLVWLFLVGAVLPVPVWLLSRAFPEKKWIALINVPVISYGFAGMPPATPTNIATWLVTGTIFNYFVFRYRKGWWQKYNYVLSAALDAGTAFMGVLIFFALQNAHHELKWWGTEVDHCPLASCPTAPGIAVKGCPVF

SEQ ID NO: 22086 - protein, 775 aa, Zea mays
  unsure (1)..(775): unsure at all Xaa locations
MGEIGTDHRGLAEAEAGVGGKEEGIVLGGHEEEEASPVEQVRLTVPSTDDPSLPVWTFRMWSIGLLSCALMSFLNQFFSYRTEPLIVTQITVQVASLPLGHFMARALPRARFRAPALLGGGEWSLNPGPFNIKEHVLISIFANAGFAFGNGSAYAVAIIDIIRAFYHRHISFFTAWLLVVTTQVLGYGWAGLLRKYVVQPAHMWWPGTLVQVSLFRALHEKDESAKASRQISRSKFFLXGLACSFAWDAVPGYLFPTLTSISWVCWVFSRSVTAQQLGSGMSGLGLGAFTLDWSTVSSFLFSPLISPFFATANIFFGYVFFVYVIMPAAYWGFDLYSAKTFPIFSSHLFMSNGSSYDVQSIVNNRFELDLDAYGKNGKVSLSVFFALSYGFSFATIAATITHVGLFYGKEIYYRFRSSQKEKPDIHTKLMERYSEIPAWWFYSLMALSIVVSLLLCTVLKREVQLPWWGLIFACGMAFVFTLPISIITATTNQTPGLNVITEYAMGLIMPGSPIAVVCFKVYGYMSMAQAVAFLSDFKLGHYMKIPPKSMFLVQFVGTIVAGTVNIGTAWWLLGSIDGICSDSLPPDSPWTCPNDRVFFDASVIWGLVGPRRIFGPDGNYGALNWFFLIGAAGPVIVYALHRTFPGQRWIPLINLPVLFGATAYMPPATAVNYNSWLLVGTVFNFFVFRYRKKWWTRYNYILSAALDAGVAFMGVVLYFSLTMQNKSIDWWGTAGEHCPLARCPTAKGVDLGDGVCPVFXSSLEFHVFTSGTSTG

SEQ ID NO: 22087 - protein, 420 aa, Zea mays
  unsure (1)..(420): unsure at all Xaa locations
LSANQNFDHYAQPYNTSRILNXXDYTVNLTAYKEYSPILLGPAFSLSYGMGFAGLISTLTHIALFYGPDVXASVCXXSRSEEPDIHLKLMRKYKEAPEWWFLAVFLVSFGFGLAACLGWQTHLPAWAYILCIIIGLFFFIPVGMVQAITNQQTGLNIITEMIFGYMLPGXRPVAMMLFKSWGYMMTFNGLQYVSDMKVGHYMKIPPRSMFGAQAFAVIWLSIVQIASYNFLRGNIEGICTPHQAQGLTCPNARTFYNASVIWGVIGPKLVFGAGQLYSWTNYFWLIGFLCPFIQWLLARRYPRSPLRYVVFPALFGAAGMIPPATTWYLAQWCIIGLVFNWWIRRRWLGWWTQYNYVLSGALDIGTALCTVVIGLGLGLGNAEFPDWWGNSVVANNLDYNGAAVLKVAPTSGPGIGPSTW

SEQ ID NO: 22088 - protein, 533 aa, Zea mays
  unsure (1)..(533): unsure at all Xaa locations
XACLQFFLTVLATSFAYYIVPNYLFPTISTVSVACLIWRRSVTAQQIGSGVYGLGVGAFGLDWATVAGFLGTPLSTPAFAIANIMAGFFLIVYVIVPFAYWSDAYGARRFPIISSHVFMANGSRYDVNRVLGAGTFQFSQAGYDGAGQIHLSIFFAFSYGLSFATLAATLSHVALYHGRSIWXXQTRATVRAAGGDVHARLMRRNYAAVPQWWFQVLLLLVLGLSLFTCEGFGRQLQLPYWGVLLAAGLAFFFTLPIGIITATTNQQPGLNVVTELIIGYLYPGRPLANVAFKTYGYISMSQAIMFLQDFKLGHYMKIPPRSMFAVQLVGTVLASSVYFATSWWLLESVPGICDPARLPEGSPWTCPGDDVFFNASIIWGVVGPLRMFGRLGLYAKMNYFFLAGALAPVPFWALARAFPDRPWLRLVNMPVLLGATGMMPPARSVNYLMWGAVGLAFNYVVYRRYKAWWARHNYVLSAGLDAGVAFMGILSYAVLQSRGVNGIDWWGLQVDDHCALARCPTAPGVRAPGCPVH

SEQ ID NO: 22089 - protein, 536 aa, Zea mays
  unsure (1)..(536): unsure at all Xaa locations
AHMPHPPRATTTMASSPQPPPHPPPRQEEDQQREEGHHHGDGGDDDQITTPLLVEAATTSSPSPSEGDDPENSPIEQVALTVPVGDDPSTPVLTFRMWVLGTASCALLSFLNQFFWYRKEPLTITAISAQIAVVPLGRLMAAALPARAVLRGTRWEFSLNPGPFSVKEHVLVTIFANSGAGTVYAIHVITAVRVFYGKHITFFVSLLVVLTTQVLGFGWAGIFRRYLVEPAAMWWPSNLVQVSLFRALHEKERRVKGGMTRNQFFLVAFVCSFAYYVFPGYLFQMLTSLSWLCWAFPRSVVAQQLGSGLSGLGVGAVGLDWSTISSYLGSPLASPWFATANVAAGFVLIMYVITPAAYYWLGLYGARSFPIFSDGLFTAAGQTYNISSIVDSNFRFDTEAYERNGPLYLSTFFAVTYGVGFASLTATVVHVFLFHGSEIWQLSRSAFQEKKVDVHTRLMRRYRQVPEWWFICILVANVAVTIFACEYYIEQLQLPWWGVLLACAIAFFFTLPIGIITWSTEENMAMQXWTSVSRAM

SEQ ID NO: 22090 - protein, 385 aa, Zea mays
  unsure (1)..(385): unsure at all Xaa locations
FLLSIAHLGPLCXSTHEAKIAVFSHSEIWQLSKSAFEDKKMDIHTKLMRRYRQVPEWWFICILVASVSATMLTCEYYIEQLQLPWWGVLLACALAIFYTLPIGILKATTNQAPGLNVITEYIMGYLYPGRPMANMCFKVYGYVGPHQALEFLQDFKLGHYMKIPPRAMFTAQVVGTLIAGSVYLGTIWWLLDTIPDVCNTELLPAGSPWTCPYDHVFYDASVLWGLIGPRRIFGDLGTYSAVNWFFLGGAIAPLLVWCTHKAFPAQKWIRHVNAPVLIGATTFMPPATAANYTTWILVAFLSGYVVYKYRRNWWERHNYLLSGALDAGLAFMAVLLYLCLGLENKSLNWWGNDLDGCPLASCPTAKGITVDGCPVHNXERSPFSI

SEQ ID NO: 22091 - protein, 312 aa, Zea mays
  unsure (1)..(312): unsure at all Xaa locations
XSRPAEFACEYYXEQLQLPWWGVLLACAIAFFFTLPIGIITATTNQTPGLNIITEYIMGYLYPGRPVANMCFKEYGYISMTQALAFLQDFKLGHYMKIPPRTMFMAQVVGTLIAALVYIGTAWWLMDSVPNICSTELLPADSPWTCPMDHVFYDASVIWGLIGPRRIFGDLGTYSAVNWFFLGGAVAPLLVWLAHRVFPSQSWILLVNMPVLIGSTGMMPPATAVNYTTWIIAGFLSGYVVYRYRRHWWERHNYLLSGALDAGLAFMAVLIYLCLGLENVGLNWWGNDLDGCPLASCPTAKGIVVEGCPVYT

SEQ ID NO: 22092 - protein, 355 aa, Zea mays
  unsure (1)..(355): unsure at all Xaa locations
MGEIGTDHRGLAEAEAGGSGKEEGMVLGDEEEEEETSPVEQVRLTVPSTDDPSLPVWTFRMWSIGLLSCALMSILNQFFSYRTEPLIVTQITVQVASLPLGHFMARALPRARFRAPALLGGGEWSLNPGPFNIKEHVLISIFANAGFAFGNGSAYAVAIIDIIRAFYHRHISFFTAWLLVVTTQVLGYGWAGLLRKYVVQPAHMWWPGTLVQVSLFRALHEKKDESAKASRQISRSKFFVVVLACSFAWYAVPGYLFPTLTSTSWLCWVFSKSVTAQQLGSGMKGLGLFAFTLDWSTVSSFLFSPLISPFFATXNIFVGYVVFVYVIMPXAYWGXXDLYSXKTFPIFSSHLFMSX

SEQ ID NO: 22093 - protein, 218 aa, Zea mays
  unsure (1)..(218): unsure at all Xaa locations
XHLPRWGVLLACALAIFYTLPIGILKATTNQAPGLNVITEYIMGYLYPGRPMANMCFKVYGYVGPHQALEFLQDFKLGHYMKIPPRAMFTAQVVGTLIAGSVYLGTIWWLLDTIPDVCNTELLPAGSPWTCPYDHVFYDASVLWGLIGPRRIFGDLGTYSAVNWFFLGGAIAPLLVWCTHKAFPAQKWIRHVNAPVLIGATTFMPPATAXVDYTESAG

SEQ ID NO: 22094 - protein, 310 aa, Zea mays
  unsure (1)..(310): unsure at all Xaa locations
MGEIGTDQLGLAEAEAAAAAVKEEGILDDDASPIEQVRLTVPTTDDSSLPVWTFRMWSIGLLSCALMSFLNQFFSYRTEPLVVTQITVQVASLPVGHFMARALPRTRFRAPALLGGGAWSLNPGPFNIKEHVLICIFAXNAGFAFGGGSAYAVGIINIIRAFYGRHISFLTAWLLVVTTQVLGYGWAGLMRKYVVQPAHMWWPGTLVQVSLFQALHEKKDESAKASRQISRSKFFVVVLACSFAWYAVPGYLFPTLTSTSWLCWVFSKSVTAQQLGSGMKGLGLFAFTLDWSTVSSFLFSPLISPFFATX

SEQ ID NO: 22095 - protein, 241 aa, Zea mays
  unsure (1)..(241): unsure at all Xaa locations
XLHGLGIAAIGLDWASISSYLGSPLVSPWFATANVAAGFFIVMYIIVPIGYWFDFYKAQTFPIYSSGLFTSAGQKYNISAIVDDHFHLDIEAYEKNGPLYLSTLFAVTYGIGFASLTATIVHVILFHGREILQLSRSAFQGKSVDIHTKLMRRYKQVPEWWFICILVVNIAVTVFACEYYIEQLQLPWWGVLLACSIAFFFTLPIGIITATTNQTPGLNIITEYIIGYLYPGRPVANMCFX

SEQ ID NO: 22096 - protein, 214 aa, Zea mays
LPYWGLLLACAIAFAFTLPVGVIFATTNMQPGLNIVTELIIGYLYPGKPLANVVFKTYGFISMGQALAFLADLKLGHYMKIPPRSMFFAQLAGTLTASTVHFATAWWLLTTVKDICDVGRLPAGSPWTCPGDDVFYNASIIWGVVGPLRMFGSLGNYWQMNYLFLVGLLAPLPVWLLQRAYPTNRVLAGVNLPLVFAGASGLVPARSVDFIMWG

SEQ ID NO: 22097 - protein, 172 aa, Zea mays
  unsure (1)..(172): unsure at all Xaa locations
XWSSXXAVAAALELPPPLIQATTNQQPGYDIIGQFIIGYILPGKPIANLIFKIYGRISTVHALSFLADLKLGHYMKIPPRCMYTAQLVGTVVAGVVNLGVAWWMLESIQDICDIEGDHPNSPWTCPKYRVTFDASVIWGLIGPRRLFGPGGMYRNLXWLFLIGAXLPXPXXX

SEQ ID NO: 22098 - protein, 231 aa, Zea mays
  unsure (1)..(231): unsure at all Xaa locations
XSTCSFAYYLIPSYLFPSLSTVSVLCWLYRDSVTAQQIGSGLRGLGIGSFGLDWNTVAGFLGNPLVSPAFTVVNVMAGFALTTYVALPLLYWTDTYYARRFPLISPHVYDDAGRPYDTGRVLNRDTFTLNLGGYDAYSRINVSVLFAVNYGIGFASLMSTLSHVALYHGREVWDGLCRKRQHQKTDVDDVHTRIMRRNYKPVPQWWFHLMLAVVLALSLFTCEGFGQQLQX

SEQ ID NO: 22099 - protein, 228 aa, Zea mays
  unsure (1)..(228): unsure at all Xaa locations
TRGRGRASSAPPWPKPTKRXXAGAEAEEVNEHPIEEVRNTVPTTDDPSEPCLTFRTWVLGMSSCVLLSFVNEFFNYRSSQLSIGTVLVQIASLPIGRLMASTLPGRPVRVPLIAWSFSLNPGPFSLKEHCLITIFAGAGCSGVYALNIVAIVKVFYRRQINPYAAMLLAQTTQLLGYGWAGLFRKFLVDSAYMWWPINLVQVTLLRAMHEEEKRPRGGVTRLQFFVIV

SEQ ID NO: 22100 - protein, 851 aa, Schizosaccharomyces pombe
MTARNSASIPTSIRKTSENEVSGDETPAGVGNLSTKTASKTSLTFRQSSSDESTSSYSGNHHNINIQHHPNRPFRTNSSSFSPNDYSISESPSKSKKDGVHVSAVQLDNETDSEVESEVEELERELEAIEDSVYPEVRAAVNPTDDVNLPVNTWRTWVLTTIFVIVFAAVNQFFSLRYPALSISFIVAQLILFPLGKLLNLLPNWKIGYGRFSFYLNSSPFNVKEHAAITIAVSLTSSTAYATNILSAQTSFYKQNLSWGYKILIVLTSQMLGYGFAGLTRRWIVYPAAMIWPQTLVSTVLFRTLHGNSGNDIGVLKNNRISANGWTISRYRFFAYVMIGSFVFYWFPGFIFKGLSYFTVLCWIWPKNRVVNQLFGYNSGLGILPLTFDWQQVVYNSNPLASPWWVICNTFGSVVLIFWIVVPILYYKGVWFSNYLPMLSSSTFDHTGVSYNSSRVLNSDYSFNHTKYESYSPLYMPMSYSMSTALNFAAVTAIFTHCALYNGKDIWQRLWKESGKDECIHRKLMRNYKEAPQWWYATLFIVVFGLTIFTVRYYDTQCPVWALIVALLIFIVNFIPQGVLEGITNQHVGLNIITELIGGYILPGKPLANLMIKLYGFIPMRQGLEFSRDLKLAQYMKIPPRILFFVQLFATILGGITQVAVQEWMNYHIPGICTTSQSNGFTCPNGRSIYNASLIWGAIGPAKMFSKGKPYYPLIFFFLIGAVAPFITWGLRKRFPKSWIGKLNAPVLFTGPGNIPPATGINYSSWAIVGFIFNYVIRKRAIHWWRKYNYVLAAAMDSGVAVAGVVIFLCVSYPGGKITWWGNTVYTKTYDWKSVPYRSLGPNETFGYTNW

SEQ ID NO: 22101 - protein, 785 aa, Schizosaccharomyces pombe
MIGSINESPIEEHMNDSPSTKEKADSVDISDYIVSHSDDSLSKDIKKDTKSFLDVEHGEISTVDEFEEDSPYPEVRAAVPPTDDPSMPCNTIRMWTIGLIYSTVGAAVNMFFSLRNPTVTLSVLISELLAYPALQIWDLIFPDREFRIGRLKFNFKPGPFNVKEHALIVVMSSVSFGNAYSTDIILAQRVHYKQRFGFGYEICLTLATQLIGYGLAGLSRRLLVRPASMLWPVNLVQCTLIKTLHRKDLRNAVANGWRISPFRFFLYVFIASFIWNWFPSYIFQALSLFAWVTWIRPNSPTVNQIFGESTGISILPMTFDWNQISAYILSPLMAPADALMNILLGVILFFWIVTPALNFTNTWYGDYLPISSSGIIDHFGNSYNVTRILTKDATFDLDAYQNYSPIFMSTTYALAFGLSFASITSVIFHVILYHGKEIYDRLRDPPAPDIHEKLMKAYDEVPFYWYLSVFLAFFGMMMGTIYGWKTETPWWVIIVGVIFSAVWFIPIGIVQAITNIQLGLNVFTEFIVGYMYPGRPLAMMIFKTVGYITMTQGLAFAADLKFGHYMKLPPRIMFYTQMIATIWSCFVQIGVLDWALGNIDNVCQADQPDNYTCPNATVFFNSSVIWGVIGPKRMFSGKNTYTGLQYFWLAGVLGTILFWALWKKWPQKWWGQLNGPLIFGGTGYIPPATPVNYLAWSGIGLFFNYYLKKIFADWWQKYNFTLSAALDTGTQLSVIILFFCLQLPMVNFPDWWGNDGAFNTLDATGAAVRKLVNESAGEFFGPAEW

SEQ ID NO: 22102 - protein, 776 aa, Schizosaccharomyces pombe
MIGSINESPIEEHMNDSPSTKEKADSVDISDYIVSHSDDSLSKDIKKDTKSFLDVEHGEISTVDEFEEDSPYPEVRAAVPPTDDPSMPCNTIRMWTIGLIYSTVGAAVNMFFSLRNPTVTLSVLISELLAYPALQIWDLIFPDREFRIGRLKFNFKPGPFNVKEHALIVVMSSVSFGNAYSTDIILAQRVHYKQRFGFGYEICLTLATQLIGYGLAGLSRRLLVRPASMLWPVNLVQCTLIKTLHRKDLRNAVANGWRISPFRFFLYVFIASFIWNWFPSYIFQALSLFAWVTWIRPNSPTVNQIFGESTGISILPMTFDWNQISAYILSPLMAPADALMNILLGVILFFWIVTPALNFTNTWYGDYLPISSSGIIDHFGNSYNVTRILTKDATFDLDAYQNYSPIFMSTTYALAFGLSFASITSVIFHVILYHGKEIYDRLRDPPAPDIHEKLMKAYDEVPFYWYLSVFLAFFGMMMGTIYGWKTETPWWVIIVGVIFSAVWFIPIGIVQAITNIQLGLNVFTEFIVGYMYPGRPLAMMIFKTVGYITMTQGLAFAADLKFGHYMKLPPRIMFYTQMIATIWSCFVQIGVLDWALGNIDNVCQADQPDNYTCPNATVFFNSSVIWGVIGPKRMFSGKNTYTGLQYFWLAGVLGTILFWALWKKWPQKWWGQLNGPLIFGGTGYIPPATPVNYLAWSGIGLFFNYYLKKIFADWWQKYNFTLSALDTGTQLSVIILFFCLQLPMVNFPDWWGNDGAFNTLDATGAAVRKLVNESAR

SEQ ID NO: 22103 - protein, 738 aa, Schizosaccharomyces pombe
  unsure (1)..(738): unsure at all Xaa locations
MVHELNYPLIEQFPVYGSYALQAAQFPHCSLFLHLDDPSMPCNTIRMWTIGLIYSTVGAAVNMFFSLRNPTVTLSVLISELLAYPALQIWDLIFPDREFRIGRLKFNFKPGPFNVKEHALIVVMSSVSFGNAXXXXXILAQRVHYKQRFGFGYEICLTLATQLIGYGLAGLSRRLLVRPASMLWPVNLVQCTLNKTLHRKDLRNAVANGWRIPPFRFFLYGFIASFXWNWFPSYIFQALSLXAWVTWIRPNSPTVNQIFXESTGISILPMTFXWNQISAYILSPLMAPADALMNILVGVILFLWIVTPALNFTNTWYGDYLPISSSGIIDHFGNSYNVTRILTKDATXDLDAYQNYSPIXMSTTYALAFGLSFAXXXSVIFHVILYHGKEIYDRLRDPPAPDIHEKLMKAYDEVPFYWYLSVFLAFFGMMMGTIYGWKTETPWWVIIVGVIFSAVWFIPIGIAQAITNIQLGLNVFTEFIVGYMYPGRPLAMMIYKTVGYITMTQGLAFAADLKFGHYMKLPPRIMFYTQMIATIWSCFVQIGVLDWALGNIDNVCQADQPDNYTCPNATVFFNSSVIWGVIGPKRMFSGKNTYTGLQYFWLAGVLGTIXFWALWKKWPQKWWGQLNGPLICGGTGYIPPATPVNYLAWSGIGLFXXYYLKKIXADWWQKYNFTLSAALDTGTQLSXIILXXXLQLPMVNXPDWWGNDGAXNTLDATGAAVRKLVXESAGEFFGPAEW

SEQ ID NO: 22104 - protein, 791 aa, Schizosaccharomyces pombe
MKTPKFITYVTRGFKGLESKSVENNKDHIVENSSPIASKFHEFDEQKKSFEIINYAGHEKFVDDITERESSVPGNAVYDITVRDIDAIVPVTDDVDIPASTFRMWILAFGLATVIAGVDAFFLMRYPSVSIAAIVALLVAYPLGQLWYYIIPQWEIKLPRGIRVSLNPGRFNRKEHACLYIFVNICVSAKLVNTLIIEQIKFFGVNIGIGRAILFNLCSYLSSFGWSGLALPILVYPPTLIWPSVLSSCALFKIFHDNDNTKACNWTISRLRYFFIVFVASFIWYWFPDLIFPALSSLGAWISWCKPSSAVLSQIFGVKTGLGLFPLTLDWAQISSLSNPLITPWWATCCIFTSFVFWIWIVLPGLYYQNYWQVAHFPIMTNSIYTVSGKSYDAQKVVDSKWELVTQKYQEYSPVMLPIAFIINIALSLGAFSSMMISFFLRFPTDVIQPICHVFKYSDIHTKLLKKYKRVHWGFYLASIIVSLGLGFAFTEGWHDIQIRSYGFVVSMVIGAALYIPLSLIESRSSFTISMQAFFEIVAAFWFNGQPMALLYFYSFGFGTLQHAMHMTQSAKIGHYMKVPPRLVAALLFTSGIWSSLVNSAVTGWIMYHVRDVCTSNAENNMTCRSPKTQFNSHLIWGLVGNHIFSSDGRYSFVMWFFLVGAVVSVVVYLLQISFPKSSWKHVNPALLLGGAAQIPSVTGINYSTWAAVAFCFNYLIRRGYYSWWKKYNLITAAAMDCGVAIAGLFIYFCVVYTGGSSNFSWWGTTVSSAGCDKKGCAHLSVSDISKPSGW

SEQ ID NO: 22105 - protein, 143 aa, Schizosaccharomyces pombe
MIGSINESPIEEHMNDSPSTKEKADSVDISDYIVSHSDDSLSKDIKKDTKSFLDVEHGEISTVDEFEEDSPYPEVRAAVPPTDDPSMPCNTIRMWTIGLIYSTVGAAVNMFFSLRNPTVTLSVLISELLAYPALQIWDLIFPD

SEQ ID NO: 22106 - protein, 836 aa, Yarrowia lipolytica
MSQYSRHAFDTDSDSDTELTPIYIDDRYSSMVSNDSRAGLLRRGGDLERDAESEKTREEKEEELRNHSFSKSRDKTRETVADATLESSSCVDSQYDTVETTSIFSVGRKKAINSPYPEVRAAVPATDDPLMPQNTPRMWVIGIFLVTICSGLNILFTLHWPAFVISSFFAAMVAWPLGRIWDQFVPNWRIPLTNIYLNNSPFNIKEHCLIIVMANVSYGTGVSYVPVIVLTMKHRYNNTYFGWGFSIVSSICVQCLGYGMAGICRRILVYPASLIWPSNLVTTTFLTNIHMNVNHTADGWKISRLRFFLIVFSAYFVWNWLPGYLAPFLSNFAFVTYAAPDNVIVNQIFGSSSGLGLIPINFDWNVIAGYIGSPLVPPFFSIGNVAAGVVVIFWIITPILHYSNAWYGRYLPMSDSNSYDRFQRTYDAERVLKPLVKGGKKKFELDVEKYKEYSPLYLSTTFALSYGVSFAAITSTVVHTILFHGKEIMYYWKHSRKEPEDVHMELMRKYPEVPEWWYALVLAICFALACVTVSVWETDLPIWALIIALLIAGGLLIPAGMIAALTNVTMGLNVLTEFVVGYILPGRPVGMMFFKTFGYISNAQALNFLVDLKLGHYLKLAPRVMFCAQILATTWGSICQLAVVEWAQMAIPDLCEESQKTNFSCPQVQVFYSASVIWGLVGPGRIFGEGQLYHGLLWMFLVGAALPFFSWLWLKRHPNSRLKFIHWPVFFNGPSQIPPATPYNYASWCVVGYIFNWLIKRRWFNWWAKYNYTLSAGLDVGMAVSAAVIFVSLQLPNINPPSWWGTNIFTPTMDIQGNAFQEVLKEGESFGMKTWK

SEQ ID NO: 22107 - protein, 801 aa, Neurospora crassa
MLRNFFRRRHGDEDVMPDMVDDGSLEGDSTGIEALTALKRFEKMHRLDPNLPLDELDEVETALNSANIEKGTEIDQILAEDNSPYPEVRASVRNYDVEMPVNTIRAWTIGMLLCTIGSAVNMLLSLRNPSISLSTLAIQLIAYPIGLGWDLIFPDRVFTVFGIKFNLKPGPFNFKEHVIIVVMSNAAYGGGALYATDVILAQEIWYKQSFGWAWQILFGISTLCTGYGLAGLARRFLVWPAAMIWPADLINCTLFYTLHDHSPSDPARTNGWSISRYRWFLIVMAGSFAWYWFPGYLFQGLSWMCWITWIWPDNVIVNQLFGGQSGYGLFPITLDWSIISGYLLSPLASPFHAIANVVGGVTFFFVIVSLGIQYSNIWYSAYLPVQESHSYDNTGKRYVVLRILNENLHFDEAKYHAYSPLYLPTQFALAYGLSFAAVAAVIVHVGLYHGKDIWNQWKLARHQEDDVHMRLMKKYRDAEDWWYIILFAVMLGMSFAVVCAWDTGFPWWAFIICILIPVVWTIPIGIIQAITNIQLGLNVLTEYVIGYMLPGRPLVMMMFKNYGYLVMSQALYFIQDLKLGHYMKVPPRVMFWSQLIASVWSAIVQIAVMNWALGAIPDICTDGQANQFDCPSAKVFFTASVIWGAIGPARMFSGKALYSSLQWFWLVGAVAPVISWFFVRRYPRSLWRYVNFPLVFGGSGWIPPATVYIYYCWGIVGTVFNFFIRRRKTGWWLQYNYLTSAALDVGLLLSTLVIFFSLTLSHTKAPEWFGNTVAKSTMDTTATAVQKLVPPGEIFGPREWP

SEQ ID NO: 22108 - protein, 1094 aa, Neurospora crassa
MENATLTPTLYPLIEAVDPLQIELAMTMTRGQENRFRMTPDRDRSPSPDIPFFLDDSDHHPSFPLRELLHQAVLPAGTNSSTTTRGQPTPTSSHSSQDFEVSLIGSTQDRDRVNTLPGRDEPVQTLPGNAHGLLQQLHLHEETGGDNADSDNDSTPSEPVSEEFMTTRQPSLLSVAPGRDSPSYGAITSAPARATSAPQSEGGEPSARAESRSESSARFRTGHDPTGRSSTGDSCDGSVGRSSERLSLSLQKSGEWGGSMTMRGIEGRFEAEVPLEGESLLDHIDELNEFDETEEDPADNSPYAQVRASVAPTDNTTLSINTPRMWTLAVLFSIIGSSTNLFFSLRYPSVAITPVIALLSTHPLGLMWDFFLKRADDPPEEYVDGCRTDSANIPVDHPTDEQPRVFVPWEKRSKLDQLRLWLAQGRWNEKEHSCVYVSSNVSFGFAFATDVIVEQTQFYKQDAPILYQILLTLSTQIMGYTFAGLTRGFLVRPSGMIWPGTLMSAAMFTTIHKQENHVANGWKMTRWKFFMVVFLAGFLFYFVPGLLFPALSYFNVITWFAPKNVVVANLFGVVSGLGLFPMTFDWAQIAYIGSPLLTPFWAAMNVVGGLVVVMWIIAPIAYYSNWLYSSYMPILSAAVFDNTGQVYDVSRILTEDFVFDREAYSKYSRVFLPITYVLGYAVQFAGLASLLTHTICWHGRDIWAQWKQTLGEMHGAEPKGSYEPVAVSTEGLSRTWSRLSSRSSFTRSNSSTENIMNREDVHNRLMRRYKDAPMSWYLITCILMLAIGIFVVEYYPVHLPWYGLLLALGICSILFIPIGIIMAVTNQHSSIYLICQLVAGAVFPGRPVANMVFVTYGYISSAQGIKFAADLKLGHYMKIPPRILFSVQMVATIVSSLTQIGVLNWMFKNVPGLCTPEALNGFTCPIARVHFNGSILWGVVGPSEFFGPGATYRPLVWAFAVGAVLPIPLWLYARKRKDSIVRKLNLPVLFGSLGWIPPATGLNFSVWALVCYVFNYVIKNRARAWWAKYTMTLSAALDSGLAFGIVVVFFGFIYPGVVKGFSWWGTEVYKQGCDWQACAYQAVPEGGRFGPDVW

SEQ ID NO: 22109 - protein, 777 aa, Schizophyllum commune
MATEDALPKLPHRPEPAREKTDGSLDEKIDEKLNNNKGEGFQDEPFELETQAQLDRQHVVTTGQDVSRYVVNLRDDEDPALTFRSLVLGTVIAGLGAALCQIYIFKPVLVSVSTVFLLLLIYCIGNAWAVFLPKRSLVKGTRFERYGGIIEFINPGPFMIKEHVVSTLVASTAAYGATSVNNFAVQRLYYDTHVGPLTAVFATFSTLTFGMGLVGILRPLTVYPAEMVYWSNLPQVTVFQALHFNRHESTKRVRVFWWGFTIMFIYELFPAYIFPLLNSVSIFCLASQKAKPSTRDVFTNIFGGGNANEGLGLLNFSFDWQYIGSNYMSYPLLQQANSWIGLGACYVIMAAIYYSNAWDSKNYKMLSTSIFNHNGTVYDQAAVFGKNGILNETALEEYGLPAMTGSNAWANFAQNLAIGALIAHVTLFWSGDMRDAVLHFRNGKKTNDDPHYLAMQKYKEAPWWWYFILLFLAFIAGLIVCIKGETSLPWWSYIVSLAVGAFITPFSTILYGRMGNGIATNNLMKMIPGALNPGRPVANLYFSMWSHDVVSTSIGLAGDLKVGQYTKVPPRVMFLTQLWGCILGAIVNYVVMISIVDAQREVLLDASGTNVWSGQTIQSLNSQAVTWSLAKELYSASGPYVIVPIGLAIGLVPPFIQWLISKRWPTIKGIKVESIILPIIFNYAQTMSKGITSYVSTSIVIGLVSQLWLRQHHPVWYRKYNYILGGAFDGGAQVMVFILSFAVFGASGVERPFPSWAGNPAKGNIDYCNGNGALDAS

SEQ ID NO: 22110 - protein, 783 aa, Candida albicans
MDKIRAVISGGEKPPVDTDNDHNTDFEADRKMPDLDIVVSKSQEFDPVTSHLVNDIMEDEYAAVHVEDDSPYPEVRAAVPSTDDPTLPQNTIRAWVIGLILTTVGCGMNMLFSFHSPSFAITTFVTSILAWPIGNFWAWIVPDWKIFGASLNPGPFNVKEHTIITIMANVSFGTGAAYATDILLAQNMFYKSNFGWGYNLLLIWSTQCIGFAFGGVMRRFVVDSPGAIWPSNLVTATFLTNMHINENHTANGWKISRLAFFVIVFVASFVWYWFPGYIFQALSYFSWITWIKPNNVIINQVFGSSSGLGMIPNNIALDWNQIAGYIGSPLIPPASVIATIFGSIVLIFWIVVPAIHYSNTWYSQYLPISSTGSFDRFQQTYNVSKIIDHKTLSFNEAEYKKYSPLFLSTTFAISYGLSFASILATITHTICFHGRDLIASLKAKEKPDVHNRLMKAYKPVPEWWYLVVFLVFFGMSIATVRAWPTEMPVWGLVFALIIAIIFLLPVAIIYAKTNIAVGLNVVTEFIVGYVLGGRPLCMMLFKTFGYITNNQAVTFVQDMKLGHYMKIDPRTLFWAQFAATIWGSLVQIAVLEWAYGAIDNLCAADQKNHYTCPNGKVFFNASIIWGVIGPQRQFSHGQIYYGLLFFFIIGAVTPVINWLILKKWPNSPVKYLHWPVFFSGTGYIPPATPYNYTSYCAVGLFFGWWIKKKWFHWWSKYNYSLSAGLDIGLAWCSLIIFLCLSLTNTDFPSWWGNDVINTTLDTQVVTNIRHILKEGEAFGPSSW

SEQ ID NO: 22111 - protein, 471 aa, Streptomyces coelicolor A3(2)
MAQPATEPAKGSSSTPSPEHTEDAVTSVHPVDEKLHPSRLVPAALQHIAAMYAGVVTPPLIIGQACGLDIEGRTRLIAASLLIAGVATLLQTLGVKGFVGNRLPFVNAASSAGIAPILAIVETNAKGSQLPAVYGAVMVAGVFCLAVGPFFGRLLRFFPPLVTGVVITLIGVTLMPVPVGWAQGGDKTAADFGSMRNLALAAFTLAVILVIQRFGKGFVKQVALLFGLLIGTLAAIPFGMADFGALRSAPVAALPTPFAFGAPEFQPAAILSLCIVMLVLMTESSAGMLALGEICDRRADARVITRGLRTDGLATLVGPVFGGFPTSAFAQNVGVVSLTRVRSRYVVAVAGATLLVLGAFPVLGAVVSLVPMPVLGGAGIVLFGSIAVSGIRTLSEAGLDDSSNIILVAVALGAGIIPLAAPTFYAEFPAWAQTVLGSGISAGAIVAVALNLFFHHLGTRSRGTVPALKSS

SEQ ID NO: 22112 - protein, 462 aa, Streptomyces coelicolor A3(2)
MADHPVDEKLPPLKMATTGLQHVAAMYAGVVAPPLIVGAAIGLSATELTFLTGACLFTAGLATFLQTLGIWKIGARLPFVNGVTFAGVAPMTAVVASTDDKSDALPIIFGAVIVAGLLGFVAAPFFSKAIRFFPPVVTGTVITLIGISLLPVAFGWAQGPSPTADDFGSATNLGLAGITLAIVLFLRRFTRGFVKQIAVLLGLVAGTLVAIPFGVTDFGPVADADVVGFPTPFHFGAPQFQIAAIISMCVVMVVSMTESTADMLALGEIVDRPADEKTIAAGLRADTLGSALSPVFNGFMCSAFAQNIGLVAMTKIRSRYVVAVGGGFLVLMGLCPMAASLIAVVPRPVLGGAGVVLFGSVAASGIQTLVRASLDKDNNVLIVAVSLAVGIIPIAAPEFYHSFPENARIILDSGISTGCVAAVLLNLVFNHIGGRGRDAEDVTHPMEAGDEITESSREAAMK

SEQ ID NO: 22113 - protein, 478 aa, Streptomyces coelicolor A3(2)
MDLGVRWKLHGDGKVPAPGAVVRPDERLSWPRTAGLGAQHVVAMFGASFVAPVLMGLDPNLAIMMSGVATVIFLLATRGRVPSYLGCSLSFVGVAAVIRAQGGTSATVTGAVLVVGVALFLVGLAVQRFGARIIHAAMPPVVTGAVVMLIGFNLAPVTASTYWPQDQWTALFVMLFTGLAVVCLRGFWSRIAIFLGLVFGYVLSWALDRIFGKIHSVDGSGKPTDHWRLDFSAVGQADWIGLPSFHGPSFEWSAILVALPVVIALIAENAGHVKAVGEMTGDNLDDKLGTAISADGIGSVLSTAVGGPPNTTYSENIGVMAATRVYSTAAYWAAAGFALLFGLCPKFGAVVAAIPGGVLGGITVILYGMIGLLGAQIWINAKVDMRNPLNLVPAAAGIIIGVGNVSMEFTDTFSLSGIALGTLVVITGYHALRAFAPAHLKTQQPLLDEGTSSYDAKTGSGGAGGDGGGDGGAQRARS

SEQ ID NO: 22114 - protein, 647 aa, Mus musculus
MGIGKNTASKSVEAGGSTEGKYEEEAKHSNFFTLPVVINGGATSSGEQDNEDTELMAIYTTENGIAEKSSLAETLDSTGSLDPQRSDMIYTIEDVPPWYLCIFLGLQHYLTCFSGTIAVPFLLADAMCVGDDQWATSQLIGTIFFCVGITTLLQTTFGCRLPLFQASAFAFLAPARAILSLDKWKCNTTEITVANGTAELLEHIWHPRIQEIQGAIIMSSLIEVVIGLLGLPGALLRYIGPLTITPTVALIGLSGFQAAGERAGKHWGIAMLTIFLVLLFSQYARNVKFPLPIYKSKKGWTAYKFQLFKMFPIILAILVSWLLCFIFTVTDVFPSNSTDYGYYARTDARKGVLLVAPWFKVPYPFQWGMPTVSAAGVIGMLSAVVASIIESIGDYYACARLSCAPPPPIHAINRGIFVEGLSCVLDGIFGTGNGSTSSSPNIGVLGITKVGSRRVIQYGAALMLGLGMVGKFSALFASLPDPVLGALFCTLFGMITAVGLSNLQFIDLNSSRNLFVLGFSIFFGLVLPSYLRQNPLVTGITGIDQILNVLLTTAMFVGGCVAFILDNTIPGTPEERGIKKWKKGVSKGSKSLDGMESYNLPFGMNIIKKYRCFSYLPISPTFAGYTWKGFGKSENSRSSDKDSQATV

SEQ ID NO: 22115 - protein, 592 aa, Mus musculus
MAIYTTENGIAEKSSLAETLDSTGSLDPQRSDMIYTIEDVPPWYLCIFLGLQHYLTCFSGTIAVPFLLADAMCVGDDQWATSQLIGTIFFCVGITTLLQTTFGCRLPLFQASAFAFLAPARAILSLDKWKCNTTEITVANGTAELLEHIWHPRIQEIQGAIIMSSLIEVVIGLLGLPGALLRYIGPLTITPTVALIGLSGFQAAGERAGKHWGIAMLTIFLVLLFSQYARNVKFPLPIYKSKKGWTAYKFQLFKMFPIILAILVSWLLCFIFTVTDVFPSNSTDYGYYARTDARKGVLLVAPWFKVPYPFQWGMPTVSAAGVIGMLSAVVASIIESIGDYYACARLSCAPPPPIHAINRGIFVEGLSCVLDGIFGTGNGSTSSSPNIGVLGITKVGSRRVIQYGAALMLGLGMVGKFSALFASLPDPVLGALFCTLFGMITAVGLSNLQFIDLNSSRNLFVLGFSIFFGLVLPSYLRQNPLVTGITGIDQILNVLLTTAMFVGGCVAFILDNTIPGTPEERGIKKWKKGVSKGSKSLDGMESYNLPFGMNIIKKYRCFSYLPISPTFAGYTWKGFGKSENSRSSDKDSQATV

SEQ ID NO: 22116 - protein, 648 aa, Mus musculus
MMGIGKNTASKSVEAGGSTEGKYEEEAKHSNFFTLPVVINGGATSSGEQDNEDTELMAIYTTENGIAEKSSLAETLDSTGSLDPQRSDMIYTIEDVPPWYLCIFLGLQHYLTCFSGTIAVPFLLADAMCVGDDQWATSQLIGTIFFCVGITTLLQTTFGCRLPLFQASAFAFLAPARAILSLDKWKCNTTEITVANGTAELLEHIWHPRIQEIQGAIIMSSLIEVVIGLLGLPGALLRYIGPLTITPTVALIGLSGFQAAGERAGKHWGIAMLTIFLVLLFSQYARNVKFPLPIYKSKKGWTAYKFQLFKMFPIILAILVSWLLCFIFTVTDVFPSNSTDYGYYARTDARKGVLLVAPWFKVPYPFQWGMPTVSAAGVIGMLSAVVASIIESIGDYYACARLSCAPPPPIHAINRGIFVEGLSCVLDGIFGTGNGSTSSSPNIGVLGITKVGSRRVIQYGAALMLGLGMVGKFSALFASLPDPVLGALFCTLFGMITAVGLSNLQFIDLNSSRNLFVLGFSIFFGLVLPSYLRQNPLVTGITGIDQILNVLLTTAMFVGGCVAFILDNTIPGTPEERGIKKWKKGVSKGSKSLDGMESYNLPFGMNIIKKYRCFSYLPISPTFAGYTWKGFGKSENSRSSDKDSQATV

SEQ ID NO: 22117 - protein, 605 aa, Mus musculus
MKTPEDPGSPKQHEVVDSAGTSTRDRQAPLPTEPKFDMLYKIEDVPPWYLCILLGFQHYLTCFSGTIAVPFLLAEALCVGRDQHMVSQLIGTIFTCVGITTLIQTTVGIRLPLFQASAFAFLVPAKSILALERWKCPSEEEIYGNWSMPLNTSHIWHPRIREVQGAIMVSSMVEVVIGLMGLPGALLSYIGPLTVTPTVSLIGLSVFQAAGDRAGSHWGISARSILLIVLFSQYLRNLTFLLPVYRWGKGLTLFRVQIFKMFPIVLAIMTVWLLCYVLTLTDVLPADPTVYGFQARTDARGDIMAISPWIRIPYPCQWGLPTVTVAAVLGMFSATLAGIIESIGDYYACARLAGAPPPPVHAINRGIFTEGICCIIAGLLGTGNGSTSSSPNIGVLGITKVGSRRVVQYGAGIMLILGAIGKFTALFASLPDPILGGMFCTLFGMITAVGLSNLQFVDMNSSRNLFVLGFSMFFGLTLPNYLDSNPGAINTGIPEVDQILTVLLTTEMFVGGCLAFILDNTVPGSPEERGLIQWKAGAHPHSETSASLKSYDFPFGMGMVKRTTFFRYIPICPVFRGFFKKTQNQPPVLEDTPDNIETGSVCTKV

SEQ ID NO: 22118 - protein, 605 aa, Mus musculus
MKTPEDPGSPKQHEVVDSAGTSTRDRQAPLPTEPKFDMLYKIEDVPPWYLCILLGFQHYLTCFSGTIAVPFLLAEALCVGRDQHMVSQLIGTIFTCVGITTLIQTTVGIRLPLFQASAFAFLVPAKSILALERWKCPSEEEIYGNWSMPLNTSHIWHPRIREVQGAIMVSSMVEVVIGLMGLPGALLSYIGPLTVTPTVSLIGLSVFQAAGDRAGSHWGISACSILLIVLFSQYLRNLTFLLPVYRWGKGLTLFRVQIFKMFPIVLAIMTVWLLCYVLTLTDVLPADPTVYGFQARTDARGDIMAISPWIRIPYPCQWGLPTVTVAAVLGMFSATLAGIIESIGDYYACARLAGAPPPPVHAINRGIFTEGICCIIAGLLGTGNGSTSSSPNIGVLGITKVGSRRVVQYGAGIMLILGAIGKFTALFASLPDPILGGMFCTLFGMITAVGLSNLQFVDMNSSRNLFVLGFSMFFGLTLPNYLDSNPGAINTGIPEVDQILTVLLTTEMFVGGCLAFILDNTVPGSPEERGLIQWKAGAHANSETSASLKSYDFPFGMGMVKRTTFFRYIPICPVFRGFSKKTQNQPPVLEDTPDNIETGSVCTKV

SEQ ID NO: 22119 - protein, 605 aa, Mus musculus
MKTPEDPGSPKQHEVVDSAGTSTRDRQAPLPTEPKFDMLYKIEDVPPWYLCILLGFQHYLTCFSGTIAVPFLLAEALCVGRDQHMVSQLIGTIFTCVGITTLIQTTVGIRLPLFQASAFAFLVPAKSILALERWKCPSEEEIYGNWSMPLNTSHIWHPRIREVQGAIMVSSMVEVVIGLMGLPGALLSYIGPLTVTPTVSLIGLYVFQAAGDRAGSHWGISACSILLIVLFSQYLRNLTFLLPVYRWGKGLTLFRVQIFKMFPIVLAIMTVWLLCYVLTLTDVLPADPTVYGFQARTDARGDIMAISPWIRIPYPCQWGLPTVTVAAVLGMFSATLAGIIESIGDYYACARLAGAPPPPVHAINRGIFTEGICCIIAGLLGTGNGSTSSSPNIGVLGITKVGSRRVVQYGAGIMLILGAIGKFTALFASLPDPILGGMFCTLFGMITAVGLSNLQFVDMNSSRNLFVLGFSMFFGLTLPNYLDSNPGAINTGIPEVDQILTVLLTTEMFVGGCLAFILDNTVPGSPEERGLIQWKAGAHANSETSASLKSYDFPFGMGMVKRTTFFRYIPICPVFRGFSKKTQNQPPVLEDTPDNIETGSVCTKV

SEQ ID NO: 22120 - protein, 543 aa, Mus musculus
MPTSFCSALQHFLTALGGLVAVPLILAKDLCLQHDPLTQSYLISTIFFVSGICTLLQVFLGVRLPILQGGTFAFVAPSLAMLSLPAWKCPEWTLNASQVNTSSPEFIEEWQKRIRELQGAIMVASCVQMLVGFSGLIGFLMRFIGPLTIAPTISLVALPLFDSAGSDAGIHWGISALTIFLIVLFSQYLKNVMVPVPVYGRRKKCHISRFNLFQVFPVLLALCLSWLFCFVLTVTNTLPESPTAYGYMARTDTKGSVLSQAPWFRFPYPGQWGLPTISLAGVFGIIAGVISSMVESVGDYHACARLVGAPPPPKHAINRGIGIEGLGCLLAGAWGTGNGTTSYSENVGALGITRVGSRMVIVAAGCVLLVMGMFGKIGAAFATIPTPVIGGMFLVMFGIISAVGISNLQYVDMNSSRNLFVFGFSIYCGLAIPNWVNKNPEKLQTGILQLDQVIQVLLTTGMFVGGFLGFVLDNTIPGSTTPPCSCFYSSGSQVPGVGLTKLDSRCGHSCSRRQLHLPSSQPPFIVSSLIYRKSKNIEEETPF

SEQ ID NO: 22121 - protein, 481 aa, Mus musculus
QHYLTCFSGTIAVPFLLADAMCVGDDQWATSQLIGTIFFCVGITTLLQTTFGCRLPLFQASAFAFLAPARAILSLDKWKCNTTEITVANGTAELLEHIWHPRIQEIQGAIIMSSLIEVVIGLLGLPGALLRYIGPLTITPTVALIGLSGFQAAGERAGKHWGIAMLTIFLVTDYGYYARTDARKGVLLVAPWFKVPYPFQWGMPTVSAAGVIGMLSAVVASIIESIGDYYACARLSCAPPPPIHAINRGIFVEGLSCVLDGIFGTGNGSTSSSPNIGVLGITKVGSRRVIQYGAALMLGLGMVGKFSALFASLPDPVLGALFCTLFGMITAVGLSNLQFIDLNSSRNLFVLGFSIFFGLVLPSYLRQNPLVTGITGIDQILNVLLTTAMFVGGCVAFILDNTIPGTPEERGIKKWKKGVSKGSKSLDGMESYNLPFGMNIIKKYRCFSYLPISPTFAGYTWKGFGKSENSRSSDKDSQATV

SEQ ID NO: 22122 - protein, 611 aa, Mus musculus
MSRSPLHPIPLLSEGYQDTPAPLPPLLPPLQNPSSRSWASRVCGPSTWGLSCLLALQHFLVLASLLWASHLLLLHGLPPGGLSYPPAQLLASSFFSCGLSTVLQTWMGSRLPLIQAPSLEFLIPALVLTNQKLPLTTKTPGNASLSLPLCSLTRSCHGLELWNTSLREVSGAVVVSGLLQGTIGLLGVPGRVFPYCGPLVLAPSLVVAGLSAHKEVAQFCSAHWGLALLLILLMVVCSQHLGSCQIPLCSWRPSSTSTHICIPVFRLLSVLAPVACVWFISAFVGTSVIPLQLSEPSDAPWFWLPHPGEWEWPLLTPRALAAGISMALAASTSSLGCYALCGQLLRLSPPPPHACSRGLSLEGLGSVLAGLLGSPLGTASSFPNVGTVSLFQTGSRRVAHLVGLFCMGLGLSPRLAQLFTSIPLPVLGGVLGVTQAVVLSAGFSSFHLADIDSGRNVFIVGFSIFMALLLPRWLREAPVLLNTGWSPLDMFLRSLLAEPIFLAGLLGFLLENTISGTRAERGLGQRLPTSFTAQEIQMLQQSRRKAAQEYGLPLPIRNLCSCIPQPLHCLCPMPEDSGDEGGSSKTGERADLLPNSGESYSTASREGVRSQ

SEQ ID NO: 22123 - protein, 611 aa, Mus musculus
MSRSPLHPIPLLSEGYQDTPAPLPPLLPPLQNPSSRSWASRVFGPSTWGLSCLLALQHFLVLASLLWASHLLLLHGLPPGGLSYPPAQLLASSFFSCGLSTVLQTWMGSRLPLIQAPSLEFLIPALVLTNQKLPLTTKTPGNASLSLPLCSLTRSCHGLELWNTSLREVSGAVVVSGLLQGTIGLLGVPGRVFPYCGPLVLAPSLVVAGLSAHKEVAQFCSAHWGLALLLILLMVVCSQHLGSCQIPLCSWRPSSTSTHICIPVFRLLSVLAPVACVWFISAFVGTSVIPLQLSEPSDAPWFWLPHPGEWEWPLLTPRALAAGISMALAASTSSLGCYALCGQLLRLSPPPPHACSRGLSLEGLGSVLAGLLGSPLGTASSFPNVGTVSLFQTGSRRVAHLVGLFCMGLGLSPRLAQLFTSIPLPVLGGVLGVTQAVVLSAGFSSFHLADIDSGRNVFIVGFSIFMALLLPRWLREAPVLLNTGWSPLDMFLRSLLAEPIFLAGLLGFLLENTISGTRAERGLGQRLPTSFTAQEIQMLQQSRRKAAQEYGLPLPIKNLCSCIPQPLHCLCPMPEDSGDEGGSSKTGERADLLPNSGESYSTASREGVRSQ

SEQ ID NO: 22124 - protein, 505 aa, Mus musculus
MGSRLPLIQAPSLEFLIPALVLTNQKLPLTTKTPGNASLSLPLCSLTRSCHGLELWNTSLREVSGAVVVSGLLQGTIGLLGVPGRVFPYCGPLVLAPSLVVAGLSAHKEVAQFCSAHWGLALLLILLMVVCSQHLGSCQIPLCSWRPSSTSTHICIPVFRLLSVLAPVACVWFISAFVGTSVIPLQLSEPSDAPWFWLPHPGEWEWPLLTPRALAAGISMALAASTSSLGCYALCGQLLRLSPPPPHACSRGLSLEGLGSVLAGLLGSPLGTASSFPNVGTVSLFQTGSRRVAHLVGLFCMGLGLSPRLAQLFTSIPLPVLGGVLGVTQAVVLSAGFSSFHLADIDSGRNVFIVGFSIFMALLLPRWLREAPVLLNTGWSPLDMFLRSLLAEPIFLAGLLGFLLENTISGTRAERGLGQRLPTSFTAQEIQMLQQSRRKAAQEYGLPLPIKNLCSCIPQPLHCLCPMPEDSGDEGGSSKTGERADLLPNSGESYSTASREGVRSQ

SEQ ID NO: 22125 - protein, 592 aa, Rattus norvegicus
MAIYTTENGIAEKSSLAETLDSTGSLDPQRSDMIYTIEDVPPWYLCIFLGLQHYLTCFSGTIAVPFLLADAMCVGDDQWATSQLIGTIFFCVGITTLLQTTFGCRLPLFQASAFAFLAPARAILSLDKWKCNTTEITVANGTAELLEHIWHPRIQEIQGAIIMSSLIEVVIGLLGLPGALLRYIGPLTITPTVALIGLSGFQAAGERAGKHWGIAMLTIFLVLLFSQYARNVKFPLPIYKSKKGWTAYKLQLFKMFPIILAILVSWLLCFIFTVTDVFPSNSTDYGYYARTDARKGVLLVAPWFKVPYPFQWGMPTVSAAGVIGMLSAVVASIIESIGDYYACARLSCAPPPPIHAINRGIFVEGLSCVLDGVFGTGNGSTSSSPNIGVLGITKVGSRRVIQYGAALMLGLGMIGKFSALFASLPDPVLGALFCTLFGMITAVGLSNLQFIDLNSSRNLFVLGFSIFFGLVLPSYLRQNPLVTGITGIDQVLNVLLTTAMFVGGCVAFILDNTIPGTPEERGIKKWKKGVSKGNKSLDGMESYNLPFGMNIIKKYRCFSYLPISPTFAGYTWKGFGKSENRRSSDKDSQATV

SEQ ID NO: 22126 - protein, 604 aa, Rattus norvegicus
MKAQEDPGSSKQHECPDSAGTSTRDQQAPLPAEPKFDMLYKIEDVPPWYLCILLGFQHYLTCFSGTIAVPFLLAEALCVGRDQHMISQLIGTIFTCVGITTLIQTTVGIRLPLFQASAFAFLVPAKAILALERWKCPPEEEIYGNWSMPLNTSHIWHPRIREVQGAIMVSSVVEVVIGLLGLPGALLSYIGPLTVTPTVSLIGLSVFQAAGDRAGSHWGISACSILLIVLFSQYLRNLTFLLPVYRWGKGLTLFRIQIFKMFPIVLAIMTVWLLCYVLTLTDVLPADPTVYGFQARTDARGDIMAISPWIRIPYPCQWGLPTVTVAAVLGMFSATLAGIIESIGDYYACARLAGAPPPPVHAINRGIFTEGVCCIIAGLLGTGNGSTSSSPNIGVLGITKVGSRRVVQYGAGIMLILGAIGKFTALFASLPDPILGGMFCTLFGMITAVGLSNLQFVDMNSSRNLFVLGFSMFFGLTLPNYLDSNPGAINTGVPEVDQILTVLLTTEMFVGGCLAFILDNTVPGSPEERGLIQWKAGAHANSETLASLKSYDFPFGMGMVKRTTFFRYIPICPVFRGFSKTENQPAVLEDAPDNTETGSVCTKV

SEQ ID NO: 22127 - protein, 864 aa, Rattus norvegicus
MESTVDALDSHRLKLLDVIASVTAASVVTLSKCVCDFYVDAWDLIYTSGVTLLLRVIREQLQLLDVPTVQILYEAVVTLSASACIPPRPGLVLFHDAYFWIGLSFDELCPALDELKQVENFSTNTAATFPGPSEAIVDSSRGRQTHVPVAPLLRPLTPRSSLLSRLRSCLLAAPEPLRSMPSPNSSKRSPNSVSSQPFLSSRGRQKESSLWLPPVAMNSAVCSLESPNSRRGDGALSSHTEDQGKTKDRQQKDFSSSHLAYGILDRPPWYLCIFLGIQHFLTALGGLVAVPLILAKDLCLQHDPLTQSYLISTIFFVSGICTLLQVLLGVRLPILQGGTFAFVAPSLAMLSLPAWKCPEWTLNASLVNTSSPEFTEEWQKRIRELQGAVMVASCIQMLVGFSGLIGYLMRFIGPLTIAPTISLVALPLFDSASNDAGTHWGISALTIFLIVLFSQYLKNVMVPVPVYGGGKRCHISKFNLFQVFPVLLALCLSWLFCFVLTVTNTFPESPTAYGYMARTDTKGSVLSQAPWFRFPYPGQWGLPTISLAGVFGIIAGVISSMVESVGDYHACARLVGAPPPPKHAINRGIGIEGLGCLLAGAWGTGNGTTSYSENVAQCGTLGTAARAASEVQYSSVKGAGPDAQGIYLPWFSYPSSLGVQVGSRMVIVAAGCVLLLMGMFGKIGAAFATIPTPVIGGMFLVMFGIISAVGISNLQYVDMNSSRNLFVFGFSIFCGLAVPNWVNKNPEKLQTGILQLDQVIQVLLTTGMFVGGFLGFVLDNTIPGSLEERGLLAWGEIQEDSEETPKASKVYGLPWGIGTKFCTSSCTRILPFWPRIDHHGDECPVSRLKQKQQAYWILFCGPAG

SEQ ID NO: 22128 - protein, 1003 aa, Rattus norvegicus
MDLAGLLLDEEGTFSLSGFQDFTFLPGHQKLSARIRRRLYYGWDLETDCSLEELSSPVADITVELLQKAAPSPIRRLQKKYVAHVSREACISPCAMMLALVYIERLRHRNPDYLQHVSSSDLFLISMMVASKYLYDEGEEEEVFNDEWGAAGGVAVPTLNALERSFLSAMDWRLYTDPREIFEVLSWLESCVAEQQGRRRGWYTYTDLCVLLEQPMWQLSLGSLCQRLVKLSCLLAVAYVSSVALAVASMAVIHQSLGLSSSPSPSPPELTLVPKNLLQPCIPAPVPQCLTNVSSCLEDSVELPSLWGSLLDPLTPPLMPPPDPPAPPTPFHKCPFCQKFQRNPPNCRACHQPNRSLLPLLGLLVWAFHLGAQLSSGSTAFPGLDISALGLPPAAASQSPPRRALIPTCSAPGFQFLLMWHVYGPADLDGQQAASNPGSVPRVSYPCTGADKPEATSDDQDTWKCLTRSCHGPELWNTSLREVSGAVVMSGLLQGTMGLLGVPGRVFPYCGPLVLAPSLVVAGLSAHKEVAQFCSAHWGLALLYAHPAHGGMLPALGVLPGTPLLLEASFNLFNSHLYSYLPTPFGEWEWPLLTPKALAAGISMALAASTSSLGCYALCGQLLHLSPPPPHACSRGLSLEGLGSVLAGLLGSPLGTASSFPNVGTTGSRRVAHLVGLFCMGLGLSPRLAQLFTNIPLPVLGGVLGVTQAVVLSAGFSSFHLADIDSGRNVFIVGFSIFMALLLPRAFLQMEELEQGLLMQPWAWLQLAENSLLAKASITKHGYALLISDLQQVWHEQVDTLEVSQRAKELNKRLTAPPAAFLHHLDEVLRPLFKDSAHQDAAHPSKATFSCDRGEEVLILRVRSELSGLPFNWHFHCLPASSLLVSQHLICPLMGVSLALHSHVRELAALLRMKDLEIQAYQESGAVLSRGRLKTEPFEENSFLEQFMVEVFFKMDVEFLHQVFSCDSDHCHIGVFHSTESEIQVWLSPMKDRLICAQLLLAV

SEQ ID NO: 22129 - protein, 332 aa, Cavia porcellus
TIAVPFLLAEALCVGRDQHMVSQLIGTIFTCVGVTTLIQTTLGIRLPLFQASALAFLVPAKAILALEKWKCPPEEEIYGNWSLPLNTSHIWHPRIREIQGAIMVSSLVEVVIGLMGLPGALLNYIGPLTVTPTVSLIGLSVFQAAGDRAGSHWGISACSILLIVLFSQYLRNVTFLLPGYRWGKGLTFFRIQIFKMFPIVLAIMTVWLLCYVLTLTDVLPVDPTDYGFQARTDARGDIITISPWVRIPYPCQWGVPTVTMAAVLGMFSATLAGIIESIGDYYACARLAGAPPPPVHAINRGIFTEGICCIIAGLLGTGNGSTSSSPNIGVLG

SEQ ID NO: 22130 - protein, 425 aa, Thermoanaerobacter tengcongensis
MPNKVYEIEETPPIKQMVPLSLQHVFAMFGATILVPLLTGLDPSVTLFTSGLGTLIFHLMTKGKVPAYLGSSFAFIAPIIAATKQFGLKGAFFGMFAAGLVYVVVFIIISLTGIDWLEKLLPPVVVGPVVMIIGLSLAPVAIAQAQKDLATALFTAALIIIFSMFGKGFIKVIPILLGTIGGYIFAITRGLVDFGPVAKASWIAIPKFSFLTGHTPEVAWGAVALVAPLALVAIIEDLGHVLVIGNIVERDLIKNPGFHRVMLGNGLATSIAALFGGPPSTTYGENIGVLAITRVYSSKVIQGAAIIAILLSFIQKIGALIEVIPQAVMGGVTIILFGMIAAAGMRTLVENKVDFSDSRNLIIASVILTLGVGGIKIPLGNFVFEGIGPATLAGILLNLVLPKINLGEEKMTEKVKSSKEAVQKA

SEQ ID NO: 22131 - protein, 445 aa, Ralstonia metallidurans
METLLYKVEDRPPILTTVLLAAQHLLAALGGIIAVPLVLGGALKLPPDQIVALVNAALLGSGIVTIIQCKGVGPVGIRLPCVMGTSFTFVGAGISVGLEHGVPGILGASLAGSLVMIVGSFFMPTIRKLFPHTVTGVVVTMIGLSLTPVAIDWAAGGAGSANYAAPGSLAIAGIVLLLVIGFVQWGKGIVSASAVVLGIMIGYLICLALGMVDFSQLHDAPVFALPQPASFGMKFPISGIAAMSLAFLVTIVETTGTFMALGSATRTPMPGKTLARGILCDGVGSAFAALLSSPPVSTFAQNVGVVSLTGVASRHVVALTGGMLVLAGLFPVLGALVVTIPQPVLGGAGLMMFAMIVSAGIRMLGHSAPTKRNSLIIAVSIGCGLAVTIRPDLLAKLPAFVKEVFGSGITVGALVAVVLNLCLPGREVDAIDEEVEGETLVQELA

SEQ ID NO: 22132 - protein, 526 aa, Ralstonia metallidurans
MPGQRPRPPPADASGSAPGSTIAGWYALCLRHEVPFARPGVRSIMRNATADSGRRAVQSDKTIEQDQPTGVPGVNRAAAEKGENNMANGQGNAGGEGFFPKWRLKTEGVIGPDERLPAGQTLLAGIQHVVAMFGSTAIAPILMGFHPNIAILFSGIGTLLFFLFVRGRVPSYLGSSFAFIAVVIAATGYAGSGPNPNIPLALGGIIAAGALYTVIGLIVQAVGYGWVEKLMPPVVTGAIVAAIGLNLAPVAVKAVSAAPLDTWVGLLTVLAVGLIAVRAPGMLGRLPVLLGGLAGYLAYYIATNLMGLGKAIDFSGVAAANWFGMPEFTAPVFQANAMLLIAPVAIVLVAENLGHIKAIGVMTGRNLDPYIGRAFIGDGVATMLSAAGGGTGVTTYAENMGVMAVTKIYSTLIFVVAAAVAILLGFSPKFGALILTIPGPVIGGLTIVVFGLISATAGRIWVQNHVDFSSSRNLITVGATLTVAAGDLTLKLGGLTLGGIGTATFGAILLYHLLGKGRTQEQGLTH

SEQ ID NO: 22133 - protein, 403 aa, Neisseria meningitidis MC58
MNQLKLAVSGAQILFVAFGAMVLVPLLTGLNPALALLGAGLGTLLFQITTKRKVPIFLGSSFAFIAPIIYSVGEWGLPSTMFGLFAAGFMYFVFAALIRWRGLAAVHKLLPPVVIGPVIMVIGLSVAVAASSMAMGQADGKQVIDYTDSLILSGFTFAVTAIVSVFGSRMMKLIPILIGVASGYVLALLMGLVDTASIAHAPWFAVPHFETPQINWQAALFMLPVAVAPAIEHIGGIMAIGNVTGKDYTKDPGLDKTLAGDGLGVCVAGLIGGPPVTTYGEVTGAVMITKNSNPVIMTWAAVFAVCMAFFGKFNAFLASIPMPVMGGIMLLLFGTIASLGVKTLIDAKVDLMLPKNLVIVSSVLTTGIGGMTLKLGSFSFAGVGLCAVLAIMLNSLLPDPKES

SEQ ID NO: 22134 - protein, 403 aa, Neisseria meningitidis Z2491
MNQLKLAVSGAQILFVAFGAMVLVPLLTGLNPALALLGAGLGTLLFQITTKRKVPIFLGSSFAFIAPIIYSVGEWGLPSTMFGLFAAGFMYFVFAALIRWRGLAAVHKLLPPVVIGPVIMVIGLSVAVAASSMAMGQADGKQVIDYTDSLILSGFTFAVTAIVSVFGSRMMKLIPILIGVASGYVLALLMGLVDTASIAHAPWFAVPHFETPQINWQAALFMLPVAVAPAIEHIGGIMAIGNVTEKDYTKDPGLDKTLAGDGLGVCVAGLIGGPPVTTYGEVTGAVMITKNSNPVIMTWAAVFAVCMAFFGKFNAFLASIPMPVMGGIMLLLFGTIASLGIKTLIDAKVDLMLPKNLVIVSSVLTTGIGGMTLKLGSFSFAGVGLCAVLAIMLNSLLPDPKES

SEQ ID NO: 22135 - protein, 480 aa, Deinococcus radiodurans
MRFPAQALSSAHSKLSHPRRERVTATPSPTVHPVDEVPAAQNLLVFGLQHVMSMYAGIVAVPLILAGALGLDATTAARIVSASFFMCGLATLVQTLGVGPFGAKLPIVQGTTFAAVGTMILVGKEFGLPGIYGAVIAGGLFTILLAPYFSRLLRFFPPVVSGTVITMIGISLLPVAFNWAGGGVGNPNFGSPGNLGLAAITLLIVLLISRFGRGYLGRIAVLLGLVIGSVIAALFGQVNGAPISSAAWVGFTPPLAFGAPTWHLVPILSMLLVMLVVMVETTADLLAIGEITGKKVGPREVAAGLRADGLSTAVGGLFNSFPFTAFAQNVGLVRFTGIKSRFVVAAAGVILLLMGFFPKLSALVASIPLPVLGGAGLVLFASVAVSGIQTLAKVDLSDTRNLTVVSVSLALGLIPSTVPGLYAHLPAQAQLFLGSGITAASLCAILLNILFNIVGSDRPRPSATATVAEHAPEPGDLAEH

SEQ ID NO: 22136 - protein, 496 aa, Deinococcus radiodurans
MHLAVMARAGQCSSSAWGGLDARDFYRREARALRARRPWRSAFLRWTWSSEKKATAEACFCLSSPPPAHYTFPMTQTAAPPPLPDLPPQRRVVLGLQHSIAMFGSTVLVPILVGLSPSVALFGAGVATLIFHLLTRGQVPIFLGSSFAFIAPTALVIKEMGPAAAAGGLIAAGLMYVLFSGLVKLFGTERLLRVFPPVVTGPVIIVIGLGLSSVAVDQAKTNWGLALVTLLAAIIASIYGRGLFRMIPILIGVVTGYLVALATGQVGAKALADIAAAPLLGLPPFHGPALDWRAVAIIAPVAIVTFIEHVGDVVVNGRVVGKNFLANPGLSRTLLADGIANMSSAVMGGPAATTYAENTGVLALTRVYDPRVIQIGAVFAILFGCSPKLAAVLQGLPQGVLGGVSILLFGMIASVGIRTLAEAQVDFAHSRNLIIVSLILVLGLGGASFPLNVAGTKLELHGMALAALVGIVANLLLPRQRPEISGKADGMGPGVG

SEQ ID NO: 22137 - protein, 368 aa, Streptococcus thermophilus
MQNKEKHSQVAILGLQHLLAMYSGSNLVPIMIAGALGYSAHQLTYLISTDIFMCGVATFLQLQLNKHFGIGLPVMLGVAFQSVAPLNMIGKSHGSGAMFGALIISGIYVIFVSGVFSKFANLFPSIVTGSVITTIGLTSLSLSLSEIWGTTLTNQLVKAFFLAAITVLIILLVNIFTKGFIKSISILIDLVIGTVIAASMGLIDFSPVAAEPVVHVPTPFYFGMPKFELSSIIMMCIIATVSMVESTGVYLALSDITKDPIDSTRLRNGYRAEGMAVLLGGLFNTFPYTGFSQNVGLVKLSGIKKRLPIYYTAGFLVLLGLLPKFGAWLKSSQAPSTWWCYASHVQFCFYFKGCKFLTRVDFANNEHN

SEQ ID NO: 22138 - protein, 475 aa, Burkholderia fungorum
MVETDDMQSNAVHPCDQRLPAGQLLTLGIQHVLVMYAGAVAVPLIIGAALKLPKDQIAFLISADLFSCGIATLIQTLGLWIFGIRLPVIMGCTFAAVGPMVAIGTNPSLGILDIFGSTIAAGVVGILLAPAVGKLLRFFPPVVIGVVISVIGLSLMEVGINWAAGGVGNPDYGNPVYLGLSLIVLMLILLINKFARGFLANISVLLGIVAGFVIALALGRVNMEGVTHAPWVGFIMPFHFGLPHFDPLSIATMVTVMFVTFIESTGMFLAVGDMVDRPVDQKTLVRGLRVDGLGTLIGGIFNSFPHTSFSQNVGLIGVTGVKSRFVCAMGGVILVLLGLFPKMAQVVASVPAFVLGGAGIVMFGMVAANGIKVLSKVDFVKNHHNLFIVAVSIGLGLVPVVSPHFFSKLPPALSPLLHSGILLASVSAVVLNLIFNGVKSEKKARCEIRSAGHDFDGRGGNEPRRDEMLRAADLH

SEQ ID NO: 22139 - protein, 435 aa, Burkholderia fungorum
MADSYFPRWRAQPAAAEGRIVGTDERLAWPQMFAMGVQHVVAMFGSTVLAPLLMGFDPNLCIFMSGIGTLLFFVLVGGRVPSYLGSSFAFIGLVIAVTGYGGHGPNLNIPVALGGIIACGVVYAVIGLIVSAVGTRWIETLMPPVVTGAIVCVIGLNLAPIAVHGVSGSNFDSWMALVTVLCVGAVAVFARGMLQRLLILVGLLMAYVIYAIVTNGLGMGKPIDFTIVANAAWFGMPHFTAPVFNMQAMTLLAPIAVILVAENLGHIKAVSAMTGQNLDRYVGRAFLGDGLATIVSGFAGGTGVTTYAENIGVMAVTKIYSTLVFVIAAVIALVLGFSPKFGAVIQTIPGPVLGGVSIVVFGLIAVTGARIWVVNKVDFSDNRNLIVAAVTLVLGAGDFSLKLGGFGLGGIGTATFGAIILYALLRRKPVQGPVA

SEQ ID NO: 22140 - protein, 392 aa, Enterococcus faecium
MFGATVLVPILVGIDPGIALVSSGLGTLVYLFTTKGKIPAYLGSSFAFIAAMQLLMKTDGYPAIAQGAVTTGLVYLIVALIIKKIGSAWLDKILPPIVVGPVIMVIGLGLAANAATNAMYNQGTYDFKYIAVALITLGLTIFFNMWLRGFLGLIPILLGIISGYIVALLFGIVDTKPIVDAAWFAVPNFEIPFVQYEPKLYLGAITTMAPIAFVTMTEHIGHLMVLNKLTKRNFFEEPGLHKTLTGDGLAQIVAAFVGGPPVTSYGENIGVLAITRVHSVFVIGGAAVFAVILGFVGKLSALILSIPGPVISGISFILFGVIAASGMKILIENKIDFDKKKNLLIASVILVVGIGGLVFEVGTFTLSAMALATVLGIILNLILPETSRSEEN

SEQ ID NO: 22141 - protein, 430 aa, Lactococcus lactis
MHDNDIILKVDEKPAASQWFGLSFQHLFAMFGSTVLVPILVGINPAIALLSSGLGTLAHMSVTKFKVPAYMGSSFAYIGAMTLLMKNGGMPAIAQGAMTGGLVYLIVALIVKFAGKGWIDKVLPPIVVGPIVMVIGLSLAPTAINDAMYTDVANLKGYSLAYIIIALITVLSIVVYSIYGKGFLSVVPILLGIITGYVAAMIIGKITGMNIVSFTGISQAKWLTLPPMEIPFASYKWAFYPSAILTMAPIAFVTMTEHFGHIMVLNSLTKKDYFKEPGLEKTLTGDGLAQIIAGFIGAPPVTSYGENIGVMAITKIHSIYVIAGAAVLAIVVSFVGKITALLQSIPAPVIGGASIALFGVIAASGLKILVENKVDFDIKRNLLISSVVLVIGIGGMIINITQNLQISSVAIATILGIVLNLVLPKDASEI

SEQ ID NO: 22142 - protein, 434 aa, Lactococcus lactis subsp. lactis
MSQKNEQSQEQSNSKSAVLGLQHLLAMYSGSILVPIMIAGALNYSATQLTYLISADIFMCGLATFLQLQLRKHFGIGLPVVLGVAFQSVAPLIIIGQRHGSGAMFGSLMVAGVFVILVSGIFSKIRKLFPPIVTGSVITTIGLSLIPVAIGNMGNNVDKPTIQSLILAVSTIVIILLINIFTTGFIRSIAILIGLIAGTILAASMGLVDFSVVSQAPWAHLPQPFYFSAPKFYLADSLMMIIIAIVSLVESTGVYLALADITGENLDEKRLRNGYRAEGFAVFLGGVFNTFPYTGFSQNVGLVQLSGIKTRKPIYFTAGFLIVLGLIPKFAAVAQLIPTPVLGGAMLIMFGMVATQGIRMLAKVEFEGNQNLLIAAVAIAMGVGFNSTNLFTALPSFIQPFVSNGIVMSTVSAIILNLVFNHGKKDELVTDETK

SEQ ID NO: 22143 - protein, 430 aa, Lactococcus lactis subsp. lactis
MHDNDIILKVDEKPAASQWFGLSFQHLFAMFGSTVLVPILVGINPAIALLSSGLGTLAHMSVTKFKVPAYMGSSFAYIGAMTLLMKNGGMPAIAQGAMTGGLVYLIVALIVKFAGKGWIDKVLPPIVVGPIVMVIGLSLAPTAINDAMYTDVANLKGYSLAYIIIALITVLSIVIYSIYGKGFLSVVPILLGIITGYVAAMIIGKITGMNIVSFTGISHAKWLTIPPMEIPFANYKWAFYPSAILTMAPIAFVTMTEHFGHIMVLNSLTKKDYFKEPGLEKTLTGDGLAQIIAGFIGAPPVTSYGENIGVMAITKIHSIYVIAGAAVLAIVVSFIGKITALLQSIPAPVIGGASIALFGVIAASGLKILVENKVNFDIKRNLLISSVVLVIGIGGMIINITQNLQISSVAIATILGIVLNLVLPKDPSEI

SEQ ID NO: 22144 - protein, 432 aa, Bacillus caldolyticus
MNKPVLDIQDRPTVGQWITLSLQHLFAMFGATILVPYLVGLDPSIALLTSGLGTLAFLLITKWQVPAYLGSSFAYIAPIIAAKTAGGPGAAMIGSFLAGLVYGVVALIIKKAGYRWVMKLLPPVVVGPVIIVIGLGLAGTAVGMAMNGPDGKYSLLHFSVALVTLAATIVCSVLARGMLSLIPVLVGIVVGYLYALAVGLVDLSKVAAAKWFEWPDFLIPFADYPVRVTWEIVMLMVPVAIVTLSEHIGHQLVLSKVVGRDLIQKPGLHRSILGDGTATMISALLGGPPKTTYGENIGVLAITRVYSVYVLAGAAVIAIAFGFVGKITALISSIPTPVMGGVSILLFGIIASSGLRMLIDSRVDFGQTRNLVIASVILVIGIGGAVLKISDSFQITGMALSAIVGVLLNLILPGRPQAAENLFEENQSDHVA

SEQ ID NO: 22145 - protein, 435 aa, Clostridium acetobutylicum
MEEKIKKETQIELSYGVEDKPELLSRILLAFQHIFAAFGGIIVVPIIVASSLKLDAKTSTALLSAAILMAGVATLIQSKGVYSVGARVACIMGTDITFVAPAAVVGKKFGLAGIFGATILGAVIVVILSFFIKYIMKFFPPIVTGIVVCLIGLTLLPVSIDWAAGGSGTKNYGSLQNISIALIVMVITLLINHYGRGLVSSASILIGMVVGYIICIPLGMVNFSTISNLKIISIPSIFQYGVKFNISALLPFIPAYFVSVISTVGNLRAINEISGIKDDSKISKGVLSDGIGSILAGMFGAMPNTSFSQNVGLIPLTKVASRYVTLVAGIILMVLGLVPKFSGIINIMPQPVLGGVGIVMFGTVAAAGIQTLSHVNLNNRNILIIATSIGLGLGVTFRPEILSSLPESLKMIFSSGISTGTIAALVLNLILKEKK

SEQ ID NO: 22146 - protein, 430 aa, Clostridium acetobutylicum
MKNFIDVEEKLPIGKTIPLSFQHLFAMVGATILVPILTHMNPSIGLFCSGVGTILYILCTKAKLPAYIGSSFAFITPMVTASQNYGPNAMLSGVISAGIVYIIVSTIIRYTGVNWLNKILSPVVVGSVVIVIGLSLASSAIGWAGLDPHQAITSGASRTSWIVVSMVTLAVGVIGSMYFKGFLGVIPILIAIICGYVLALLLGVVPDKTIHTILSAKLFEIPPFMTPKFNINAMIIMAPVSFVTIAEHIGHVYVTNNVVGRDFTKEPGIHRSMLGDGVATIFAGLVGGPPNTTYGENIGVMAITKVYSVWVIGIAAVIAIILSFIGPVASVIANMPRPVMGGVSILLFGIIASSGYRMFVDGKIDFSLKKNLIVTSVIIVLGIGGASINFKFNGSPVVISGVALATIVGIVLNLILPEKSLSERQEEKTA

SEQ ID NO: 22147 - protein, 505 aa, Escherichia coli O157:H7 EDL933
  unsure (1)..(505): unsure at all Xaa locations
MCLDSFINVNGCFLLWRAKGETLMSAIDSQLPSSSGQDRPTDEVDRILSPGKLIILGLQHVLVMYAGAVAVPLMIGDRLGLSKEAIAMLISSDLFCCGIVTLLQCIGIGRFMGIRLPVIMSVTFAAVTPMIAIGMNPDIGLLGIFGATIAAGFITTLLAQLIGRLMPLFPPLVTGVVITSIGLSIIQVGIDWAAGGKGNPQYGNPVYLGISFAVLIFILLITRYAKGFMSNVAVLLGIVFGFLLSWMMNEVNLSGLHDASWFAIVTPMSFGMPIFDPVSILTMTAVLIIVFIESMGMFLALGEIVGRKLSSHDIIRGLRVDGVXTMIGGTFNSFPHTSFSQNVGLVSVTRVHSRWVCISSGIILILFGMVPKMAVLVASIPQFVLGGAGLVMFGMVLATGIRILSRCNYTTNRYNLYIVAISLGVGMTPTLSHDFFSKLPAVLQPLLHSGIMLATLSAVVLNVFFNGYQHHADLVKESVSDKDLKVRTVRMWLLMRKLKKNEHGE

SEQ ID NO: 22148 - protein, 429 aa, Escherichia coli O157:H7 EDL933
MTRRAIGVSERPPLLQTIPLSLQHLFAMFGATVLVPVLFHINPATVLLFNGIGTLLYLFICKGKIPAYLGSSFAFISPVLLLLPLGYEVALGGFIMCGVLFCLVSFIVKKAGTGWLDVLFPPAAMGAIVAVIGLELAGVAAGMAGLLPAEGQTPDSKTIIISITTLAVTVLGSVLFRGFLAIIPILIGVLVGYALSFAMGIVDTTPIINAHWFALPTLYTPRFEWFAILTILPAALVVIAEHVGHLVVTANIVKKDLLRDPGLHRSMFANGLSTVISGFFGSTPNTTYGENIGVMAITRVYSTWVIGGAAIFAILLSCVGKLAAAIQMIPLPVMGGVSLLLYGVIGASGIRVLIESKVDYNKAQNLILTSVILIIGVSGAKVNIGAAELKGMALATIVGIGLSLIFKLISVLRPEEVVLDAEDADITDK

SEQ ID NO: 22149 - protein, 464 aa, Escherichia coli O157:H7 EDL933
MVRSQLSRADAPCLLTSLRRQLMAMFGLPHWQLKSTSTESGVVAPDERLPFAQTAVMGVQHAVAMFGATVLMPILMGLDPNLSILMSGIGTLLFFFITGGRVPSYLGSSAAFVGVVIAATGFNGQGINPNISIALGGIIACGLVYTVIGLVVMKIGTRWIERLMPPVVTGAVVMAIGLNLAPIAVKSVSASGFDSWMAVMTVLCIGLVAVFTRGMIQRLLILVGLIVACLLYGVMTNVLGLGKAVDFTLVSHAAWFGLPHFSTPAFNGQAMMLIAPVAVILVAENLGHLKAVAGMTGRNMDPYMGRAFVGDGLATMLSGSVGSSGVTTYAENIGVMAVTKVYSTLVFVAAAVIAMLLGFSPKFGALIHTIPAAVIGGASIVVFGLIAVAGARIWVQNRVDLSQNGNLIMVAVTLVLGAGDFALTLGGFTLGGIGTATFGAILLNALLSRRLVDVPPPEVVHQEP

SEQ ID NO: 22150 - protein, 422 aa, Staphylococcus aureus subsp. aureus Mu50
MKNLILSVQHLLAMYAGAILVPIIVGTSLKFTPEQIAYLVTVDIFMCGVATFLQANKVTGTGLPIVLGCTFTAVAPMILIGQTKGIDVLYGSLFLSGILVIIIAPFFSHLVKFFPPVVTGSVVTIIGINLMPVAMNYLAGGQGAKDYGDVKNILLGLMTLIIILVLQRFTTGFIKSIAILIGLVLGTIGAGLLGMVDINQVNHAGWLGIPVPFRFSGFSFDVTSTLVFFILAIVSLIESTGVYHALSEITGKKLERKDFRKGYTAEGLAIVLGSIFNSFPYTAYSQNVGLVSLSGAKKNNVIYGMVVLLLICGCIPKLGALANIIPLPVLGGAMIAMFGMVMAYGVSILGHIDFKNQNNLLIIAVSVGLGTGISAVPQAFKGLGEQFAWLTQNGIVLGAISAIILNFFFNGIKYKQTEENVK

SEQ ID NO: 22151 - protein, 435 aa, Staphylococcus aureus subsp. aureus Mu50
MQNDEMFERTVKPVLDVNEKPQPAQWAFLSLQHLFAMFGATVLVPFLTGLPISAALLASGIGTLLYILITKAQIPAYLGSSFAFITPIITGLSTHSLGDMLVALFMSGVMYVIIGILIKLSGTAWLMKLLPPVVVGPVIMVIGLSLAPTAVNMAMYENPGDMKGYNISFLIVAMITLLVTIVVQGFFKGFLSLIPVLVGIIVGYVVAIFMGIVKFDAIMSAKWIDFPHIYLPFKDYVPSFHLGLVLVMIPIVFVTVSEHIGHQMVLNKIVGRNFFEKPGLDKSIIGDGVSTMFASIIGGPPSTTYGENIGVLAITRIYSIYVIGGAAVIAIVLAFIGKFTALISSIPTPVMGGVSILLFGIIAASGLRMLVESKVDFANNRNLVIASVILVVGIGNLVFNLKEIGINLQIEGMALAALSGIILNLILPKEKKQNN

SEQ ID NO: 22152 - protein, 426 aa, Lactobacillus plantarum
MTKKAAFHNDEVVLDIHDRPKLGSWLGLSVQHLFSMFGSTVLVPILVGLNPGIALFSSGVGTLMYILITRGKIPAYMGSSFSFIVVMQSLMKTAGYPAIAQGTVAVGCVYLLVSLLVTLIGSDWIDKALPPIVVGPIVMVIGLSLAGTAAKDATMNGSSYDIKYFGVAMATMLLTVIFNMYLRGFMSLVPILLGIVCGYIIAVLVGIVDFSGVEKAQWFAMPAFQLPFISYHPGIYWGAILSMAPIAFVTMSEHMGHIMVLNKLTKRNFFKNPGLNHTLAGDGTASIIAGFVGGPPVTSYGENIGVLAITRVHSIYVLGGAAFFAIVFSFVGKLSALIESIPSPVIGGVSFLLFGVIASSGMRILIDNKVDFNQKRNLMIASAILVIGIGNAYLQLGSFQFSGLAVATVLGIVMNLVLPKTAVNEK

SEQ ID NO: 22153 - protein, 443 aa, Lactobacillus gasseri
MKKMPKDTFHNNDAILDVYEKPELGQGILLSMQHLFAMFGSTVLVPILVGINPSIALLSSGVGTLVHMLLTHFKIPAYLGSSFAFVATMQALMRQDGYPAIAQGAIAAGLVYVVVALVIAKVGSDWVNKVLPPIVVGPIIIVIGLSLATTAANDAMMKGTKYNLTYFGVAIFTLIMTLIFQMCFKGFTSLVSIMLGIICGYALSCVLGIVDFSGVAKAAWFSMPALDVPGISYHFKWYPAAILTMAPIAFVTMTEHMGHIMVLNSLTKRNFFKNPGLHRTMMGDGLSTIIAGFIGGPPTTSYGENIGVLAMTKVHSVWVLAGAAVFAIIFSFVGKVAAVIESIPMPVIGGISFLLFGTIASNGLKILVDDKIDFGEKRNMLIASVILVIGIGGAYLQLGSFQLTSVALCTIFGMLMNWILPKKAASEKALEAEKKEKEQKYFN

SEQ ID NO: 22154 - protein, 276 aa, Lactobacillus gasseri
MKHMQVNHKKAALLGLQHLLAMYSGAIAVPLLIGTALKFNSTQMTYLVSIDIFMCGLATALQLLRNRYFGIGLPVVLGCAIQAVAPLQMIGKKFTIGTMYGAIIVAGIFVFLVAGYFSKIKKLFPPVVTGSLITVIGLSLIPVSIQNLGGGNSAAKNFGDPKNLLTGFITVAIILALQVWGRGFIKSIAVLVGLIAGTLIASTLGMVSLTPVAQASWFHLPQPFYFGMPQFEWSSSLTMIIIALVSMVESTGVFFAIGDLLHKDISSDDLKKGYRA

SEQ ID NO: 22155 - protein, 451 aa, Pseudomonas putida KT2440
MSESRKAYIPIAPPREPLPLFQLILVGLQHVLLMYGGAIAVPLIIGQAAGLSREEVAFLINADLLVAGVATIIQSFGIGPVGIRMPVMMGASFAAVGSMVAMAGMPGVGLQGIFGATIAAGFFGMLIAPFMSKVVRFFPPLVTGTVITSIGLSLFPVAVNWAGGGHEAETFGSPIYLLVAGLVLAVILLINRFMRGFWVNVSVLVGMGLGYILAGSIGMVDLSGLNEAPWLQVVTPLHFGMPTFSLAPILSMCLVVVIIFVESTGMFLALGKVTDREVTPGMLRRGLLCDAGASFIAGFFNTFTHSSFAQNIGLVQMTGVRCRYVTIVAGALLILLSLLPKAAFLIASIPPAVLGGASIAMFGMVTATGIKILQEADIGDRRNQLLVAVSVGFGLIPVVRPEFFAQMPQWMEPITHSGIAMATVCALVLNVLFNILGGADRAMHNDVCHQH

SEQ ID NO: 22156 - protein, 505 aa, Pseudomonas putida KT2440
MTTSPSTSPAKRPEDENLGLGANLAYGLQHVLTMYGGIVAVPLILGQAAGLNGAEIGMLIAASLFAGGLATLLQTLGLPFFGCQLPLVQGVSFAGVATMGAILSSEGGGGLPGVLGAVMAASLIGFLITPVFSRITKFFPPLVTGIVITTIGLTLMPVAARWVMGGNSASPEFGSMANIGLAALTFAIVLLLSKLGSATISRLSILLAMVVGTLIAWALGMTDFSKVGEGPMFAFPTPFHFGMPEFHIAAILSMCIVIMVTLVETSADILAVGEIIDTKVDSKRLGNGLRADMASSILAPIFGSFTQSAFAQNVGLVAVTGVKSRYVVATGGVILVVLGLLPVMGRVIAAVPTPVLGGAGIVLFGTVAASGIRTLSKVSYKNNVNLIIVAASLGFGMIPIAAPTFYHHFPNWFETIFHSGISSAAIMAILLNLIFNHFTTGNSENQSVFAAAYERTIQYSDISALRDGDYFKDGKLFDAEGNEVPMLELDEHGNETVRRTAVAEH

SEQ ID NO: 22157 - protein, 421 aa, Pseudomonas putida KT2440
MQDGFNDPLWRQVVSGAQMLFVAFGALVLMPLITGLDPNVALFTAGIGTLLFQLVTGRQVPVFLASSFAFITPIILAKGQFGLAETMGGVMAAGFVYTFMGLMVKIKGTGFIDRMLPPVVIGPVIISIGLAMAPIAANMAMGKGGDGTALMPYKTAMLISMPALLTTLIVAVFGKGIFRLVPIISGVLVGFALSFAFGVVDTARIAAAPWLEIPNFTAPAFNWQAILFIVPVALAPAIEHIGGVIAVGSVTGRDYLKKPGLHRTLLGDGLATTAAGLFGGPPNTTYAEVTGAVMLTKNYNPKIMTWAAVFAITLAFIGKFGALLQSIPVPVMGGILCLLFGSIAAVGMNTMIRHKIDLGEARNLVIVSVTLVFGIGGVLIGSGDGPDDWGLKGIALCAIVAIALNLILPGNDSWKHKKLDV

SEQ ID NO: 22158 - protein, 427 aa, Streptococcus pyogenes M1 GAS
MTHSTKQEHSHSQSAVLGLQHVLSMYAGSILVPIMIAGALGYSARELTYLISTDIFMCGVATFLQLKLTKHTGVGLPVVLGCAFQSVAPLSIIGAQQGSGAMFGALIASGIYVILVAGIFSKIARFFPPIVTGSVITVIGLSLVGVAMGNMGDNVKEPTAQSMMLSLLTIVIILLVQKFTKGFVKSISILIGLVAGTLVSAMMGLVDTTPVVEASWIHVPTPFYFGMPTFEITSIVMMCIIATVSMVESTGVYLALSDLTNDQLDEKRLRNGYRSEGIAVFLGGLFNTFPYTGFSQNVGLVQISGIKTRRPIYYAAGILVVIGLLPKFRAMAQMIPSPVLGGAMLVLFGMVALQGMQMLNRVDFQKNEYNFIIAAVSISAGLGFNGTNLFASLPETAQMFLTNGIVIATLTSVVLNLVLNGKDKQDE

SEQ ID NO: 22159 - protein, 419 aa, Streptococcus pyogenes M1 GAS
MKDVIYDVEEVPKAGMLVGLSFQHLFAMFGATVLVPILVGIDPSVALLSSGLGTLAHLSVTKFKIPAYMGSSFAYIAAMQLLMKTNGIGAVAQGAMTGGLVYLIVALIVKAIGNDWIDNILPPIVVGPIVMVIGLSLASTAVNDVMLKNGNYNLTYLVIGLVTLLSVIFFNIYGKGIVAIVPLLLGLLVGYVVALLVGVLTGQEIVDFTNVAQAKWFSIPSVEIPFLTYGVKFYPSAILTMAPIAFVTMTEHFGHIMVLNSLTKRDYFKDPGLEKTLTGDGFAQIIAGFLGAPPVTSYGENIGVMALNKIFSVYVIAGAAVIAALLSFIGKVSALIQSIPTPVIGGISVALFGVIASSGLKILIESKVDMDNKKNLLIASVILVSGIGGLMLQVNGLQISGVAFSTLLGIILYQVLPEK

SEQ ID NO: 22160 - protein, 435 aa, Listeria innocua
MLGKGKIAALGFQHVLAMYAGAVIVPLLIGGALGFNGEEMTYLVSIDIFMCGIATLLQLTVNRFFGIGLPVVLGCAVQAIAPIILIGQDMGIGAIYGSIIVSGLFVLLIAPFFSKVVRFFPPVVTGSVVTVIGLTLIPVAINNLAGGAGAKDFGSMYNLGLGFGTLLLIILVYRFGQGFSKAIAVLIGLVGGSLFAALYKGISLGPVSEASWFHMPKPFYFGTPTFEWPAIITMILIALVSMVESTGVYFALSDITERKLTQKDLTRGYRAEGLAIMLGGVFNTFPYTAYSQNVGLVQLSGIKTRKVIYAAAGFLIVLGLIPKIGAVTTIIPTPVLGGAMVAMFGMVVAQGIKMLGKVNFTSQENLLIIACAVGVGLGVTVVPDLFNAFPSFVRLFTSNGIVAGSVTAITLNIIFNMIPHRKDKKLADPEPQHAE

SEQ ID NO: 22161 - protein, 435 aa, Listeria monocytogenes EGD-e
MLGKGKIAALGFQHVLAMYAGAVIVPLLIGGALGFNGEEMTYLVSIDIFMCGIATLLQLTVNRFFGIGLPVVLGCAVQAIAPIILIGQDMGIGAIYGSIIVSGLFVLLIAPFFSKVVRFFPPVVTGSVVTVIGLTLIPVAINNLAGGEGAKDFGSMYNLGLGFGTLLLIILVYRFGQGFSKAIAVLIGLVGGSLFAALYKGISLGPVSEASWFHMPKPFYFGTPTFEWPAIITMILIALVSMVESTGVYFALSDITERKLTQKDLTRGYRAEGLAIMLGGVFNTFPYTAYSQNVGLVQLSGIKTRKVIYAAAGFLIVLGLIPKIGAVTTIIPTPVLGGAMVAMFGMVVAQGIKMLGKVNFTSQENLLIIACAVGVGLGVTVVPDLFNAFPSFVRLFTSNGIVAGSVTAITLNIIFNMIPHRKDKKVADPEPQHAK

SEQ ID NO: 22162 - protein, 420 aa, Streptococcus pneumoniae TIGR4
MQTQEKHSQAAVLGLQHLLAMYSGSILVPIMIATALGYSAEQLTYLISTDIFMCGVATFLQLQLNKYFGIGLPVVLGVAFQSVAPLIMIGQSHGSGAMFGALIASGIYVVLVSGIFSKVANLFPSIVTGSVITTIGLTLIPVAIGNMGNNVPEPTGQSLLLAAITVLIILLINIFTKGFIKSISILIGLVVGTAIAATMGLVDFSPVAVAPLVHVPTPLYFGMPTFEISSIVMMCIIATVSMVESTGVYLALSDITKDPIDSTRLRNGYRAEGLAVLLGGIFNTFPYTGFSQNVGLVKLSGIKKRLPIYYAAGFLVLLGLLPKFGALAQIIPSSVLGGAMLVMFGFVSIQGMQILARVDFANNEHNFLIAAVSIAAGVGLNNSNLFVSMPTAFQMFFSNGIVVASLLAIVLNAVLNHKKK

SEQ ID NO: 22163 - protein, 439 aa, Streptococcus pneumoniae TIGR4
MGSFLMPKSEVYMKQESTVDLLLDVDQRPSAGKGILLSFQHVFAMFGATILVPLILGMPVSVALFASGVGTLIYMIATGFKVPVYLGSSFAFITAMSLAMKEMGGDVSAAQTGVILTGLVYVLVATSIRFVGTKWIDKLLPPIIIGPMIIVIGLGLAGSAVTNAGLVADGNWKNALVAVVTFLIAAFINTKGKGFLRIIPFLFAIIGGYLFALTLGLVDFTPVLKANWFEIPGFYLPFSTGGAFKEYNLYFGPEAIAILPIAIVTISEHIGDHTVLGQICGRQFLKEPGLHRTLLGDGIATSVSAFLGGPANTTYGENTGVIGMTRIASVSVIRNAAFIAIALSFLGKFTALISTIPNAVLGGMSILLYGVIASNGLKVLIKERVDFAQMRNLIIASAMLVLGLGGAILKLGPVTLSGTALSAMTGIILNLILPYENKD

SEQ ID NO: 22164 - protein, 420 aa, Streptococcus pneumoniae R6
MQTQEKHSQAAVLGLQHLLAMYSGSILVPIMIATALGYSAEQLTYLISTDIFMCGVATFLQLQLNKYFGIGLPVVLGVAFQSVAPLIMIGQSHGSGAMFGALIASGIYVVLVSGIFSKVANLFPSIVTGSVITTIGLTLIPVAIGNMGNNVPEPTGQSLLLAAITVLIILLINIFTKGFIKSISILIGLVVGTAIAATMGLVDFSPVAVAPLVHVPTPLYFGMPTFEISSIVMMCIIATVSMVESTGVYLALSDITKDPIDSTRLRNGYRAEGLAVLLGGIFNTFPYTGFSQNVGLVKLSGIKKRLPIYYAAGFLVLLGLLPKFGALAQIIPSSVLGGAMLVMFGFVSIQGMQILARVDFANNEHNFLIAAVSIAAGVGLNNSNLFVSMPTAFQMFFSNGIVVSSLLAIVLNAVLNHKKK

SEQ ID NO: 22165 - protein, 439 aa, Streptococcus pneumoniae R6
MGSFLMPKSEVYMKQESTVDLLLDVDQRPSDGKGILLSFQHVFAMFGATILVPLILGMPVSVALFASGVGTLIYMIATGFKVPVYLGSSFAFITAMSLAMKEMGGDVSAAQTGVILTGLVYVLVATSIRFVGTKWIDKLLPPIIIGPMIIVIGLGLAGSAVTNAGLVADGNWKNALVAVVTFLIAAFINTKGKGFLRIIPFLFAIIGGYLFALTLGLVDFTPVLKANWFEIPGFYLPFSTGGAFKEYNLYFGPEAIAILPIAIVTISEHIGDHTVLGQICGRQFLKEPGLHRTLLGDGIATSVSAFLGGPANTTYGENTGVIGMTRIASVSVIRNAAFIAIALSFLGKFTALISTIPNAVLGGMSILLYGVIASNGLKVLIKERVDFAQMRNLIIASAMLVLGLGGAILKLGPVTLSGTALSAMTGIILNLILPYENKD

SEQ ID NO: 22166 - protein, 422 aa, Staphylococcus epidermidis ATCC 12228
MKNFILSVQHLLAMYAGAILVPIIVGTSLKFSAEEIAYLVTVDIFMCGVATFLQANKVTGTGLPIVLGCTFTAVAPMILIGQTKGLDVLYGSLLISGILVVLIAPFFSYLVKFFPPVVTGSVVTIIGINLMPVAMNYLAGGEGAKNYGDTKNLILGGVTLLIILILQRFTKGFLKSIAILIGLAIGTALAGIFGMVDIKQVGDAHWFGFPVPFRFSGFGFDVSSILVFFIVAVVSLIESTGVYHALSEITGRKLERKDFRKGYTAEGLAIILGSIFNAFPYTAYSQNVGLVSLSGAKKNNVIYGMVILLLICGCIPKLGALANIIPLPVLGGAMIAMFGMVMAYGVSILGNINFQNQNNLLIIAISVGLGAGISAVPQAFKGLGEQFAWLTQNGIVLGAISAIILNFFFNGIKYKQTEENVK

SEQ ID NO: 22167 - protein, 435 aa, Staphylococcus epidermidis ATCC 12228
MENEQMFERTVQPVLDVKDKPKPAQWAFLSLQHLFAMFGSTVLVPFLTHLPISAALLASGIGTLLYILITKAKIPAYLGSSFAFITPIITGLSTHSLGDMLVALFMSGLMYVIIGIFIKLSGTHWLMHLLPPVVVGPVIMVIGLSLAPTAVNMAMFENSAEMKGYNLSYLIVALITLAVTIIVQGFFKGFLSLIPVLIGIIVGYIVSIFMGIVKFAPIAQAKWIDFPHIYLPFKDYTPSFHLGLILVMIPVVFVTVSEHIGHQMVINKIVGRNFFENPGLDKSIIGDGVSTMFASMIGGPPSTTYGENIGVLAITKIYSIYVIGGAAVIAIILAFIGKFTALISSIPTPVMGGVSILLFGIIAASGLRMLVESQVDFASNRNLVIASVVLVVGIGNLLINLKGIGINLQIEGMALSALSGIILNLILPKDKNQIN

SEQ ID NO: 22168 - protein, 571 aa, Anopheles gambiae str. PEST
TMDTERQCAPEQSTESKPEGKARGADINYGIDDNPPWYFCIMMALQHYLTMIGAIVSIPFILTPALCMRDEDPARGTIISTMIFVTGLITYLQATWGCRLPLVQGGTISFLVPTLAILNLPQWKCPPADAIDAMTDTDRTELWQVRMRELSGAIAVAAVTQLVLGFSGLVGKLLRIITPLTIVPTVALVGITLFQHASETASKQWGIAVGTTAMLTLFSQVMGEVPFPGIAYRKGHGLRVVWFPLFKLFPVLLTIAIMWTVCGVLTATGVFPEGHPARTDVRLRVLQDAEWFRVPYPGQFGLPTVSLAGVLGMLAGVLACTVESISYYPTIAQMCAAPPPPLHAINRGIGIEGLGTMLAGLWGSGNGTNTFGENVGAIGVTKVGSRRVIQWAALIMVLQGVLNKFGAAFIMIPDPVVGGIFCVMFGMITAFGLAALQYVDLRSSRNLYILGVSFFFPLVLCLWLQEHPGAIQTGNQTVDSTLSVLLGTTILVGGVLGCVLDNLIPGTPEERGLVAWSKEMALETVQANDDLPAGGLVWEKSTFDFPYGMQLMRRWKWTRYVPFLPTYRMKL

SEQ ID NO: 22169 - protein, 440 aa, Agrobacterium tumefaciens str. C58 (U. Washington)
MSDTGGYFPRWRLKTEGRIMPDERLPAGQTAVLGLQHVVAMFGSTVLAPLIMGFDPNVSILFSGISTLIFFIAVGGRVPSYLGSSFAFIGPVLVATGAAAGAASPDIALALGGIIAAGVLYALIGVIVMIVGHNWIEKLMPPVLTGAIVAAIGLVLAPIAIASASGTGPGNPDGDQLSRWIAILTVTSVGAIAVYAPGMTRRLPILLGGAIAYLAYLVLANGFGLGKPVDFAGVAAAAWFGLPAFTTPVFSAPAIALIAPVVVILVAENLGHIKAIGAMTGRNLDPYLGRAFIGDGIATIFSGAFGGTGMTTYAENMGVMAITRIFSTLVFIVAALVAIILGFSPKFGALIQTIPGPVIGGLSVVVFGLIAATAGRIWVENKVDFSEPRNLITVGIALVLGAGNFKLNVAGFTLDGIGTATIGAIAFYHLLGLGRPAQGR

SEQ ID NO: 22170 - protein, 502 aa, Agrobacterium tumefaciens str. C58 (Cereon)
MGNNPIPMTAAGNRANREKMRRQPIRSRATGANHKEQIFLHGDEPGWESPEDACRAFPGGTTMSDTGGYFPRWRLKTEGRIMPDERLPAGQTAVLGLQHVVAMFGSTVLAPLIMGFDPNVSILFSGISTLIFFIAVGGRVPSYLGSSFAFIGPVLVATGAAAGAASPDIALALGGIIAAGVLYALIGVIVMIVGHNWIEKLMPPVLTGAIVAAIGLVLAPIAIASASGTGPGNPDGDQLSRWIAILTVTSVGAIAVYAPGMTRRLPILLGGAIAYLAYLVLANGFGLGKPVDFAGVAAAAWFGLPAFTTPVFSAPAIALIAPVVVILVAENLGHIKAIGAMTGRNLDPYLGRAFIGDGIATIFSGAFGGTGMTTYAENMGVMAITRIFSTLVFIVAALVAIILGFSPKFGALIQTIPGPVIGGLSVVVFGLIAATAGRIWVENKVDFSEPRNLITVGIALVLGAGNFKLNVAGFTLDGIGTATIGAIAFYHLLGLGRPAQGR

SEQ ID NO: 22171 - protein, 427 aa, Streptococcus pyogenes MGAS8232
MTHSTKQEHSHSQSAVLGLQHVLSMYAGSILVPIMIAGALGYSARELTYLISTDIFMCGVATFLQLKLTKHTGVGLPVVLGCAFQSVAPLSIIGAQQGSDAMFGALIASGIYVILVAGIFSKIARFFPPIVTGSVITVIGLSLVGVAMGNMGDNVKEPTAQSMMLSLLTIVIILLVQKFTKGFVKSISILIGLVAGTLVSAMMGLVDTTPVVEASWIHVPTPFYFGMPTFEITSIVMMCIIATVSMVESTGVYLALSDLTNDQLDEKRLRNGYRSEGIAVFLGGLFNTFPYTGFSQNVGLVQISGIKTRRPIYYAAGILVGIGLLPKFGAMAQMIPSPVLGGAMLVLFGMVALQGMQMLNRVDFQKNEYNFIIAAVSISAGLGFNGTNLFASLPETAQMFLTNGIVIATLTSVVLNLVLNGKDKQDE

SEQ ID NO: 22172 - protein, 419 aa, Streptococcus pyogenes MGAS8232
MKDVIYDVEEVPKAGMLVGLSFQHLFAMFGATVLVPILVGIDPSVALLSSGLGTLAHLSVTKFKIPAYMGSSFAYIAAMQLLMKTNGIGAVAQGAMTGGLVYLIAALIVKAIGNDWIDKILPPIVVGPIVMVIGLSLASTAVNDVMLKNGNYNLTYLVIGLVTLLSVIFFNIYGKGIVAIVPLLLGLLVGYVVALLVGVLTGQEIVDFTNVAQAKWFSIPSVEIPFLTYGVKFYPSAILTMAPIAFVTMTEHFGHIMVLNSLTKRDYFKDPGLEKTLTGDGFAQIIAGFLGAPPVTSYGENIGVMALNKIFSVYVIAGAAVIAALLSFIGKVSALIQSIPTPVIGGISVALFGVIASSGLKILIESKVDMDNKKNLLIASVILVSGIGGLMLQVNGLQISGVAFSTLLGIILYQVLPEK

SEQ ID NO: 22173 - protein, 427 aa, Pyrococcus furiosus DSM 3638
MGPDIKVKIDEKVEPKRAILFGLQHVLAMFGATVTVPLVVGTTVGLSTREIATMIQAVLLAMGIATILQTTIGSRYPIVQGSSFAFIPGLISIGKSLGMAATQGALIVGGIIEALVGGLGIVGKIKKLFTPVVTGVTIMLIGFSLAHVSVKYFFNYFADPSGASIPRATIVALITFGTTVYVALKSRGTLRAMPVIVGAFVGYLVSIPLGLADFQLVKELPVVSVPKIFPWGTPVFDVGAIITLLFAFMVSIIESVGDYHAISAIAEAPITNKHINRGIMSEGIACSIAGVLGACGTTSYSENIGLVALTKVASRYVVQVGGIILIVISLFPKFAGLLAAMPAPVLGGLTLALYGMISVTGLRLIKEKVELNDRNTIIIATALIAGLGAPQLPPEFLEHFPQIIASILESGMAVGAITAIVLEQVLR

SEQ ID NO: 22174 - protein, 363 aa, Magnetospirillum magnetotacticum
MDGRAASAAPAASEEPVPGTKIRPSALGLLGLQHVLVMYAGAVAVPLIVGRALKLSPEEVAILVSADLFACGIATLIQSWGLPGIGIRMPVMMGVTFASVTPMIAIGTNPALGLTTIYGSVIVAGLFGLLAAPLVGRLLPLFPPVVTGTIILVIGISLMRVGVNWAAGGVGSPHYGAPLNLGISAFVLLTILALTRFTTGFVSSASVLIGIVLGMLVAAMAGLVDPAKVVAAPWLDVVKPFHFGWPTFDPVSAATLCIVMIVVMIESTGMFLALSAITGDPVGEERLTRGLRADGLGTLLGGVFNTFPYTSFSQNVGLVGVTGVRSRLVTVVGGVIMLGLGLIPKLAALVERSRPACSAAPGS

SEQ ID NO: 22175 - protein, 407 aa, Fusobacterium nucleatum subsp. nucleatum ATCC 25586
MKILGLKTKIILGMQHVLAMFGATVLVPFLTGLNPSIALICAGVGTLMFHSVTKGIVPVFLGSSFAFIGATALVLREQGIAILKGGVISAGLVYVMMSFIVLKFGVERIKSFFPPVVVGPIIMVIGLRLSPVALSMAGYSNNTFDRDSLIIALIVVISMIFISILKKSFFRLVPILISVAIGYIVAYFMGDVDLSKIHEASWIGLPEGAWDTITTVPKFTFSGVVALAPIALVVFIEHIGDITTNGAVVGKDFFKNPGVHRTLLGDGIATMAAGLLGGPANTTYGENTGVLAVTKVYNPAILRIAACFAIVLGLIGKFGVILQTIPQPVMGGVSIILFGMIAAVGVRTIVEAQLDFTHSRNLMIAALIFVLGIAIGDITIWGTISISGLALAALVGIVLNKILPEDK

SEQ ID NO: 22176 - protein, 440 aa, Bacillus anthracis str. A2012
MKQHPFKIASLGMQHMLAMYAGAIIVPLIVGGGLGLNQKELTYLVSIDLLMCGVATILQALSNRFFGIGLPVVLGCTFTAVGPMIAIGKQYGVSSIYGAIIAAGLFVVIFAKLFGKLVKLFPPVVTGSVVTVIGVTLVPAAINDMAGGVGSKDFGSLENLALAFGVLLFIIIMYRFFDGFIRSISILLGLLFGTIVAAFMGKVSLQAVGEADWFHGIQPFYFGTPTFELTPIITMILVACVGIVEATGVYFALSDICNKKIGEKELTKGYRAEGLAMVLGGIFNAFPYTTYSQNVGLVQLTGVRNRVIIYTCGGMLIALGFIPKIAAITTIIPKSVLGGAMLAMFGMVMAYGIKMLSSVDFGRQENLLIVACSVGIGLGVTVVPTLFSQLPESIRILTDNGIVLGSASAVLLNIVFNMVPQRKVKVKDEPVPMQSAVREA

SEQ ID NO: 22177 - protein, 427 aa, Bacillus anthracis str. A2012
MEQKPVLDVNEVPKPGKWLFLSIQHLFAMFGSTVLVPFLTGLNPSVALISSGLGTLAFLLITKGQVPAYLGSSFAFIAPIITAKTAGGPGAAMLGGLLAGLVYILISLGIKKSGSKWIMKLLPPIVVGPVVMVIGLALAHTAVNMAMNGADGKYSFTHFSVALVTLAITIICSIFGRGFFSIIPVLLGIIGGYIFAYFQGLVDLKPVAEAKWFVVPDFTVPFVTYTPEFSWKIVLLMVPVALVTISEHIGHQIVLGNVIKRDLIEKPGLHRSIFGDGVATLIASLIGGPPNTTYGENIGVLAITRAYSVYLFIGSAVFAIMFGFIGKISALIHSIPTPVMGGVSILLFGVIASSGLRMMVDDKTDLSDKRNLMIASVILVIGIGGAVLHVGESFQVEGMALAAIVGVLLNLLLPETKQIKQSKQIAS

SEQ ID NO: 22178 - protein, 427 aa, Bacillus anthracis str. A2012
MKTFLSALQWALFILAGSLIVPISVATSYGLDGAEAIAFVQRTLFVLGFAGLLQAIFGHKLPIQEGPAGLWWGIFSLYASLGVVLFGSSNETLKVLQYAFLLSGIICIILSVFGLIDKLVRYFTPTVIGTYLFLLVAQLSGAFLKGMFGLDGQHTEVQADVFILSLIVILLSFFIMKLPIIGQYSVLFSIVCGWILFACFGLSNPITPVTDIIRLPSLFVFGMPRIEWNMAITVVFVTLLLLTNMLASIRVVQKVVSKYEENATPDRFKQAGIITGINQLLGGLFSAIGPVAISGSAGFIATTNIYKRLPFMLGSSFIIVVSIFPKITSFFAAIPVAVGYAAIYPVFASMIGLAFREYDTVQNKERLFKVAGLSIFTGVGVMFVPAGAFSTLPPFLASFLSNGLVLGSVMAILLEILFSRSTEKQLS

SEQ ID NO: 22179 - protein, 428 aa, Bacillus anthracis str. A2012
MDNQHNQNHIMGTLQWFIFLLANSIALPIVVGGLFHLTTEEIFYLMQRTFFVVGISSFLQGWLGHRLPIADGPAGSWVGVFTVLAYATAGQDQLHSTLQILELGMIISGVILIGLGVTGFIGRILFLFTPIVTGTFLLLLCLQLSGVFLKGMLGITATASQIDGFTAIIAFSIFLFVIILSNFGKGFVKSYAVLIGLISGWILFLIAGKVTISSQVTHFVQLPQIFAWGLPKWNTGMAVSSFVMVCILVSNTVAAIIAINQATIQKGTIEQKQLKDGTWVGGISHIISSVFSTVGVVPLPATAGFIRLTKQKYIRSFLLACMLLVVMSLFPSIIRYLASLPSAVASAVLMASFVQLIGIGLNNIKQVELNERNVTILGVAVLFGSGVMFLPSGALQSLPSVMQYIFGNGLFVGTVVSILLEQIWRIGK

SEQ ID NO: 22180 - protein, 452 aa, Clostridium perfringens str. 13
MEKQNLKNTEVNLIYGVDDDLDLPKKVLFGLQHIFAAFGGIIVVPLVIATSLGFDSKVTTALISASILGSGLATIIQAKGVGKVGARVACIMGTDFTFVSPAISVGSVLGLPGIIGATILGSLFEVILSFFIKPLMKFFPPLVTGTVVALIGLTLLPVSIDWAAGGAGSANYASLENLAVAMFVLVITLLLNNYGKGMISSASILIGIVVGYIVCIPLGLVDFTPVKEASWLSFPKILEFGVTFDAKAVMAFIPAYFVATIGTVGCLKAIGETSNIDIGDKRVAAGVLSDGVGSALGGLVGSCPNTSFSQNIGIISLTKVASRHVAVMAGILLVILGFLPKVAAIITGIPNPVLGGVGIMMFGTVAAAGIRTLSNIKLTERNLLIIAISMGLGLGVTFRPDVIHNLPEAIRMIFSSGISTGTIAALILNAVLKESPTSMEFENMYDEEKKAS

SEQ ID NO: 22181 - protein, 436 aa, Clostridium perfringens str. 13
MAQQVISKEQGSIKTLGIFSYFKNGILGLQHLVAMFGATILVPLVTGLDPSVALFTAGIGTLIFHLCTKGKVPVFLGSSFAFIPVIQVIAAKYGDLRYAQGGIFFAGLAYVLISFGIKKIGVDKIKRFLPARVVGPMIMVIGLNLIPNALEMAGVKSLIAGETGAMTSVLIACTTLGLALIISKFGKGFFSQLAIITAVCVGYTLSLILGQVDTSLIQQSTMVAVPNFTLPKFDFGAIMITLPVILAVSMEHIGDITTNGQVVGKNFIEDPGLNRTVLGDGLATLVASLLGGPANTTYGENTGVLAITKNYNPSILRLTAVFAIILSFIAKFGAVIRTIPQSVMGGISLMLFSMIALVGVKTIKNEGVKLNKTNLILMGSIIFVGLSGLFMSEPIGIEISEAVSISGLSLAALIGVILNLIITKFESAKSRKEVIA

SEQ ID NO: 22182 - protein, 644 aa, Corynebacterium efficiens YS-314
MTTQTPIRTVHPVDQVPPAPKLAALGLQHVLAFYAGAVIVPLLIAQSLNLDAATTIHLINADLLTCGIATLIQSVGIGRHIGVRLPIVQGVTTTAVAPIIAIGLGVTDGEGGVASLPAIYGAVIVAGLFTFFAAPVFTRFLRFFPPVVTGTVLLVMGTSLLSVSANDFVNYADGVPAARDLAYGFGTLLIIILAQRFLRGFLGTLAVLLGLVVGTVTALLLGDANLDEVSNADAFGITTPFYFGLPEFNLVAIFSMIIVMIITMVETTGDVFATGEIVRKRTRRYDITRALRADGLSTFIGGIMNSFPYTCFAQNVGLVRITGVKSRWVAASAAVFMIILGVLPKAGAIVASIPSPVLGGASLALFANVAWVGLQTIAKSDLRDSRNAVIVTSALGLAMLVTFRPDIAQAFPEWARIFVSSGMSVGAITAIILNLLFFHVGRQTGANVAVSGSGEKLTLDQINAMDREQFVDTLSPLFNSRTWPLEIAWESRPFANVTALREAIQISVLTAPLEAREDLIHDYPDMAQLLLADQDEAAEISRDRGSIGLEELDDVDRDKLLTVTSNYRDRFGMPYVAYYDTTDTVDDVVAEGLRRLDNSDEQEHRQALSEIIEIANDRFDIVLEDANPARTAFDRKFTDTDFMS

SEQ ID NO: 22183 - protein, 431 aa, Corynebacterium efficiens YS-314
MLVTSTWGWTVHGDGRKIEPGAVVAPRERLSWGRTIGIGMQHVVAMFGATLLVPTLTGFPVNTTLLFSGLGTIFFLLITRNRLPSYLGSSFAFIAPLTATQAQGISVQIGGVLVSGLVLMGIGFLVKAAGRRVIDAVMPPTVTGAIVALIGLNLAPTAASNYQAQPFVATVTLMVILLATVAGRGMVARLGILIGVVVGWVFAALTDNLAEGSVEAISSASWIGLPQFHTPEFQLSAILVTLPVVIVLVAENIGHVKAVSEMTGENLDDLAGNALIADGLATSVAGGFGGSGTTTYAENIGVMAATRVYSTAAYWVAAFTAIALAFIPKFGALIFTIPVGVLGGATLVLYGLIGMLGIRIWQDNRVNFNNPVNLTMAAVALVAGIGNLTLTIFGVTLEGIAWGSVGIIVLYPLMKKLYVTLGEGKGAKFYN

SEQ ID NO: 22184 - protein, 422 aa, Staphylococcus aureus subsp. aureus MW2
MKNLILSVQHLLAMYAGAILVPIIVGTSLKFTPEQIAYLVTVDIFMCGVATFLQANKVTGTGLPIVLGCTFTAVAPMILIGQTKGIDVLYGSLFLSGILVIIIAPFFSHLVKFFPPVVTGSVVTIIGINLMPVAMNYLAGGQGAKDYGDVKNILLGLMTLIIILVLQRFTTGFIKSIAILIGLVLGTIGAGLLGMVDINQVNHAGWLGIPVPFRFSGFSFDVTSTLVFFIVAIVSLIESTGVYHALSEITGKKLERKDFRKGYTAEGLAIVLGSIFNSFPYTAYSQNVGLVSLSGAKKNNVIYGMVVLLLICGCIPKLGALANIIPLPVLGGAMIAMFGMVMAYGVSILGHIDFKNQNNLLIIAVSVGLGTGISAVPQAFKGLGEQFAWLTQNGIVLGAISAIILNFFFNGIKYKQTEENVK

SEQ ID NO: 22185 - protein, 659 aa, Corynebacterium glutamicum ATCC 13032
MDKFHIEDEGTTPNAVTTSTTTRVKHPVDQVPPAPKLAALGLQHVLAFYAGAVIVPLLIAQSLNLDTATTIHLINADLLTCGIATLIQSVGIGRHIGVRLPIVQGVTTTAVAPIIAIGLGVTDGQGGVASLPAIYGAVIVSGIFTFFAAPVFARFLKFFPPVVTGTVLLVMGASLLSVSANDFVNYADGVPAARDLAYGFGTLAVIILAQRFFRGFMGTLAVLIGLVGGTAVALILGDANLDEVGNAEAFDITTPFYFGVPEFNAVAIFSMIIVMIITMVETTGDVFATGEIVGKRTRRSDVTRALRADGLSTLMGGVMNSFPYTCFAQNVGLVRITGVKSRWVAAAAAGFMIILGVLPKAGAIVASIPSPVLGGASLALFANVAWVGIQTIAKSDLADSRNSVIVTSALGLAMLVSFRPDVAQAFPEWARIFVSSGMSVGAITAILLNLLFFHVGRQSGGQVATSKSGERINLDAVNKMDRTDFVETFAPLFNSKTWPLETAWESQPFANVTELREAIQVAVLTAPLSDREELIHDYPDMAQLILATEEEAATISQDRGSIGLDDLDDVDQEKLITVTEQYRERFNMPYVAYFDTMDSVDTVVAAGLRRLDNSDEQEHRQALSEIIEIANDRFDILLADANPARSAFDRKFTETDFLG

SEQ ID NO: 22186 - protein, 629 aa, Corynebacterium glutamicum ATCC 13032
MPPAPKLAALGLQHVLAFYAGAVIVPLLIAQSLNLDTATTIHLINADLLTCGIATLIQSVGIGRHIGVRLPIVQGVTTTAVAPIIAIGLGVTDGQGGVASLPAIYGAVIVSGIFTFFAAPVFARFLKFFPPVVTGTVLLVMGASLLSVSANDFVNYADGVPAARDLAYGFGTLAVIILAQRFFRGFMGTLAVLIGLVGGTAVALILGDANLDEVGNAEAFDITTPFYFGVPEFNAVAIFSMIIVMIITMVETTGDVFATGEIVGKRTRRSDVTRALRADGLSTLMGGVMNSFPYTCFAQNVGLVRITGVKSRWVAAAAAGFMIILGVLPKAGAIVASIPSPVLGGASLALFANVAWVGIQTIAKSDLADSRNSVIVTSALGLAMLVSFRPDVAQAFPEWARIFVSSGMSVGAITAILLNLLFFHVGRQSGGQVATSKSGERINLDAVNKMDRTDFVETFAPLFNSKTWPLETAWESQPFANVTELREAIQVAVLTAPLSDREELIHDYPDMAQLILATEEEAATISQDRGSIGLDDLDDVDQEKLITVTEQYRERFNMPYVAYFDTMDSVDTVVAAGLRRLDNSDEQEHRQALSEIIEIANDRFDILLADANPARSAFDRKFTETDFLG

SEQ ID NO: 22187 - protein, 429 aa, Corynebacterium glutamicum ATCC 13032
MLVTSTWGWTVHGDGKKIEPGAVVAPKERLSWGRTIGIGMQHVIAMFGATLLVPTLTGFPVNTTLLFSGLGTILFLLITRNRLPSYLGSSFAFIAPLTATQVHGIGVQIGGILVAGLVLVAIGFVVKAAGKRVIDAVMPPAVTGAIVALIGLNLAPTAAGNFSSQPLVATATLFAILIATVAGRGMIARLGILIGVVIGWVFAAITGNLSEGAADTIREAAWFGLPQFHKPEFQLSAILVTLPVIIVLIAENVGHVKAVSEMTGEDLDDLAGDALIADGFGTTLAGAFGGSGTTTYAENIGVMAATRVYSTAAYWVAACTAIALAFIPKFGALIFTIPAGVLGGACLVLYGLIGMLGIRIWQDNKVNFNNPVNLTMAAVALVAGIGNLTLTVFGVTLEGIAWGSVGIIVLYPIMKRLYLSIGEGKNAKF

SEQ ID NO: 22188 - protein, 505 aa, Shigella flexneri 2a str. 301
MCLDSFINVNGCFLFWRAKGETLMSAIDSQLPSSSGQDRPTDEVDRILSPGKLIILGLQHVLVMYAGAVAVPLMIGDRLGLSKDAIAMLISSDLFCCGIVTLLQCIGIGRFMGIRLPVIMSVTFAAVTPMIAIGMNPDIGLLGIFGATIAAGFITTLLAPLIGRLMPLFPPLVTGVVITSIGLSIIQVGIDWAAGGKGNPQYGNPVYLGISFAVLIFILLITRYAKGFMSNVAVLLGIVFGFLLSWMMNEVNLSGLHDASWFAIVTPMSFGMPIFDPVSILTMTAVLIIVFIESMGMFLALGEIVGRKLSSHDIICGLRVDGVGTMIGGTFNSFPHTSFSQNVGLVSVMRVHSRWVCISSGIILILFGMVPKMAVLVASIPQFVLGGAGLVMFGMVLATGIRILSRCNYTTNRYNLYIVAISLGVGMTPTLSHDFFSKLPAVLQPLLHSGIMLATLSAVVLNVFFNGYQHHADLVKESVSDKDLEVRTVRMWLLMRKLKKNEHGE

SEQ ID NO: 22189 - protein, 443 aa, Shigella flexneri 2a str. 301
MSKAPITHNTEDNTMTRRAIGVSERPPLLQTIPLSLQHLFAMFGATVLVPVLFHINPATVLLFNGIGTLLYLFICKGKIPAYLGSSFAFISPVLLLLPLGYEVALGGFIMCGVLFCLVSFIVKKAGTGWLDVLFPPAAMGAIVAVIGLELAGVAAGMAGLLPAEGQTPNSKTIIISITTLAVTVLGSVLFRGFLAIIPILIGVLVGYALSFAMGIVDTTPIINAHWFALPTLYTPRFEWFAILTILPAALVVIAEHVGHLVVTANIVKKDLLRDPGLHRSMFANGLSTVISGFFGSTPNTTYGENIGVMAITRVYSTWVIGGAAIFAILLSCVGKLAAAIQMIPLPVMGGVSLLLYGVIGASGIRVLIESKVDYNKAQNLILTSVILIIGVSGAKVNIGAAELKGMALATIVGIGLSLIFKLISVLRPEKVVLDAEDADITDK

SEQ ID NO: 22190 - protein, 464 aa, Shigella flexneri 2a str. 301
MVRSQLSRADAPCLLTSLRRQLMAMFGFPHWQLKSTSTESGVVAPDERLPFAQTAVMGVQHAVAMFGATVLMPILMGLDPNLSILMSGIGTLLFFFITGGRVPSYLGSSAAFVGVVIAATGFNGQGINPNISIALGGIIACGLVYTVIGLVVMKIGTRWIERLMPPVVTGAVVMAIGLNLAPIAVKSVSASAFDSWMAVMTVLCIGLVAVFTRGMIQRLLILVGLIVACLLYGVMTNVLGLGKAVDFTLVSYAAWFGLPHFSTPGFNGQAMMLIAPVAVILVAENLGHLKAVAGMTGRNMDPYMGRAFVGDGLATMLSGSVGGSGVTTYAENIGVMAVTKVYSTLVFVAAAVIAMLLGFSPKFGALIHTIPAAVIGGASIVVFGLIAVAGARIWVQNRVDLSQNANLIMVAVTFVLGAGDFALTLGGFTLGGIGTATFGAILLNALLSRRLVDVPPPEVVHQEP

SEQ ID NO: 22191 - protein, 429 aa, Shigella flexneri 2a str. 2457T
MTRRAIGVSERPPLLQTIPLSLQHLFAMFGATVLVPVLFHINPATVLLFNGIGTLLYLFICKGKIPAYLGSSFAFISPVLLLLPLGYEVALGGFIMCGVLFCLVSFIVKKAGTGWLDVLFPPAAMGAIVAVIGLELAGVAAGMAGLLPAEGQTPNSKTIIISITTLAVTVLGSVLFRGFLAIIPILIGVLVGYALSFAMGIVDTTPIINAHWFALPTLYTPRFEWFAILTILPAALVVIAEHVGHLVVTANIVKKDLLRDPGLHRSMFANGLSTVISGFFGSTPNTTYGENIGVMAITRVYSTWVIGGAAIFAILLSCVGKLAAAIQMIPLPVMGGVSLLLYGVIGASGIRVLIESKVDYNKAQNLILTSVILIIGVSGAKVNIGAAELKGMALATIVGIGLSLIFKLISVLRPEEVVLDAEDADITDK

SEQ ID NO: 22192 - protein, 427 aa, Streptococcus pyogenes MGAS315
MTHSTKQEHSHSQSAVLGLQHVLSMYAGSILVPIMIAGALGYSARELTYLISTDIFMCGVATFLQLKLTKHTGVGLPVVLGCAFQSVAPLSIIGAQQGSSAMFGALIASGIYVILVAGIFSKIARFFPPIVTGSVITVIGLSLVGVAMGNMGDNVKEPTAQSMMLSLLTIVIILLVQKFTKGFVKSISILIGLVAGTLVSAMMGLVDTTPVVEASWIHVPTPFYFGMPTFEITSIVMMCIIATVSMVESTGVYLALSDLTNDQLDEKRLRNGYRSEGIAVFLGGLFNTFPYTGFSQNVGLVQISGIKTRRPIYYAAGILVVIGLLPKFGAMAQMIPSPVLGGAMLVLFGMVALQGMQMLNRVDFQKNEYNFIIAAVSISAGLGFNGTNLFTSLPETAQMFLTNGIVIATLTSVVLNLVLNGKDKQDE

SEQ ID NO: 22193 - protein, 404 aa, Streptococcus pyogenes MGAS315
MLVGLSFQHLFAMFGATVLVPILVGIDPSVALLSSGLGTLAHLSVTKFKIPAYMGSSFAYIAAMQLLMKTNGIGAVAQGAMTGGLVYLIVALIVKVIGNDWIDKILPPIVVGPIVMVIGLSLASTAVNDVMLKNGNYNLTYLVIGLVTLLSVIFFNIYGKGIVAIVPLLLGLLVGYVVALLVGVLTGQEIVDFTNVAQAKWFSIPSVEIPFLTYGVKFYPSAILTMAPIAFVTMTEHFGHIMVLNSLTKRDYFKDPGLEKTLTGDGFAQIIAGFLGAPPVTSYGENIGVMALNKIFSVYVIAGAAVIAALLSFIGKVSALIQSIPTPVIGGISVALFGVIASSGLKILIESKVDMDNKKNLLIASVILVSGIGGLMLQVNGLQISGVAFSTLLGIILYQVLPEK

SEQ ID NO: 22194 - protein, 525 aa, Escherichia coli CFT073
MPPQFLSLTPLPRKNWHSTSMCLDSFMNINGCFLLWRAKGETLMSAIDSQLPSSSGQDRPTDEVDRILSPGKLIILGLQHVLVMYAGAVAVPLMIGDRLGLSKEAIAMLISSDLFCCGIVTLLQCIGIGRFMGIRLPVIMSVTFAAVTPMIAIGMNPDIGLLGIFGATIAAGFITTLLAPLIGRLMPLFPPLVTGVVITSIGLSIIQVGIDWAAGGKGNPQYGNPVYLGISFAVLIFILLITRYAKGFMSNVAVLLGIVFGFLLSWMMNEVNLSGLHDASWFAIVTPMSFGMPIFDPVSILTMTAVLIIVFIESMGMFLALGEIVGRKLSSHDIIRGLRVDGVGTMIGGTFNSFPHTSFSQNVGLVSVTRVHSRWVCIASGIILILFGMVPKMAVLVASIPQFVLGGAGLVMFGMVLATGIRILSRCNYTTNRYNLYIVAISLGVGMTPTLSHDFFSKLPAVLQPLLHSGIMLATLSAVVLNVFFNGYQHHADLVKESVSDKDLKVRTVRMWLLMRKLKKNEHGE

SEQ ID NO: 22195 - protein, 443 aa, Escherichia coli CFT073
MSKAPITHNTEDNTMTRRAIGVSERPPLLQTIPLSLQHLFAMFGATVLVPVLFHINPATVLLFNGIGTLLYLFICKGKIPAYLGSSFAFISPVLLLLPLGYEVALGGFIMCGVLFCLVSFIVKKAGTGWLDVLFPPAAMGAIVAVIGLELAGVAAGMAGLLPAEGQTPDSKTIIISITTLAVTVLGSVLFRGFLAIIPILIGVLVGYALSFAMGIVDTTPIINAHWFALPTLYTPRFEWFAILTILPAALVVIAEHVGHLVVTANIVKKDLLRDPGLHRSMFANGLSTVISGFFGSTPNTTYGENIGVMAITRVYSTWVIGGAAIFAILLSCVGKLAAAIQMIPLPVMGGVSLLLYGVIGASGIRVLIESKVDYNKAQNLILTSVILIIGVSGAKVNIGAAELKGMALATIVGIGLSLIFKLISMLRPEEVVLDAEDADITDK

SEQ ID NO: 22196 - protein, 464 aa, Escherichia coli CFT073
MVRSQLSRADAPCLLTSLRRQLMAMFGFPHWQLKSTSTESGVVAPDERLPFAQTAVMGVQHAVAMFGATVLMPILMGLDPNLSIFMSGIGTLLFFFITGGRVPSYLGSSAAFVGVVIAATGFNGQGINPNISIALGGIIACGLVYTVIGLVVMKIGTRWIERLMPPVVTGAVVMAIGLNLAPIAVKNVSASAFDSWMAVMTVLCIGLVAVFTRGMIQRLLILVGLIVACLLYGVMTNVLGLGKAVDFTLVSHAAWFGLPHFSTPAFNGQAMMLIAPVAVILVAENLGHLKAVAGMTGRNMDPYMGRAFVGDGLATMLSGSVGGSGVTTYAENIGVMAVTKVYSTLVFVAAAVIAMLLGFSPKFGALIHTIPAAVIGGASIVVFGLIAVAGARIWVQNRVDLSQNGNLIMVAVTLVLGAGDFALTLGGFTLGGIGTATFGAILLNALLSRRLVDVPPPEVVHQEP

SEQ ID NO: 22197 - protein, 468 aa, Thermobifida fusca
MQPGSHQNPQGDTDVPSPAPATGPRNGLSAGLTTLSLGIQHVVAMFGATFVFPLLMGLDPNLAIMMSGICTILFLLIVNGKVPSYLGSSASFVAAAVIIAADGGGPATITGAVLVTGVVLALAGFVIHLLGPNAIVRAFPPAVTGGVVMLIGFNLAPVVSESYWPYDQWTALLTMAFVILATVVLRGFLSRITVLLGLVFGFVLSWVFDRLFGMTPTPQEDGSVKDAFRVDLSGVADAPWFGLPEFHAPEFHLSAILVALPAVIALIAENAGHVKAVQEMTGNDLNPYMGRAIFADGVATALASSVGGAPTTTYAENIGVMAITRVYSTAPYYVAAVIAILIGLCPKFGALVYAIPQGVIGGITVILYGMIGLLGAKIWVENQVNFADPLVLVPIAAGLIAGIGNVSLVFTDGFQISGIALGTIVILAGYHLLHALAPRSKTHAAPSPGAPAGSGAEGGKAEQHAVQD

SEQ ID NO: 22198 - protein, 428 aa, Leuconostoc mesenteroides subsp. mesenteroides ATCC 8293
MMTPKHNRIMDHGLAGIQHVFVSNVWLDPIYVAAAAGLSLNLSTNLVNTIFIVSGLVTLTQATKLAKLPIVQGPSAAFDALMINAGKAGQLATASGSILLSALIVFLLSVTGLINKLIKLLTPAITGTLIFLVGISLSGFTLSEFLGGYPGDKGFSSPTTLILSVTTATIVILLSIFGKGFWKRFSFLIALIVGDILAVSLGVVDYSVLSTKSWFGMPHLLPYGSLKFNWVMFLTFFVAYVVAVVEALGVYQAAGDTLKENISPRRIQNGLIGESAGSMFSSLFGGFPTTAFAQNVGILNLTGNVSRIPVIIAGILFVVLGFVPKIGAFLAITPSPVIGGIFLPAATTLILTGFNILKRAPDNNENNMIIGLSIILAIALPNYATGWSGVTGELLSNSILVGALSAIILQFALVNLPRMIKNIRGSHD

SEQ ID NO: 22199 - protein, 452 aa, Leuconostoc mesenteroides subsp. mesenteroides ATCC 8293
MCLFLCNLSTLFWNFVYNKISIFCRRDPLMSKNQNNAIYDLHDKPPFFTWLGLSLQHLFSMFGATVLVPLLVGLNPGVALFTSGVGTLLHLLITRGKVPAYMGSSFAFIIPMTSLLKTVGYPAVAQGIISVGLVYLVVAFIVTFTGTAWIEHIFPAEVVGPIIMVIGLSLAGSAASSATTMNGHYDIRVFTVALVTLLATIAFNMFLRGFLGLLPVLLGIIFGYIVALITGLVDLSPVASAHWFQLPNFETFIGKDGFVFYPAAVLSMAPLALVTLSEHLGHLMVLSKITGTDFFENPGLKRTLTGDGTASVVAGLIGGPAVTSYGENIGVMQLSRVYSVWVIGGAAFFAVVFSFVGKLSALISTIPGAVTGGVGFMLYGVIAAAGLQVIVDNKVDYSKKRNLMIAAPIMVVGIGNFHLQLSTQVDFSGVAIATILGIVLNLVLPKVAASEK

SEQ ID NO: 22200 - protein, 461 aa, Oenococcus oeni MCW
MDKSFLVNKGKLRMSINNRESQNNLVDNYHSALLGIQHLLAMYSGAVLVPLLIGGALKFSAAQMTYLISIDIFMCGLATFLQLFTNRIFGIGLPVILGCAIQAVAPLEMIGQNFSIGTMYGAIIASAVFVFLIAGLFAKIRKFFPPLVTGTVITVIGLTLIPIGFVNLGGGSATAKSFGSGNNLIVGLFTILVVLVCSVYGRGFISRIAVLIGLLLGTILASLMGMVSFKAVVDASWFHFPQPFYFGTPRFEVSSILTMIAISLVSLVESTGVFFALGDITKKPIGEKDLKKGYRAEALAGILGGIFNTFPYTTFSQNVSLVQLSGIKSRQPIYYAAGFLMLLGLLPKIGALATIIPTPVIGGATVIMFGMIAIQGIRILEKMDFSNNKNILVAAISIGAGLGVSVEPNIFQSLPETVRLIFSNGVVIASLCAVLLNLIIQPDRVTNKIKNPAGSVKQQEN

SEQ ID NO: 22201 - protein, 423 aa, Oenococcus oeni MCW
MEEKRSNGAIYDVYERPPFPMLFGLSLQHLFSMFGATVLVPLVVGLNPGVAIFSSGVGTLLHMLITRGKIPAYMGSSFAFVIPMTSLMKSFGYPAVAQGVFSVGIIYLIVALIVAKAGSAWIDKIFPPAVVGPIVMVIGLSLAGSAATNATINSATNKYEIKIFIVALLTLAATIFYNMYFKGFLGMIPVLLGIITGYIFAIIFGLVDFQSVAQAHWFALPNFNSLFASKKLYPSAILDMAPLALVTISEHLGHIMVLNKITGRNFFRDPGLNKTLAGDGTASIAASLVGGPSVTSYGENIGVMQMSKVYSVWVIGGAAVLAVLLSFVGKLSALIQTIPGAVIGGVGFMLYGVIAAAGLQIIVDNKVDYSKKRNLMIAAPILVIGIGNFDLQLGNLEFTGVAMATVIGIVLNLVLPKVAASEK

SEQ ID NO: 22202 - protein, 426 aa, Brucella suis 1330
MGYFPSWRLTSNAVVLPDERLPAAAAVPMGIQHLLAMSGSTIVAPLLMGFDPNVAVFFSGIGTLLFFLITAGRVPSYLGSSFAFIAVVIAATGYSGSGPNPNIAIALGGIIACGAFYSLIGLIVMFLGTGWVEKLMPPAVTGAIGVSIGLNLAPVAIGQLKGTGAHTSIALLTVLCMAMISAYGPRGTRRLSVLFALLFGYLLVLIAGNGLGIVPGIDFTAVKNAAWFGLPHFTTPAFNWQAVTLIAPVAIVLVAENLGHIKALGSITGRNMDGYIGRGFFSDGLATMISGAGGGTGVTTYAENIGVMAMTKVYSTLIFVIAAIMALILGMSPKFGAILQTIPAPVLAGLAVSVFGLIASAMARIWIVNKVDFADSRNLFTVGVALIFGAGDFTLNIGNFALGGIATSTLAALVLYQLLGIGRSDS

SEQ ID NO: 22203 - protein, 450 aa, Bifidobacterium longum DJO10A
MSIRKELTAQNVLLGFQHVLVSNVWLDPVFVAGAIGLPIALSSNMINAIFIVSGLVTLVQATRLVRLPVVQGPSAAFDALMIAAGTAGMLGAASSSILIASLVFLLLCLTGVIERMRFLFSPMISGVVIFMVGVSLSGFTLSEFLGGAPGDKTFADPHILTVSILTTAIVLVLSLLGKGLLKSFSFLIALVVGTVVAAAFGMVDFSPVASKGWLGLPTFLPYGPFTFDWKIFIPFFIAYMVAVMEALGVYQAASEIQGTPLERKQVRYGLAGEAAGSAISSLIGGFTTTAYPQNVGLLNLTGEGKLRTRTPVIIAAVLLLILGFVPKAGALLSVIPSAVVGGIFLPAAASLIVTGLRALRKVADDERRQTVIGMSLLLGIALPKALSGLTGGASVFFGNNIMVGVFSAIILNALFVALPDLVAKHRAPASVDVPAADPADGTGAAAYDER

SEQ ID NO: 22204 - protein, 496 aa, Bifidobacterium longum DJO10A
MARIQAPVSLQWRFGGCGAGRRPTPAGVLRQIAFPGRETSQNLRELEWCVVRLVVNAVPQARARRVVMSNIFQWQLHGDGKTLAPGEVVEPDERLTWVRTAGIGAQHVIAMFGATFLVPILTGFDPSTTLFFTAMSTALFLLINRNVLPSYLGSSFGFIAPITAVTTANKGIAVASFGIMVTGILLALVGVLVHYAGSKWIDIIMPPVVNGAIVAIIGFNLAPSVWTNFQAAPDTALVTLLAVLLVAVLFKGLLGRLNILVGVIIGYVYACIRGQVDFSAIGDAAWIGFPKFHLPQADFSILPMFIPVVLVLVAENVGHVKSVAQMTGRDYDNQIGTALMADGLGTTLAGFGGGSGTTTYGENIGVMAATKVYSTAAYWCAAAFALILSLCPKFGAVINTIPAGVLGGVTTLLYGMIGMIGIRIWVENKVNFDKPLNIMVAAITMIIAIGQFAFTVGGISFNGIAIGTIVILVAYHGLKAIGKATGTIAKDDPDIL

SEQ ID NO: 22205 - protein, 413 aa, Haemophilus somnus 129PT
MTNQNIPVEISGKIKQAFIGLQMLFVAFGALVLVPLITGLDANTALLTAGIGTLLFQLCTGKKVPIFLASSFAFIAPIQYGVASWGIPATMGGLACAGLVYVALSLLVKLRGAGALQKIFPPVVVGPVIIIIGLGLAPVAVDMATGKGSNYEYGDAVLVSMITLLTTLIVAVFAKGMMKLIPIMFGIAVGYILSLFMGLIDFSPIAKASWFSLPNLTTPEFKLEAILYLLPIAIAPAVEHIGGIMAISSVTGKDFLKNPGLHRTLLGDGLATSAASLLGGPPNTTYAEVTGAVMLTRNFNPTIMTWAAVWAIAISFCGKVGAFLSTIPTFVMGGIMMLVFGSIAVVGMSTLIRGKVDVTEARNLCIISVVMTFGIGGMFVNLGELSLKGISLCAVVAIILNLILPSAKNQIED

SEQ ID NO: 22206 - protein, 441 aa, Pseudomonas syringae pv. syringae B728a
MPVTRFSAPNRRTRNPMTQQEFNDPLWRTILSGAQMLFVAFGALVLMPLITGLDPNVALFTAGLGTLLFQIVTGRQVPVFLASSFAFITPIILAKGQFGLAATMGGVMAAGFVYTFLGLAVKIKGTGFIDRLLPPVVIGPVIISIGLAMAPIAANMAMGKSGDGVQLIPYQTAMLISMPALLTTLIVAVFGKGIFRLVPIISGVLVGFALSFYFGVVDTKKIADAAWLALPHFTAPEFNWQAILFIVPVALAPAIEHIGGVIAVGSVTGRDYLKKPGLHRTLFGDGIATTAAGLFGGPPNTTYAEVTGAVMLTKNYNPQIMIWASFFAITLAFIGKFGALLQSIPVPVMGGILCLLFGSIAAVGMNTLIRHKIDLAEARNLVIVSVTLVFGIGGVLIGTGNGPNDFGLKGIALCAVTAIALNLILPGNDSWKNKQLDDQLP

SEQ ID NO: 22207 - protein, 491 aa, Pseudomonas fluorescens PfO-1
MGAGLPAIGRISGLPDAKRAAASNPAAVHHKNKKDPRCCMSELSKARIPDAPAIQRLPLLQLILVGLQHVLLMYGGAIAVPLIIGQAAGLSREEIAFLINADLLVAGIATIVQSLGIGPMGIRMPVMMGASFAAVGSMVAMAGMPGIGLQGIFGATIAAGFFGMIIAPFMSKVVRFFPPLVTGTVITSIGLSLFPVAVNWAGGGAGAAQFGSPIYLAIAALVLATILLIHRFMRGFWVNISVLIGMCLGYVLCGAIGMVDLSGMANAPWVQFVTPLHFGMPKFELAPILSMCLVVVIIFVESTGMFLALGKITGQEVCPRMLRRGLLCDAGASFFAGFFNTFTHSSFAQNIGLVQMTGVRCRSVTIVAGGLLIVLSLLPKAAFLVASIPPAVLGGAAIAMFGMVAATGIKILQEADIGDRRNQLLVAVSIGMGLIPVVRPEFFAHLPLWMSPITHSGIAMATLSALTLNLLFNILGGAERAAINDCHAHPH

SEQ ID NO: 22208 - protein, 451 aa, Pseudomonas fluorescens PfO-1
MSSASSSSTVHPVDRVLPVRQMLTLGLQHMAVSYIGAIAVPLIVASALKMSHADTVVLISTTLFCSGIATLLQTVGFWRFGVRLPILQGVAFSSVGPVIAIGSNPEVGFAGVCGAVIGAGIFTMLIAPFVGRLRRFFPPVVTGCIVTVIGLQLFPIAYEWVGGGRNASNFGAPAFLAVAVVVLLTILLVNRYGSPLLRNMAVLVGMLVGAGLAYGLGMGNFHSVEDAPWLTVPYPFYFGLPTFSLIPIATMVVVMIVQMVESMGLFVAIGDIVDKPVEDKQVINGLRANGLASTIAGMFAAFPFIAFMENVGLVILTGVRSRWVVAISGLLMCSIALVPKAGAIIASMPTAALGGAGIAMFGVVAAAGIQTLAKVDYERNRYNVLIVGFTIAAALVPVLAPTLFKQLPEWSQPFLHSSVVIACLVSVLLNAALNGVSMPETTAGKSASHIL

SEQ ID NO: 22209 - protein, 506 aa, Pseudomonas fluorescens PfO-1
MKTPHVSHQRPEDENLGVGANMAYGLQHVLTMYGGIVAVPLIIGQAAGLSPADIGLLIAASLFAGGLATLLQTLGLPFFGCQLPLVQGVSFSGVATMVAIVSSGGEGGFQSVLGAVIAASLIGLLITPVFSRITKFFPPLVTGIVITTIGLTLMPVAARWAMGGNSHAPDFGSMQNIGLAAVTLVLVLLLSKVGSSTISRLSILLAMVIGTVLAVFLGMADFSSVTQGPMFGFPTPFHFGMPTFHFAAILSMCIVVMVTLVETSADILAVGEIIGTKVDSKRLGNGLRADMLSSMFAPIFGSFTQSAFAQNVGLVAVTGIKSRYVVATGGIFLVILGLLPFMGRVIAAVPTSVLGGAGIVLFGTVAASGIRTLSKVDYRNNVNLIIVATSIGFGMIPIAAPNFYDHFPSWFATIFHSGISSSAIMAILLNLAFNHFTAGNSDQQSVFAAAEERTLRYRDLAALREGDYFSDGKLHDCDGNEVPVIDPDADHGHGAPKVHAKSSEHV

SEQ ID NO: 22210 - protein, 502 aa, Pseudomonas fluorescens PfO-1
MPDPCHRKKRWLLICFIAINVQIWPRFKRSPGRMHLSNALGMPAISTDAAPSGAWEMTTQRIHPVDEVLPLRQLFTFGLQHVLVMYAGAVAVPLILGSAMGLTSAQVVLLINANLLTSGVATLIQTLGFWKFGARLPLIQGCSFIALAPMIMIGKEFGLSQIFGAVIAAGFITVALAPVFSRLLRFFPPVVIGSLITIIGISLMPAAAIWLGGGNPDSADFGNPANLLLGLATVSVTLVIYARFKGFIGNLSVLIGLFVGSLIAAACGMTHFNRVSEAAWFELSAPMAFGAPEFAPVPILIMTLAMLVIMAETTGNCLAIGKLTGKPTTQQTLGNAFRADGLSTMLGGLFNSFPYNAFTQNTGLIALSNVKSRFVVAAAGAIMVLMGLFPKLGALIAAVPTPVLGGCAIVMFGMTTVAGIQELSRVQFEGTRNGIIVAVSVSAGVLPMSFPALFEHVGPTLKLVLDSGIFLGAITAIVLNVLLNDEKKPTETIGATSAELAD

SEQ ID NO: 22211 - protein, 424 aa, Pseudomonas fluorescens PfO-1
MQQEFNDPLWRTVLSGAQMLFVAFGALVLMPLITGLDPNVALFTAGLGTILFQIVTGRQVPVFLASSFAFITPIILAKGQFGLAATMGGVMAAGFVYTFLGLAVKIKGTGFIDRLLPPVVIGPVIISIGLAMAPIAANMAMGKAGDGSELIHYQTAMMISMPALLTTLIVAVFGKGIFRLVPIISGVLVGFAMSFYFGVVDTAKIAAAPWFALPHFTAPEFNWQAILFIVPVALAPAIEHIGGVIAVGSVTGRDYLKKPGLHRTLLGDGIATTAAGLFGGPPNTTYAEVTGAVMLTKNYNPKIMTWAAIFAISLAFIGKFGALLQSIPVPVMGGILCLLFGSIAAVGMNTLIRHKIDLGEARNLVIVSVTLVFGIGGVLVGTGTGPDDFGLKGIALCAVVAIALNLLLPGNDSWKQKKADEPLI

SEQ ID NO: 22212 - protein, 450 aa, Bifidobacterium longum NCC2705
MSIRKELTAQNVLLGFQHVLVSNVWLDPVFVAGAIGLPIALSSNMINAIFIVSGLVTLVQATRLVRLPVVQGPSAAFDALMIAAGTAGMLGAASSSILIASLVFLLLCLTGVIERMRFLFSPMISGVVIFMVGVSLSGFTLSEFLGGAPGDKTFADPHILTVSILTTAIVLVLSLLGKGLLKSFSFLIALVVGTVVAAAFGMVDFSPVASKGWLGLPTFLPYGPFTFDWKIFIPFFIAYMVAVMEALGVYQAASEIQGTSLERKQVRYGLAGEAAGSAISSLIGGFTTTAYPQNVGLLNLTGEGKLRTRTPVIIAAVLLLILGFVPKAGALLSVIPSAVVGGIFLPAAASLIVTGLRALRKVADDERRQTVIGMSLLLGIALPKALSGLTGGASVFFGNNIMVGVFSAIILNALFVALPDLVAKHRAPASVDVPAADPADGTGAAAYDER

SEQ ID NO: 22213 - protein, 429 aa, Bifidobacterium longum NCC2705
MSNIFQWQLHGDGKTLAPGEVVEPDERLTWVRTAGIGAQHVIAMFGATFLVPILTGFDPSTTLFFTAMSTALFLLINRNVLPSYLGSSFGFIAPITAVSTANKGIAVASFGIMVTGILLALVGVLVHYAGSKWIDIIMPPVVNGAIVAIIGFNLAPSVWTNFQAAPDTALVTLLAVLLVAVLFKGLLGRLNILVGVIIGYVYACIRGQVDFSAIGDAAWIGFPKFHLPQADFSILPMFIPVVLVLVAENVGHVKSVAQMTGRDYDNQIGTALMADGLGTTLAGFGGGSGTTTYGENIGVMAATKVYSTAAYWCAAAFALILSLCPKFGAVINTIPAGVLGGVTTLLYGMIGMIGIRIWVENKVNFDKPLNIMVAAITMIIAIGQFAFTVGGISFNGIAIGTIVILVAYHGLKAIGKATGTIAKDDPDIL

SEQ ID NO: 22214 - protein, 435 aa, Desulfovibrio desulfuricans G20
MSRNTELHLTVGVDEPVSPLKAFALGLQHVLAMDVYIAPFVMAGLLSLSVPETATFIQMTFVAAGLATLIQAGFGIRLPVMQGPSYVPIGALAAIGNSLGLGAMFGSLLPGALVMTLLGKPLRVFSRIVRFFIPPLVGGTVIVIVGIALMPVALKGCYGYFGDPAHNAVVALVSAAVLVVLTVAGSRPGRFNQVVRMGSVVFSMAAGTLTAAAFGMVNFDSVAAAPWLALPVIFPYGTPHIDVSAALTLVFIYLVVLVETTGTWFAVEAVTGSRLDDERINGGTFGEGVGCFLGAMLGGTPVTGYSTNAGIIAITGVASRWAIMAGGGILLVLGMVPKLMNVIASIPGPVISGVFAVICVVIAMNGFRVVRTVTLSERNMLVMGLPILLTLAAVFMPAELRDRLPALVRYLVESGIAVGAVSAVVLNLILPKDAE

SEQ ID NO: 22215 - protein, 415 aa, Desulfovibrio desulfuricans G20
MVSESTEYSFRLKDSLIGAQMLFVAFGALVLVPLLTGLDPNVALFTAGAGTLVFQLITKRQVPIFLASSFAFIAPIIHGVATWGIPATMGGLVAAGLLYVLLGTMIKIQGTQILDRVLPTIVTGPVIMVIGLVLAPAAVFMALGKTGDGSAELFARNDALVVSMISLVATIGASMFGRGVIRLIPIICGIAAGYTAALAYGMVDFTRVIEAPWLAVPSFVAPEFNIEAIIFIVPVAIAPAIEHVGDVLAISSVTGKNYIDKPGVHRTMIGDGIATMFASLLGGPPNTTYSEVTGAVALTRSFNPGIMTWAAITAILLAFVGKLGALLQTIPTPVMGGIMILLFGAIVVVGVNSLVRAQQDLMEPRNLAIISVILVFGIGGMAFHAGEFSIKGIGLAGITGVVLNMILPKPARRKR

SEQ ID NO: 22216 - protein, 424 aa, Streptococcus agalactiae 2603V/R
MKFNVQSNSQAALLGLQHLLAMYAGSILVPIMIASALGYNAKQLTYLIATDIFMCGIATLLQLRLSKHFGVGLPVVLGCAFQSVAPLSIIGAQQGSGYMFGALIASGIYVVLVAGIFSKVANFFPPIVTGSVITTIGLTLIPVAMGNMGDNAKEPSLQSLTLSLVTIGVVLLINIFAKGFLKSISILIGLISGTILAAFMGLVDASVVADAPLVHIPKPFYFGAPRFEFTSILMMCIIATVSMVESTGVYLALSDITNDKLDSKRLRNGYRSEGLAVLLGGLFNTFPYTGFSQNVGLVQISGIRTRKPIYFTALFLVILGLLPKFGAMAQMIPSPVLGGAMLVLFGMVALQGMKMLNQVDFEHNEHNFIIAAVSIAAGVGFNGTNLFISLPNTLQMFLTNGIVISTLTAVVLNIILNGLPKKLI

SEQ ID NO: 22217 - protein, 441 aa, Streptococcus agalactiae 2603V/R
MTLNAKGESNQILVDKEVHSTNLLLDIDEKPELFQGLLLSFQHVFAMFGATILVPLILGMPVSVALFASGCGTLIYQVATKFKVPVYLGSSFAYITAMALAMKQMHGDISAAQTGILFVGLIYVVVATVIKFVGNSWVDKILPPIIIGPMIIVIGLGLANSAVTNAGFVAKGDWRKMLVAVVTFLIAAFINTKGKGFIKIIPFLFAIIGGYILSIILGLVDLSPVEKAAWFELPKFYLPFKTGLFHSYKLYFGPEMLAILPISIVTIAENIGDHTVLGQICGRNFLKKPGLNRLLIGDGLATAFSALIGGPAETTYGENTGVIGMTRIASVTVIRNAAFIAIAFSFFGKFTALISTIPSAVLGGMAILLYGVIASNGLKVLIENRVNFAEVRNLIIASSMLVLGLGGAVLDLGALTLSGTALSAIVGIILNLILPKESMKS

SEQ ID NO: 22218 - protein, 455 aa, Pseudomonas aeruginosa PAO1
MSVVTDRRIPDSPVDQRLPLTQLLLVGFQHVLLMYGGAVAVPLIVGQAAGLSREEIAFLINADLLVAGIATLVQSLGIGPMGIRMPVMMGASFAAVGSMVAMAGMPGVGITGIFGATIAAGFFGMLIAPFMSRIVRFFPPLVTGTVITSIGMCLFPVAINWAGGGKGAEDFGSLHFLFLSSLVLCTILLINRFMRGFWVNISVLMGMGLGYAIAGGMGMVDLGGLAERPWFDIVTPLHFGAPTFDLAPILSMCLVVVIIFVESTGMFLALGKITGREITPTELRRGLLCDAGASFFAGFLNTFTHSSFAQNIGLVQMTGVRSRYVTVAAAGFLILLSMLPKAAFLVASIPPAVLGGAGIAMFGMVAASGIQILHEANITDRRNQLLVAVSIGMGMVPVVRPDFFARLPVWMEPITHSGIAMTAIWAVVLNLLFNILSRNDRSHLCGSHAPAPKHS

SEQ ID NO: 22219 - protein, 485 aa, Pseudomonas aeruginosa PAO1
MAYGLQHVLTMYGGIVAVPLILGQAAGLAPGDIGLLIAASLFAGGLATLLQTLGVPFFGCQLPLVQGVSFAGVATMVAIIGSGGSGGIPAVLGAVMAASLIGLLITPIFSRITKFFPPLVTGIVITTIGLTLMPVAARWAMGGNSHAPDFGSMANIGLAAITLVIVLLLSKLGSASISRLSILLAMVIGTVIAVFLGMADFSKVTEGPLVAFPTPFHFGMPTFQVAAIISMCIVIMVTLVETSADILAVGEIIDTKVDSRRLGNGLRADMFSSMLAPIFGSFTQSAFAQNVGLVAVTGIKSRYVVATGGLFLVILGLLPVMGRVIAAVPTAVLGGAGIVLFGTVAASGIRTLSKVDYRNNMNLIIVATSIGFGMIPIAAPTFYDHFPSWFATIFHSGISSSAIMAILLNLAFNHFTAGNSDQQSVFVAASERTLRYQDIAALHEGDYFLDGKLYDAQGNEVPLAGDDSHGAPPRRRSETAEAGSA

SEQ ID NO: 22220 - protein, 427 aa, Pseudomonas aeruginosa PAO1
MGDAFQEPLWRQVLSGAQMLFVAFGALVLMPLITGLDPNVALFTAGLGTLLFQLVTGRQVPVFLASSFAFITPIILAKGQFGLAATMGGVVAAGFVYTFMGLAVKIKGTGFIDKLLPPVVIGPVIISIGLAMAPIAANMAMGKAGDGSELLPYRTAMMISMPALLTTLVVAVFGKGIFRLVPIIAGVLVGFALSFVFGVVDTAAIVAAPWLELPKFTAPEFNWQAILFIVPVALAPAIEHIGGVIAVGGVTGQDYLKKPGLHRTLLGDGLATSAAGLFGGPPNTTYAEVTGAVMLTKNYNPKIMTWAAVIAITLAFVGKFGAILQSIPVPVMGGILCLLFGTIASVGMNTLIRHKVDLSEARNLVIVSVTLVFGIGGVLIGSGTGPDDIGLKGIALCAIVAIVLNLLLPGNDGWQNKALDEQHKDSH

SEQ ID NO: 22221 - protein, 407 aa, Fusobacterium nucleatum subsp. vincentii ATCC 49256
MEKLSLQTKIVLGMQHVLAMFGATVLVPFLTGLNPSIALICAGVGTLIFHSVTKGIVPVFLGSSFAFIGATALVFKEQGVAILKGGIISAGLVYVIMSFIVLKFGVERIKSFFPPVVVGPIIMVIGLRLSPVALSMAGYSNNTFDRDSLIIALVVVITMIFISILKKSFFRLVPILISVAVGYIVAYFMGDVDLSKVHEASWIGLPVGAFDIITTLPKFTFAGVVALAPIALVVFIEHIGDITTNGAVVGKDFFKDPGVHRTLLGDGLATMAAGLLGGPANTTYGENTGVLAVTKVYDPAILRIAACFAIVLGFIGKFGVILQTIPQPVMGGVSIILFGMIAAVGVRTIVEAQLDFTHSRNLIIAALIFVLGIAIGDITIWGTISVSGLALAALVGIVLNKVLPEDK

SEQ ID NO: 22222 - protein, 421 aa, Streptococcus mutans UA159
MSQELKLDVQERPRFGMLLGLSFQHLFAMFGSTVLVPILVGIDPAVALLSCGLGTLVHLSVTKYKIPAYMGSSFAYIGAMQTLMKTDGIAAVAQGAITGGLVYFIVALVIKWIGNSWIDKILPPVVVGPIVMVIGLSLAGSAVSDVMTKDGHYHLTYVFIGLITLFAVVLFNVYGKGMFGLMPILFGLIFGYLFAVAVGILTGQEIVSFSGVSKASWIQIPTIHLPILNDGFKLYPSAILTMAPIAFVTMTEHFGHIMVLNSLTGRDFFKKPGLDKTLTGDGLAQVVAGILGAPPVTSYGENIGVMALNKIFSVYVIAGAAFLAVLMSFIGKISALLQSIPTPVIGGISIALFGVIASSGLKILIENKTDFDNKKNLLIASIILVSGIGGLTLQIQSLQITGVAFSTLLGIILYQILPEKD

SEQ ID NO: 22223 - protein, 424 aa, Streptococcus agalactiae NEM316
MKFNEQSNSQAALLGLQHLLAMYAGSILVPIMIASALGYNAEQLTYLIATDIFMCGIATLLQLQLSKHFGVGLPVVLGCAFQSVAPLSIIGAQQGSGYMFGALIASGIYVVLVAGIFSKVANFFPPIVTGSVITTIGLTLIPVAMGNMGDNAKEPSLQSLTLSLVTIGVVLLINIFAKGFLKSISILIGLISGTILAAFMGLVDASVVAEAPLVHIPKPFYFGAPRFEFTSILMMCIIATVSMVESTGVYLALSDITNDKLDSKRLRNGYRSEGLAVLLGGLFNTFPYTGFSQNVGLVQISGIRTRKPIYFTALFLVILGLLPKFGAMAQMIPSPVLGGAMLVLFGMVALQGMKMLNQVDFEHNEHNFIIAAVSIAAGVGFNGTNLFISLPNTLQMFLTNGIVISTLTAVVLNIILNGLPKKLI

SEQ ID NO: 22224 - protein, 412 aa, Shewanella oneidensis MR-1
MRRLAIPLQGAQMLFVAFGALVLMPLLTGLDTSVALFTAGIGTLLFQLITKRQVPIFLASSFAFIAPILYGVQTWGIPSTMGGIMAAGVVYVCLGALVKVRGTDFIHKLLPPVVVGPVIIIIGLGLAPVAVNMALGKSGDGSLALVPTNTALIISLVSLCTTIAVAIFAKGLLKVMPILAGIIVGYGLSLAFGIVDFSVVTAANWIAIPKFVAPEFNWHAIAFMIPVAIAPAVEHIGDILAISNVTGKDFMKKPGLHRTLTGDGVATIAAAAFGGPPNTTYSEVTGAVTLTRNFDPRIMTWTAITAITLAFVGKLGALMQTIPVPVMGGIMCLLFGSIAAVGLNTLIRNHVDLSEPRNLSIVGVTLVFGIGGMAFGIGSFSLTGISLCGIVAITMNLLLPASKHHKQDVASH

SEQ ID NO: 22225 - protein, 446 aa, Lactobacillus plantarum WCFS1
MKEVSAAPKITNVKAAILGFQHLLAMYSGDVLVPLLIGAALHFSQEQLTYLVSIDIFMCGIATFLQLKRTPLTGIGLPVVLGCAVQAVNPLIQIGKTYGLGTMYGSIIGAGIFIFLIAGLFSKIKNLFPPVVTGSLITIIGFTLIPVAFQNLGGGDTSAKDFGNLQALGIGFLTIAIILLISVFARGFMKSVSILIGILVGTLIAGAMGMVSLKPVAEASWFHLPTLFYFGTPHFEWSSILTMILVSLTTMVESTGVFFALGDITGRKIEGDDLKRGYRAEGIAVILGGLFSTFPYSTFSENVGVVQLSGVKTRKPIYFSAAFLVVLGLLPKIGALATIIPDPVLGGAMVVMFGIVGIQGIRMLAQVDFRNNNNLLVAAVSIGLGLGVTVQTNIFQFLPGALQIMLSNGVVVGSVAAVGLNLLFNRHAAENTVDDESVGLNETEQP

SEQ ID NO: 22226 - protein, 426 aa, Lactobacillus plantarum WCFS1
MTKKAAFHNDEVVLDIHDRPKLGSWLGLSVQHLFSMFGSTVLVPILVGLNPGIALFSSGVGTLMYILITRGKIPAYMGSSFSFIVVMQSLMKTAGYPAIAQGTVAVGCVYLLVSLLVTLIGSDWIDKALPPIVVGPIVMVIGLSLAGTAAKDATMNGSSYDIKYFGVAMATMLLTVIFNMYLRGFMSLVPILLGIVCGYIIAVLVGIVDFSGVEKAQWFAMPAFQLPFISYHPGIYWGAILSMAPIAFVTMSEHMGHIMVLNKLTKRNFFKDPGLNHTLAGDGTASIIAGFVGGPPVTSYGENIGVLAITRVHSIYVLGGAAFFAIVFSFVGKLSALIESIPSPVIGGVSFLLFGVIASSGMRILIDNKVDFNQKRNLMIASAILVIGIGNAYLQLGSFQFSGLAVATVLGIVMNLVLPKTAVNEK

SEQ ID NO: 22227 - protein, 434 aa, Oceanobacillus iheyensis HTE831
MKIAALGFQHVLAMYAGAILVPLIVGEALGLTVEQLTYLVAIDIFMCGIATLFQVMNNRFFGIGLPVVLGCTFTAVAPMIAIGGQYGITAIYGAIIVSGIFVVLISGFFGKLVRFFPPVVTGSVVTIIGITLIPVAINNLGGGQGASDFGSLANISLGFGTLLFIILMYRFTTGFLRSISILIGLAIGTIIASFMGRVDFTAVADASYFHMIQPFYFGTPTFEWPAIITMILVAMVSLVESTGVYFALGDITDKKLKEKDLTKGYRAEGLAILLGGIFNALQYTAFSQNVGLIQMTGVKKLRVIVVAGIMLIALGLIPKIAALTTIIPTAVLGGAMVAMFGMVIAQGIKMLSAVISDSHENSMIIACSVGMGLGVTVVPELFAQIPNSLQILTSNGIVAGSVTAIVLNILFHMLPQRSKKQQTTDSRELAEDIV

SEQ ID NO: 22228 - protein, 406 aa, Pseudomonas syringae pv. tomato str. DC3000
MLFVAFGALVLMPLITGLDPNVALFTAGLGTLLFQIVTGRQVPVFLASSFAFITPIILAKGQFGLAATMGGVMAAGFVYTFLGLAVKIKGTGFIDRLLPPVVIGPVIISIGLAMAPIAANMAMGKTGDGAVLIPYQTAMLISMPALLTTLIVAVFGKGIFRLVPIISGVLVGFALSFYFGVVDTKKIADAAWLAIPHFTAPEFNWQAILFIVPVALAPAIEHIGGVIAVGSVTGRDYLKKPGLHRTLFGDGIATTAAGLFGGPPNTTYAEVTGAVMLTKNYNPQIMIWASFFAITLAFIGKFGALLQSIPVPVMGGILCLLFGSIAAVGMNTLIRHKIDLAEARNLVIVSVTLVFGIGGVLIGTGNGPNDFGLKGIALCAITAIILNLILPGHDSWKHNRPDDQLL

SEQ ID NO: 22229 - protein, 430 aa, Bacillus subtilis subsp. subtilis str. 168
MKEQHNALQLMMLGLQHMLAMYAGAILVPLIVGAAIGLNAGQLTYLIAIDLFMCGAATLLQLWRNRYFGIGLPVVLGCTFTAVGPMISIGSTYGVPAIYGAIIAAGLIVVLAAGFFGKLVRFFPPVVTGSVVMIIGISLIPTAMNNLAGGEGSKEFGSLDNVLLGFGVTAFILLLFYFFKGFIRSIAILLGLIAGTAAAYFMGKVDFSEVLEASWLHVPSLFYFGPPTFELPAVVTMLLVAIVSLVESTGVYFALADITNRRLSEKDLEKGYRAEGLAILLGGLFNAFPYTAFSQNVGIVQLSKMKSVNVIAITGIILVAIGLVPKAAALTTVIPTPVLGGAMIVMFGMVISYGIKMLSSVDLDSQGNLLIIASSVSLGLGATTVPALFSSLSGAASVLAGSGIVIGSLTAIALHAFFQTKQPNSADIKT

SEQ ID NO: 22230 - protein, 449 aa, Bacillus subtilis subsp. subtilis str. 168
MKKRSFKVFTLSLQHVLAMYAGAILVPLLVGRALNVTTEQLSYLLAIDLLTCGVATLLQTLRGTYIGIGLPVMLGSSFVAVTPMIAIGSNYGIHAIYGSIIAAGVFIFLFARFFGKLTVLFPPVVTGTVVTLIGLSLVPTGVKNMAGGEKINGSANPEYGSLENLLLSVGVLVLILVLNRFLKGFARTLSVLIGIAAGTAAAAIMGKVSFSSVTEAPFFQIPKPFYFGAPAFEIGPILTMLIVGIVIIVESTGVFYAIGKICGRPLTDKDLVKGYRAEGIAILIGGLFNAFPYNTFAQNAGLLQLTKVKTRNIVVTAGCILVCLGLIPKIAALASAVPAAVLGGATVVMFGMVIASGVKMLSTADLKNQYHLLTIACSIALGIGASTAPGIFAEFPAPIRILVSDGTITGSLTAIFLNLFFSLRDKKELTAQQTELPVLEHTLALEKEV

SEQ ID NO: 22231 - protein, 438 aa, Bacillus subtilis subsp. subtilis str. 168
MRNGFGKTLSLGIQHVLAMYAGAIVVPLIVGKAMGLTVEQLTYLVSIDIFMCGVATLLQVWSNRFFGIGLPVVLGCTFTAVSPMIAIGSEYGVSTVYGSIIASGILVILISFFFGKLVSFFPPVVTGSVVTIIGITLMPVAMNNMAGGEGSADFGDLSNLALAFTVLSIIVLLYRFTKGFIKSVSILIGILIGTFIAYFMGKVQFDNVSDAAVVQMIQPFYFGAPSFHAAPIITMSIVAIVSLVESTGVYFALGDLTNRRLTEIDLSKGYRAEGLAVLLGGIFNAFPYTAFSQNVGLVQLTGIKKNAVIVVTGVILMAFGLFPKIAAFTTIIPSAVLGGAMVAMFGMVIAYGIKMLSRIDFAKQENLLIVACSVGLGLGVTVVPDIFKQLPSALTLLTTNGIVAGSFTAVVLNIVYNVFSKAKKIEQEADLAEQKTAV

SEQ ID NO: 22232 - protein, 465 aa, Bradyrhizobium japonicum USDA 110
MSSEVHPVDEVLPVPRLLALGLQHVLVMYAGAVAVPLIIGRALKLPPEDVAFLISADLFACGLATLVQCLGFPGVGIRLPVMMGVTFASVGPMLSMAAAPDIGLLGIYGSVIAAGLFGIVAAPFVSRLLPLFPPVVTGSIILVIGISLMRVGINWAGGGLPTLTKVVDGVAGSFPNPAYGQLQGLGISLFVLLFILGLIKWGTGFLANVSVLLGIVAGAVLATILSVMHFDKVSAASWGALVIPFRFGMPQFHLVPVVTMCVVMIVVMIESLGMFLALGDITGKTVDREALSRGLRADGVGTLLGGIFNTFPYTSFSQNVGLVSVTGVRSRWVTVTGGCIMLGLGLLPKLAALVEAVPLVVLGGAGLVMFGMVAATGARILTSVDFRTNRYNLFIVAISIGFGLIPLAAPGFFRNLPHDLQPLLESGILLCAVVSVLLNAFFNGLGGGAAAEADAAAVASSAQHV

SEQ ID NO: 22233 - protein, 439 aa, Bradyrhizobium japonicum USDA 110
MTTTTGSDEQTQGYFPRWKLKTSGVIMPEERLSWGQTIVSGLQHCVAMSGSTIIAPLLMGFDPNVAVLFSGVGTLIFFVIVAGRVPSYLGSSFAFIAVVLAATGYAGQGPNPNISVALGGIVGAGVLYGAIALIVMWSGVGWVERLMPPAVTGAVVAAIGLNLAPVAVKAVSANAFDTWIGLATVLIIGVVAVAAPGLWRRLPIILGAIGGYLLYFLFANGLGFGKPIDFALLSAASWLGLPKFTTPTFQADAIFLIAPVAVILVAENLGHIKAVGAMTGRSLDAYLGRALFADSLATIVAACGGGTGVTTYAENIGVMAATKVYSTLLFALAATVSILLGFSPKFGALILSIPGPVIGGLSIVLFGLIAAMAGRIWVENKVDFANPANLITVAVALTAGAGDLTLKFGAFTIGGIGTATFGAIILYQILTSSLAQHAE

SEQ ID NO: 22234 - protein, 426 aa, Brucella melitensis 16M
MGYFPSWRLTSNAVVLPDERLPAAAAVPMGIQHLLAMSGSTIVAPLLMGFDPNVAVFFSGIGTLLFFLITAGRVPSYLGSSFAFIAVVIAATGYSGSGPNPNIAIALGGIIACGALYSLIGLIVMFLGTGWVEKLMPPAVTGAIGVSIGLNLAPVAIGQLKGTGAHTSIALLTVLCMAMISAYGPRGTRRLSVLFALLFGYLLVLIAGNGLGIVPGIDFTAVKNAAWFGLPHFTTPAFNWQAVTLIAPVAIVLVAENLGHIKALGSITGRNMDGYIGRGFFSDGLATMISGAGGGTGVTTYAENIGVMAMTKVYSTLIFVIAAIMALILGMSPKFGAILQTIPAPVLAGLAVSVFGLIASAMARIWIVNKVDFADSRNLFTVGVALIFGAGDFTLNIGNFALGGIATSTLAALVLYQLLGIGRSDS

SEQ ID NO: 22235 - protein, 434 aa, Enterococcus faecalis V583
MNTPQQTETPNGKAAVLGLQHLLAMYAGAVAVPLLIGTGLNFDSQQMTYLISIDIFMCGVATLLQLTVNKFFGIGLPVVLGCAIQAVAPLIMIGTNKGVGAIYGSIIASGIFVVLIAGFFSKIKRLFPPLVTGTVITVIGLTLIPVAVEKMGGGLATDKSFGDPKNLLLAFVTIALIIVVQVWGRGFIKSIAVLIGLVGGTILAAFLGLVDLSPVGQATWFHFPQPFYFGKPTFDLSSIVLMIIISIVSMVESTGVYFALGDITGKKIGEDDLRRGYHAEGLAVILGGIFNTFPYTGFSQNVGLVQLSGIKTRRPIYFSAFFLIILGLLPKIGAMAQIIPEPVLGGGMLVMFGMVAVQGMRMLSKVDYSNDKNLLIIAISIGFGLGFNIMPTLFNKVPETVSMFTGNGIVMSSITAIILNLLFNGLKETSESNE

SEQ ID NO: 22236 - protein, 443 aa, Enterococcus faecalis V583
MSEKKQNNLHLTVGPEDSVSFGQATMLGIQHVLAMDVYVVPVIIASIIGISTAQTSSLIQATFIAAGLATIIQSHFCMRLPVAQGPSFIPIGAIAGIYFANNQQGNGWGAVLGASLVGAIVVIILGFTGIFNRLITKFVPPIVGGTIIFVVGLSLMPVALSDNIYHAKGELGQNILLAFIAAGTLIFFALLGSALKKGRIFRVSSVILALLFGSIAAQLLGVLDLSAVSKAAWFSLPQLPLVNFSFQFDWSAIATMLVIYLVLMAETTGTWFAVSHVVAEPLTEEKINRGVIGEGLGCLVSSFIGGTPVTSYSTNAGIISITGVASRKVFVAAGAWFVLFGLSGKLSTLISAIPAPVIGGVFVVVCGIISVSGMKVMSDVTIHEKEMYVIAVPIIMTLALTLLPKEFLETLPQFLQYLFSSPVATASIVAILLQAILPNVQEG

SEQ ID NO: 22237 - protein, 439 aa, Enterococcus faecalis V583
MNEKKEQALFEYDAKLSISEAIPMGLQHVVAAVVGIVTPGIMIAKVCQLSPSDTTILIQTSLIFSAVATLIQLFPIFGKVGSRLPVMMGASFAYVPILMAIGADFGIAAIFGSQLVGSILVIIVGLFIKKIRVLFPPLVTGTVILSIGLSLFPVAIKYMAGGAGSADFGSARNWLVALLTFAIVFYFNYFAKGFLKLSAILNGMVIGYLISLALGMVSFEPVQNAKIVQVITPFHFGLDFQLVPIFTLVVMFIVDAVQAIGQFTATTVGAMDRDATDEELSGGIMGSGFTNFIGSLFGSIPVATFGQNVGLVTVTKVINKYVLVFASVILLIAGFVPKVAALLTTIPYAVIGGATISVFASISMTGIRMIASQEMTPRNTGVVGTALAFGIGVTLSTGSLAGFPTWVTTIFGNSEVILTTLVAVLLNVILKPKKRVALE

SEQ ID NO: 22238 - protein, 394 aa, Bacteroides thetaiotaomicron VPI-5482
MDSNNLTPLRKGVVGVQFLFVAFGATVLVPLLVGLDPSTALFTAGIGTLIFHAVTRGKVPIFLGSSFAFIAPIIKATELYGLAGTLSGMVGVALVYFVMSALVKWQGVRVIERLFPPVVIGPVIILIGLSLAGTGVNMAKENWVLALLSLVTAVVVSMKAKGLLKLIPIFCGIIVGYLAAWLFYDLDLSGVRDAAWIGLPQFVFPKFSWEPILFMIPVAIAPVIEHIGDVYVVNTVTGKDFVKDPGLHRTLLGDGLACCFAGLVGGPPVTTYSEVTGAMSLTKITNPQVIRIAAISAILFSVVGKISALLKSIPSAVLGGIMLLLFGTIACAGIGNLVNNCIDLSRTRNIIIVSLTLTVGIGGAVLTWGDFSLSGIGLAALVGVLLNLILPKDD

SEQ ID NO: 22239 - protein, 440 aa, Bacillus cereus ATCC 14579
MKQHPFKIASLGMQHMLAMYAGAIIVPLIVGGGLGLNQKELTYLVSIDLLMCGVATILQALSNRFFGIGLPVVLGCTFTAVGPMIAIGKQYGVSSIYGAIIAAGLFVVIFAKLFGKLVKLFPPVVTGSVVTVIGVTLVPAAINDMAGGVGSKDFGSLENLALAFGVLLFIIIMYRFFDGFIRSISILLGLLFGTIVAAFMGKVSLQAVGEADWFHGIQPFYFGTPTFELTPIITMILVACVGIVEATGVYFALSDICNKKIGEKELTKGYRAEGLAMVLGGIFNAFPYTTYSQNVGLVQLTGVRNRVIIYTCGGMLIALGFIPKIAAITTIIPKSVLGGAMLAMFGMVMAYGIKMLSSVDFGRQENLLIVACSVGIGLGVTVVPTLFSQLPESIRILTDNGIVLGSASAVLLNIVFNMVPQRKVKVEEEPVSMQSAVREA

SEQ ID NO: 22240 - protein, 448 aa, Bacillus cereus ATCC 14579
MCTGTKSFFLLQRFKLKEDVTMEQKPVLDVNEVPKPGKWLFLSIQHLFAMFGSTVLVPFLTGLNPSVALISSGLGTLAFLLITKGQVPAYLGSSFAFIAPIITAKTAGGPGAAMLGGLLAGLVYILISLGIKKSGSEWIMKLLPPIVVGPVVMVIGLALAHTAVNMAMNGADGKYSFTHFSVALVTLAITIICSIFGRGFFSIIPVLLGIIGGYIFAYFQGLVDLKPVAEAKWFVVPDFTVPFVTYTPEFSWKIVLLMVPVALVTISEHIGHQIVLGNVIKRDLIEKPGLHRSIFGDGVATLIASLIGGPPNTTYGENIGVLAITRAYSVYLFIGSAVFAIMFGFIGKISALIHSIPTPVMGGVSILLFGVIASSGLRMMVDDKTDLSDKRNLMIASVILVIGIGGAVLHVGESFQVEGMALAAIVGVLLNLLLPETKQIKQSKQIAS

SEQ ID NO: 22241 - protein, 428 aa, Bacillus cereus ATCC 14579
MDNQHNQNHIMGTLQWFIFLLANSIALPIVVGGLFHLTTEEIFYLMQRTFFVVGISSFLQGWLGHRLPIADGPAGSWVGVFTVLAYATAGQDQLHSTLQILELGMIISGIILIGLGVTGFIGRILFLFTPLVTGTFLLLLCLQLSGVFLKGMLGITATISQIDGFTAMIAFSIFLFVIILSNFGKGFVKSYAVLIGLISGWIIFLIAGKVTIPSQVTHFVQLPHIFAWGLPKWNTGMAVSSFVMVCILVSNTVAAIIAINQATIHKATIEQKQLKDGTWVGGISHIISSVFSTVGVVPLPATAGFIRLTKQKYIRSFLMACALLVVMSLFPSIIRYLASLPSAVASAVLMASFVQLIGIGFNNIKQVPMSERNVTILGVAVLFGSGVMFLPSGALQSLPSVMQYIFGNGLFVGTVVSILLEQIWRVGK

SEQ ID NO: 22242 - protein, 369 aa, Bacillus cereus ATCC 14579
MKEVDIMKTFLSALQWALFILAGSLIVPISVATSYGLNGAEAIAFVQRTLFVLGFAGLLQAIFGHKLPIQEGPAGLWWGIFSLYASLGVVLFGSSNETLKVLQYAFLLSGIICIILSVFGLIDKLVRYFTPTVIGTYLFLLVAQLSGSFLKGMFGLDGKHTEVQPNVFILSLIVILLSFFIMKLPIIGQYSVLFSIVCGWILFACFGLSNPITPVTDIIRFPSLFVFGMPRVEWNMVITVIFVTLLLLTNMLASIRVVQKVVSKYEENAASDRFKQAGIITGINQLLGGLFSAIGPVAISGSAGFIATTNIYKRLPFILGSSFIIVVSIFPKITSFFAAIPVAVGYAAIYPVFARHDWSRLSRIRNCPG

SEQ ID NO: 22243 - protein, 451 aa, Streptomyces avermitilis MA-4680
MATTASVHPVDEVPPIRQLAAFGLQHVLAMYAGAVAVPLIVGSAMKLSAADLAYLITADLLVCGIATLIQCVGFWRFGVRLPIMQGCTFAAVSPMVLIGTTGGGLPAIYGSVIVAGLAIALLAPVFGKLLRFFPPLVTGTVILIIGVSLLPVAGNWAAGGQGAKGFGEPKNLALAGFVLLVVLGVQRFAPAFLSRIAVLIGIVVGLAVAVPFGFTDFGGVGDADWLGISTPFHFGTPTFHASAIASMLVVALVTMTETTGDLIAVGEMTDRGVEPRMLADGLRADGLSTVLGGVFNTFPYTAYAQNVGLVGMTRVRSRWVVAAAGGMLVLLGLLPKLGAVVAAIPAPVLGGAGLVMFGTVAASGLKTLARVDFKDNDNLTVVAVSVAVGMLPVGVPTIYAQFPDWFQTVMNSGISAGCLTAIVLNLLFNHLPGKAGSPAKAAEPDEASGTA

SEQ ID NO: 22244 - protein, 486 aa, Streptomyces avermitilis MA-4680
MAAQPSPSTDAVPTDQPRHPVDEKLPLLKMTTSGLQHVAAMYAGVVAPPLIVGAAAGLSGTELTFLTGACLFTAGLATFLQTLGFWKIGARLPFVNGVTFAGVAPMTAIVASTKDRSDALPIIFGAVIVAGALGFVAAPFFSKAVRFFPPVVTGTVITLIGVSLLPVAFGWAQGPDPTADSYGSTTYLGLAAATLVIVLLLRRFTHGFVKQIAVLLGLVIGTLLAIPLGVTDFGPVAGADLIGFPTPFHFGAPRFQLAAILSLSVVMVVSMTESTADMLALGEIVGRPADERTIAAGLRADTLGSALSPLFNGFMCSAFAQNIGLVAMTRIRSRYVVATGGGFLVLMGLCPVAASLIAVVPRPVLGGAGVVLFGSVAASGIQTLVRAGLEKDNNVLIVAVSLAVGIIPITAPEFYHAFPQTAKIVLDSGISTGCVAAVVLNLLFNHLGRRQGDDEVTAPMEPGEEIAGQRGGAGSPAAGPSAVTAH

SEQ ID NO: 22245 - protein, 479 aa, Streptomyces avermitilis MA-4680
MDLGVRWKLHGDGRTPAPGAVVRPDERLSWPRTVGLGAQHVVAMFGASFVAPVLMGLDPNLAIMMSGVATVIFLLATRGRVPSYLGCSLSFVGVAAVIRAQGGTSATVTGAVFVVGVALFLVGLAVQRFGARIIHAAMPPIVTGAVVMLIGFNLAPVTASTYWPQDQWTALLVMAFTGLAVVCLRGFWSRIAIFLGLVFGYGISWASDRIFGKIHSVDASGKLTDHWRLDLSGVGKADWIGLPSFHGPSFQWSAILVALPVVIALVAENAGHVKAVGEMTGDPLDDKLGTAISADGVASMLSTAVGGPPNTTYSENIGVMAATRVYSTAAYWAAAGFALLFGLSPKFGAVVAAIPGGVLGGITVILYGMIGLLGAQIWLNARVDLRNPLNLVPAAAGIIIGVGGVSLKFTDNFSLSGIALGTLVVIIGYHGLRAMAPAHLKTQEPLLDSGTSSYDEAEGDKAGVSEAGDDKAEDQRASS

SEQ ID NO: 22246 - protein, 399 aa, Thermotoga maritima
MEFEGAVTKVSGWRWFLLALQHFVAMFGATVLVPLITGLDPLVALLTAGIGTLIFHFVTGGIVPVFLGSSFAFIAPILAVKEIYGDLAYATGGIFVAGLFYVLYALIVKAVGPEKVKKILPPVVTGSMIMVIGLTLSPVAIQMASSDWPLALIVIATVVFVSTMTRGFFSMVPVITGVVVGYVAGLFMGKIDTSVIVSTPLFSVPKVMLPKFDYGAIFMIVPVTLATFMEHLGDITTNGAVVGKNFFDKPGLHRTLLGDGLATAVAGLLGGPANTTYSENTGVLALTRVYDPSVLRGAALVAIFAAFVSKFGAILQTIPQAVMGGVSLILFGMITSVGVRTMVNAEVDFSKPRNLMITALMLTVGIGGAVLKVGRVELKGIGLAALVGIFLNLILPDRD

SEQ ID NO: 22247 - protein, 427 aa, Pyrococcus abyssi
MGPGVLVKVDEKVEPRKAILLGLQHVLAMFGATVTVPLVVGTAVGLSKEEISIMIQAVLLAMGIATLLQTTIGSRYPIVQGSSFAFIPGLISIGKSLGMAATEGALIVGGIIEALIGGTGIVGKVKRLFTPLVTGVTIMLIGFSLADVAVKYFFNFYADPSGSSIPRATIVALVTFITTVYVALKAKGPIRAMPVIAGALVGYLVSVPLGLANFQLVKELPLVSLPRPFPWGIPEFNLTAIVTLLFAFMVSIIESVGDYHAISAIAEAPITNKHINRGIMSEGIACSIAGILGACGTTSYSENIGLVALTKVASRYVVQIGGIILVVLSLFPKFAGILASMPAPVLGGLTIALYGMISVTGLRLIKDKVELNDRNTLILATSLIVGLGAPQLPPKFLAHFPRIVASILESGMAIGAITAIVLDQLLR

SEQ ID NO: 22248 - protein, 468 aa, Ralstonia solanacearum
MASTLAAPPADLTNERVAYARLFALGLQHVLVMYAGTVAVPLIVGSALHLPKEQLAFLINADLFAAGVATLIQSLGVWKFGIRMPVMMGVTFASVGPMIAIGGDPGIGLLGIYGAVIAAGLFGIVIAPLMGRVLGLFPPVVTGTVITLIGVSLMGVGINWAAGGQPTLQAMVDGVLRTVPNPAYGDPGGLAIALSVLVIILLLTKYGRGLIGNIAVLLGVACGTLIAMAAGKVSFAGVADADWMAVITPLHFGMPTFHAGAVASMCVVMLITLVESTGMFLALAEITGKTLTHDDLTRGLRADGLGSVIGGLFNTFPYTSFSQNVGLVTVTGVRSRFVAAAGGVILIALGLFPKMAHVVASVPAFVLGGAGIVMFGMVAATGVRILGSIDFNRHRHNLFIVAIAIGFGMIPTLAPAFFQYLPRWLEPVTHSGIVLGTLVAVILNLYYNGMQPAEHAMRAAAATTHSAE

SEQ ID NO: 22249 - protein, 528 aa, Mesembryanthemum crystallinum
MAALKGGEDFGPFPVKEQLPGVDFCLNSNPPWHEAIALGFQHFLVMLGTTIMIPTILVPQMGGGPEEKALVIQTLLFVSGLNTLLQTMIGCRSSVVIGGSHAFIIPAISIIFSDQYGRIVDPYERFRVTMRAIQGAIMFASMLPVLVGVLGLWRIVVRFLSPLAAIPLVILTGLGLFQFGFPQLAKCVEVGLPALIVLVFISQYFSQLLKPFQVIGRRYAVILIVGLLWAFAAILTAAGAFNHSAPKTQFYCRTDRSGLISAAAWIRVPYPFQWGRPTLNVGNGFAMMAAAFVALVESTGTFITAARYGSATPLPPSVVSRGVSWLGVANFINGLFGAITGATASVENAGLLGLNQVGSRRVAQLSAVFMLFFSVLGKFGALLASIPLPIFAALYCVLFAYAASAGLSFLQFCNLNSFRSKFILGFSLFMGLSIPQYFNEFLLVTGRTPVFTRSVAFNSMLQVIFSSPATVAGIIALFLDLTLHRRHTATRRDSGRHWWKKFRTFDADTRSEEFYSLPWGLNKYFPSL

SEQ ID NO: 22250 - protein, 526 aa, Mesembryanthemum crystallinum
MAALKGGEDFGPFPVKEQLPGVDFCLNSNPPWHEAIALGFQHFLVMLGTTIMIPTILVPQMGGGPEEKALVIQTLLFVSGLNTLLQTMIGCRSSVVIGGSHAFIIPAISIIFSDQYGRIVDPYERFRVTMRAIQGAIMFASMLPVLVGVLGLWRIVVRFLSPLAAIPLVILTGLGLFQFGFPQLAKCVEVGLPALIVLVFISQYFSQLLKPFQVIGRRYAVILIVGLLWAFAAILTAAGAFNHSAPKTQFYCRTDRSGLISAAAWIRVPYPFQWGRPTLNVGNGFAMMAAAFVALVESTGTFITAARYGSATPLPPSVVSRGVSWLGVANFINGLFGAITGATASNAGLLGLNQVGSRRVAQLSAVFMLFFSVLGKFGALLASIPLPIFAALYCVLFAYAASAGLSFLQFCNLNSFRSKFILGFSLFMGLSIPQYFNEFLLVTGRTPVFTRSVAFNSMLQVIFSSPATVAGIIALFLDLTLHRRHTATRRDSGRHWWKKFRTFDADTRSEEFYSLPWGLNKYFPSL

SEQ ID NO: 22251 - protein, 438 aa, Bacillus sp. TB-90
MKKNYGMARIVSLGLQHVLVMYAGAILVPLIVGGALHLSSNELAYLVSIDLLTCGIATLLQSWKNRFFGIGLPVVLGTSFVAVTPIIGIGTQYGMGAIYGSIITAGIFILIFSPFFGKLAKLFPPVVTGSVVTIIGVSLVPAGIKNMAGGEGNPHFGDPENLLLSFGVFIFILLINRFFHGFIRTISVLLGIIAGTIVAAFMGKVDFTNVAQASWFHMPELFYFGAPSFEWGPMITMTLVGIVIIIESTGSFFALSKICEQNMNEQDLVLGYRAEGLSFILGGLFNAFPYSTFAQNVGLVQLTNIKTRNVTIAAASLLVLLGFIPKIAAFTTIIPTPVLGGAMIVMFGMVVSSGIKMLSSVDFGQQSNLLTVACSVALGLGATVVPDLFSKLPQFMRILVGDGIVTGSLTAIILNLFFNLSSKKKPTVSSTLETTIES

SEQ ID NO: 22252 - protein, 532 aa, Arabidopsis thaliana
MAGGGAPAPKADEPQPHPPKDQLPNISYCITSPPPWPEAILLGFQHYLVMLGTTVLIPTALVPQMGGGYEEKAKVIQTILFVAGINTLLQTLFGTRLPAVVGASYTFVPTTISIILSGRFSDTSNPIDRFERIMRATQGALIVASTLQMILGFSGLWRNVVRFLSPISAVPLVGLVGFGLYEFGFPGVAKCIEIGLPELLILVFVSQYLPHVIKSGKNVFDRFAVIFAVVIVWIYAHLLTVGGAYNGAAPTTQTSCRTDRAGIIGAAPWIRVPWPFQWGAPSFDAGEAFAMMMASFVALVESTGAFVAVSRYASATMLPPSILSRGIGWQGVAILISGLFGTGAGSSVSVENAGLLALTRVGSRRVVQIAAGFMIFFSILGKFGAVFASIPAPIIAALYCLFFAYVGAGGLSFLQFCNLNSFRTKFILGFSVFLGLSIPQYFNEYTAIKGYGPVHTGARWFNDMVNVPFSSEPFVAGSVAFFLDNTLHKKDSSIRKDRGKHWWDKFRSFKGDTRSEEFYSLPFNLNKYFPSV

SEQ ID NO: 22253 - protein, 494 aa, Sinorhizobium meliloti
MNDASSIHPVDERLPIGRLATLGIQHVLVMYGGAVAVPLIVGRALQLSPEDVAFLISADLFVCGIVTIIQSLGLTRGIGIRLPVMMGVTFAAVGPMVSMAAMTPGIDGARTIFGAIIGAGLVALLIAPIMGRLLKFFPPVVTGTIILVIGVTLMRVGVNWIFGNPFGPTAPKLVDPAHAQWLAGLKQLAATGGPAVPDGLVLGATVPNPIYAEPGHVALAAFVLVSILVVARFGKGLISNIAVLIGIVIGCVAAALLGMMHFDRVASAGWFAVVTPLRFGMPIFDPVLIATMSLVMIVVMIESTGMFLALGEMTNREVKQQQLTAGLRVDGLGTIIGGLFNTFPYTSFSQNVGLVGVTGVKSRYVCVMGGVIMILLGVIPKMGALVEAVPTFVLGGAGLVMFGMVAATGVRILSTVDFKSSRNNLFVVAVSVGFGLIPMIAPNFLMWMPHAIHPIIESGIVLAAVSAVVLNAFFNGLSIERSACVEAARLADGH

SEQ ID NO: 22254 - protein, 449 aa, Sinorhizobium meliloti
MTGNKIDSIDPTDEVLPPRSLVLFGLQHVLVMAASPITAVFLVSKALGFSDALTVSLISATFLICGLGTILQSFGPAGFGARLPFIMVPGGAPIAIFLAIAQQTDVQTAVGAVILTAGFYFLALPVFRRLLRYFPPIVVGTMLLLVSVNLVRIYGGTITGKQGSEGFADPMNVGLALATIALTVIFARVFTGTLQRISVMFGLIAGSAIAIGAGYMDLSGIFDGPVIAMPQLLPFGMPKFDFFAALPLIVFSIISMAEATGQTIATAEIVGRRGDAHAIVPATIRGDAVASLVGGLFGTSLIITSGENVGIVRATNVKSRYVTATAGVILVLIALFAPVGRLASALPGPVVGGTAVIVFSIIGVIGIDLLRRVDLREHGPMFTLAAALSMGLLPILVPGVYSQFPPWSQMILANGLAAGTITAVIVNAFFQHLPLEQFQEKCAAVFRPE

SEQ ID NO: 22255 - protein, 463 aa, Sinorhizobium meliloti
MNTDSKCDAIEAMFPAPKLAALGLQHVLVMYAGAIAVPLIIGSALNLSKDQIAMLISADLFCCGIVTLIQCLGVWNVGARLPIMMGIGFTAVPPIIATGTDPDLGMPGVLGAVIASGVFTLLAAPYFSRWVRFFPAVVTGTVMLVIGLSLMRVGVNWAAGGQPMIKGPDGLIPNPAYGEPFALAVAAIVLVSILLMTRFLKGFLANLAVLFGIGIGFAIAVAFGKVDFQGVADASWVTVVTPFAFGMPIFDLWATVALCTVMIVMMIEATGQILAVGDMAGRTISEADLARGLRTDGLGNIIGGIFNTFTYTTYAQNVGLLQITGVMSRWAVAAGGVVLILLGCLPKIAFITASIPSYVVGGAAIVMFGMVSATGVKILARVNFVDNRRNLYIVAVSVGLAMIPVVADKIFAQLPEFIDRFFHSGVLVGTFSAVLLNLLFNGVPPREEVQPDLLGEGAMRHPG

SEQ ID NO: 22256 - protein, 490 aa, Sinorhizobium meliloti
MANSAEETVSPTRPEDEKLGIGANLAYGLQHVLTMYGGIVAVPLILGQAAGLGSGDIGLLITASLFAGGLATILQTMGLPFFGSQLPLVQGVSFSGVATMIAISGNGGLQSVLGAVIAASLIGLLITPIFSRITRFFPPLVTGIVITTIGLTLMPVAARWAMGGNSSAPDFGSPANIQLAAVTLVIVLLLSKLGSAAISRLSILLALIIGTVIAYFAGMADFSQVTEGPFFALPLVFHFGYPTFEVAAIASMFIVIMVTLVETSADILAVGEIIETKVDSRRLGDGLRADMLSSLLAPIFGSFTQSAFAQNVGLVAVTGVKSRYVVATGGLFLVTLGLLPVMGRIVAAVPSSVLGGAGIVLFGTVAASGIRTLSKVDYANNMNLVIVATSIGFGMIPIASPTFYEHFPAWVETIFHSGISSAALMAISLNLIFNHMTAGNSDQQSVFVAGTERTLRYQDIARLHDGDYFLNGKLYDANGTEVPVLAAEAH

SEQ ID NO: 22257 - protein, 529 aa, Oryza sativa (japonica cultivar-group)
MAAPAPKQEELQPHAVKDQLPAISYCLTSPPPWPEAILLGFQHYLVMLGTTVIIPTALVPQMGGGNEEKARVIQTLLFVAGINTLIQSFLGTRLPAVIGGSYTFVAPTISIILAGRYNGIADPHEKFVRIMRGTQGALIVASTLQIIMGFSGLWRIVVRLLSPLSAAPLVALVGFGLYELGFPSVAKCVEIGLPQIILLVALSQYIPKLVPLLGTAFERFAIIMSVALVWLYAFFLTVGGAYKNAAPKTQFHCRTDRSGLVGGAPWISVPYPFQWGAPTFDAGEAFAMMAASFVALVESTGAFIAVSRYASATPCPPSVMSRGIGWQGVGILLGGLFGTANGSSVSVENAGLLGLTRVGSRRVVQISAGFMIFFSILGKFGAVFASIPGPIIAAIYCLLFAYVGMAGVGFLQFCNLNSFRTKFIVGFSVFMGLSVPQYFNEYTSVAGYGPVHTHARWFNDMINVVFSSKAFVGGAVAYLLDNTLQRHDSTARKDRGHHFWDRFRSFRTDPRSEEFYSLPFNLNKFFPSF

SEQ ID NO: 22258 - protein, 489 aa, Lycopersicon esculentum
MKERMERQKGVNPKIEPFVPKKGYDPRELKSWAKRTGFVSTTFSGETERGGGHSRRDFDNGRDLNVSSNENVGFDLERGVNKTETVSPKIELDPILGRARNRGVEIEPISGSNNEGLRNGRGRGRGKGENLGRRTEMEPILRGHNEERKDARNENGNDGDSANGAVNGNGNGHIAQPATPVTEVPRKDDGNVDEEVGMGIYPNGEDPSYGGWHQSPRMKCGLRENPGVDPPGMHYCWRIQHAPANIFEGSEQHRSSNNVPSENTRVPLMFYGLQHYLSLAGSLIFIPLITVPTMGGSDKDTADVVSTVLLLSGLTTILHSYFGTRLPLVQGSSFVYLAPALVIMNSEEYRNLADHYLGGISIFGYRVFRIYALLRKLSSHVHLFSNEQKELLQVPVSVMIIWAYAFFLTAGGAYNFKGCSPDIPNSNILIDACQKHANTMRHCRTDVSNAMRTAAWVRIPYPFQWGIPTFRLRTSIIMVIVSLVASIDS

SEQ ID NO: 22259 - protein, 505 aa, Dictyostelium discoideum
MILDYFPKYKLKNTSDIPIMPDERIPIIPSFFLSFQHILAMFGGNILCPLLMGFSTNSALFFSGVGTLIFYVCTGGKVPSYLGSSFAFIGVVNSATGYIYSPGTTNPNISPAAGGIVVCGFIYLAIGLLVMVAGHAWIEFLTPPVVTGSVIVSIGLHLANSAVGQAATTGFDAWMAALTILLVVMITCYAPGPLKRLPILIGGVVSYVVYLLCGLGGVGPGIDFSVVSDAKWIGLPQTHLPSFDSTYISMIAPVAVILAAENIGHLKAVSSMTEYSMDNLLGRTFIGDALACILAGFFGSSGTTTYAENIGVMSITKIFSTLSFVFAACIAIVLGCLPIFGAIVQTIPPGIFGGLSIVLFGITAITGAKLWINSQVDFSKPRNLLTAGISIVLGTGMISVNVEWGKIKIDAIGVSTFVSIILYQLLRENWGTIFRNILAKITGRSFKQSDDCEETIENPQYSNLLKPLIENQGINSSDYNEFNNEDNENNNYEPFKDNDEEIIQN

SEQ ID NO: 22260 - protein, 544 aa, Oryza sativa
SRSWGRRRRMAAAPPPKADELQPHPPKEQLASVSFCITSPPPWPEAIILGFQHFIVMLGTTVIIPSALVPQMGGGNDEKARVIQTLLFVAGINTLFQTFFGSRLPVVMGGSYTFVAPTISIILAGRYNNEADPREVVPIKKFLRTMRGTQGALVIASTIQMILGFSGLWRNVVRLLSPLSAVPLISLVGFGLYSLGFPGVAKCVEIGLPELILLVAFSQYLPQVLHFGKPIFGRFGVLFTVSIVWLYAYILTISGAYKNAPPKTQVHCRVDRSGLISGAPWIRVPYPFQWGAPTFDAGEAFAMMMTSFIALVETTGAFIAASRYASATMIPPSIISRGIGWQGISILIDSFFGTANGTSVSVENVGLLALTHVGSRRVVQISAGFMIFFAILGKFGALFASIPLPIFAGMYCIFFAYVGACGLSFLQFCNLNSFRTKFILGFAFFMGISVPQYFNEYTAVAGYGPVHTGARWFNDMINVPFSSKPFVAGLVAYFLDNTIETHNNTVRKDRGYHWWDKFRSFKKDARSEEFYSLPFNLNKFFPAV

SEQ ID NO: 22261 - protein, 446 aa, Triticum aestivum
  unsure (1)..(446): unsure at all Xaa locations
XVRFGTRLPAVIGGSYTFVLPTISIILAGRYTNEPDPHTKFLKIMRGTQGALIVASALQIIVGFSGLWRNVARYLSPLSAAPLIALVGFGLYELGFPSVAKCVEIGLPELILLVIFAMYLPHTIHMMKSIFDRFAVLFTIPIVWLYAYLLTVGGAYRNVSPKTQFHCRTDRSGLIGGAPXWIRVPYPFQWGAPTFDAGEAFAMMAASFVALVEATGSFIAGSRFASATPLPPSVLSRGVGWQGVGGRLGGLFGTGNGSSVSIENAGLLALTRVGSRRVVQISAGFMIFFSILGKFGAVFASIPAPIFAALYCVFFAYVGSAGLGFLQFCNLNSFRTKFILGFSVFMGFSVPQYFNEYTSVAGFGPVHTRARWFNDMVNVLFSSKAFVGGIVAYVLDNTLHRHDGAVRKDRGYHWWDKFXRSYRTDTRSEXEFYSLPFNLNKFFPSV

SEQ ID NO: 22262 - protein, 437 aa, Bordetella pertussis
MSNTYFPRWRLADDTVPGAVIAPDERLSWPKNIAMGAQHVVAMFGSTVLAPLLMGFDPNVAILMSGIGTLIFFLFVGGRVPSYLGSSFAFIGGVVAVTGYVAPGANANIGVALGAIIACGLVYALIGLVVWAASARGNGARWIEAMMPPVVTGAVVAVIGLNLAPIAAKGAMGSSGFEASMALMTILCVGGIAVYTRGMVQRLLILVGLVLACVIYAVCANGLGLGAPMDFAKVAAAPWFGLPSFAAPVFEPQAMGLIVPVAIILVAENLGHVKAVAAMTGQDLDRYVGRAFVGDGVATMVSGAVGGTGVTTYAENIGVMAVTRIYSTLVFVVAAVIALVLGFSPKFGALIQTIPGPVLGGMSVVVFGLIAIAGARIWVVNQVDFSDNRNLIVAAVTLVLGAGDFSVKLGDFSMNGIGTATFGAIILYALLGLARRR

SEQ ID NO: 22263 - protein, 482 aa, Escherichia coli
MSAIDSQLPSSSGQDRPTDEVDRILSPGKLIILGLQHVLVMYAGAVAVPLMIGDRLGLSKEAIAMLISSDLFCCGIVTLLQCIGIGRFMGIRLPVIMSVTFAAVTPMIAIGMNPDIGLLGIFGATIAAGFITTLLAPLIGRLMPLFPPLVTGVVITSIGLSIIQVGIDWAAGGKGNPQYGNPVYLGISFAVLIFILLITRYAKGFMSNVAVLLGIVFGFLLSWMMNEVNLSGLHDASWFAIVTPMSFGMPIFDPVSILTMTAVLIIVFIESMGMFLALGEIVGRKLSSHDIIRGLRVDGVGTMIGGTFNSFPHTSFSQNVGLVSVTRVHSRWVCISSGIILILFGMVPKMAVLVASIPQFVLGGAGLVMFGMVLATGIRILSRCNYTTNRYNLYIVAISLGVGMTPTLSHDFFSKLPAVLQPLLHSGIMLATLSAVVLNVFFNGYQHHADLVKESVSDKDLKVRTVRMWLLMRKLKKNEHGE

SEQ ID NO: 22264 - protein, 442 aa, Escherichia coli
MAMFGFPHWQLKSTSTESGVVAPDERLPFAQTAVMGVQHAVAMFGATVLMPILMGLDPNLSILMSGIGTLLFFFITGGRVPSYLGSSAAFVGVVIAATGFNGQGINPNISIALGGIIACGLVYTVIGLVVMKIGTRWIERLMPPVVTGAVVMAIGLNLAPIAVKSVSASAFDSWMAVMTVLCIGLVAVFTRGMIQRLLILVGLIVACLLYGVMTNVLGLGKAVDFTLVSHAAWFGLPHFSTPAFNGQAMMLIAPVAVILVAENLGHLKAVAGMTGRNMDPYMGRAFVGDGLATMLSGSVGGSGVTTYAENIGVMAVTKVYSTLVFVAAAVIAMLLGFSPKFGALIHTIPAAVIGGASIVVFGLIAVAGARIWVQNRVDLSQNGNLIMVAVTLVLGAGDFALTLGGFTLGGIGTATFGAILLNALLSRKLVDVPPPEVVHQEP

SEQ ID NO: 22265 - protein, 555 aa, Caenorhabditis elegans
MSGLHFHVNEIPSPPSIMLFGLQQMMICLSSLLVIPYVVSDMLCAGDQAMEIRVQLISATFVTSGIATILQTTFGMRLSILHGPSFAFLPALHTFQATFPCDANTDTSNWQEKMQMISGSCLIAVLIMPILGFTGLVGKISKYIGPVTIVPIMSLLTIGTVPDIESKMALHWISIVEFLTLILFVVILERYEVPIPIFSLSEKKFKFTRQKIFSQFPYLLGISIVWFICFIMTITNAEPRGGEARTDQNASITVFDQTPWVQMPMPLFFGPPKFNLALVCGFTASCFAAMIESIGDYNLCAKISKQSRPPPSNTNRAFVVEGIGCILAALWGVGTGVTTYAENIAIMSVTKVTSRITMQMAGVFLILAGVISKFAAFLSMIPEPIIGGLLAMGVCLINGVSLSNLQTVDMKLSRNLTIIGVSIIMGLTVATHFEKTPLNTGNQIVDDVFGTLLTIRMLIGGVIAFVLDNITGGATRRQRGFVSEIDEDDDVEEQATVEMNGYALPSKLNQFFLRYSWLTYLPVIPSEREIREIEEKLCNFKFIKNSESIESVKKV

SEQ ID NO: 22266 - protein, 546 aa, Caenorhabditis elegans
MREEKEDELVHHVNDIPSIPTILLIGFQQMMICISMLLVIPYMMSDMVCPGDKETEIRVQLISASFVTAGIATILQTTFGMRLAILHGPSFAYLPVLNTFQSTYPCNEHTDTSLWQHKMQMISGSCLVAVLVMPLFGFTGLIGFLSQFIGPITIVPIMTLLTISAVSDVEQKMALHWMSSVEFLMLVVFIVLLEHWEMPLPAYSLKRRHFYIARRKILSQFPYIIGIAIGWLICYILTVTNAIPANSPARTDQNSTMEILKSTPWVHVPIPGQYGTPIIDISLLCGFIASSFVAMIESIGDYNLCAKLSKQGRIPTSNLNRGFIVEGIGCMLSSSFGIGTGITTYAENIAIMSVTKVASRITMQTAGIFLLIAGIFSKFAAVLAMIPEPVVGGVLAIGICMVNGVVLRNLMTVDLRLSRNLTIMGIAVIMGLTVALHFENNPLKTGNQTVDNVFGTLLTIRMLIGGIIAFTLDNIAPGATREQRGFRKADDDGEDDIPVENNGFALPSFMNRFFLKYRWLTYIPLIPSREEILDIEEKRTEVKYKL

SEQ ID NO: 22267 - protein, 555 aa, Caenorhabditis elegans
MDYPEKRVEIREKKTAQRPFLKARDTPPIGIALLYGLQQVMVCVSALLTVPLIMADSMCPGSSIAVLRQTLISSTFVSSGISTIIQTLFGMRLALLQGTAFAYVPSVQGFMSLPENTCNATESDYVPEEVYYGKLALLQGCLIASSFVPILIGATGLVGMLTKFIGPLTVSPLMLLLAFSQVDLMVTHISKHWVAIVQAVTLFATILYLAEVKVPVPGIKNGKFHWYRINLFGQYPYLIAICTSWIFCVALTIFNLTPEGSAARVDKNISLAVIRESSWLEVPYPGKFGPPQFNTGLFLLFLLSAMTSVFESVGDYHAAARVSEERPPPSHAINRGILAEGLGSLISGLLGPGVGMTTHTENIGVIGVTRVASRWTMVMAGVFLIILGLITKIGALLSTIPDPLVGGVLASSMAMVVGVAVSNLQTVDMTLSRNMGIFGFSMMFGLIVPKYFKLFPVDTDWGWFNQILNVLLQMPMFVGALCACILDNSIGGATREQRGLRARGEIYAGGIDECTYSYPKWVMNILNRIPGVQYIPCMPKEKKGTNRVGGEEIRL

SEQ ID NO: 22268 - protein, 540 aa, Caenorhabditis elegans
MSKNSGDLHFHVNDVPHKSAIFFFGLQQMLVCISALLVTPYFVSNLLCAGAETTEVRVQLIAATFISSGIATILQTTLAILHGPSFAFFPALHTFGDVYPCNSDTDTTQWKEKLQMISGSLFVAVLIMPFLGITGMVGRIAKHIGPITIVPMLMLLCIGTVQDIEQKVSHHWISIVEILLLIIFVVLLEEFEVPMPAFSMEKKAFYTAKMKIFSQFPYLLGIMIAWFVCWILTITDLEPYGCSARTDRNESLFVLENTPWIQIQYPLQYGLPKLSAPLIIAFSASMLAATIESIGNYGICARICQQGSPPSSSMNRAFVVEGFGSMLAALMGVGTGVTTYSENIAIMQVTKVTSRITMQCAGVILILMGIFSKFAAFLAMIPEAIIGGVLTAGMSMICGVAFSNLQSVDLRLSRNLTIIGLSIILGCTIPAHFEKSPLHSGNKTIDDIFGTLLKMRMLVGGLIAFCLDIIASGATRKQRGFEDKLEKIEISVEKNGFALSSFANQTILKIPSLTKLPIVPSEKSIRRIEELRMKVIDHKI

SEQ ID NO: 22269 - protein, 1100 aa, Caenorhabditis elegans
MAEPLHLGVNDVPSIKGILGFGFQQAMLCMSGLLVYPFLISNCACAGAAAVQLRVQLISATFVSCGIATIFQTTFGLRLSVLHGPAMAFLPPLFAYKTQNLCPYTEHDEVPPEFWMERMREIQGSLLLACFVFILVGMTGIAGHLSKLIGPITIVPLMLLLTTSIVPTIEEKLSLHWISMVMLLVVVMMAVYLENTRVPFYYYNTEKKQIVSTKVRLFGQFPYLLSMLFVWFICFIMTITDLEPYNGAARTDNNVTMMVLRESPWFQVPLPFPFGIPKISAGIFFGYIASVLASIIENIGSYDLLARTSQQKPPPKDAINRAIAMEGGEFQFIISENFYNKNFLLFRKIMIINFFLHFCVGSLIAAVTGVSSGVTTYAENIALIHITKVASRATMQFAGFILIMLGLFSKFAAILASIPDALVGGLLTMGISMIGGVAMSNLQVSRRKLNSDFEALFLNMENWQLYFVRSVFNLKMIDLNLCRNLSIMGLSLLLGLIVPLHFEKHPVNTGHFEIDHILNMLLNIKMLVGGVVATFLDNTVPGATRAQRGFREHHRVPSESDVSTSNSSETSGASFEVLPSSDAYTFPEVFQRLLRAFPVLQLLPILPKLSKSQFKTNRTFSLERACIRRQLVFFRKQFLQNRIFLLNLQFRNISESERTPAKKSRRSATHTPKTPKSDKKPANKHEKDEKSNQKKKRISKMLNSKKKKRLSAQRHRTRRTRDIRQKVARTLERALVEAPKIPLIHHLFTSTDSMGTPRASLKQVLKQLRISDFVKDTHILRDSHMKTLSQFTTLFTIEEDEPFQGLFVKYRPIYDREAATVYVDNLPEGCSEEKLLRLCSCYGTVVEVRISKKGGRWIRPKQNFKKRTSGVSTNRQAHRTPPKKKPLINVGSRPKAFGFVRFVDSDSAAAMVRDFIVNDPSIKYQKHEKRKKEAELVRRQEENEEEEIPDILSPGEIDDLEPPVVPQEFPPRLRPFVELYMTKNLHSPRRLLSHHAQLVVLLLQLHLKTKPLRLPKVYKIQFHTTSILSDHETRGRKSRKKKNRRRKNRQQKRRKVLRNQNLSRRRRIGGGRGRKCAENLPSTFQEARFEDFSRRFKFFR

SEQ ID NO: 22270 - protein, 485 aa, Caenorhabditis elegans
MTRKSRETSDLYYYVNDIPNISAIFFYGFQQMLVCISALLITPYLVSNLLCAGVETTAISGSLFAAVLIMPFLGLTGMVGRMAKHIGPITIVPMLILLCIGVIPDIEHKVSLHWISIIEILILIAFVVLLEEYEVPIPAFSMEQKKFNTMKIKLFSQFPYLLGIMIAWFACWILTISDLEPYGSSARTDRNDSLFVLENTPWIQIQYPLQFGFPRLSAPLVIAFTASMLAAMIESIGSYGICARICQQGSPPSSSMNRAFVVEGFGSMLAALMGVGTGVTTYSENIAIMQVTKVTSRITMQCAGVILILMGIFSKFAAFLAMIPEAIIGGVLTAGMSMICGVAFSNLQSVDLRLSRNLTIIGLSIILGCTIPAHFEKSPLHSGNKTIDDIFGTLLKMRMLVGGLIAFCLDIIASGATRKQRGFEDKLEKIEISVEKNGFALSSFANQTILKIPSLTKLPIVPSEKSIRRIEELRMKVIDHKIVSQ

SEQ ID NO: 22271 - protein, 414 aa, Haemophilus influenzae Rd
MTNQIPPSLAENQSKLKQSFVGLQMLFVAFGALVLVPLITGLDSNTALLTAGVGTLLFQFCTGKQVPIFLASSFAFIAPIQYGVQTWGIATTMGGLAFTGLVYFALSTLVKLRGAEALQRFFPPVVVGPVIIIIGMGLAPIAVDMSLGKNSAYAYNDAVLVSMVTLLTTLSVAVFAKGLMKLIPIMFGITAGYILCLFLGLINFQPVIDAPWFSLPKLTTPEFNLEAILYMLPIAIAPAVEHVGGIMAISSVTGKDFLKKPGLHRTLLGDGIATAAASLVGGPPNTTYAEVTGAVMLTRNFNPNIMTWAAVWAIAISFCGKVGAFLSTIPTIVMGGIMMLVFGSIAVVGMSTLIRGKVDVTEARNLCIISVVMTFGIGNMFVDVGNVSLKGISLCAIVAIILNLVLPKAKNEVE

SEQ ID NO: 22272 - protein, 570 aa, Anopheles gambiae
MDTERQCAPEQPTESKPEGKARGADINYGIDDNPPWYLCIMMALQHYLTMIGAIVSIPFILTPALCMRDEDPARGTIISTMIFVTGLITYLQATWGCRLPLVQGGTISFLVPTLAILNLPQWKCPPDDAINAMTDTDRTELWQVRMRELSGAIAVAAVTQLVLGFSGLVGKLLRIITPLTIVPTVALVGITLFQHASETASKQWGIAVGTTAMLTLFSQVMGEVPFPGIAYRKGHGLRVVWFPLFKLFPVLLTIAIMWTVCGVLTATGVFPEGHPARTDVRLRVLQDAEWFRVPYPGQFGLPTVSLAGVLGMLAGVLACTVESISYYPTIAQMCAAPPPPLHAINRGIGIEGLGTMLAGLWGSGNGTNTFGENVGAIGVTKVGSRRVIQWAALIMVLQGVLNKFGAAFIMIPDPVVGGIFCVMFGMITAFGLAALQYVDLRSSRNLYILGVSFFFPLVLCLWLQEHPGAIQTGNQTVDSTLSVLLGMTILVGGVLGCVLDNLIPGTPEERGLVAWSKEMALETVQANDDLPAGGLAWEKSTFDFPYGVQLMRRWKWTRYVPFLPTYRMKL

SEQ ID NO: 22273 - protein, 573 aa, Drosophila melanogaster
MELNNVTIEDATDASKSYSQAANTPPSNEKPKPQLLYAINDNPPWYLSIFLAFQHYLTMIGAIVSIPFILTPALCMSDEDANRGIIISTMIFVTGIVTYFQATWGVRLPIVQGGTISFLVPTLAILALPQWKCPEQAVMDAMDEAEREELWQVRMRELSGAIAVSAMVQVILGYTGLVGKILKYVTPLTIVPTVSLVGLTLFEHAAETASKHWGIAVGTTGMLTLFSQIMSNVPVPILAYRKGHGLEIRQFQLFRLFPVLLTIMIMWGLCGILTATDVFPPSHPSRTDVRLNVLTSAKWFYVPYPGQFGWPSVTLSGVLGMLAGVLACTVESLSYYPTVSQMSGAHSPPLHAINRGIGTEGFGTVLAGLWGAGNGTNTFGENVGAIGVTKIGSRRVIQWAALIMVLQGVIGKFGAIFILIPDSVVGGIFCVMFGMIIAFGLSTLQYVDLRSARNLYILGLSIFFPMVLCRWMQKNPGAIDTGNKTVDSTLSVLLGTTILVGGVLGCLLDNIIPGTPEERGLIDWANEMPLGDDNVNDGTATDYDFPLGMDAIRRWKWTYYIPFMPTYKLQKQS

SEQ ID NO: 22274 - protein, 417 aa, Pasteurella multocida
MTNQNPPVLLEQNHAKQAFVGLQMLFVAFGALVLVPLITGLNANTALLTAGIGTLLFQLCTGRQVPIFLASSFAFIAPIQYGVTTWGIATTMGGLVFTGLVYFALSTLVKIKGAGALQKVFPPVVVGPVIIIIGMGLAPVAVDMALGKNSTYQYNDAVFVSMATLLTTLGVAVFAKGMMKLIPIMFGIVVGYILCLFLGLINFQPVIDAPWFSVPEITTPEFKLEAILYLLPIAIAPAVEHVGGIMAISSVTGKDFLQKPGLHRTLLGDGIATSAASFLGGPPNTTYAEVTGAVMLTRNFNPKIMTWAAVWAIAISFCGKVGAFLSTIPTIVMGGIMMLVFGSIAVVGMSTLIRGKVDVTEARNLCIISVVMTFGIGGMFVNFGEVSLKGISLCAVVAILLNLILPKAKNTPIEENR

SEQ ID NO: 22275 - protein, 505 aa, Escherichia coli K12
MCLDSFINVNGCFLLWRAKGETLMSAIDSQLPSSSGQDRPTDEVDRILSPGKLIILGLQHVLVMYAGAVAVPLMIGDRLGLSKEAIAMLISSDLFCCGIVTLLQCIGIGRFMGIRLPVIMSVTFAAVTPMIAIGMNPDIGLLGIFGATIAAGFITTLLAPLIGRLMPLFPPLVTGVVITSIGLSIIQVGIDWAAGGKGNPQYGNPVYLGISFAVLIFILLITRYAKGFMSNVAVLLGIVFGFLLSWMMNEVNLSGLHDASWFAIVTPMSFGMPIFDPVSILTMTAVLIIVFIESMGMFLALGEIVGRKLSSHDIIRGLRVDGVGTMIGGTFNSFPHTSFSQNVGLVSVTRVHSRWVCISSGIILILFGMVPKMAVLVASIPQFVLGGAGLVMFGMVLATGIRILSRCNYTTNRYNLYIVAISLGVGMTPTLSHDFFSKLPAVLQPLLHSGIMLATLSAVVLNVFFNGYQHHADLVKESVSDKDLKVRTVRMWLLMRKLKKNEHGE

SEQ ID NO: 22276 - protein, 464 aa, Escherichia coli K12
MVRSQLSRADAPCLLTSLRRQLMAMFGFPHWQLKSTSTESGVVAPDERLPFAQTAVMGVQHAVAMFGATVLMPILMGLDPNLSILMSGIGTLLFFFITGGRVPSYLGSSAAFVGVVIAATGFNGQGINPNISIALGGIIACGLVYTVIGLVVMKIGTRWIERLMPPVVTGAVVMAIGLNLAPIAVKSVSASAFDSWMAVMTVLCIGLVAVFTRGMIQRLLILVGLIVACLLYGVMTNVLGLGKAVDFTLVSHAAWFGLPHFSTPAFNGQAMMLIAPVAVILVAENLGHLKAVAGMTGRNMDPYMGRAFVGDGLATMLSGSVGGSGVTTYAENIGVMAVTKVYSTLVFVAAAVIAMLLGFSPKFGALIHTIPAAVIGGASIVVFGLIAVAGARIWVQNRVDLSQNGNLIMVAVTLVLGAGDFALTLGGFTLGGIGTATFGAILLNALLSRKLVDVPPPEVVHQEP

SEQ ID NO: 22277 - protein, 505 aa, Escherichia coli O157:H7
MCLDSFINVNGCFLLWRAKGETLMSAIDSQLPSSSGQDRPTDEVDRILSPGKLIILGLQHVLVMYAGAVAVPLMIGDRLGLSKEAIAMLISSDLFCCGIVTLLQCIGIGRFMGIRLPVIMSVTFAAVTPMIAIGMNPDIGLLGIFGATIAAGFITTLLAQLIGRLMPLFPPLVTGVVITSIGLSIIQVGIDWAAGGKGNPQYGNPVYLGISFAVLIFILLITRYAKGFMSNVAVLLGIVFGFLLSWMMNEVNLSGLHDASWFAIVTPMSFGMPIFDPVSILTMTAVLIIVFIESMGMFLALGEIVGRKLSSHDIIRGLRVDGVGTMIGGTFNSFPHTSFSQNVGLVSVTRVHSRWVCISSGIILILFGMVPKMAVLVASIPQFVLGGAGLVMFGMVLATGIRILSRCNYTTNRYNLYIVAISLGVGMTPTLSHDFFSKLPAVLQPLLHSGIMLATLSAVVLNVFFNGYQHHADLVKESVSDKDLKVRTVRMWLLMRKLKKNEHGE

SEQ ID NO: 22278 - protein, 442 aa, Escherichia coli O157:H7
MAMFGLPHWQLKSTSTESGVVAPDERLPFAQTAVMGVQHAVAMFGATVLMPILMGLDPNLSILMSGIGTLLFFFITGGRVPSYLGSSAAFVGVVIAATGFNGQGINPNISIALGGIIACGLVYTVIGLVVMKIGTRWIERLMPPVVTGAVVMAIGLNLAPIAVKSVSASGFDSWMAVMTVLCIGLVAVFTRGMIQRLLILVGLIVACLLYGVMTNVLGLGKAVDFTLVSHAAWFGLPHFSTPAFNGQAMMLIAPVAVILVAENLGHLKAVAGMTGRNMDPYMGRAFVGDGLATMLSGSVGSSGVTTYAENIGVMAVTKVYSTLVFVAAAVIAMLLGFSPKFGALIHTIPAAVIGGASIVVFGLIAVAGARIWVQNRVDLSQNGNLIMVAVTLVLGAGDFALTLGGFTLGGIGTATFGAILLNALLSRRLVDVPPPEVVHQEP

SEQ ID NO: 22279 - protein, 444 aa, Bacillus halodurans
MAKQQRDIGIREVPLPHKWLILSLQHLCAMFGATILVPLLVDLSPAVALISSGLGTLAYLLITKGQVPAYLGSSFAFITPIIAVTAFGGPEAAMVGSFFVGLVYGVAALLIKVVGRKWLMTVLPPIVVGPVIMVIGLGLAGVAIDMAMMETIEQGVQVFNGTFMLVAMITLLITIVAAVFFKGFFGLVPMMFGIAGGYVTALFVGLIDFQAVYEAKWLVAPDFIVPFVTYTPTVEWTVLAIMVPIAAVTLAEHIGDQMVLSKVAGKNFLEKPGLHRSLAGDGVATMIASFLGGPPNTTYGENIGVIAITRVFSVFVIGGAALLAIVFGFSGKISALISTIPQAVMGGVSILLFGVIASSGLRMLIDNEIQLGEKRNLIISSVILVIGIGGAFVPINENVQIPGMALATIIGIVLHLVLPNKEVSYGTKSMFENEKTERKKEQAA

SEQ ID NO: 22280 - protein, 429 aa, Salmonella enterica subsp. enterica serovar Typhi
MTRRAIGVSERPPLLQTIPLSLQHLFAMFGATVLVPVLFHINPATVLLFNGIGTLLYLFICKGKIPAYLGSSFAFISPVLLLLPLGYEVALGGFIMCGVLFCLVSFIVKKAGTGWLDVMFPPAAMGAIVAVIGLELAGVAAGMAGLLPAQGQSPDTKTIIISMVTLAVTVFGSVLFRGFLAIIPILIGVLAGYALSFALGVVDTTPIAQAHWFALPTFYTPRFEWFAILTILPAALVVIAEHVGHLVVTANIVKKDLVRDPGLHRSMFANGLSTIISGFFGSTPNTTYGENIGVMAITRVYSTWVIGGAAIFAILLSCVGKLAAAIQIIPLPVMGGVSLLLYGVIGASGIRVLIESKVDYNKAQNLILTSVILIIGVSGAKVHIGAAELKGMALATIVGIGLSLIFKLISLLRPEEVVLEANDAESPHQ

SEQ ID NO: 22281 - protein, 676 aa, Homo sapiens
SWAPSLNKPSLPAALPNGCVNYSFLLMMGIGKNTTSKSMEAGSSTEGKYEDEAKHPAFFTLPVVINGGATSSGEQDNEDTELMAIYTTENGIAEKSSLAETLDSTGSLDPQRSDMIYTIEDVPPWYLCIFLGLQHYLTCFSGTIAVPFLLADAMCVGYDQWATSQLIGTIFFCVGITTLLQTTFGCRLPLFQASAFAFLAPARAILSLDKWKCNTTDVSVANGTAELLHTEHIWYPRIREIQGAIIMSSLIEVVIGLLGLPGALLKYIGPLTITPTVALIGLSGFQAAGERAGKHWGIAMLTIFLVLLFSQYARNVKFPLPIYKSKKGWTAYKLQLFKMFPIILAILVSWLLCFIFTVTDVFPPDSTKYGFYARTDARQGVLLVAPWFKVPYPFQWGLPTVSAAGVIGMLSAVVASIIESIGDYYACARLSCAPPPPIHAINRGIFVEGLSCVLDGIFGTGNGSTSSSPNIGVLGITKVGSRRVIQCGAALMLALGMIGKFSALFASLPDPVLGALFCTLFGMITAVGLSNLQFIDLNSSRNLFVLGFSIFFGLVLPSYLRQNPLVTGITGIDQVLNVLLTTAMFVGGCVAFILDNTIPGTPEERGIRKWKKGVGKGNKSLDGMESYNLPFGMNIIKKYRCFSYLPISPTFVGYTWKGLRKSDNSRSSDEDSQATG

SEQ ID NO: 22282 - protein, 650 aa, Homo sapiens
MMGIGKNTTSKSMEAGSSTEGKYEDEAKHPAFFTLPVVINGGATSSGEQDNEDTELMAIYTTENGIAEKSSLAETLDSTGSLDPQRSDMIYTIEDVPPWYLCIFLGLQHYLTCFSGTIAVPFLLADAMCVGYDQWATSQLIGTIFFCVGITTLLQTTFGCRLPLFQASAFAFLAPARAILSLDKWKCNTTDVSVANGTAELLHTEHIWYPRIREIQGAIIMSSLIEVVIGLLGLPGALLKYIGPLTITPTVALIGLSGFQAAGERAGKHWGIAMLTIFLVLLFSQYARNVKFPLPIYKSKKGWTAYKLQLFKMFPIILAILVSWLLCFIFTVTDVFPPDSTKYGFYARTDARQGVLLVAPWFKVPYPFQWGLPTVSAAGVIGMLSAVVASIIESIGDYYACARLSCAPPPPIHAINRGIFVEGLSCVLDGIFGTGNGSTSSSPNIGVLGITKVGSRRVIQCGAALMLALGMIGKFSALFASLPDPVLGALFCTLFGMITAVGLSNLQFIDLNSSRNLFVLGFSIFFGLVLPSYLRQNPLVTGITGIDQVLNVLLTTAMFVGGCVAFILDNTIPGTPEERGIRKWKKGVGKGNKSLDGMESYNLPFGMNIIKKYRCFSYLPISPTFVGYTWKGLRKSDNSRSSDEDSQATG

SEQ ID NO: 22283 - protein, 650 aa, Homo sapiens
MMGIGKNTTSKSMEAGSSTEGKYEDEAKHRAFFTLPVVINGGATSSGEQDNEDTELMAIYTTENGIAEKSSLAETLDSTGSLDPQRSDMIYTIEDVPPWYLCIFLGLQHYLTCFSGTIAVPFLLADAMCVGYDQWATSQLTGTIFFCVGITTLLQTTFGCRLPLFQASAFAFLAPARAILSSDKWKCNTTDVSVANGTAELLHTEHIWYPRIREVQGAIIMSSLIEVVIGLLGLPGALLKYIGPLTITPTVALIGLSGFQAAGERAGKHWGIAMLTIFLVLLFSQYARNVKFPLPIYKSKKGWTAYKLQLFKMFPIILAILVSWLLCFIFTVTDVFPPDSTKYGFYARTDARQGVLLVAPWFKVPYPFQWGLPTVSAAGVIGMLSAVVASIIESIGDYYACARLSCAPPPPIHAINRGIFVEGLSCVLDGIFGTGNGSTSSSPNIGVLGITKVGSRRVIQCGAALMLALGMIGKFSALFASLPDPVLGALFCTLFGMITAVGLSNLQFIDLNSSRNLFVLGFSIFFGLVLPSYLRQNPLVTGITGIDQVLNVLLTTAMFVGGCVAFILDNTIPGTPEERGIRKWKKGVGKGNKSLDGMESYNLPFGMNIIKKYRCFSYLPISPTFVGYTWKGLRKSDNSRSSDEDSQATG

SEQ ID NO: 22284 - protein, 650 aa, Homo sapiens
MMGIGKNTTSKSMEAGSSTEGKYEDEAKHPAFFTLPVVINGGATSSGEQDNEDTELMAIYTTENGIAEKSSLAETLDSTGSLDPQRSDMIYTIEDVPPWYLCIFLGLQHYLTCFSGTIAVPFLLADAMCVGYDQWATSQLIGTIFFCVGITTLLQTTFGCRLPLFQTSAFAFLAPARAILSLDKWKCNTTDVSVANGTAELLHTEHIWYPRIREIQGAIIMSSLIEVVIGLLGLPGALLKYIGPLTITPTVALIGLSGFQAAGERAGKHWGIAMLTIFLVLLFSQYARNVKFPLPIYKSKKGWTAYKLQLFKMFPIILAILVSWLLCFIFTVTDVFPPDSTKYGFYARTDARQGVLLVAPWFKVPYPFQWGLPTVSAAGVIGMLSAVVASIIESIGDYYACARLSCAPPPPIHAINRGIFVEGLSCVLDGIFGTGNGSTSSSPNIGVLGITKVGSRRVIQCGAALMLALGMIGKFSALFASLPDPVLGALFCTLFGMITAVGLSNLQFIDLNSSRNLFVLGFSIFFGLVLPSYLRQNPLVTGITGIDQVLNVLLTTAMFVGGCVAFILDNTIPGTPEERGIRKWKKGVGKGNKSLDGMESYNLPFGMNIIKKYRCFSYLPISPTFVGYTWKGLRKSDNSRSSDEDSQATG

SEQ ID NO: 22285 - protein, 650 aa, Homo sapiens [sequence omitted]

SEQ ID NO: 22286 - protein, 598 aa, Homo sapiens
MRAQEDLEGRAQHETTRDPSTPLPTEPKFDMLYKIEDVPPWYLCILLGFQHYLTCFSGTIAVPFLLAEALCVGHDQHMVSQLIGTIFTCVGITTLIQTTVGIRLPLFQASAFAFLVPAKAILALERWKCPPEEEIYGNWSLPLNTSHIWHPRIREVQGAIMVSSVVEVVIGLLGLPGALLNYIGPLTVTPTVSLIGLSVFQAAGDRAGSHWGISACSILLIILFSQYLRNLTFLLPVYRWGKGLTLLRIQIFKMFPIMLAIMTVWLLCYVLTLTDVLPTDPKAYGFQARTDARGDIMAIAPWIRIPYPCQWGLPTVTAAAVLGMFSATLAGIIESIGDYYACARLAGAPPPPVHAINRGIFTEGICCIIAGLLGTGNGSTSSSPNIGVLGITKVGSRRVVQYGAAIMLVLGTIGKFTALFASLPDPILGGMFCTLFGMITAVGLSNLQFVDMNSSRNLFVLGFSMFFGLTLPNYLESNPGAINTGILEVDQILIVLLTTEMFVGGCLAFILDNTVPGSPEERGLIQWKAGAHANSDMSSSLKSYDFPIGMGIVKRITFLKYIPICPVFKGFSSSSKDQIAIPEDTPENTETASVCTKV

SEQ ID NO: 22287 - protein, 598 aa, Homo sapiens
MRAQEDLEGRTQHETTRDPSTPLPTEPKFDMLYKIEDVPPWYLCILLGFQHYLTCFSGTIAVPFLLAEALCVGHDQHMVSQLIGTIFTCVGITTLIQTTVGIRLPLFQASAFAFLVPAKAILALERWKCPPEEEIYGNWSLPLNTSHIWHPRIREVQGAIMVSSVVEVVIGLLGLPGALLNYIGPLTVTPTVSLIGLSVFQAAGDRAGSHWGISACSILLIILFSQYLRNLTFLLPVYRWGKGLTLLRIQIFKMFPIMLAIMTVWLLCYVLTLTDVLPTDPKAYGFQARTDARGDIMAIAPWIRIPYPCQWGLPTVTAAAVLGMFSATLAGIIESIGDYYACARLAGAPPPPVHAINRGIFTEGICCIIAGLLGTGNGSTSSSPNIGVLGITKVGSRRVVQYGAAIMLVLGTIGKFTALFASLPDPILGGMFCTLFGMITAVGLSNLQFVDMNSSRNLFVLGFSMFFGLTLPNYLESNPGAINTGILEVDQILIVLLTTEMFVGGCLAFILDNTVPGSPEERGLIQWKAGAHANSDMSSSLKSYDFPIGMGIVKRITFLKYIPICPVFKGFSSSSKDQIAIPEDTPENTETASVCTKV

SEQ ID NO: 22288 - protein, 598 aa, Homo sapiens [sequence omitted]

SEQ ID NO: 22289 - protein, 602 aa, Homo sapiens
MRAQEDLEGRTQHETTRDPSTPLPTEPKFDMLYKIEDVPPWYLCILLGFQHYLTCFSGTIAVPFLLAEALCVGHDQHMVSQLIGTIFTCVGITTLIQTTVGIRLPLFQASAFAFLVPAKAILALERWKCPPEEEIYGNWSLPLNTSHIWHPRIREVGLHVQGAIMVSSVVEVVIGLLGLPGALLNYIGPLTVTPTVSLIGLSVFQAAGDRAGSHWGISACSILLIILFSQYLRNLTFLLPVYRWGKGLTLLRIQIFKMFPIMLAIMTVWLLCYVLTLTDVLPTDPKAYGFQARTDARGDIMAIAPWIRIPYPCQWGLPTVTAAAVLGMFSATLAGIIESIGDYYACARLAGAPPPPVHAINRGIFTEGICCIIAGLLGTGNGSTSSSPNIGVLGITKVGSRRVVQYGAAIMLVLGTIGKFTALFASLPDPILGGMFCTLFGMITAVGLSNLQFVDMNSSRNLFVLGFSMFFGLTLPNYLESNPGAINTGILEVDQILIVLLTTEMFVGGCLAFILDNTVPGSPEERGLIQWKAGAHANSDMSSSLKSYDFPIGMGIVKRITFLKYIPICPVFKGFSSSSKDQIAIPEDTPENTETASVCTKV

SEQ ID NO: 22290 - protein, 598 aa, Homo sapiens [sequence omitted]

SEQ ID NO: 22291 - protein, 425 aa, Homo sapiens
MMGIGKNTTSKSMEAGSSTEGKYEDEAKHPAFFTLPVVINGGATSSGEQDNEDTELMAIYTTENGIAEKSSLAETLDSTGSLDPQRSDMIYTIEDVPPWYLCIFLGLQHYLTCFSGTIAVPFLLADAMCVGYDQWATSQLIGTIFFCVGITTLLQTTFGCRLPLFQASAFAFLAPARAILSLDKWKCNTTDVSVANGTAELLHTEHIWYPRIREIQGAIIMSSLIEVVIGLLGLPGALLKYIGPLTITPTVALIGLSGFQAAGERAGKHWGIAMLTIFLVLLFSQYARNVKFPLPIYKSKKGWTAYKLQLFKMFPIILAILVSWLLCFIFTVTDVFPPDSTKYGFYARTDARQGVLLVAPWFKVPYPFQWGLPTVSAAGVIGMLSAVVASIIESIGDYYACARLSCAPPPPIHAINRYVPEKTSS

SEQ ID NO: 22292 - protein, 259 aa, Homo sapiens
MRAQEDLEGRTQHETTRDPSTPLPTEPKFDMLYKIEDVPPWYLCILLGFQHYLTCFSGTIAVPFLLAEALCVGHDQHMVSQLIGTIFTCVGMFCTLFGMITAVGLSNLQFVDMNSSRNLFVLGFSMFFGLTLPNYLESNPGAINTGILEVDQILIVLLTTEMFVGGCLAFILDNTVPGSPEERGLIQWKAGAHANSDMSSSLKSYDFPIGMGIVKRITFLKYIPICPVFKGFSSSSKDQIAIPEDTPENTETASVCTKV

SEQ ID NO: 22293 - protein, 492 aa, Homo sapiens
MSRSPLNPSQLRSVGSQDALAPLPPPAPQNPSTHSWDPLCGSLPWGLSCLLALQHVLVMASLLCVSHLLLLCSLSPGGLSYSPSQLLASSFFSCGMSTILQTWMGSRLPLVQAPSLEFLIPALVLTSQKLPRAIQTPGNSSLMLHLCRGPSCHGLGHWNTSLQEVSGAVVVSGLLQGMMGLLGSPGHVFPHCGPLVLAPSLVVAGLSAHREVAQFCFTHWGLALLTWAPASFMCAPGGELQRHQLTLLSLSSGSFRNCLPPPRHHGFGCLTQAGSQQVAHLVGLLCVGLGLSPRLAQLLTTIPLPVVGGVLGVTQAVVLSAGFSSFYLADIDSGRNIFIVGFSIFMALLLPRWFREAPVLFSTGWSPLDVLLHSLLTQPIFLAGLSGFLLENTIPGTQLERGLGQGLPSPFTAQEARMPQKPREKAQVYRLPFPIQNLCPCIPQPLHCLCPLPEDPGDEEGGSSEPEEMADLLPGSGEPCPESSREGFRSQK

SEQ ID NO: 22294 - protein, 650 aa, Sus scrofa
MMGIGKTSSKSMEAGSSAEGKYEDEAKHPTFFTLPVVTNGGATSSGEQDNEDTELMAIYTTENGIAEKSSLAETLDSTGSLDPQRSDMIYTIEDVPPWYLCIFLGLQHYLTCFSGTIAVPFLLADAMCVGYDQWATSQLIGTILFCVGITTLLQTTFGCRLPLFQASAFAFLAPARAILSLDKWKCNTTDVSVANGTTELLHTEHMWYPRIREIQGAIIMSSLIEVVIGLLGLPGALLKYIGPLGITPTVALIGLSGFQAAGERAGKHWGIAMLTIFLLLLFSQYARNVKFPLPIYKSKKGWTAYKLQLFKMFPIILAILVSWLLCFIFTVTDVFPPDSTKYGFYARTDARQGVLLVAPWFKVPYPFQWGLPTVSAAGVIGMLSAVVASIIESIGDYYACARLSCAPPPPIHAINRGIFVEGLSCVLDGIFGTGNGSTSSSPNIGVLGITKVGSRRVIQYGAASCCALGMIGKFSALFASLPDPVLGALFCTLFGMITAVGLSNLQFIDLNSSRNLFVLGFSIFFGLVLPSYLRQNPLVTGITGVDQVLNVLLTTAMFVGGCVAFILDNTIPGTPEERGIRKWKKGVGKGCKSLDGMESYDLPPFGMNVIKKYKCFSYLPISPTFAGYTWKGLGKERQCRSSDEDSQATV

SEQ ID NO: 22295 - protein, 429 aa, Salmonella typhimurium LT2
MTRRAIGVSERPPLLQTIPLSLQHLFAMFGATVLVPVLFHINPATVLLFNGIGTLLYLFICKGKIPAYLGSSFAFISPVLLLLPLGYEVALGGFIMCGVLFCLVSFIVKKAGTGWLDVMFPPAAMGAIVAVIGLELAGVAAGMAGLLPAQGQSPDTKTIIISMVTLAVTVFGSVLFRGFLAIIPILIGVLAGYALSFALGVVDTTPIAQAHWFALPTFYTPRFEWFAILTILPAALVVIAEHVGHLVVTANIVKKDLVRDPGLHRSMFANGLSTIISGFFGSTPNTTYGENIGVMAITRVYSTWVIGGAAIFAILLSCVGKLAAAIQIIPLPVMGGVSLLLYGVIGASGIRVLIESKVDYNKAQNLILTSVILIIGVSGAKVHIGAAELKGMALATIVGICLSLIFKLISLLRPEEVVLEANDAEPPHQ

SEQ ID NO: 22296 - protein, 441 aa, Salmonella typhimurium LT2
MPQPGLTTPDNDALPWQTTLLLALQHVLVVAATPITSVFLIAKALHFTDTVTASVLSATFLMCGLGAILQSLGVKGVGARLPFIMVPGGAPIAIFVAIALQTNIQTAIGAVILTSLFYFIALPIFRRCLHHFPPFIIGIMLLMVSINLIRLYGGLIIGQPGSADFAHPTSIILSLGTILITLIFALAFSGILRQLAVMFGLLAGTLLGMALGSTDFSGVSHGPLFSFPQLLPFGWPIFDLSASLPLLIYAVISMAEATGQTIATAEIVNSTQNVQQAIPRTIRGDAVMSLLGGIFGTSLIITSGENIGVVRTTNVKSRFVTAAAGGLLILIAIFAPLVRLATCLPGSVVCGTAVIVFSIIGVIGIDMIAREPLHTPGKTYALAMGLAMGMLPILVPGLYQNFPAGVQMVFGNGMAAGTLTAILVNSLFNWSEKRTQARVKS

SEQ ID NO: 22297 - protein, 412 aa, Oryctolagus cuniculus
TLLQTTFGCRLPLFQASAFAFLAPARAILSLDKWKCNTTDVSIANGTAELLHTEHIWYPRIREIQGAIIMSSLIEVFIGLLGLPGALLRYIGPLTITPTVALIGLSGFQAAGERAGKHWGIAMLTIFLVLLFSQYARNVKFPLPIYKSKKGWTAYKLQLFKMFPIILAILVSWLLCFIFTVTDVFPPDSTKYGSYARTDARQGVLLVAPWFKVPYPFQWGLPTVSAAGVIGMLSAVVASIIESIGDYYACAWLSCAPPPPIHAINRGIFVEGLSCVLDGIFGTGNGSTSSSPNIGVLGITKVGSRRVIQYGAALMLALGMIGKFSALFASLPDPVLGALFCTLFGMITAVGLSNLQFIDLNSSRNLFVLGFSIFFGLVPPSYLRQNPLVTGITGIDQVLNVLLTTAMFVGGC

SEQ ID NO: 22298 - protein, 419 aa, Oceanobacillus iheyensis HTE831
MKDREIQVDERLPLLQSFPLSLQHLFAMFGSTVLVPILFGVDPATILLMNGIGTLLYIFITKGKIPAYLGSSFAFISPVTMVLTEGGGYGAALGGFFVVGLVLVIVGLIVRYAGTSWIDVIFPPAAMGAIVAVIGLELVPTAADMAGLLPQADVPRDTTAILVSLITLGATIIYWVTMRGFLKIIPILLGIITGYVVATMFGIVDFSAVREASWIQMPTYYQIEFNWSDILIILPAALVLVPEHIGHLVVTGNIVKKDLVKEPGLDRSLFGNGFSTMISSFLGSTPNTTYGENIGVLAISKVYSTWVIGGAAIIAVVLSFCGKLAALISSIPTPVMGGISLLLFGIIAVSGLRMLVEQQIDYSKSQNLILTCVVLAIGVSGAAINVGSVELKGMGLATIIAIVVSLFFKLLDVLKLSNE

SEQ ID NO: 22299 - protein, 460 aa, Bacillus subtilis subsp. subtilis str. 168
MKLVLGALQWTAFIIAAAIVVPVAVAQSFHLDHSDSARLIQSTFFVLGIAAVIQCLKGHRLPINESPAGLWWGVYTIYAGLTGTVFATYGDTLRGLQGALLVSAVCFFLLSVFKVIDRLAKLFTPVVTGVYLLLLVMQLSQPIIKGILGIGYRQDGVDGLVFGLALVVIAAAFIMTNSNIMFFKQYSILLALFGGWVLFAAAGAAKPIEMPDRLFQLPSLFPFGTPLFNSGLIITSIFITILLIVNMLASMKVVDIAMKKFSKQPDGKHHERHAGFAASFSHLLSGLTGAIAPVPISGAAGFIETTKMPSKKPFMLGSILVIVISVIPFFMNTFASLPSPVGFAVNFVVFSAMGGLAFAEFDSYEKEESKRVRSIIGISLLTGVGIMFVPETALKGLHPVFISLLSNGLVLGTLAAIAADQFQLWRRRNPTISCQRRTNIEFWCRCDKINDMSLTKRRER

SEQ ID NO: 22300 - protein, 543 aa, Arabidopsis thaliana
MAGGGGGGGGVAPPLKHDGLEPHPVKDQLSSISYCITSPPPWPEAILLGFQHYLVMLGTTVLIPTYLVPQMGGGNEEKAKMVQTLLFVSGLNTLLQSFFGTRLPAVIGGSYTYVPTTLSIILAGRYSDILDPQESENMQKFKRIMRGIQGALIVASILQIVVGFSGLWRNVVRLLSPLSAVPLVALAGFGLYEHGFPLLAKCIEIGLPEIILLLLFSQYIPHLIRGERQVFHRFAVIFSVVIVWIYAHLLTVGGAYKNTGVNTQTSCRTDRSGLISGSPWIRVPYPFQWGPPTFHAGEAFAMMAVSFVSLIESTGTYIVVSRFASATPPPPSVLSRGVGWQGVGVLLCGLFGAGNGASVSVENAGLLALTRVGSRRVVQISAGFMIFFSILGKFGAIFASIPAPVVAALHCLFFAYVGAGGLSLLQFCNLNSFRTKFILGFSVFMGLSIPQYFNQYTAVNKYGPVHTHARWFNDMINVPFSSKAFVAGILAFFLDVTMSSKDSATRKDRGMFWWDRFMSFKSDTRSEEFYSLPFNLNKYFPSV

SEQ ID NO: 22301 - protein, 528 aa, Arabidopsis thaliana
MSAPKSGGDPLPHPPKEQLPDISYCITSPPPWPEAVLLGFQHYLVMLGTTVLIPSALVPQMGGRNEEKAKLIQTILFVAGLNTLLQTVFGTRLPAVIGASYTFVPVTISIMLSGRFNDVADPVERFKRIIRATQGALIVASTLQIILGFSGLWRNVVRFLSPLSAAPLVGLVGYGLYELGFPGVAKCIEIGLPGLIILILISQYMPHVIKGGKHVFARFAVIFSVAIVWLYAFFLTLGGAYNGVGTDTQRSCRTDRAGLISAAPWIRVPWPFQWGAPLFDAGEAFAMMMASFVALVESTGAFIAVSRYASATMPPPSVISRGVGWQGVAILISGLFGTGIGSSVSVENAGLLALTKIGSRRVVQISAGFMIFFSILGKFGAVFASIPSPIIAALYCLFFAYVGAGGLSLLQFCNLNSFRTLFILGFSIFLGLSIPQYFNEHTAIKGYGPVHTGARWFNDMVNVPFSSKAFVGGCVAYLLDTTLHKKDGSIRKDRGKHWWDRFWTFKNDPRTEEFYALPFNLNKYFPSV

SEQ ID NO: 22302 - protein, 539 aa, Arabidopsis thaliana
MAGDGVENAKPPQKQEDLQPHPVKDQLYGITYCLTSPPPWPETILLGFQHYLVMLGTTVLIPTMLVSKIDARNEDKVKLIQTLLFVSGINTLFQSFFGTRLPAVIGASYSYVPTTMSIVLAARYNDIMDPQKRFEQIMRGIQGALIIASFLHILVGFSGLWRNVTRFLSPLSAVPLVAFSGFGLYEQGFPMLAKCIEIGLPEIILLVIFSQYIPHLMQGETCSNFFHRFAVIFSVVIVWLYAYILTIGGAYSNTEINTQISCRTDRAGIISASPWIRVPHPIQWGGAPTFNAGDIFAMMAASFVSLVESTGTYIAVSRYASATPIPPSVLSRGIGWQGFGILLCGLFGAGNATSVSVENAGLLAVTRVGSRRVIQVAAGFMIFFSILGKFGAIFASIPAPIVAALYCLFFSYVGAGGLSLIQFCNLNSFRTKFILGFSIFMGLSIPQYFYQYTTLETYGPVRTSATWFNNIINVPFSSKAFVSGILAFFLDTTLPPKDKTTKKDRGLVWWKRFKSFQSDNRSEEFYSLPLNLSKYFPSH

SEQ ID NO: 22303 - protein, 483 aa, Arabidopsis thaliana
MLGTTVLIPSALVPQMGGRNEEKAKLIQTILFVAGLNTLLQTVFGTRLPAVIGASYTFVPVTISIMLSGRFNDVADPVERFKRIIRATQGALIVASTLQIILGFSGLWRNVVRFLSPLSAAPLVGLVGYGLYELGFPGVAKCIEIGLPGLIILILISQYMPHVIKGGKHVFARFAVIFSVAIVWLYAFFLTLGGAYNGVGTDTQRSCRTDRAGLISAAPWIRVPWPFQWGAPLFDAGEAFAMMMASFVALVESTGAFIAVSRYASATMPPPSVISRGVGWQGVAILISGLFGTGIGSSVSVENAGLLALTKIGSRRVVQISAGFMIFFSILGKFGAVFASIPSPIIAALYCLFFAYVGAGGLSLLQFCNLNSFRTLFILGFSIFLGLSIPQYFNEHTAIKGYGPVHTGARWFNDMVNVPFSSKAFVGGCVAYLLDTTLHKKDGSIRKDRGKHWWDRFWTFKNDPRTEEFYALPFNLNKYFPSV

SEQ ID NO: 22304 - protein, 600 aa, Arabidopsis thaliana
MAGDGVENAKPPQKQEDLQPHPVKDQLYGITYCLTSPPPWPETILLGFQHYLVMLGTTVLIPTMLVSKIDARNEDKVKLIQTLLFVSGINTLFQSFFGTRLPAVIGASYSYVPTTMSIVLAARYNDIMDPQKKMQRFEQIMRGIQGALIIASFLHILVGFSGLWRNVTRFLSPLSAVPLVAFSGFGLYEQGFPMLAKCIEIGLPEIILLVIFSQYIPHLMQGETCSNFFHRFAVIFSVVIVWLYAYILTIGGAYSNTEINTQISCRTDRAGIISASPWIRVPHPIQWGGAPTFNAGDIFAMMAASFVSLVESTGTYIAVSRYASATPIPPSVLSRGIGWQVNTQKRLKYFSMASSKLSLLMRFSVFKGFGILLCGLFGAGNATSVENAGLLAVTRVGSRRVIQVAAGFMIFFSILGKFGAIFASIPAPIVAALYCLFFSYVGTILETTETELFCFLFLEPQGTHLFAQKTENIAGAGGLSLIQFCNLNSFRTKFILGFSIFMGLSIPQYFYQYTTLETYGPVRTSATWFNNIINVPFSSKAFVSGILAFFLDTTLPPKDKTTKKDRGLVWWKRFKSFQSDNRSEEFYSLPLNLSKYFPSH

SEQ ID NO: 22305 - protein, 526 aa, Arabidopsis thaliana
MATKTDDFAPFPVKDQLPGVEFCVSSSPNWPEGIVLGFQHYIVMLGTTVIIPSILVPLMGGGDVEKAEVINTVLFVSGINTLLQSLFGSRLPVVMGASYAYLIPALYITFSYRFTYYLHPHLRFEETMRAIQGALIIASISHMIMGFFGLWRILVRFLSPLSAAPLVILTGVGLLAFAFPQLARCIEIGLPALIILIILSQYLPHLFKCKRSICEQFAVLFTIAIVWAYAEILTAAGAYDKRPDNTQLSCRTDRSGLISASPWVRIPYPLQWGRPSFHGSDAFAMMAATYVAIVETTGSFIAASRFGSATHIPPSVLSRGIGWQGIGVLLNGLFGTATGSTALVENTGLLGLTKVGSRRVVQISAGFMIFFSIFGKFGAVLASIPLPIFAALYCVLFAYVASAGLGLLQFCNLNSFRNKFILGFSIFIGLSVAQYFTEYLFISGRGPVHTRTSAFNVIMQVIFSSAATVGIMAAFLLDCTHSYGHASVRRDSGRHWWEKFRVYHTDTRTEEFYALPYNLNRFFPSF

SEQ ID NO: 22306 - protein, 529 aa, Arabidopsis thaliana
MATKTDDFAPFPVKDQLPGVEFCVSSSPNWRIVLGFQHYIVMLGTTVIIPSILVPLMGGGDVEKAEVINTVLFVSGINTLLQSLFGSRLPVVMGASYAYLIPALYITFSYRFTYYLHPHLRFEETMRAIQGALIIASISHMIMGFFGLWRILVRFLSPLSAAPLVILTGVGLLAFAFPQLARCIEIGLPALIILIILSQVSVNFYLPHLFKCKRSICEQFAVLFTIAIVWAYAEILTAAGAYDKRPDNTQLSCRTDRSGLISASPWVRIPYPLQWGRPSFHGSDAFAMMAATYVAIVETTGSFIAASRFGSATHIPPSVLSRGIGWQGIGVLLNGLFGTATGSTALVENTGLLGLTKVGSRRVVQISAGFMIFFSIFGKFGAVLASIPLPIFAALYCVLFAYVASAGLGLLQFCNLNSFRNKFILGFSIFIGLSVAQYFTEYLFISGRGPVHTRTSAFNVIMQVIFSSAATVGIMAAFLLDCTHSYGHASVRRDSGRHWWEKFRVYHTDTRTEEFYALPYNLNRFFPSF

SEQ ID NO: 22307 - protein, 531 aa, Glycine max
MAGGGAPAKADEPQPHPPKDQLPNISYCITSPPPWPEAILLGFQHFLVMLGTTVLIPTALVPQMGGGNNEKARVIETLLFVAGINTLLQTMFGTRLPAVIGGSYTFVPTTISIILAGRFSDEPDPIEKFKRIMRSIQGALIVASTLQIVLGFSGLWRNVARFLSPLSSVPLVSLVGFGLYELGFPGVAKCVEIGLPQLILLVFVSQYVPHVLHSGKHIFDRFAVLFTIVIVWIYAHLLTVGGAYNDAPHKTQISCRTDRAGLIDSAPWIRIPYPFQWGAPSFDAGEAFAMMMASFVALVESSGAFIAVYRYASATPLPPSILSRGIGWQGVGILLSGLFGTVNGSSVSVENAGLLALTRVGSRRVVQISAGFMIFFSILGKFGAVFASIPPPIIAALYCLFFAYVGAGGLSFLQFCNLNSFRTKFILGFSIFVGLSVPQYFNEYTAINGYGPVHTGARWFNDIINVPFQSKPFVAGVVAYFLDNTLFKREAAIRKDRGKHWWDKYKSFKGDTRSEEFYSLPFNLNKYFPSV

SEQ ID NO: 22308 - protein, 539 aa, Glycine max
  unsure (1)..(539): unsure at all Xaa locations
MAGGGGAPAPKIDEPQPHPPKDQLPNVSYCSTSPPPWPEAILLGFQHYLVMLGTTVLIPTALVPQMGGGNEEKAKVIQTLLFVAGINTLLQTLFGTRLPAVIGGSYTYVATTISIILSGRFSDEPDPIEKFKRIMRATQGALIVASTLQIVLGFSGLWRNVARLVSGSXFLSPLSAVPLVSLVGFGLYELGFPGVAKCVEIGLPELILLVFISQFVPHVLHAGKHVFDRFAVLFTIAIVWLYAYLLTVGGAYNHAAPKTQSTCRTDRSGLIESAPWIRVPYPFQWGAPTFDAGEAFAMMMASFVALVESSGAFIAVYRYASATPLPPSILSRGIGWQGVGILLSGLFGTGNGSSVSVENAGLLALTRVGSRRVVQIAAGFMIFFSILGKFGAVFASIPPPIVAALYCLFFAYVGAGGLSFLQFCNLNSFRTIFVLGYSIFIGLSVSQYFNEYTAINGYGPVHTKARWFNDIINVPFQSKAFVAGCVAYFLDNTLHKKEAAIRKDRGKHWWDKYRSFKTDTRSEEFYSLPFNLNKYFPSV

SEQ ID NO: 22309 - protein, 531 aa, Glycine max
MAGGGAPAKADEPQPHPPKDQLPNISYCITSPPPWPEAILLGFQHFLVMLGTTVLIPTALVPQMGGGNNEKARVIETLLFVAGINTLLQTMFGTRLPAVIGGSYTFVPTTISIILAGRFSDEPDPIEKFKRIMRSIQGALIVASTLQIVLGFSGLWRNVARFLSPLSSVPLVSLVGFGLYELGFPGVAKCVEIGLPQLILLVFVSQYVPHVLHSGKHIFDRFAVLFTIVIVWIYAHLLTVGGAYNDAPHKTQISCRTDRAGLIDAAPWIRIPYPFQWGAPSFDAGEAFAMMMASFVSLVESSGAFIAVYRYASATPLPPSILSRGIGWQGVGILLSGLFGTVNGSSVSVENAGLLALTRVGSRRVVQISAGFMIFFSILGKFGAVFASIPPPIIAALYCLFFAYVGAGGLSFLQFCNLNSFRTKFILGFSIFIGLSVPQYFNEYTAINGYGPVHTGARWFNDIINVPFQSKPFVAGVVAYFLDNTLFKRAADIRKDRGKHWWDKYKSFKGDTRSEEFYSLPFNLNKYFPSV

SEQ ID NO: 22310 - protein, 532 aa, Glycine max
  unsure (1)..(532): unsure at all Xaa locations
MAGGGAPXPKADEPQPHPPKDQLPNISYCITSPPPWPEAILLGFQHFLVMLGTTVLIPTALVPQMGGGNNEKARVIETLLFVAGINTLLQTMFGTRLPAVIGGSYTFVPTTISIILAGRFSDEPDPIEKFKRIMRSIQGALIVASTLQIVLGFSGLWRNVARFLSPLSSVPLVSLVGFGLYELGFPGVAKCVEIGLPQLILLVFVSQYVPHVLHSGKHIFDRFAVLFTIVIVWIYAHLLTVGGAYNDAPHKTQISCRTDRAGLIDAAPWIRIPYPFQWGAPSFDAGEAFAMMMASFVSLVESSGAFIAVYRYASATPLPPSILSRGISWQGVGILLSGLFGTVNGSSVSVENAGLLALTRVGSRRVVQISAGFMIFFSILGKFGAVFASIPPPIIAALYCLFFAYVGAGGLSFLQFCNLNSFRTKFILGFSIFIGLSVPQYFNEYTAINGYGPVHTGARWFNDIINVPFQSKPFVAGVVAYFLDNTLFKRAADIRKDRGKHWWDKYKSFKGDTRSEEFYSLPFNLNKYFPSV

SEQ ID NO: 22311 - protein, 554 aa, Glycine max
  unsure (1)..(554): unsure at all Xaa locations
KRAIIGCGGAXQASKVDEPQPHPPKDHLPNISYCITSPLTWPEAILLGFQHXXPAMRCSNYANSRGIDSQHFVVHLDTLFQTMIGTRLPAVIGGSYTFVPTTISIXILAGRFSDEPDPXXEKFKRIMSSIQGALIVASILHIVLGFSGLWRNVARFLSPLSSVPLVSLVGFGLYELGIPGVAXCEVIGLPQLILLVFVSQYVPHVQQSGKHIFPSFSLLFGIXLVFFLMSHLHNIGAAISDAPHKTXISCRCSXSIGLIDAAPWIRIPYPFQWGAPSFDAGEAFAMMMASFVSLVESSGAFIAVYRYASATPLPPSILSRGIGWQVAFIAVYRYATAAPVRPSSFIRFSGCQGFSILLSGWFGIVNGSSVSVENAGLLAFTRVGTIQVVAISVGVMIFFSFHGKFGVVFASAPSPVIAALYCLFFAYVGAGGLSFLQFCNLNSFRTKFILGFSIFVGLSVPQYFNEYTAINGYGPVHTGARWFNDIINVPFQSKPFVAGVVAYFLDNTLFKREAAIRKDRGKHWWDKYKSFKGDTRSEEFYSLPFNLNKYFPSV

SEQ ID NO: 22312 - protein, 532 aa, Oryza sativa
AGGGAAPPPKQEELQPHQVKDQLPSVSYCITSPPPWPEAVILGFQHYIVMLGTSVIIPSALVPQMGGGNEEKARVIQTLLFVAGINTLCQSFFGTRLPAVMGGSYTIVAPTISIILAGRYSNEADPHEKFLRTMRGTQGALIIASTIQIILGFSGLWRNVVRLLSPLSAVPLISLAGFGLYELGFPGVAKCVEIGLPEIILLLVFSQYLPHVIHVAKPVFDRFAVIFTIAIVWLYAYILTASGAYKNARPKTQVHCRVDRSGIISGAPWIRVPFPFQWGAPTFDAGESFAMMMASFVALVESTGTFIAVSRYASATMIPPSVLGRGIGWQGIGTLIGAFFGTANGTAVSVENAGLLALTHVGSRRVVQISAGFMIFFSILGKFGAIFASIPLPIFAALYCIFFAYIGACGLSFLQFCNLNSFRTKFIVGFSFFMGLSVPQYFNEYTSVAGYGPVHTGARWFNDMINVPFASKPFVAGLIAYFLDNTIQRRDNGVRRDRGYHWWDKFRSFKTDTRSEEFYSLPFNLNKFFPSV

SEQ ID NO: 22313 - protein, 601 aa, Schizosaccharomyces pombe
MSESIQDQDHEKTTIIEKTRRFVLSIFTKDFWIGDYDYSFLLPAIPFTKQKPKSPPFFSLNAKVPVLLALLLGFQHALAMVGGVTSPPRIIAASANLTTEQTNYLVSAGLISSGIMTLIQIARVHIPKTKYYIGTGMLSVLGISFTSVSVAPKVLSQMYENGYCPKDENGTKLPCPDGYGAFLATACVCSLLEIFMSFIPPRILKRLFPPIVTGPVVLLIGTSLISSGLNDWAGGEGSCTGRPTEAEAPGYSLCPSDTSPHALGWGSAQFIGLGFSVFATIIIIERFGPPLMKTTSVVLGLVVGMIISAATGYWDHSIIDAAPVVTFNWVHTFRLRIYGPAVLPMLALYIVNMMEAIGDIGATSDVSMLEVDGPAFDARVQGGILGDGLASLIASLMTTTPLTTFAQNNGVISLTKCANRRAGFFCAVILFFMGLFAKFAAVFVAIPSPVLGGMTTFLFSSVAVSGIAIISQIPFNRRNRFILTASMTLGMGAILVPDWFTYFFEYSGPNKALVGFLDAITLVMENGFAIGAFISIFLNLILPYEFDPDLTNDSPGLSTTNGVNNGIVEVRGIDPNDSLSNTDTEYANENKKDEVDVDKVV

SEQ ID NO: 22314 - protein, 1472 aa, Streptomyces coelicolor A3(2)
MAGGLLTRSQDAVTGFVLAGPRLLARGTAPAVGAAAGAAAGTARAGVRGADFAARAARVARAALPGGSRDWRAGPRAHLALRPVARDEVRRAGGTERVGRRVAAALAEHPDVLFAYWDTGLARLVVTATEDALTDRVVDHATELAGRHGLTRVDQADLTGLTGPGEPGDDDLVDGDLVDEPDHPGDPAPVRVAAAALGADVLGIAAAVTGARLRLPPSPRLVTAVATLLRENPAFRAWLRERLGDHRMDVALAAANAAVHGAGQSPTSLVLDGALRVCQLTEAVARGAAFEVVHDRLCVPGRDSLPAVPALRPAPRTSPAQDYAAHASAGSVAGAAATLLVKHDLAEAAEAVLAGSPKAARYGPAAFHAVLSAALSRTGVLVRDPGRLRQLEMVRTVVLHPSALRVPDAGADPWTEDVLDAARRAGLRVVMVEDPALADFTGLADQVVGARRPLADVVAELRAEGGVVTVVRPLPGDDGSVSAGLLAGDVAVALADGDCPVAWGADVLAPQGLADVWRVLRAVPVARAVGRRSQTLARSGAALSGLLVAVGEARGRSRGGVSSLLGMRHAPVDASAALALLSGTRAAIGVATARAPHPRARVAWHALDPQDVRDRLEREREPEPTAVEQATARLRAAADRAGRVPVLAPVRWSWQLARAVRGELDDPLTPVLAVGSAASAILGSVVDALLVVGALDLNALVGGFQRLRAERALSGLLAEQKQKARVAEEQLRPETAEFTPEGEPRIVDAAKLHPGHVIELRADDVVPADARLLWEDGLEVDESALTGESLPVDKCVDPAPRAPVAERYCMVFEGTTVVAGRARAVVVDTGDHTEAARAVALAARTPSAAGVQARLQELTRKALPLTLAGGAAVTGLSLLRGAPIRQAVAGGVSVAVAAVPEGLPLVATVAQLAAARRLSRRGVLVRTPRTLEALGRMDTVCFDKTGTLTENRLRLSRVAGADGTVRRSGDPETADTVRTAARACPRLDGDGARPTHATDEAILDAAGDDPGWTQEEGLPFETSRGYAAAVGREDGTGAAVLVVKGAPETVLPACAGLPDHALEVAQRLAGAGLRIIAVARRTLDTGERAADVLERQPSELEFTGLLALADVARETSPALVRGLREAGVRPVVLTGDHPQTAHAIAVDLGWPEDAVVVTGDELAAADRTARSRMLRDADVVARVAPEQKLQVVESLRDAGRVVGMVGDGANDAAAIRAADIGVGISARGSAAARNAADLVVTGDDLLVLVEAVREGRALWHSVADAIAILIGGNAGEVGFGILGTVLGGAAPLSTRQMLLVNLFTDLFPAMAVAVTKTGDPEQEAADAGAPLGTAVLGEPLIRQIRHRALTTALGATAAWLLGRFTPGTRRRSTTMALCAVVGTQLAQTLADRRDSRLVQVTSLGSAAALVALVQTPGASRLFGCTPLGPVAWTCVAAAIALALAGQRALPGVEDAIVRYWPKAAERLPRAVR

SEQ ID NO: 22315 - protein, 796 aa, Streptomyces coelicolor A3(2)
MKNQLDEPGGAVRVGGGGGLSAAEVAERVAAGQVNDVPARSSRTIGEIVRSNLFTRINAIIGVLFVIVMIVGPVQDGLFGGVILANTAIGIIQEVRAKRTLDQLAIVGESRPRVWRDGQRLELSASEIVIDDSIDLGQGDKIVVDGTVTSGDSLEVDESLLTGEADPVVKQPGDPVMSGSFVVAGSGTFTATRVGKEAYASQLADEARRFSLVNSELRNGIDRILKFVTYAIVPAGIALIITQFVVNDDNFSEAIRRMVGGLVPMVPEGLVLLTSLAFAVGVVRLGKKQCLVQELPAIEGLARVDTVCLDKTGTLTEASMDVDEVLPLLPELPVDAVLGALGAADERPNASLQAIIESYPAPEGWRRTATAPFSSARRWSGASFAEPSGTESAWLLGAPDTMLPAGHSVLTAADSYGARGLRVLLLARSDRPLDTLMDDPAAVPAAVTAAALVVIKQRVRPEARATLDYFADQGVTAKVISGDNAVSVGAVASSLSLPGAERPVDARFLPDEPAELADAVEENTVFGRVGPQQKRDMVGALQSRGHTVAMTGDGVNDVLALKDADIGVGMGSGSPATRAVAQIVLLNNNFSALPSVVAEGRRVIGNIERVANLFLTKTVYSVLMALVVVIAQVPYPFLPRHITLVGSLTIGIPAFFLALAPNKERARSNFVGRVLRFAIPAGALAAAATSVAYLIARSVYDDNLDAETSAATLALFLTALWALAVIARPYTWWRVLLVLTMAVGFAVVLVVPYLQEFFQLKLVGVTAPWAAVACAAVAGLVLELVWARMRRRLDAD

SEQ ID NO: 22316 - protein, 802 aa, Streptomyces coelicolor A3(2)
MTHLDADRLDPEHPAHAVDAPSPATGLTAAGVAERIARGQVNDVPVRSSRSLADIVRANVFTRFNAIIGVLWVIMLFVAPIQDSLFGFVILANTGIGIIQEWRAKKTLDSLALIGEVRPTVRRDGKPVGISTSEIVLDDVIEIGPGDKAVVDGVCVEADGLEIDESLLTGEADPVVKQPGDQVMSGSFVVAGGGAFRATKVGREAYAAQLAEEASRFTLVQSELRSGISTILKYVTWMMVPTAIGLILSQLLAKDNDLDDSIARTVGGIVPMVPEGLVLLTSVAFAIGVVRLGRKQCLVQELPAIEGLARVDTVCLDKTGTLTEGGMDVTDLRVLDGADERHVRAVLGALGASDPRPNASLQAIIDTYPDDGSAGAWRNTRSLPFSSARKYSGATFDEGDGAAGTWLLGAPDVLLPEDDPALAETGRLNEQGLRVLLLARAARDLDDPEVAEGVEPTALVVLEQRLRPDAADTLRYFADQDVRAKVISGDNAVSVGAVAAKLGLSGATVDARRLPAEREEMAGALDEGTVFGRVTPQQKRDMVAALQSRGHTVAMTGDGVNDVLALKDADIGVAMGSGSEATRAVAQIVLLNNSFATLPSVVAEGRRVIGNITRVATLFLVKTVYSVLLAILVVCSQVEYPFLPRHLTLLSTLTIGVPAFFLALAPNRERARPHFVRRVMRYAIPGGVVAGAATFVTYLVARQHYTGPGALDAETSAATLTLFLISMWVLAIIARPYTWWRVLLVAAMGLGFVVVLAVPWLQDFFALKLVGVTMPWTAVGIAVAGAAVLELTWGWVDRRFPV

SEQ ID NO: 22317 - protein, 581 aa, Streptomyces coelicolor A3(2)
NVFTRFNAIIGVLWVIMLFVAPIQDSLFGFVILANTGIGIIQEWRAKKTLDSLALIGEVRPTVRRDGKPVGISTSEIVLDDVIEIGPGDKAVVDGVCVEADGLEIDESLLTGEADPVVKQPGDQVMSGSFVVAGGGAFRATKVGREAYAAQLAEEASRFTLVQSELRSGISTILKYVTWMMVPTAIGLILSQLLAKDNDLDDSIARTVGGIVPMVPEGLVLLTSVAFAIGVVRLGRKQCLVQELPAIEGLARVDTVCLDKTGTLTEGGMDVTDLRVLDGADERHVRAVLGALGASDPRPNASLQAIIDTYPDDGSAGAWRNTRSLPFSSARKYSGATFDEGDGAAGTWLLGAPDVLLPEDDPALAETGRLNEQGLRVLLLARAARDLDDPEVAEGVEPTALVVLEQRLRPDAADTLRYFADQDVRAKVISGDNAVSVGAVAAKLGLSGATVDARRLPAEREEMAGALDEGTVFGRVTPQQKRDMVAALQSRGHTVAMTGDGVNDVLALKDADIGVAMGSGSEATRAVAQIVLLNNSFATLPSVVAEGRRVIGNITRVATLFLVKTVYSVLLAILVVCSQVE

SEQ ID NO: 22318 - protein, 846 aa, Rhodospirillum rubrum
MEPVLMDALPFSPIGDPAAHRPPSPEYPDVDCDHGLSSGQAADLLAEWGANRLDDGNPGRLRRLANSLSGPVAWMLQAAALLALAAGRWADGALILTLLLVNAGVSLVEQRHAGRALSRLGRRLAPMARVLRDGVWADRPADEVVPGDVIFLKLGRVVPADAVLLGEGALSIDASMLTGDRRVIAKTGGDEVHAGSMVRGGEMKAVVTATGPTTLFGRSPPVTARRKPSALRAAMLGIGNTLVALTLVMMVTVMILALYRQDPPLETVLFVLVLSAASIPLALPAVLSMTLSAGALRLERMKAVVARMAAIEDLAGLDVLCADQSGTLSEPRLVMGEPVLLQASGRGELLRTAALACPAEGANAVDLAILAGQPALTPGDGYCLFLQPLTEDAGEGGCLRAEVERPLESGAVARFSVLKGEPLAVAQATGLEPALVRRISEATDDLAERGFRAVGIARAEEGGEVEHWRYLGLIALVEPSRGDSPGSLDAARVLGLRVLMITPERAAIGGRVARGMGLGDRVVCARRMVDGLGEDGGTGRAECGADRDDDLEDAHVIAEVHPEHRLRLVRALQRAGHRVGITGAAGEDAAALDHAEVGIAVKGASDAARQAADVVLGASGLAIITRAVSESRRILGRMSGYAAYRIAETLRLPVFVALAYLMLGSFPISLAMIALLSILASLPALFVAGDTAPPPPRPVRWDMLKVVRVSGVLGVSGVASSFLLLWLLDHRLDLPAAQEQTILFLKLLIGGNMTIALTRRDGWVWRRPFPAHRLLVAIVLTQGLGTLAAVGGLFMAPIGWPMAGAVWAFALVCFAFDNLALVATERLNRDGLPGMGLGFSKLLGGN

SEQ ID NO: 22319 - protein, 956 aa, Hordeum vulgare subsp. vulgare
MADKEAGNLEAVLKEVVDLENIPLEEVLDNLRCSREGLTAEQAQQRLQILGPNKLEEKEESKFLKFLGFMWNPLSWVMEMAAIMAIALANGGGKPPDWQDFVGIIVLLVINSTVSFIEENNAGNAAAALMANLAPKTKVLRDGRWGEQEASILVPGTLSASSLVTSSLLMLVCLEGDPFEDSSVWAYRRVSPSDQEPWGEVFSGSTCKQGEIEAVVIATGVHTFFGKAAHLVDSTNQVGHFQQVLTAIGNFCIISIAVGIVIEIIVMFPIQRRKYRAGIENLLVLLIGGIPIAMPTVLSVTMAIGSHKLSQQGAITKRMTAIEELAGMDVLCSDKTGTLTLNKLSVDKNLVEVFAKGVDKEHVLLLAARASRVENQDAIDACMVGMLADPKEARAGIREVHFLPFNPTDKRTALTYIDAEGNWHRASKGAPEQIITLCNCKEDVKRKVHSVIEKYAERGLRSLAVARQEVPEKSKDSAGGPWQFIGLLPLFDPPRHDSAETIRKALVLGVNVKMITGDQLAIGKETGRRLGMGTNMYPSSALLGQSKDGSLESLPVDELIEKADGFAGVFPEHKYEIVKRLQEKKHIVGMTGDGVNDAPALKKADIGIAVDDATDAARSASDIVLTEPGLSVIISAVLTSRCIFQRMKNYTIYAVSITIRIVLGFLLIALIWKFDFAPFMVLIIAILNDGTIMTISKDRVKPSPLPDSWKLNEIFATGVVLGTYLALMTVVFFWIIHRTDFFTNKFGVRSIRENETEKMSALYLQVSIVSQALIFVTRSRSWSFVERPGFLLVIAFLLAQLVATLIAVYANWGFARISGIGWGWAGVIWLFSIVFYFPLDIFKFFIRFVLSGRAWDNLLQNKTAFTTKENYGKGEREAQWATAQRTLHGLQAPEPASHTLFNDKSSYRELSEIAEQAKRRAEIARLRELNTLKGHVESVVKLKGLDIDTINQNYTV

SEQ ID NO: 22320 - protein, 635 aa, Hordeum vulgare subsp. vulgare
IEEMAGMDVLCSDKTGTLTLNKLSVDKNLVEVFAKGVDKEHVLLLAARASRVENQDAIDACMVGMLADPKEARAGIREVHFLPFNPTDKRTALTYIDAEGNWHRASKGAPEQIITLCNCKEDVKRKVHSVIEKYAERGLRSLAVARQEVPEKSKDSAGGPWQFIGLLPLFDPPRHDSAETIRKALVLGVNVKMITGDQLAIGKETGRRLGMGTNMYPSSALLGQSKDGSLESLPVDELIEKADGFAGVFPEHKYEIVKRLQEKKHIVGMTGDGVNDAPALKKADIGIAVDDATDAARSASDIVLTEPGLSVIISAVLTSRCIFQRMKNYTIYAVSITIRIVLGFLLIALIWKFDFAPFMVLIIAILNDGTIMTISKDRVKPSPLPDSWKLNEIFATGVVLGTYLALMTVVFFWIIHRTDFFTNKFGVRSIRENETEKMSALYLQVSIVSQALIFVTRSRSWSFVERPGFLLVIAFLLAQLVATLIAVYANWGFARISGIGWGWAGVIWLFSIVFYFPLDIFKFFIRFVLSGRAWDNLLQNKTAFTTKENYGKGEREAQWATAQRTLHGLQAPEPASHTLFNDKSSYRELSEIAEQAKRRAEIARLRELNTLKGHVESVVKLKGLDIDTINQNYTV

SEQ ID NO: 22321 - protein, 174 aa, Vallisneria gigantea
LVMNGAPEQILNLCNCKEDLRKKVHSIIDKYAERGLRSLAVARQEVHEKSKESAGGPWQFVGLLPLFDPPRHDSAETIRKALNLGVNVKMITGDQLAIAKETGRRLGLGTNMYPSSSLLGQDKDASIAALPVDELIEKADGFAGVFPEHKYEIVKKLQEKKPICGMTGDGVHDS

SEQ ID NO: 22322 - protein, 173 aa, Vallisneria gigantea
MMKGAPEQILNLCNCKEDLRKKVHSIIDKYADRGLRSLAVARQEVHEKSKESAGGPRQFVGLLPLFDPPRHDSAETIRKALNLGVNVKMITGDQLAIAKETGRRLGMGTNMYPSSSLLGQDKDASIAALPVDELIEKADGFAEVFPEHKYEIVKKLQEKKHICGMTGDGVNDS

SEQ ID NO: 22323 - protein, 174 aa, Vallisneria gigantea
LVMKGAPEQILNLCNCKEDVRKKVHSVIDKYAERGLRSLAVGRQEVPEKSKESAGGPWQFVGLLPLFDPPRHDSAKTIRRALNLGVNVKMITGDQLAIAKETGRRLGMGTNMYPSSSLLGNHKDESLGTIAVEELIEKADGFAGVFPEHKFEIVKKLQERKHICGMTGDGVNDS

SEQ ID NO: 22324 - protein, 811 aa, Burkholderia fungorum
MRRGPVRKLRWLEARAAASFSTNLNWFAMSSLPETSEHSVEDRQSGGLTSDEAQRRLQVFGPNGVPDTATSPWSRALGKLWAPVPWMLEAAIVLQLVLGEYVEAGVIAALLIFNAALGFFQESRAQATLDALKSRLALITPVRRDGAWKTVPVGQLVPGDIVKLSLGCIVGADVRLIEGEVLLDQSTLTGESLPIEGGPGLQTYAGALVRRGEAVAEVTATGAHTKFGQTAELVRIARVPSSQQQAVMRVVRNLAMFNGVIVLVQIGYASSLRMPLVEIVPLALTAILAAIPVALPATFTLATALGARVLAKLGVLPTRLSAIDEAASMDVLCADKTGTLTRNELAVTAVHAMPGFDEPHVLALAALASSEGGQDPVDAAIRNASRPACVADLPRLVRFVPFDPAEKMSEALATDKDDRTVRIVKGAFARVSALTQSSPEAAVAEQALEAKGFRVLAVGAGVPGKLQVAGLIALSDPPRDDSARLIADLLGMGVHTVMVTGDAVATAGVVAHTVGLDGAVCPPGPLPGQLRPEEFAVFAGVFPDDKFHIVKAFQSGGHIVGMCGDGANDAPALRQAQMGIAVSTATDVAKSAAGIVLTEPGLGGVVAAVREGRVTFQRILTYTLRSVTRKIDQMLFLTVGLIMTGHAVLTPMLMVVLMTTGDFLAMSSTTDNVRPSTRPNAWRINNLTIAGIVLASCNLLFCSSILALGKFWLHLGTGQLQTLAAVILVFSGQAVLYVVRERRRLWSSRPGRWLIVSSIADVSIIATLATRGILMSPLPLQWIGAMLGAAIVFAFVLDFVKVAAFARLKMV

SEQ ID NO: 22325 - protein, 818 aa, Burkholderia fungorum
MKNSPGTLKCVRGKLNVKLPLRPGRINVTSAVVPAPIPEAASQPDAVPGTGLSSTEARRRLAESGANTLPDTAASTWRMMLGKFWAPVPWMLEAAVVLQCVLGRFVEAGIIAGLLVFNAILGVFQESRAQATLAALKSRLAMNASVLRDGAWSIVPAADLVKGDVVKLSLGGVVAADMRIVSGNALLDHSMLTGESVPIEATSGTQTFAGALVRRGEALALVTATGTHTRFGRTAELVRTAHIASSQQTAVLLVVRNLAAFSVAVIALLVGYALYLHMPLADIVPLILTAVLASIPVALPATFTLSAALGARALAAQGVLSTRLSAVDEAGTMDVLCADKTGTLTCNALTVSTVAPMPGFDMNRVLILAALASAAGSQDPVDKAILDAASSVAPTPEDSVLKLVALKPFDPSTRTSEASVSDPSHGIQRIVKGASAAVISLSQASPEAAARTAELEGQGLRVLAVAAGTADALQVVGLVALSDPPRADSAAFIEELHGLGVRVVMVSGDAPATAASVAQAIGLTGPVCPPGSMPDRADPQSFAVFAGVLPEDKYKLVKAFQQTGHTVGMCGDGANDAPALRQAQIGIAVSTATDVARSAAGMVLTEAGLGGIVTAVKEGRLTFQRILTYMLNSVLKKIATAFMLVIGLLVTGHAILTPLLMVILMIAGDFLAMSLTTDRVEPSPSPNVWRISNLTVVGVFVGFALVAFCSGVLALGKFAMGLNLDALRTLTFVLLVFGGQATLYAIRHRRHMWGTRPSVWVMASSVADVLIAAGLAIGGIAMTALPPMLIGGVLAATVVFAFVLAAAKIPLFARLKIS

SEQ ID NO: 22326 - protein, 996 aa, Makaira nigricans
MENAHTKSPAECLSYFGVNEHTGLSPDQFKKNLDKFGYNELPAEEGKSIWDLIVEQFEDLLVRILLLAACISFVLAWFEEGEETITAFVEPFVILLILIANAIVGVWQERNAEDAIEALKEYEPEMGKVYRSDRKSVQRIKAREIVPGDIVEVSVGDKVPADIRIVSIKSTTLRVDQSILTGESVSVIKHTESVPDPRAVNQDKKNMLFSGTNIAAGKAIGVAIATGVSTEIGKIRDQMAATEQEKTPLQAKLDEFGEQLSKVISLICVAVWAINIGHFNDPVHGGSWIRGAVYYFKIAVALAVAAIPEGLPAVITTCLALGTRRMAKKNAIVRSLPSVETLGCTSVICSDKTGTLTTNQMCVTKMFIVKSVDGDHVDLNAFDISGSKYTPEGEVSHGGSKTNCSAYDGLVELATICALCNDSSLDYNESKKIYEKVGEATETALCCLVEKMNVFNSNVKNLSRIERANACCTVIKQLMKKNFTLEFSRDRKSMSVYCTPAKGDGGAKMFVKGAPEGVIDRCAYVRVGTTRVPLTSAIKEKIMAVIRDWGTGRDTLRCLALATRDTPLKVEEMNLEDSTKFADYETDMTFVGCVGMLDPPRKEVTGSIELCRDAGIRVIMITGDNKGTAIAICRRIGIFKEDEDVSNKAYTGREFDDLPSQDQAEAVRRACCFARVEPSHKSKIVEFLQGNDDITAMTGDGVNDAPALKKAEIGIAMGSGTAVAKSASEMVLADDNFSSIVAAVEEGRAIYNNMKQFIRYLISSNVGEVVCIFLTAALGLPEALIPVQLLWVNLVTDGLPATALGFNPPDLDIMGKPPRSPKEPLISGWLFFRYMAIGGYVGAATVGGAAWWFLYDSTGPAVTYYQLSHFMQCHNHNEDFTGVDCDIFEASPPMTMALSVLVTIEMCNALNSLSENQSLIRMPPWSNLWLMAAMTLSMSLHFMIIYVDPLPMIFKLTHLTFDQWLMVFKLSFPVILIDEVLKFFARNYIETGKEVK

SEQ ID NO: 22327 - protein, 991 aa, Makaira nigricans
MENAHTKSPAECLSYFGVNEHTGLSPDQFKKNLDKFGYNELPAEEGKSIWDLIVEQFEDLLVRILLLAACISFVLAWFEEGEETITAFVEPFVILLILIANAIVGVWQERNAEDAIEALKEYEPEMGKVYRSDRKSVQRIKAREIVPGDIVEVSVGDKVPADIRIVSIKSTTLRVDQSILTGESVSVIKHTESVPDPRAVNQDKKNMLFSGTNIAAGKAIGVAIATGVSTEIGKIRDQMAATEQEKTPLQAKLDEFGEQLSKVISLICVAVWAINIGHFNDPVHGGSWIRGAVYYFKIAVALAVAAIPEGLPAVITTCLALGTRRMAKKNAIVRSLPSVETLGCTSVICSDKTGTLTTNQMCVTKMFIVKSVDGDHVDLNAFDISGSKYTPEGEVSHGGSKTNCSAYDGLVELATICALCNDSSLDYNESKKIYEKVGEATETALCCLVEKMNVFNSNVKNLSRIERANACCTVIKQLMKKNFTLEFSRDRKSMSVYCTPAKGDGGAKMFVKGAPEGVIDRCAYVRVGTTRVPLTSAIKEKIMAVIRDWGTGRDTLRCLALATRDTPLKVEEMNLEYSTKFADYETDMTFVGCVGMLDPPRKEVTGSIELCRDAGIRVIMITGDNKGTAIAICRRIGIFKEDEDVSNKAYTGREFDDLPSQDQAEAVRRACCFARVEPSHKSKIVEFLQGNDDITAMTGDGVNDAPALKKAEIGIAMGSGTAVAKSASEMVLADDNFSSIVAAVEEGRAIYNNMKQFIRYLISSNVGEVVCIFLTAALGLPEALIPVQLLWVNLVTDGLPATALGFNPPDLDIMGKPPRSPKEPLISGWLFFRYMAIGGYVGAATVGGAAWWFLYDSTGPAVTYYQLSHFMQCHNHNEDFTGVDCDIFEASPPMTMALSVLVTIEMCNALNSLSENQSLIRMPPWSNLWLMAAMTLSMSLHFMIIYVDPLPMIFKLTHLTFDQWLMVFKLSFPVILIDEVLKFFARNYIEK

SEQ ID NO: 22328 - protein, 1131 aa, Dunaliella bioculata
MADIKEGVEEGSVKVDMIKEPLTQGDTGVDEVDFAKITLDDAFKYLNCNKHGLSSAEAAARLQQHGPNKLPDSSRNPVLVFLGYMWNPLAWAMEAAAIISIALLDVADFVLIVGLLLINAIISFYEESNADKAIKALTAALAPKAMVVRDGAIVTIDAVNLVPGDVILIRLGNIVPADVKLLEEEGADEGEQEAPMQIDQAALTGESLPAKKFTGDVAFSGSSIKQGERHAVVYATGVNTFFGRAAALISGTNNVSNLQTVMNKMSAICIVTILLWVVVELAVQFGHYSHECVGGREGCPTLLNMLVVLVGGIPIAMPTVLSVTLALGAYKLAREGAIVTRMSAVEEMAGMDVLCSDKTGTLTLNKLSIDKSMVVPVGNMGVDEIMRMGALSANTVTEEPIDMVLWESYPDRETIKRDYKHTKYFPFNPNDKITIATCLEIATGRVFRVLKGSPQVVLAKAWNAAELDATVNQKMVEFANRGFRALGLAMADGDGKDGTKWEMLALLPLFDPPRHDTKETIEHCQNQGIQVKMITGDHLLIGKETAKMLGMGTEMFPSEVMIKARNGDASQLHGYKNFVEMVETCNGFAQVFPEHKFEIVKILQDSNHVVGMTGDGVNDAPALKKADVGVAVADATDAARGAADIVLTEPGLSTIVTAVIGARKIFQRMTTYSKYTIAMTFRICFTFGLITVIYDWYFPTILIVIMAVFNDGAMIALSKDRVVASKTPNSWNITNIFIMGMVYGLYLTLSTWALYQTATKTTFFEDKTPLHSLNDQYSVLQPWCEDEVRAKLGQTIDPYASLCESNSYAKQFDECEGYQKGSGVQVEDVPTLHAQCVTEQRYLRGAMTRSLIYTQVSISGQALVFVVRTAGYSLMERAGTSTYLAFFFAQVGATLFGIFGLGGFEKPRHQLEDCQFCDYSFHEPVDWFDSGIVPESGTESDFTASVIGCGGYVIVAWIWSAIWYVLLDPIKWILFWILNEEGFRDTMSWRESTKRSLDRRSKDDIGDKEFTGPSGMVPANYSNPLGRASMSKPVSAVLDRKSASLVAINRNSMTVSQDPNRALNIGRRSMIGRPSGPVGRTSMPLGRISRTSNTLSTGSKDGQIGRGSKPLNSSSAEIKPDKYDFASTIRE

SEQ ID NO: 22329 - protein, 994 aa, Rana clamitans
MENAHTKTTEECLAYFGVNENTGFSPEQVKKNFEKYGPNELPAEEGKSIWELVAEQFEDLLVRILLLAAIISFVLAWFEEGEETITAFVEPFVILLILIANAIVGVWQERNAEDAIEALKEYEPEMGKVYRSDRKSVQRIKAREIVPGDIVEIAVGDKVPADIRLISIKSTTLRIDQSILTGESVSVIKHTDVVPDLRAVNQDKKNMLFSGTNVGAGKAIGIVIATGANTEIGKIRDEMAATEQEKTPLQQKLDEFGEQLSKVISLICVAVWLINIGHFNDPIHGGSWIKGAVYYFKIAVALAVAAIPEGLPAVITTCLALGTRRMAKKNAIVRSLPSVETLGCTSVICSDKTGTLTTNQMSVCRMFVLDKVEGDVASLNEFTITGSTYAPEGDVQKNDKNVKAGQYDGLVELATICALCNDSSLDFNEAKGVFEKVGEATETALTTLVEKMNVFNTDVKSLSKVERANACNSVIKQLMKKEFTLEFSRDRKSMSVYCTPAKASRAAVGNKMFVKGAPEGVIDRCNYVRVGTTRVPFTSGIKDKILSVVKEWGTGRDTLRCLALATRDTPPKREDMVLEDSTKFADYETDLTFVGCVGMLDPPRKEVMGSIQLCRDAGIRVIMITGDNKGTAIAICRRIGIFGENDDVSSRAYTGREFDDLPPAEQREAVKHASCFARVEPSHKSKIVEFLQSCDEITAMTGDGVNDAPALKKAEIGIAMGSGTAVAKTASEMVLADDNFATIVAAVEEGRAIYNNMKQFIRYLISSNVGEVVCIFLTAALGLPEALIPVQLLWVNLVTDGLPATALGFNPPDLDIMDRPPRSPKEPLISGWLFFRYMAIGGYVGAATVGAAAWWFMYADDGPNVTFYQLSHFMQCTEDNPEFEGHECEVFESPVPMTMALSVLVTIEMCNALNSLSENQSLIRMPPWVNFWLLGSICLSMSLHFLILYVEPLPMIFKLTPLNIEQWFVVLKISFPVILLDELLKFVARNYLDG

SEQ ID NO: 22330 - protein, 898 aa, Escherichia coli O157:H7 EDL933
  unsure (1)..(898): unsure at all Xaa locations
MFKEIFTRLIRHLPSRLVHRDPLPGAQQTVNTVVPPSLSAHCLKMAVMPEEELWKTFDTHPEGLNQAEVESAREQHGENKLPAQQPSPWWVHLWVCYRNPFNILLTILGAISYATEDLFAAGVIALMVAISTLLNFIQEARSTKAADALKAMVSNTATVLRVINDKGENGWLEIPIDQLVPGDIIKLAAGDMIPADLRILQARDLFVAQASLTGESLPVEKAATTRQPEHSNPLECDTLCFMGTTVVSGTAQAMVIATGANTWFGQLAGRVSEQESEPNAFQQGISRVSMLLIRFMLVMAPVVLLINGYTKGDWWEAALFALSVAVGLTPEMLPMIVTSTLARGAVKLSKQKVIVKHLDAIQNFGAMDILCTDKTGTLTQDKIVLENHTDISGKTSERVLHSAWLNSHYQTGLKNLLDTAVLEGTDEESARSLASRWQKIDEIPFDFERRRMSVVVAENTEHHQLVCKGALQEILNVCSQVRHNGEIVPLDDIMLRKIKRVTDTLNRQGLRVVAVATKYLPAREGDYQRADESDLILEGYIAFLDPPKETTXPALKALKASGITVKILTGDSELVAAKVCHEVGLDAGEVVIGSDIETLSDDELANLAQRTTLFARLTPMHKERIVTLLKREGHVVGFMGDGINDAPALRAADIGISVDGAVDIAREAADIILLEKSLMVLEEGVIEGRRTFANMLKYIKMTASSNFGNVFSVLVASAFLPFLPMLPLHLLIQNLLYDVSQVAIPFDNVDDEQIQKPQRWNPADLGRFMIFFGPISSIFDILTFCLMWWVFHANTPETQTLFQSGWFVVGLLSQTLIVHMIRTRRVPFIQSCASWPLMIMTVIVMIVGIALPFSPLASYLQLQALPLSYFPWLVAILAGYMTLTQLVKGFYSRRYGWQ

SEQ ID NO: 22331 - protein, 758 aa, Lactobacillus plantarum
MIEDLTEQQAAAKLAADGFNDVPEPTFNFFKAVVSRLWEPSAWILEGALVIEVVLGKEIQAGFIALMLVFAAVNGAIQSRRAALVLQELAHQLTPTSSVRRAGHWQLIDAKALVVGDLISLQVGSVIPADIRVLTNPIYTDESSITGESVAVIHTSGETAFAGTMVVAGETLARVLATGSHSRAGKTVSLINQNNAPGHLQRLLGKIIGYLALLDSALALIIVGIALIRHADMIQMLPFLAMLFIATIPIAMPSSFAVANSVEARELSRQRILVSELTGIQEAANLNLLLVDKTGTITTNQPQVVQFKNLSARSDQQLLRLAASATDSRHPSVVDQAIVNFAHRYQLKRLPQQEFKPFDASVGYAEALVGEAPTVVRVRIGALSRLYELTAQQPALAIDQLDLTRGRSVAVMINNVLQGVLILQDQPRPDSAAALKRIQHRGVKTIMLTGDNLKTAQAVADAVGLKGQVVSYQTFKTHSRPLAQVAGIAEVVPENKLAIVKAMHRAGYVVGMTGDGVNDAPALKQSEVGIAVDNATDLAKRSAKFVLLTGGLANILTILDNGHRVYQRMLTWTITKLTRTVELTVLLTIGYLWLDYVPLSLNAMVLVAILNDLVTLVLGTDRTTIRHRPEQWDMPRLSKIAGFLATGWTAVGVGLIVWLHGLGLSAGQLSTSLYVYLIFSAMLTILMTRTSGPFWRGRPSRAVGVTIGLNCLLTIGLASSDWGVPAISGWLTLIVIVLVLMTGIGLTVAGDLWRRLTK

SEQ ID NO: 22332 - protein, 920 aa, Pseudomonas putida KT2440
MKRLCVVPPQRQEHSNMTVKYRNTSSAKAERETRLSTRAAREARNGLAVTLANLDASEQGLTEHEAAKRLVRDGANQVAHDPQPHALVQLLKALNNPFIYVLLTLAGISFVTDYWLPVSAGEADDADLTKVIIIMTMVSLSSLLRFWQEYRSNKAADALKAMVRTTATVLRREQIGQAPRLREVPMDELVAGDIVQLSAGDMIPADIRLLEARDLFISQAVLTGEALPVEKYDTLGNVAQKSAAEHGAHQDNLLELPNICFMGTNVVSGRARAVVVATGRRTYFGSLAKAIAGSRSQTAFDRGVNSVSSLLIRFMLVMVPVVFMINGVVKGDWADAFLFALAVAVGLTPEMLPMIVSANLAKGAVAMARRKVVVKRLNAIQNLGSMDVLCTDKTGTLTQDRIILEHHVGFDGQTDKHILELAWLNSHHQSGIRNLMDQAVLHFAGQDHQFQAPYAYAKVDELPFDFIRRRLSVVVKNALGDHLLVSKGAVEEMLAIATHVQEGDKVVALDPCRRQQLMARVDAFNQDGFRVLVVATRQIPADEGKAQYHTEDERDLVIQGLLTFLDPPKETAGPAIAALRDMGVQVKVLTGDNPVVTSKVCREVGLAPGQPLLGQDIEGMDDTTLKLQVEERTVFAKLTPLQKSRVLKALQANGHTVGFLGDGINDAAALRDADVGISVDSGTDIAKESADIILLEKSLMVLEEGVLKGRETFGNIMKYLCMTASSNFGNVFSVLVASAFIPFLPMLAIHLLLQNLMYDFSQLSLPWDRMDKEFLSKPRKWDARNIGRFMLWIGPTSSIFDITTFALMWYVFAANSVEMQALFQSGWFIEGLLSQTLVVHMLRTRKVPFFQSTAALPVVLATGLVMALGIYIPFSPVGAMVGLVPLPWEYFPWLVATLLGYCVVAQAMKTLYIRRFGQWF

SEQ ID NO: 22333 - protein, 990 aa, Aspergillus nidulans
MAERKISYAADVENGDHSRPTDVNDDAGLDEYGPLNRYISTARDNRCGSTSSAGALSMKQKKKPWYKFWAKAGGENGEEGFVAPEDWLETDLNGLPSSQIEPRRKRGGWNELTTEKTNFFVQFIGYFRGPILYVMELAVLLAAGLRDWIDLGVIIGILMLNAVVGWYQEKQAGNVVASLKGDIAMKAVVKRDGQEQEILARELVTGDIVVIEEGTIVPADVRLICDYDKPETYETYKEYLATANDDTLKENDDDDDDHGIEARLGVSLVAVDQSAITGESLAVDKYMADTCYYTTGCKRGKAYAIVTATAKHSFVGKTAALVQGAQDQGHFKAVMDNIGTSLLVLVMFWILAAWIGGFYRHLKIATPEHSDNTLLHWTLILLIIGVPVGLPVVTTTTLAVGAAYLAEQKAIVQKLTAIESLAGVDILCSDKTGTLTANQLSIREPYVNEGVDVNWMMAVAAIASNHNVKNLDPIDKVTILTLRRYPKAREILARNWVTEKYTPFDPVSKRITTICTCDGVRYTCAKGAPKAILAMSECSPEEAQKFREKASEFARRGFRSLGVAVQKEGEPWQLLGMYPMFDPPREDTAHTIAEAQHLGLSVKMLTGDALAIAKETCKMLALSTKVYDSERLIHGGLAGSAQHDLVEKADGFAEVFPEHKYQVVEMLQQCGHLTAMTGDGVNDAPSLKKADCGIAVEGSTEAAQAAADIVFLAPGLSTIVDAIKLARQIFQRMKAYIQYRIALCIHLELYLVTSMIIINETIKADLIVFIALFADLATIAVAYDNAHFEARPVEWQLPKIWVISVVLGVLLAAGTWIMRASLFLENGGIIQNFGSPQPMLFLEVSLTENWLIFVTRGGKTWPSWQLVGAIFVVDVLATLFCVFGWLAGDYVETSPPSQATFSTNNDTDIVTVVVIWAYSIGVTIIIAVVYYLLTIIPALDNLGRKNRSVVDTKVENLLNHLSKLAIEHEVDANGKSRYTLGARAEPEDDE

SEQ ID NO: 22334 - protein, 990 aa, Aspergillus nidulans
MAERKISYAADVENGDHSRPTDVNDSAGLDEYGALNRYISTARDNRRGSTSSAGALSMKQKKKPWYKFWAKAGGENGEEGFVAPEDWLETDLNGLPSSQIEPRRKRGGWNELTTEKTNFFVQFIGYFRGPILYVMELAVLLAAGLRDWIDLGVIIGILMLNAVVGWYQEKQAADVVASLKGDIAMKAVVKRDGQEQEILARELVTGDIVVIEEGTIVPADVRLICDYDKPETYETYKEYLATANDDTLKENDDDDDDHGIEARLGVSLVAVDQSAITGESLAVDKYMADTCYYTTGCKRGKAYAIVTATAKHSFVGKTAALVQGAQDQGHFKAVMDNIGTSLLVLVMFWILAAWIGGFYRHLKIATPEHSDNTLLHWTLILLIIGVPVGLPVVTTTTLAVGAAYLAEQKAIVQKLTAIESLAGVDILCSDKTGTLTANQLSIREPYVNEGVDVNWMMAVAAIASNHNVKNLDPIDKVTILTLRRYPKAREILARNWVTEKYTPFDPVSKRITTICTCDGVRYTCAKGAPKAILAMSECSPEEAQKFREKASEFARRGFRSLGVAVQKEGEPWQLLGMYPMFDPPREDTAHTIAEAQHLGLSVKMLTGDALAIAKETCKMLALSTKVYDSERLIHGGLAGSAQHDLVEKADGFAEVFPEHKYQVVEMLQQRGHLTAMTGDGVNDAPSLKKADCGIAVEGSTEAAQAAADIVFLAPGLSTIVDAIKLARQIFQRMKAYIQYRIALCIHLELYLVTSMIIINETIKADLIVFIALFADLATIAVAYDNAHFEARPVEWQLPKIWVISVVLGVLLAAGTWIMRASLFLENGGIIQNFGSPQPMLFLEVSLTENWLIFVTRGGKTWPSWQLVGAIFVVDVLATLFCVFGWLAGDYVETSPPSQATFSTNNDTDIVTVVVIWAYSIGVTIIIAVVYYLLTIIPALDNLGRKNRSVVDTKVENLLNHLSKLAIEHEVDANGKSRYTLGARAEPEDDE

SEQ ID NO: 22335 - protein, 1609 aa, Mycobacterium leprae
MKIPHVTDPVSNMVGGMAQVVRASTHAATGAVNTMQMLASPVAEFAWPVVQSVAKSTGRALGTGHSPNFANRVDPPVRWHNGQRVHLDLDPLLPFPRWHEYAAVVEEPVRRIPGVAKGHVEGSLGRLVIELDKNADSDVVLGKVRDVVIALAADLALTGARSAPKVAPFADPGNPLAILMPLTAAVMDLVALSAAVTGWVTRLPAVPQTIRAAAALVNHQPRMVSLLESRLGRVGTDIALSITTAAASGLTQAVGTPLLDLACRGLQLSEAAAHQRVWRDREPQLASPKRPQAPVVPVISSAGEKSHAAGHNWTAAASNEASHLVVGGSIDAAIDTAKGSMKGPVESYVDSAANGSLIAAASALLAGGGTEDAAGAILAGVPRAAHMGQQAFAATLGRGLANAGQLVLDPGALRRLDQVKVVVIDGAALRGDHRAVLLARGNTPGWDDDRVYEVTDALLHGERAPEPDPDESPATGARLRWVPLQGPSATPVQGREHADLVVNGECVGGVDVGWEVDPYAIPLLQTAHRTGARVVLRHVAGTEDLSASVGATHPPGTPLLKLVRELRTDRGPVLLITAVHRDFASTDTLAALAIADVGVALDDPHAATPWTADIITGTDLAAAVRILSALPVARSASESSVHLAQGGTTLAGLLLITASAGSKSASPITLRRWFSPVNAAAATALVTGVVSASKVLRLPDPTPQPLTAWHALDPEIVYSRLAGVTQPLAVEPGTPDWRRRLDDLSYTRALSPLRKPVTKLARLASATRQEFADPLTPILAVGAAASAIVGSNIDALLVAGVMTVNAITGGVQRLRAEAAAAELFAEQDQLVRRVVVPAVATTRRRLEAAQHATRTVTVSAKSLRAGDVIDLAAPEVVPADARVLVAEDLEVDESLLTGESLPVDKRVDPVAINDADRASMLFEGSAIVAGHARAIVVATGVGTAAHRAISAVADVEVSAGVQARLRELTSKVLPLTLAGGAAVTGLALLRRASLRQAVADGVAIAVAAVPEGLPLVATLSQLAAAQRLTAKGALVRSPRTIEALGRVDTICFDKTGTLTENRLRVVCAVPNTRMPHDPLPDITDPHSAAVLRDAARASTQPHDGQGHTHATDEAILTAASSLNSHTDSTWSLIAEVPFESSRGYAAAIGITGNGKAPMLMLKGAPEKILPRCRFADPEADVAHAESLVRHLAEQGLRVLAVAQCSWGHDTTDDNDTDADAVDAAAHDLELVGYIGLADTARPSSRPLIEALVTAGRNVVLITGDHPITARAIAQQLGLRSDARVVNGTELIGLDEDACAELAADVQVFARVSPEQKVQIVAALQRCGQVTAMVGDGANDAAAIRMADVGIGVSGRGSSAARGAADIVLTDDDLGVLLDALVEGRSMWAGVRDAVTILVGGNVGEVVFTIIGTVFGAGRAPVGTRQLLLVNLLTDMFPALSIAVTSQYEEPGEDEYQTDEEADEARRTHQHEVLTGPTPSLDAPLMRQIVNRGVVTAAGATTAWAIGRWTPGTERRTATMGLTALVTTQLAQTLLTRRHSPLVVATALGSAGVLIGIIQTPVISQFFGCTPLGPIAWSGVITATAGATAVSVLAPQWLNKAFGIAQLNQE

SEQ ID NO: 22336 - protein, 998 aa, Cryptococcus neoformans var. grubii
MSDNEKVGHTEEVPTKESSLENKVQGEDVPAAAAAADEEPRKKREYKEMEHKTEGDLHAKVDMNTIQFTAADLYDKDKVDIEHVVMEEVYQLLQCTDAGLTETEAVDRIGIFGPNKLEEKSENVLLQFLSFMWNPLSWVMEGAALVAIALSNGGGTPPDWQDFVGIVLLLFVNSTIGFVEERNAGNAVKALMDSLAPKARVKRDGQWKEIESAELVPGDLIAFKHGDVCPSDCRLVEAIDVSMDQAALTGESLPVGKSEGDECFSGSTCKQGEAEGIVIATGPNTFFGRAATLVGQDNDQVGHLQQVLARIGSFCLCSIGIFVLLEILILYADFRYPYRRGLDNILVLLIGGIPIAMPTVLSVTLAVGAQQLAKHKAIVTRITAIEELAGVTILCSDKTGTLTTNKLTIDKENVKCYSKWDVEGVCLLAAYASRTENQDAIDGCVVGTLPDPKQARGGIQLLDFKPFNPVDKRTEITYRDDMDGGKLKRATKGMTGIIIELCSRGKTNELEDQLEADVEEFARRGLRALAVAYEDVAGDDPSAEGNGFELVGLLSIFDPPRSDTKKTIDDAMALGVKVKMVTGDQLAIAKETGRRLGLGDHMYPAKVLKEGPEAGGKHANLDEMIMDADGFAGVFPEHKFEIVKRIQNLGHLCAMTGDGANDAPALSRANVGIAVEGATDAARGAADIVLTEPGLSTIVHAIYGSRVIFQRMRNYAIYACAVTIRIVLCFAIMAFAWRFDFPPFMVLIIAVLNDGTIMTLSLDRVLPSTTPDSWDLAEVFSFGVAYGIYLSASTIALYATMENTSFFEDRFGVEPLKGNSYGGHMVIYLQVAIISQALIFVTRSHGPSWTERPSVALMLAFCLAQLVSSIIAAYADWSFSQVHSISGGWIGIVWVWNIVWYFPLDGIKFIMKKTVIAALQRRKARKAGPAVADAALHRAPSRHESLYSNRTNFLTRAANRLRGGAKISMSQNELQRFSSIQAQQSGAALTRAHSRPAA

SEQ ID NO: 22337 - protein, 839 aa, Methanosarcina acetivorans C2A
MGIIVMNQNITSTDEAKEASVAELLEKLSSSERGLTDSEAKERLQKYGPNEITEKKASALVKFLSYFWGPIPWMIEIAVVLSGILHRWDDFAIILALLLLNVTVGFWQEHKADNAIELLKQKLALKARVLRDNKWLEISAGEMVPGDVIRLRLGDICPADVKLITGDYLLVDESALTGESLPVEKHVSDIAYSGSVIRQGEMDALVVATGMNTFFGKTARLVEEAKTQSHFQKAVIKIGDYLIVFALVLVAFTFLVVLFRHESLLEFFQFALVLLVAAIPAALPAVLSVSMAVGAVTLARDGAIVSKLAAVEEMAGMDILCSDKTGTITKNELVLTEINPFQNFSENDVLLFASLASREEDRDPIDDAVLARTKTLKDFSEIAGSYRVLSFKPFDPVSKRTEAEVEDSAGNRFLVTKGAPQAVSALMDSEVAVTSKVTTDSKVTTDDSENTAGSQIEEYVEEFASRGYRALGVGRTDAQGSWHFAGLLALYDPPRDDSAETIRTAQDMGVDVKMITGDHLAIAKEISRQVNLKQDIMLPTSFLDAPDRNAEEIVETADGFAQVFPEHKYHIVELLQHRGHIIGMTGDGVNDAPALKKADAGIAVAGATDAAKSAADIVLTKPGLSTIVNALKESRKIFQRMNNYALYRITETIRVLLFITSSILAFKFYPVTSLMIVLLALLNDAPIMTIAYDNVKYSDLPEKWDMRILLSMATLLGVIGVISSFGILYIGLHIFQLSHEVLQSFIYLKLSVAGHLTIFVARTKSYFWSVKPAKILFAAVIITQIIATLITVYGFLLPAMGWKLAFFVWGYALTAFVITDFIKVQAYRLLNHTGIKFHV

SEQ ID NO: 22338 - protein, 819 aa, Methanosarcina acetivorans C2A
MNNQGLGVFMKENVQLKVDEIKDSPASEIIKKLDSSDKGLSSSEAESRIEQYGYNEIFEKKVSPLRKFFGYFWGPIPWMIEIAAVISAFIHRWEDFVIISLLLLLNGVVGFWQENKADNAIELLKQKMALNAKVLRGGEWSQIPARELVPGDVVRVRSGDVVPADLKLFEGDYLQVDESALTGESLPVEKKSDDIAYSGSVIQKGEMNALVVATGMNTYFGETTKLVAEIRTRSHFQKAVLKIGDYLIVLAACIVAIVLVIEFFFRHTPFLETLQFALVLIVAAIPAALPAVMSVSMAVGATELANKGAIVSKLVSIEEMAGMDILCSDKTGTITQNKLKLSEISPFGNFKENDLLLYGSLASREEDNDPIDNAILLKAKDEGSVQEKIDSYEVKEFTPFDPVIKHTEATIEGPEGKLKIAKGAPQVILDMSDDKEEVRQKVEEKVDSLASKGYRALGVCVGEEGKYRFAGLLGLYDPPHEDSAETIKTANSLNVNVKMVTGDHIAIAKEIASQVGLGTNIITADDFVEKSDSEAQELVEKADGFAQVFPEHKYRIVDLLQKEEHIVGMTGDGVNDVPALKMADAGIAVAGATDAAKSAADIVFTISGLSIIINAIKESRKIFQRMKSYSIYRIAETVRVLFFIATSIIVFNFYPITAIMIVLLAILNDAPIMTIAYDNVKYSLKPEEWNMREVVRVSTFLGILGVIASFLIYYIGARVLYLSPGVLQSFIFLKLAVAGHLTIFVARTRGHFWSPPPGKLLFWSAVVTKLLATFIAVYGIYISPIGWKLAGFIWIYALTAFVITDYLKVGFYKLMDSRG

SEQ ID NO: 22339 - protein, 602 aa, Leptospira interrogans serovar lai str. 56601
METEFEVGVRKFGFFLLHVTLLLVITIFIANVFLHKSVLEFFLFSLALSVGLTPQLLPAIISVNLSHGARKMAEKKVIVKRLAAIENFGNMNIICSDKTGTLTEGTVKLQSSLDIYGNENQEVALSAFLNASFETGFVNAIDQSIRENLNFNLSGFEKKDEIPYDFQRKRLSILVSHSGGHRIITKGALINILEICNTAKSQDGSQIEIEKVRDQILQRYETLGAKGYRILGIAVKEIGEQSKIEKLEEKNMVFLGMLSFYDPPKTKIKETITNLKNLGVTLKVITGDNRFVAMNLSSQIGLENPNILSGHELEKMSNEALIHQVGKVNVFAEIEPNGKERIIIALKKAGNVVGYIGDGINDVSALHSSDVGISVEKAVDVAKNAADLVLLEKDLEVLVDGVKEGRNTFANTLKYVFMATSANFGNMFSMAGVSMFLPFLPLLPKQILLTNFLTDFPEMTIATDRVDSEMIASPKRWDISAIRKFMVVFGMVSSFFDYLTFGVLHWLLKVNQDQFRTGWFIESIVSASLIVLIIRTRNVFFVSKPSRSLFLTTLCVICFTISIPYSPIADWSGSSSSFVFGNVGWDCAYLRNGCRNNKTDFL

SEQ ID NO: 22340 - protein, 869 aa, Chlorobium tepidum TLS
MDGQGRKSKEYEQKPVEETLSELKVDRTLGLDDKAVSERRSRFGFNEIEEKEEALWHRVFRRFWGPIPWMIEVAAILSAAVQKWEDFSIIFVMLLVNAGLDFMQEHRALNALKTLKQRLSKEVTVRRNGQFVRVPVRELVPGDIVKIRIGDIVPADVQLLDGDYLQIDQSALTGESLPVTRKTGAVAFANTIVKQGEMLAVVLNTGMNTSFSSVVALVAEAQRQERSHFQKMVIQIGNFLIMVTLVLVLLIVMVSLFRHEPLLDIIRFALVLSVAAIPVALPAVLSVTMAVGAMNLAKRQAIVSRLAAIEELAGVDIFCTDKTGTLTKNQMEVANPEVLEGFTEQELFLYAALASRPENNDPVELPIFSYLDTKLKSVDWKSWKQTSFTPFDPVSKRTEADAEKDGHTVHVVKGAPQVVIEMAGLDEARTRKLNDSVNELASKGYRTLGVGVKEGEGMFRMIGLIPLYDPPREDSKQVIDEMHKFGVKVKMVTGDNLAIAREIGGILGLEQKTIRSSQLSGASANELLNLAEVLATAIYRKLKGDVELREAKAFASDVMEQVGKLYDTRLLEREFIHTHESAIVEMIEDVDIFAEVVPEDKYRIVDTLQKGGHIVSMTGDGVNDAPALKKADCGIAVSNATDAARAAADIVLTAPGLSVINAAMQQARLTFARMKSYATFRIAETIRIILFMTLSIVVFNFYPITPLMIILLALLNDIPILAIAYDNSTIHPTPVRWKMQELLIIASSLGLFGVIASFLLFFLLQQYGFSEPMIQTLLFLKLIIAGHSTLYVTRSEGWFWQRPWPSPLLFGATFGTEILGTIFAVYGLFVTPIGWTYALLIWAYALLEFVINDAIKLAVKRVFLQRNHD

SEQ ID NO: 22341 - protein, 886 aa, Chlorobium tepidum TLS
MFRTLYNKISSTSIREEAAQSHVRSEDEQFLLKLCNAPVDEALRLMESRVDGLDSQEASKRLSKYGKNEISLATRPSFLQDILHRLSSPLVIQLVLIAVVSGVTGDMTSSAIVGMMILLSVGTSYVLERRSGNAVEALGKRVQSRAHVIRNGLEAEVPLSELVPGDIVQLQAGSVIPADLRLISAKDFFVGQAALTGETMPVEKSADAGETGNLGILELRNACFQGSSVSSGSARAVVVNTGSRTFFGAIAERLNQRRDETDFDKGIRSFTWLMIRFMVVMVSTVFLIVGLTKGNWLESLFFSLSVAVGLTPEMLPMIVTVNLAKGALSMARKKVIVKQLSSIQNFGAIDILCTDKTGTLTQDHVLLEMAVDVMGEQSDNVLRYAYLNSFFQTGLRNLLDRAVLDHQEFAVDGNCKLIDELPFDFQRRRMSVVVDYEGDHVLISKGAVEEIFACCDRYQIDDEIYPLIGMIRDDLFEEVAALNNNGYRVLAIAYNEFPPDRKRFTHDDEKNLILLGYIAFLDPPKDSTAQALVKLREAGVKVKILTGDNALVTRKICKDVGMAVNRVVTGDELARLSPDLFGKAVEEADVLAKLSPLQKEEVVQSLRKQGHVIGFMGDGINDAPALRAADVGISVDSAVDVAKESADIVLLEKSLMVLDDGILEGRRVFTNIIKYIRMGASSNFGNMFSVVGASYLLPFLPMQPIQILLNNLLYDFSQTGIPTDNVDEEQVRSPRKWDIGNIKWFMIVIGPISSIFDYATFALMWFFFNSKLFIDPAATGAAKAHAVQLFQTGWFVESLLTQALIVHIIRTRKIPFLESHASLPMLLTTLAVMAIAVWLPYSPFASLFGMVPLPLAYFGWIALFLLSYAALTHKIKTWFFKRFGGN

SEQ ID NO: 22342 - protein, 851 aa, Shigella flexneri 2a str. 301
MPEEELWKTFDTHPEGLNQAEVESAREQHGDNKLPAQQPSPWWVHLWVCYRNPFNILLTILGAISYATEDLFAAGVIALMVAISTLLNFIQEARSTKAADALKAMVSNTATVLRVINDKGENGWLEIPIDQLVPGDIIKLAAGDMIPADLRILQARDLFVAQASLTGESLPVEKAATTRQPEHSNPLECDTLCFMGTTVVSGTAQAMVIATGANTWFGQLAGRVSEQESEPNAFQQGISRVSMLLIRFMLVMAPMVLLINGYTKGDWWEAALFALSVAVGLTPEMLPMIVTSTLARGAVKLSKQKVIVKHLDAIQNFGAMDILCTDKTGTLTQDKIVLENHTDISGKTSERVLHSAWLNSHYQTGLKNLLDTAVLEGTDEESARSLASRWQKIDEIPFDFERRRMSVVVAENTEHHQLVCKGALQEILNVCSQVRHNGEIVPLDDTMLRKIKRVTDTLNRQGLRVVAVATKYLPAREGDYQRADESDLILEGYIAFLDPPKETTAPALKALKASGITVKILTGDSELVAAKVCHEVGLDAGEVVIGSDIETLSDDELANLAQRTTLFARLTPMHKERIVTLLKREGHVVGFMGDGINDAPALRAADIGISVDGAVDIAREAADIILLEKSLMVLEEGVIEGRRTFANMLKYIKLTASSNFGNVFSVLVASAFLPFLPMLPLHLLIQNLLYDVSQVAIPFDNVDDEQIQKPQRWNPADLGRFMVFFGPISSIFDILTFCLMWWVFHANTPETQTLFQSGWFVVGLLSQTLIVHMIRTRRVPFIQSCASWPLMIMTVIVMIVGIALPFSPLASYLQLQALPLSYFPWLVAILAGYMTLTQLVKGFYSRRYGWQ

SEQ ID NO: 22343 - protein, 898 aa, Shigella flexneri 2a str. 2457T
MFKEIFTRFIRHLPSRLVHRDPLPGAQQTVNTAVPPSLSAHCLKMAVMPEEELWKTFDTHPEGLNQAEVESAREQHGDNKLPAQQPSPWWVHLWVCYRNPFNILLTILGAISYATEDLFAAGVIALMVAISTLLNFIQEARSTKAADALKAMVSNTATVLRVINDKGENGWLEIPIDQLVPGDIIKLAAGDMIPADLRILQARDLFVAQASLTGESLPVEKAATTRQPEHSNPLECDTLCFMGTTVVSGTAQAMVIATGANTWFGQLAGRVSEQESEPNAFQQGISRVSMLLIRFMLVMAPVVLLINGYTKGDWWEAALFALSVAVGLTPEMLPMIVTSTLARGAVKLSKQKVIVKHLDAIQNFGAMDILCTDKTGTLTQDKIVLENHTDISGKTSERVLHSAWLNSHYQTGLKNLLDTAVLEGTDEESARSLASRWQKIDEIPFDFERRRMSVVVAENTEHHQLVCKGALQEILNVCSQVRHNGEIVPLDDTMLRKIKRVTDTLNRQGLRVVAVATKYLPAREGDYQRADESDLILEGYIAFLDPPKETTAPALKALKASGITVKILTGDSELVAAKVCHEVGLDAGEVVIGSDIETLSDDELANLAQRTTLFARLTPMHKERIVTLLKREGHVVGFMGDGINDAPALRAADIGISVDGAVDIAREAADIILLEKSLMVLEEGVIEGRRTFANMLKYIKLTASSNFGNVFSVLVASAFLPFLPMLPLHLLIQNLLYDVSQVAIPFDNVDDEQIQKPQRWNPADLGRFMVFFGPISSIFDILTFCLMWWVFHANTPETQTLFQSGWFVVGLLSQTLIVHMIRTRRVPFIQSCASWPLMIMTVIVMIVGIALPFSPLASYLQLQALPLSYFPWLVAILAGYMTLTQLVKGFYSRRYGWQ

SEQ ID NO: 22344 - protein, 898 aa, Escherichia coli CFT073
MFKEIFTRLIRHLPSRLVHRDPLPGAQQTVNAAVPPSLSAHCLKMAVMPEEELWKTFDTHPEGLNLAEVESAREQHGENKLPAQQPSPWWVHLWVCYRNPFNILLTILGAISYATEDLFAAGVIALMVAISTLLNFIQEARSTKAADALKAMVSNTATVLRVINDKGENGWLEIPIDQLVPGDIIKLAAGDMIPADLRILQARDLFVAQASLTGESLPVEKAATTRQPEHSNPLECDTLCFMGTTVVSGTAQAMVIATGANTWFGQLAGRVSEQESEPNAFQQGISRVSMLLIRFMLVMAPVVLLINGYTKGDWWEAALFALSVAVGLTPEMLPMIVTSTLARGAVKLSKQKVIVKHLDAIQNFGAMDILCTDKTGTLTQDKIVLENHTDISGKTSERVLHSAWLNSHYQTGLKNLLDTAVLEGTDEESARSLASRWQKIDEIPFDFERRRMSVVVAENTEHHQLVCKGALQEILNVCSQVRHNGEIVPLDDTMLRKIKRVTDTLNRQGLRVVAVATKYLPAREGDYQRADESDLILEGYIAFLDPPKETTAPALKALKASGITVKILTGDSELVAAKVCHEVGLDAGEVVIGSDIETLSDDELANLAQRTTLFARLTPMHKERIVTLLKREGHVVGFMGDGINDAPALRAADIGISVDGAVDIAREAADIILLEKSLMVLEEGVIEGRRTFANMLKYIKMTASSNFGNVFSVLVASAFLPFLPMLPLHLLIQNLLYDVSQVAIPFDNVDDEQIQKPQRWNPADLGRFMVFFGPISSIFDILTFCLMWWVFHANTPETQTLFQSGWFVVGLLSQTLIVHMIRTRRVPFIQSCASWPLMIMTVIVMIVGIALPFSPLASYLQLQALPLSYFPWLVAILAGYMTLTQLVKGFYSRRYGWQ

SEQ ID NO: 22345 - protein, 911 aa, Thermobifida fusca
MEGQNRMTGPAVVDRQWHTVAAHEVFPALETSPDGLTEEEARRRLAEYGPNRLEEAPPPSAVAVFLRQFASPVIAILLFALLLTVVLREWLDAAVIAAALLVNAGIGFVQERKAEQAVRALMNLSQPRARVVRDGRRREVESTDLVPGDVVFIESGSRIPADIRLVEAHALEVDESLLTGESEPVVKSTATAAADAGVGDRSGVAFSGTMVVSGRGMGVVYATGRRTELGAIAGLLKSEPETATPLKERMTRLSRVIVAATLVSALLVMAIGLVRGGDPMELLLVAVALAVAAVPEGLPIVLTVALAVGVTRMARRNAIVRRMLAVEALGSATVIGSDKTGTLTENRMTVRRLWSPAGGEAGPAAVTPYWGNITELPLEQVDPYVLLVLCGALTNEATMASEEGREASGDPTEVALLEAAYDAELLHTARDVRFPKTAEVHFEPARRFSATARRWGNREVLFVKGAPERVVEMCDAQVGRVEAGRWQPAALRPGELHAAGERMAAEGLRLLALAVSRPYEPGAASVDPHDPSGLVLLGLVGIMDPPRPGVREAVQDCREAGVRVVMITGDHAVTARAIAAELGICEPDAPVLTYQQIAGLDDEELRAAVAQVNVYARIPPEGKLRLVRALEANGEVVAVTGDGVNDAPALKAASVGVAMGQEGTDVAREAAEIVLADDNFTTIVHAVEEGRVTFDNIRRAVFFLVSIGAAMVVALTVSTLLGWPLLMVPAQLLWLNLVTSGVQDIALVFERAEPGLLRRPPRSVHEGILSRLLWQRVGVTGVVMAAGTLAMFWWEWQRTASLTAAQTMALTTMVVFMAFQAGNARSDTRSVLGMPLRYNPYLVVAVAGSFALHVAALYFPPTQVLLRVEPLDAAAWARIAAVAVSVVVVVELEKMVRRAWARHGEPSGARQ

SEQ ID NO: 22346 - protein, 1068 aa, Thermobifida fusca
MGGIRSGFVQQAHPVPPDLADVRRGAQHVLGRGRPGCSEPWTVLGGARRGGVQPGVDDDGHAGREFLLGQVGAVPAHQGGLLGVGDDEVERVEGPQLVPAQAQGARGGGPQRKLAPAAAGHSRRHGGVEHGPPSRSGEFLHPPVEYCGHARRCRLRGCNRQPGAAGLGVATTDEVRPLRPVLSWPVKRAVHHFVAEGGQHNRDGSGGIESHNGGTHWDCSSVSPGNGSERAPSASPVGSGCAPRLRLSQHAFFQYGTGWWSMVQQDGQAALPEASDVGLTSAQAAQRLAAGLGNDVPVRASRTVGQIIRANVFTRINAMVAVLFGVIAVIGPVQDGLFALVIVINTLVGIVQELRAKKTLDSLAIINAARPRVVRDGVAVEVRPQEVVLDDVIELGSGDQAVVDGVVVSASGLEVDESLLTGEADPVLKQPGDPILSGSFVVAGSGRFRATRVGRDAYAARITEEASRFSLVRSELRSGVDRILRFITWLLFPIGGLLLYSQLFLDAHVTAEVSAGGTISGPFADALRGTVAALVSMVPEGLVLLISIAFAVGVIRLGRRRCLVQELPAIEGLARVDVVCTDKTGTLTEAGMRLAEVRPLDAAADADALTEVLAALAAADPHPNPSMAAIRDSCGTPPDWPVAAVRPFSSARRWSGASFTTPQGKQHWVLGAPEVLADADSPAVAAAARTAAQGLRVLLLGRADAAVDGPHQVTPMALVVLEQRVRPDSAPTLDYFARQDVAVKVVSGDNAASVAAVAHTLGLPGADQPVDARDLAPQDADFAEKVEKATVFGRVSPEQKRSMVAALQQHGHTVAMTGDGVNDVLALKEADIGVAMGSGSPAARSVAQIVLLDDRFATLPHVVAEGRRVIGNIERVANLFLTKTVYSMTMATVVSLLAVAYPFFPRHATLINAVTFGIPSFFLALAPTTERARPGFVARTLRLAVPAGLVSGLAAMTTYFLVLDGADTPTLADRTAVLITLCATTLWVLLLVARPYVWWKAVLVAAMVGLLLAALLTPVGQAFFALDMSDPAAVGTALAVAGVAAAIITVIRVVDARWLSRERDTRDS

SEQ ID NO: 22347 - protein, 863 aa, Thermobifida fusca
MVMTREPQADPLQGRPVPVRSGLTGPDAARRLGHDGRNLVPPPQRTLPFLLLASSFTHSFALLLWAAAALAFIGGLPEAAWAVVTVIVVSGLVGFVLDYWSDRIGQRLRRRAPAAVRVIRDGRQARVNADELVVNDVVLLRAGDRVPADIRLTEVHDFVVVEVGVTGMREMLRCDEGTTVFAGTHVAAGEAEGVVVTTGMWTRLGQDSPLLRHARRPSGPLVENLRDLTAAAAAAATGTALVVFLLTLLVGVPPAEGFLPAVGLAVALVPLGLRSIVHLCLAWAAQRMADAHALVRHSAAVQQLGTVTFLCIPAAGVLTRGEPVAVEVWTPEGTVQVTGTGYAPEGALVGDAAAVAAAHDLALSAALCSSDGYFFTDGQWRPVGDPVEAACHVLAARAGVDVSLAAVERRYPFDPHRRRASAFAKGSVHVKGAPDAVLPRCRAVAGAADASAAMADRGLRVLAVARRDLAAPPEQAEDAERDLTLLGLIGLADPPRSDARTAVTRCRRLGIRLALVTGEDPRTALAVARATGLARPGAPVLHGAELPDDLREIGELLDSDGAVVSRVTPEDRRRVTVALQHRGYTVATTAGGAADDAALRRADVGIAPGYAGADTARDSADLVLLDSGIATVAAALGAGRAIRVTLRRALTYRLTGVVAMATPFLVWAVTGGAVPPALTLGQVLAIGVGVDLLPALALGVGPRGWRALRDPPPDGEFLVDRRLAVRVGGVLGPVEAVTALFTFGVVLWVNGWQWGQSPAPLLLAQASGAAFATIVLGQVAAALACRSETRPFDAVPWRSDPLPRGLGAQLLLLWLFFTAPPLAGWLGSTVPPGFVWPGVVCVVPALLAADTIHKVVRPSQAPG

SEQ ID NO: 22348 - protein, 391 aa, Clostridium thermocellum ATCC 27405
VLGVAFRRLDSKNYRLDDVEKDLVFAGLIGMIDPPRKETLDAVRKCKLAGIKPVMITGDHKITAAAIARELNIASEGDRVLTGAQLEQMDDKRLEELVDEVSVYARVSPRHKLRIVRALKKRGHVVAMTGDGVNDAPAIKEADIGVAMGITGTDVTKEASSMILLDDNFATIVAAVEEGRVIYNNIRKFIRYMLSCNIGEVLTMFVGTLIGLPLPLLPIQILWVNLVTDGLPAIALGLEPGDKDIMMRPPRGAKENIFSNGLWQLIIFRGALIGLSTLAVFASILNFTSNVDVARTAAFVTLVITQLIHVFECKSERKNIFEIPLFNNIPLVLAVLCSLVMILGVVYIPLFQGIFKTVPLSLNDWILIGGFSALGPVISSFFKVNYKYIRR

SEQ ID NO: 22349 - protein, 356 aa, Clostridium thermocellum ATCC 27405
  unsure (1)..(356): unsure at all Xaa locations
MKHYFESVETVLEHMGSSKNGIDPKEASLRLEKYGRNKLDEGKKKTVFGRFLDQLKDPMIIVLIVAAIISGFAGEPADSIIILMVVLINSILGVVQEGKAEKAIEALQKMSSPYSKVRRNGRVMQIKSEEIVPGDIVLLEAGDAVPADMRIIEASSLKIEEASLTGESIPIEKDAGAIPPSDKDIPLGDRRNMAYMGTNVVYGRGEGIVVNTGMSTEMGKIANIISGTEEEKTPLQKKLAELSKVLSIAVLGICIFIFVFGVLKNGXXXXXXXXXXXXXXXXXXXXXXXXXXXXXXXXXXXXXXXXXXXXXXXXXXXXXXXXXXXXXXXXXXXXXXXXXXXXXXXXXXXXXXXLRH

SEQ ID NO: 22350 - protein, 831 aa, Trichodesmium erythraeum IMS101
MNDRQNIHNTSIIHGLTKDQVINLRAVGRGNNIKLDTSRSYRQILKENLFTFINTVFLSISLVLISLSRYGDAFLVIIVILGGVIVSVCQEIWAKQKLDQIALLARPLATVIRETKQQNIDPSEIVVGDILVVHSGDQIVVDGQVVGKGQIEVDESLLTGESDLVPKQAGQPVYSGSFCVSGTAHYEAQKVGTESFAYQLTVSARAFRQIYTPLQQEINLVIRVFLLLSCFLWILVSINWYFGFYKFVDTVQYAAVIAGLVPSGLYLAITLAYALGAVKMVGQEVLIQQANAVESLSNVDILCLDKTGTLTTNHISLQAIYPIGIDEIKLENILGEYAASTTSKNKTIEALERVFPRPKRSLTFEIPFASARKWSGMSFATEEQNSPSGTYILGAPEILAEVTPLSRKFTQQIQKLAQKGFRVLLFAYNPNISSLDQDLEKLQLPTELFPLGIISFQDELRPEARETIEGFSKVGIKIKVISGDNPQTVATLALQAGLSSNIQVISGSELAKLDEDQFIQAAKSKTIFGSVTPKQKAKLIHSFKKQGHYVAMIGDGVNDVLSLKEANLAIAMEGGSKATRSVADIVLLNNSFASLPHTFLEGQRIRNSIQDVLKLFMIRVFCVSILIFSTGFIGGFIGGTFPLLNKHSAVVTLISVGFPTFCIPIWAKPGILPRRSMIRSLLHFTLPATFSLTLVALLVYLTYLAIPFSGNELVIDLDQVNEFLSVPRSALVTIMILCGLLLVPFLKPPTKAWVGGETYSGDWRYTFVALALLGVYIVILAVPPLRQFFELSLLSTHDYLVIIWVALVWCLLLRYVWRTKLLDKFLGVDLS

SEQ ID NO: 22351 - protein, 905 aa, Brucella suis 1330
MNVAVRTANNKNFKKDERRLSMRAVREASNEIELTLANVGSRRDGLTEGDAITRLYRDGPNEVARERRIPALVQFALAFKNPFIMVLVVLGAISAFTDIWLPLETGEEADPTKVIIIAVMVLASALMRFIQEYRSGRAAEALKAMVRTTATVWRRVSAGTSSAPREIPMRELVVGDIVQLSAGDMIPADLRLIESRDLFISQAVLTGEALPVEKYDTLGAISEKSAMATASQDADMLDLPSICFMGTNVVSGTATAVVVATGQRTYFGSLAKAIVGSRAQTSFDRGINSVSWLLIRFMLIMVPVVFLINGFTKGNWVEAMLFGLAVAVGLTPEMLPMIVSSNLAKGAVAMARRKVVVKRLNAIQNFGAMDVLCTDKTGTLTQDKIILEHHIDVSGKADDKVLRLAWLNSYHQSGVKNLMDQAVVSFANRVPEEVMRTARLYRKVDELPFDFIRRRLSVVVEGVGGEHLLVCKGAVEEMLAICTTVRDGETVRALDAVTREKLIATARAYNADGFRVLVVATREIPGAETSAQYRIADEAGLTVQGFLTFLDPPKETAGPAIAALAEHGVCVKVLTGDNEIVTRKICREVGLEAGIPILGSEIEKLDDEALRVVAEERTVFAKLTPLQKSRVLQALQANGHTVGFLGDGINDAPALRDADVGISVDSGADIAKESADIILLEKSLIVLEEGVVTGRETFGNILKYLNMCASSNFGNVFSVLVASAFIPFLPMLAIHLLIQNLMYDISQLALPWDKMDKEFLAKPRKWDARNIGRFMIWIGPTSSIFDITTFALMWYVFSANSPQMQSLFQSGWFIEGLLSQTLVVHMLRTQKIPFFQSTAALPVMLMSALIIALGIYIPFSPIGEMVGLVPLPWAYFPWLAATLVSYCLVAQGMKVIYVRRFGQWF

SEQ ID NO: 22352 - protein, 924 aa, Pseudomonas fluorescens PfO-1
MPVFRCPRRGRTCSTVSRLTIGATAMKLTLKEFFAGFLRTRHIARHFRRLALLETLSDTTVSREVPPTLANTLVDAAHCDSGVLLSNLGTHTDGLTDFEVDVLRAQHGLNEVEHEQPLPWWTHLWHCYKNPFNLLLTLLAVISWLTEDLKAAIVIFSMVVLSTLLRFWQESKSNQAADALKAMVSNTATVLRRDAPRAELPIKQLVPGDLIVLSAGDMIPADCRVLSAKDLFVSQAAMTGESMPVEKFPRQADRDTRNPLELDNILFMGTNVVSGTAVAVILTTGNSTYFGALAQRVGATDRAVTSFQQGVNKVSWLLIRFMFVMAPLVLFINGFTKGDWTEALLFALSIAVGLTPEMLPMIVTSTLAKGAVFLSRKKVIVKRLDAIQNFGAMDVLCTDKTGTLTQDRIFLARNVDVWGEDSDDVLEMAYLNSYYQTGLKNLLDVAVLEHVEIHRELKVGTAFRKVDEIPFDFNRRRMSVVVEGRGQPHQLICKGAVEEVLSVCSRVRHGEVDEALSDELLAKIRQVTAAFNAEGLRVVAVAARSMPEGRDTYSLGDEQELTLIGYVAFLDPPKESTAPALKALAEHGVAVKVLTGDNELVTAKICREVGLAQQGLLMGNDIERMSDAELAVAVETTNVFAKLTPSHKERIVRILKGNGHVVGFMGDGINDAPALRTADIGISVDSAVDIAKEAADIILLEKSLMVLEEGVLEGRRTFANMLKYIKMTASSNFGNVFSVLVASAFIPFLPMLPMHLLVQNLLYDISQIAIPFDNVDDEMLKQPQRWQPGDVGRFMLFFGPISSIFDITTFALMWYVFDANTPDHQTLFQSGWFVVGLLTQTLIVHMIRTPKIPFLQSRAAMPLLVMTGIIMAVGIFLPMGPLAHYFKLQALPSMYFVFLPVILLAYMALTQAVKGFYIRRFGWQ

SEQ ID NO: 22353 - protein, 874 aa, Mycoplasma genitalium
MNSWTGLSEQAAIKSRQEHGANFLPEKKATPFWLLFLQQFKSLVVILLLLASLLSFVVAIVSGLRSNWNFNHDLIIEWVQPFIILLTVFANSLIGSIQEFKAQKSASALKSLTKSFTRVFRNGELISINVSEVVVGDIIFVDAGDIIPADGKLLQVNNLRCLESFLTGESTPVDKTIDSNEKATILEQTNLVFSGAQVVYGSGVFQVEAVGIKTQVGKIAKTVDDSVTKLSPLQQKLEKIGKWFSWFGLGLFAVVFLVQTALLGFDNFTNNWSIALIGAIALVVAIIPEGLVTFINVIFALSVQKLTKQKAIIKYLSVIETLGSVQIICTDKTGTLTQNQMKVVDHFCFNSTTQTDLARALCLCNNASISKDANKTGDPTEIALLEWKDRSQLDLKTYYRVYEKAFDSIRKLMTVVVQKDNRFIVIVKGAPDVLLPLCNNVQNEVKNIENLLDQSAGQGLRTLAVALKVLYKFDQNDQKQIDELENNLEFLGFVSLQDPPRKESKEAILACKKANITPIMITGDHLKTATVIAKELGILTLDNQAVLGSELDEKKILDYRVFARVTPQQKLAIVSAWKEAGFTVSVTGDGVNDAPALIKSDVGCCMGITGVDIAKDASDLIISDDNFATIVNGIEEGRKTFLTCKRVLLNLFLTSIAGTVVVLLGLFILGQVFKTNLLQQGHDFQVFSPTQLLIINLFVHGFPAVALAVQPVKEKLMVGSFSTKNLFYNRQGFDLIWQSLFLSFLTLLFYSLGIIYAINNRDLQTSGDLINRAGSTCGFFILGASAALNSLNLMVDKPLLMTNPWFFKLVWIGSLASILVFLLIIFINPLGLVFNVLQDLTNHPVLISYSFGGVILYMGMNEVVKLIRLGYGNI

SEQ ID NO: 22354 - protein, 805 aa, Methanocaldococcus jannaschii
MWGVVMNVEEIEEEYKTSIKTGLSTEEAKKRLKIYGYNEIPEKKVHPIIKFLSYFWNPIAWMIEIAAILSAIIKHWVDFVIILILLLVNGVVGFWEEYKAENVIEFLKQKMALNARVLRDGKWQIIPAKELVPGDVVRIRIGDIVPADIILVDGDYLVVDESALTGESLPVEKKIGDIAYSGSIVKKGEMTGIVKATGLNTYFGKTVKLVEKAEKVSSYQKMIIKIGDYLIVLAVILIAIMVAVELFRGKSLIETAQFALVLAVSAIPAAMPAVLSITMAIGALNLAKKDAIVKKLVAIEELAGVDILCSDKTGTLTKNQLVCGEIIALNGFSKEDVVLFAALASREEDADAIDMAILNEAKKLGLMEKIKNYKIKKFIPFDPVIKRTEAEVTNDEEFKVSKGAPQVILDLCNADEELRRKVEEIVDKLAENGYRALGVAVYKNGRWHFAGIIPLYDPPREDAPLAVKKIKELGVIIKMVTGDHVAIAKNIARMLGIGDKIISISELLKKLKRGEIKEEKFDEIVEEADGFAEVFPEHKYKIVDSLQKRGHLVAMTGDGVNDAPALKKADCGIAVSNATDAARAAADIVLLSPGISVIVDAIQEARRIFQRMESYVIYRITETIRILFFVELCILILGIYPITALMIVLLAILNDIPILAIAYDNVVEPKSPVRWRMREILMLSTALGLSGVVSSFLIFYISDVFLHLTIAELQSFVFLKLILAGHATIFVTRIRDRLWKKPYPSKLLFWGVMGTNIIGTIVAAEGIFMAPIGWDLALFMWLYAHVWMLINDEIKMILLKRLKID

SEQ ID NO: 22355 - protein, 535 aa, Methanosarcina barkeri
MIEAAAAISGVIHRWEDFVIISLLLILNAVVGFWQEHKADNAIELLKQKMALNARVLREGQWAQIPARELVPGDIVRIRSGDVVPADLKLLEGEYLQVDESALTGESLPVEKKSDGIAYSGSVIQKGEMNALVVATGMNTYFGETTKLVAGIKSRSHFQKAVLNIGNYLIITAGCIVAIVLVVEELFRHTPFLETLQFALVLIVAAIPAALPAVMSVSMAVGATELAGKGAIVSKLVSIEEMAGMDILCSDKTGTITQNKLKLSELVPFGDFKENDLLIYGSLASREEDNDPIDNAILQKAKDTESLEDKIKTYTVKKFTPFDPVIKHTEATVKGSEGEFKVAKGAPQVILGMSSNKEEIRQKVEEKVNSMASKGYRALGVCAEEERKYRFVGLFGLYDPPHEDSAETIKTANSLNVDVKMVTGDHVAIAKEIASQVGLGTNIITADDFKEKSDSEAQKVVEKADGFAQVFPEHKYKIVELLQKKEHIVGMTGDGVNDVPALKLADAGIAVAGGYGRCKIGCRHRIYKSRSFDNY

SEQ ID NO: 22356 - protein, 828 aa, Methanosarcina barkeri
MPEMLQRLQTTYEGLSSSESSERLKKYGANLLKPKKSSNTLKILLSQFKSPIILILLFAAGLSFFLGDVTDTVIIITIILISSLLGFWQEKGAADAFEKLLSAVEVKATVVRDGEEKEVPIEQIVPGDVIIFSAGDIVPADCLILESKGLFVNEATLTGETYPVEKSTKTLNSETPLAKRTNSLWMGTSVESGSGKALAVTTGKNTEFGKISEELRTSAPETEFERGIAKFGHFLMEVTMLMVITIFAINVYLQRPILDSFLFSLALAVGLTPQLLPAIISVNLSHGAREMAENKVIVKRLASIENLGSMNLLCSDKTGTLTEGELKLHSIRDVKGSQSEKILLYASLNAYYQKGFKNPIDRAILTQNRFEMGEYKSLDEVPYDFIRKRLSVLVSKNENNLMITKGALSNILEICTLAEVEPGKIVEISEVKEKIEQQYKDFSEKEFRTLGVAYREINRQTKIEKEQEKGMTFIGFLLFFDPLKPEIAKTIENMEQLGISLKIITGDNRLVATSIGKEVGFDASRILTGSEIYQMTSEALIGKVNDIDIFAEVEPNQKERIILALKKRGNVVGYLGDGINDASALHAADVGISVDRAADVAKEAAQIVLMEKSLDSLVEGVKGGRKTFANTLKYVFMATSANFGNMFSMAGASLFLPFLPLLPTQILLTNLLTDFPEMTIATDTVDKELVEEPHRWDINFIRKFMMVFGSTSSVFDYLTFGTLLLLLPGMIEQFRTGWFIESVISASMIVLVIRSRKPFFESRPGKYLLIATVLIVVMTLVFPLTPFAALFGFKPLPLQVILTLGAIIGLYIIAAEAIKRIFYKKVKF

SEQ ID NO: 22357 - protein, 835 aa, Aquifex aeolicus VF5
MLKAHSLSPEEILRILKTDRRGLSEEEAKKRLKIYGKNEIEEEEESLIKVFFRQFNNPFVYILFVASGISAYIGKKEDSLIILAIIFVNSLLGFFQEFRAITSLKALKKLTEVKTKVYRDGKLKVIPASELVPGDVVYIQEGDVVPADIRLIESVGLMVDESVLTGESVPVEKNADVVLPEDTPVYNRSNVVFKGTHVVKGWAVGVVYATGRQTEFGKISEKAKEKSPETPLMRALKKFSLAWMVIIFFLLSILFLIGIYQGRDIYEVLLLIVSELVSAVPEGLPLVITFTLVIGAIALSRRKVLIRYLPATETLGSTTFICSDKTGTITEGKLKVQEFFALNEKFLNLISALCNSSDGESGDPVDLALLRWLEENDIDWKKLREEYRTVKVFPFDTKKRYMAVIVEKEGKYYLLVKGAFETLSNFSEGISEELIKVHDVLAENGLRVLFFAYAEIPEPVEDIESLKLKPAGFVGFLDPPKEGVKEAVVNARRAGIRVIMITGDNLKTAVAVAKQTEIYREGDLAVEGKDLSKYSDAELYNLLKRVSVIARALPEDKYRVVKVLQEKGEIVAVTGDGVNDVPALKVADIGVAMGSGTEAAKSVAKMVITDNNLKVIVEAVRWGRIIVRNIKRAITYLLTTSFGEITLLSSAILMKLPLPLYPTQILWINIVTDGVQDKTFPFNKEEIDVMKEKPQKPEKVFLDKRLFLRFLTGGLFIGFINLILFKHLLSVYSYEVAVTITFTSMVVNQWAVGIQTVRDYPFFYKPWRNFQMNPYIFIGIFIGLILQLLAIYVFPNYFHAVPLSLEHWFYVILTTLSVFIFIEIRKLVFTIFSER

SEQ ID NO: 22358 - protein, 832 aa, Bradyrhizobium japonicum USDA 110
MTKPPNNQASQFWRLPTDALCTRLGCSLQGLTATEAAERLGRFGPNSDAPPRIEGAARAVLRRLLEPLSLILLVAGIVSMLTGDDVGGLIIVLILAGSIGLDTIQEGHAVRAAEILRRSVALKAEVRRDGAFCEIDVDHVVPGDLLRVRAGDIIPADGLILESTAFTAGEAALTGEPYPVQKRAGAATDPDDTSNALFRGAVAQTGEAIALVVRTGRDTVFGAAASALAETQAPSPFERDLREFGLVIARATLALVLVVLTVRVVFGRPVLDSLLFAVALAVGLTPELLPMITTVTLSRGALRMAGRKVIVKRLAAIHDLGAMTVLCTDKTGTLTSAEITLARSLDAEGKDNARAAQLGAIAASLGGDRGSLDAALVAGRPDAAQGWTLAGRQAFDFSRRLGSVLATGPEGTLLIVKGAPEAVLALCTMDERARTAALARVRELASEGLRTVAIASRAWSGVLREVETEDETDLAFEGFCAFADPPKPTAAAAIAQLAARGVGLKILSGDDPVVVKRLASLVGLNPERVLSGTDVAALSDAALAVQVRSTDAFGRLAPDQKSRIVRALQAGGEVVGFLGDGINDAPALKVADVGLSVDGATGVAQAAADMILLASDLEVVADGVAEGRRTFANILKYVRMGASSNFGNMLSMAIASMVLPFLPMLPTQILLNNLLYDLSELGIPFDRVSAQATAQPQVWSMSNLARFAAIMGPLSSVFDFLTFGALIMLFHASPGEFRTAWFIESMATQILVIFVIRTNGRPWRNWPDPVLSASSLIALLVAMVVPFTPVGTWFGFVAPPPLMMAGIALLVVVYLACAELLKPFAIRSKRKR

SEQ ID NO: 22359 - protein, 850 aa, Bradyrhizobium japonicum USDA 110
MSATEAKRPAGLSEVEARARLEEDGANELPRPERRSPLRIVMEVLREPMLVLLLCGGLVYLVLGDLREALILLVFGAMSIVITVVQETRTERVLEALRDLSSPRALVVRDGARRRIPGREVVRGDLLVLGEGDRIPADAALVDARDLQIDESLLTGESVPVRKRAAGKAMSADQRPGGEDQPFVYSGSLVVRGEGLALVEATGPRSEIGKIGLSLRGLQTEPPRLRQQTARLVRLCFLGGAVVSVAAVALYGVLRGDWLQALLAGIAIGMAMLPEEFGVVLTVFMAMGAWRISQARVLTRRAAAIEVLGSATVLCTDKTGTLTQNQMSVAELRLLDGARMRPESAGRDDARPEFIELARCGALASSPEPFDPMEKALHLFAQDALRGGDAPDGDRTLVRTYGLRPELLAMTQVWRTAGRADLVACAKGAPEAIARLCRMNAADQDSVRDAASAMARDGLRVLGMAVAACDDASLPPTQEDFAFRFVGLVGLADPLRPHVPEAVRECRAAGIRVVMITGDYPATAVAIANQAGLDVRDVMTGDQVRLADDPELAKRVGHVNVFARVLPEQKLRIVQAMKLNGEIVAMTGDGVNDAPSLKAAHIGIAMGGRGTDVAREASAIVLLDDDFGSIVSAIRLGRRIYDNLRKAMAFIFAVHVPIAGLALLPLVFGLPLIFSPVHIAFLELIIDPVCSLVFEAERDERDAMTRPPRRPDAALFSWALVGWSVLQGALAFALTAIIFVGALRSGLVADEARTLAFVTLVVCIVALVLVNRSFSASFASAFFRPNPALTWIFAGVALVLATALLWPPASSLFRFGPLHADDLMIALGAGLLVLTVLELLKPLWARRLRF

SEQ ID NO: 22360 - protein, 928 aa, Brucella melitensis 16M
MRPHARGWITRCRCRFRCGRRSKMNVAVRTANNKNFKKDERRLSMRAVREASNEIELTLANVGSRRDGLTEGDAITRLYRDGPNEVARERRIPALVQFALAFKNPFIMVLVVLGAISAFTDIWLPLETGEEADPTKVIIIAVMVLASALMRFIQEYRSGRAAEALKAMVRTTATVWRRVSAGTSSAPREIPMRELVVGDIVQLSAGDMIPADLRLIESRDLFISQAVLTGEALPVEKYDTLGAISEKSAMATASQDADMLDLPSICFMGTNVVSGTATAVVVATGQRTYFGSLAKAIVGSRAQTSFDRGINSVSWLLIRFMLIMVPVVFLINGFTKGNWVEAMLFGLAVAVGLTPEMLPMIVSSNLAKGAVAMARRKVVVKRLNAIQNFGAMDVLCTDKTGTLTQDKIILEHHIDVSGKADDKVLRLAWLNSYHQSGVKNLMDQAVVSFANRVPEEVMRTARLYRKVDELPFDFIRRRLSVVVEGVGGEHLLVCKGAVEEMLAICTTVRDGETVRALDAVTREKLIATACAYNADGFRVLVVATREIPGAETSAQYRIADEAGLTVQGFLTFLDPPKETAGPAIAALAEHGVCVKVLTGDNEIVTRKICREVGLEAGIPILGSEIEKLDDEALRVVAEERTVFAKLTPLQKSRVLQALQANGHTVGFLGDGINDAPALRDADVGISVDSGADIAKESADIILLEKSLIVLEEGVVTGRETFGNILKYLNMCASSNFGNVFSVLVASAFIPFLPMLAIHLLIQNLMYDISQLALPWDKMDKEFLAKPRKWDARNIGRFMIWIGPTSSIFDITTFALMWYVFSANSPQMQSLFQSGWFIEGLLSQTLVVHMLRTQKIPFFQSTAALPVMLMSALIIALGIYIPFSPIGEMVGLVPLPWAYFPWLAATLVSYCLVAQGMKVIYVRRFGQWF

SEQ ID NO: 22361 - protein, 883 aa, Bacteroides thetaiotaomicron VPI-5482
MVWKKKLRSSQYTFNSERVFLVATQPGKSIYSCLQTTKLGLTLGEVQERQSIYGRNEVIHEQKKNPFILFIRTFINPFIGVLTGLAIISLFLDVLMAEPGEQEWTGVIIISSMVLFSAVLRFWQEWRASEATDSLMRMVKNTCLAKRAGEQEEEIDITELVPGDIVYLAAGDMVPADIHIIDSKDLFISQASLTGESEPIEKFPEVQGQQFRKGSVIELDNICYMGSNVISGAAKGIVFETGNKTYLGTIAKSLVGHRATTAFDKGISKVSFLLIRFMLVMVPFVFFVNGFTKGDWFEAFIFAVSVAVGLTPEMLPMIVTANLSKGAIAMSKKKTIVKNLNAIQNFGAMDILCTDKTGTLTCDKIVLEKYINADGSDDNSKRILRHAYFNSYFQTGLRNLMDKAILSHVRELNLEHLKDAYTKVDEIPFDFTRRRMSVVIEDRQGKRQIITKGAVEEILDVCSYAEFDREIHPLTDSLKIKAQKISEEMNRQGMRVLAVSQKSFIEKDCNFAIEDEKEMVLIGYLAFLDPPKPSAAEAIEQLYMHGVAVKILSGDNDTVVKAIARQVGIDTGHSLTGIEMEEMDETTLKETVKDTTLFSKLTPLQKTQIISLLQEQGNTVGFLGDGINDAGALRQSDIGISVDSAVDIAKESADIILLEKDLMVLEDGVLEGRKTFGNINKYIKMTASSNFGNMFSVMFASAFLPFLPMMPIHLLIQNLLYDISQTTIPFDRMDPEFLKKPRKWDASDLSRFMIYIGPISSIFDIATYLVMWYVFSCNSPEHQTLFQTGWFVEGLLSQTLIVHMIRTRKIPFIQSRATWPVMGLTFLIMAVGILIPFTAFGRSIGLTALPLGYFPWLIGILLSYCILTQLVKNWYIRKFVRWL

SEQ ID NO: 22362 - protein, 797 aa, Streptomyces avermitilis MA-4680
MTHIDAGAELDPVHPMPLPGRARGLSTAQVAERVARGEVNDVPVRSSRSLGEIVRANVFTRFNAIIGVLWLVMLFVAPFQDSLFGYVIIANTGIGIIQEWRAKKTLDSLALIGEAKPTVRRDGVASEVSTSEIVLDDVIETAPGDKIVVDGVCVETDGLEIDESLLTGEADPVVKHAGDSVMSGSFVVAGGGAFKATKVGREAYAAQLAEEASRFTLVHSELRTGISTILKYVTWMMVPTAIGLVISQLVVKQNDFKNSVARTVGGIVPMVPEGLVLLTSVAFAIGVIRLGRRNVLVQELPAIEGLARVDTVCLDKTGTLTEGGMDVTELRPLGGADEAYVRKVLGALGESDPRPNASLQAIINAYQDSDDWRCTESLPFSSARKYSGASFSEGNGESSTWLLGAPDVLLPADDPALAETEQLNEQGLRVLLLTRAVRDLDDREVKTEARPTALVVLEQRLRPDAADTLRYFAEQNVHAKVISGDNAVSVGAVAGKLGLTGGVVDARALPAERAEMAKGLDKGTVFGRVTPQQKRDMVGALQSRGHTVAMTGDGVNDVLALKDADIGVSMGSGSEATRAVAQIVLLDNSFATLPSVVGEGRRVIGNITRVATLFLVKTVYSVLLAVLVVCWQVEYPFLPRHLTLLSTLTIGVPAFFLALAPNKERAKPHFVRRVMRYSIPGGVLAAVATFVCYLLARHHYTGPGALDAETSAATLTLFLISMWVLAIIARPYTWWRICLVAAMGGAFLLVLVVPSLQQFFALKLVGVTMPWLAVAIAAVAAATLEFLWKWVDRRFPA

SEQ ID NO: 22363 - protein, 780 aa, Thermoplasma acidophilum
MASQKVDIDQILKEVNSGKSGLTEEEAQRRLSQYGYNEIQEKKESRIVKFLKKFWAPVPWMLEATIVITLLLDKLLDTYIIAFLLVFNAAVGFFQESKAENAVELLKQKLSVKARVERSGVWKQVEARVLVPGDVIDIRLGDVVPADSVILSGSLEIDESALTGESVAVTKDTGDIAYSGSVVRRGEALAIVYKTGSATYFGKTTSLVQSAGSKSHIESLIFNIVRDLIVIDVLLVIITAVYSYFIHIPIPTIIPFVLVLLIASIPVALPATFTIAMAYGALDISKKGALVTRLSAIEDAASMDVLCSDKTGTITKNHLTVSDPLPLNATREDLIRYAAYASEMASDDPIDKAILEYAKNANLLPDLSLRSSFLPFDPSTKRTEATIKVEGKTLRVAKGAPQIISELCGMRYEDIMDKVIEIAKRGYRVIAVGAGENSMHLVGLIPLYDPPRDDSRKLISDLKNLGVSVKMVTGDNAPIAEEIANQVGIEGQVCSLHGNQKISDECGIYAEVFPEDKFKIVRSLQEAGHVTGMTGDGVNDAPALKQAEVGIAVSNATDIAKASASIVLTHEGISDIVEAVKEGRKIFQRMLTYTMNKIVKTIQVVIFLTASFFAVRYFVTTPFDIILLLFANDFVTMSIATDNVRYSNRPEKWNVKALIVTSGLIAALLVVEGFIILYLGIYLHFSKDMIHTLIFDMLVFSGLFNVFMVRERRRFWHSRPSRYLLVSIAGDIVGISLISTFGILVTGIPFYSVLIVLGFAFAWMAVLDTIKNYLFRIYGL

SEQ ID NO: 22364 - protein, 248 aa, Citrus limon
GGIPIAMPTVLSVTMAIGSHRLSQQGAITKRMTAIEEMAGMDVLCSDKTGTLTLNKLSVDKSLIEVFVKGTDSDGLLLAAARASRVENQDAIDASIVGMLADPKEARAGITEVHFLPFNPVDKRTAITYIDSNGDWHRTSKGAPEQIIDLCGLKGEMRRKAHQIIDNFAERGLRALGVARQTVPEKTKESEGSPWEFVGLLPLFDPPRHDSAETIRRALDLGVNVKMITGDQLAIGKETGRRLGMGTN

SEQ ID NO: 22365 - protein, 955 aa, Cyanidium caldarium
MADVESGNSQVNGGNEVDGTNGSSSLRAESKPLPADLDKRSLSMSMLETVDLEKDDMDYVMACLKTSPEGLKPDVAARRLAKFGPNALPEKKVNPILEFLMFMWNPLSWVMEAAALVAIFLTIPGGKAPDWEDFLGILLLLLINSTIGFIEERNAGNAVKALMDALAPRAKVQRGGEWLDIDAKDLVIGDIVALKLGDVIPADARIMNGKDIKIDQAALTGESLPVGKEKGDMIYSGSVVKQGEFLALVIATGMNTFFGKAAHLVNQTESTSHLQAIVSAIGLYCMAWISTFVLLLIVTQWPIHLENYRHGINNILVLLIGGVPIAMPVVLSVTLAIGAHELAEQKAIVTRMTAVEELAGMTILCSDKTGTLTLNKLSIDQESFFTMGGYTVDTVDQCMVFAARASRTENQDAIDFAVVNSLPDPKMAREGIEELDFHPFNPVDKRTEITYRDNKDGKVYKATKGAPQIILGMAHNKKEIEKEVHEQIEDFAKRGFRALGIAVAEVPSGEAHGEPGPWSMVGLMPIFDPPRHDTKETIEQAIAMGVEVKMITGDQLAIAKETARRLGMGTNIFNTDVLNLSDQRASIEYGGSVGELVESADGFAGVFPEHKYRIVEVLQRRGHMVGMTGDGVNDAPALKRASVGIAVAGATDAARGASDIVLTEPGLSVIIHAMVMSRQIFQRMKNYSMYACSVTVRIVVTFSILVWAFRFNMPPFLVLILAYLNDGTIMTISKDRVKPSPLPQRWDLKEVFIVASSLGIYLTASTVIFYVTLFKTQFWHDTFKLGMPWLNPRDPNYFQLHSIIYLQASIIGQALIFVTRAHWFFFMDRPGILLMSAFVVAQLVATFICVYANWGFTQIQGTGWGWAGVVWVWNVIWYAPLDIIKIAVRSIITGDKTPIHKLFAARRMFTFDYSKHGREGRMPRSSLQAAQARASVHRSMETYRASLQKNVNSLD

SEQ ID NO: 22366 - protein, 833 aa, Geobacter metallireducens
MKARKGLQRMNQNPVNEERSAEDPSLQTIPLVELFGRLSSSPEGLSPTEAARRLEKVGYNELQEREPSAFRKLLTFFWGPIPWMIEAAALLSALVGHWEDFGIIIVLLMVNAVVGFWEEYQAGNAIAALKQTLALKAKARRGGEWQSVPARELVPGDVIRLRLGDIVPADGRLIEGNPLEVDQSALTGESLPVSRGVGEAVYSGTVVRRGEGNALVYATGRETSFGKTARLVEEARTVSHFQRAVLKIGDYLIIVAIGLVLLIIAVALFRGDPIGETLQFALVLTVAAIPVAMPTILSVTMAVGARILAGRQAIVSRLAAIEELAGMDILCSDKTGTLTKNELTLGAPSCTEGIDPDAVILAAALASRREDADPIDLAILRKLPAGASLEGYRVLRFVPFDPVTKRTEATVSAPDGTTFTVTKGAPQVIVGLASPPPEVRARIDAAVEAFAARGFRSLGVARADKEGAWRMLGILPLFDPPRDDSRETLAAARRMGTRVKMVTGDQLAIAREIGRELGLGDRILDAALLTGADYREASRLADAIDKADGFAQVFPEHKFHIVEALQQQGHIVGMTGDGVNDAPALKKADAGIAVSGATDAARAAADIVLLTPGLSVIIDAVTESRRIFRRMNSYTIYRISETIRVLLFITLSILVFNFYPVTAVMIVLLALLNDGAILAIAVDRQEAAPEPQSWNMPVVLGVSTVLGIVGVVATFGLYYLAERLSGLGRDVIQSLIYLKLSVSGHLTIFAARARGPFWSNRPATALLAATVGTQLVATAIAVYGLFMAPIGWAWGGIVWAYALVWFVIEDRVKLGAYRIFDRRAPGLLEKVRR

SEQ ID NO: 22367 - protein, 977 aa, Olisthodiscus luteus
MQKPPLNRKASDRAMELNKQSPATGGPVLFDRKRSMSIDDVMEEREKQDSSGGPIKLGDIRSEDFRRSFHSGRSHDLDIEDPSSSAAAESFEPSTGLTTEEAEILLKQWGKNELIEKTKSKLEIFIEQFTAPMPIMIWIAILIEAVLENWPDMYILCGLQAINGGVGFYEMVKAGNAVAALKASLQPKAICHRDGQFKNMNATLLVPGDLVILGAGAAVPADCMINEGQIEVDQAALTGESLPVTMLKGDNPKMGSTVARGEVEATVTATGMNTFFGKTANLIQSVDELGHLQKILLYIMAFLIVLSFLLCGITLWYLLDQGEDFKESISFVVVLLVASIPIAIEVVVTATMALGSRELAKMDAIVARLSAIEELAGMNMLCSDKTGTLTLNKMVIQDDCPMFVDGITPEDVILHAALAAKWKEPPKDALDTMVLGACDVSLCNPFTQLDYTPFDPTLKRTEAELKGPDGKTFKVTKGAPHIVLDLCHDKKRIEEAVDFKVLELAERGIRSLAVARTNAKGQWFMLGILTFLDPPRPDTKLTIERARVHGVEVKMVTGDHQVIAKETARVLDMGTNILGCDGLPTLDAEGKLPSGAEMADICQRVVDCNGFAQVFPEHKFVIVEAVRMGGFEVGMTGDGVNDAPALKRADIGIAVQGATDAARAAADIVLTSPGLTVVVEAIIVARKIFARMKSFIVYRVACTLQLLVFFFVGVLWLHPQDYNSEFPRFWGMPVIALIMITLLNDGTIISIAYDNVQSSKNPEVWNLPAVYVVSTVLGMIACVSSILLLHWALDSTSPTSLFNKFGVELEYAEVMAVMYLKVSLSDFLTLFASRTHGPFWVQKPGKLLAAAFLFAVGLSTANSLTWPFGEGMAALPPVAPPPSGHTVWCGSSSRTLARPFCTCGCTSTTSLGSTTPRVSSLNTTAENMLMRMRRLEEGMVVSQQMILLVLQVLERMVRRGICSSNLSGSSLLSRCLY

SEQ ID NO: 22368 - protein, 603 aa, Olisthodiscus luteus
PTMALGSRQLTEKGAIVARLSAIEEMAGMNMLCSDKTGTLTLNKMVIQDDCPTFMDGVTRDDVILASQLAAKWWEPAKDALDTMVLTTGDLKNCEPYKQIEYTPFDPTLKRTEATLQGPDGKEFKVTKGAPHVVLALCWNKGEIEEQVDGKVLELAERGIRSLAVARTDNKGRWNMMGIMTFLDPPRPDTKQTIQDARKHGVEVKMITGDHQVIAKETARQLDMGTDILGCAGLPSWNGQDALPEGMDELAETIMQCNGFAQVFPEHKFLIVEALRRKGYIVGMTGDGVNDAPALKKGDVGIAVAGATERARAAADIVLTAPGLMVVVDAIIYSRQIFARMKSFIVYRVACTLQLLVFFFIGVLFFHPVAYNSSFPDFWYMPVLALITITLLNDGTIISIAYDNVQYNVNPEQWNLPVIFCVSTTLGAVACVSSVLLLHLALASESAGSFLSKFGIALDFPEVMCVMYLKVSISDFLTLFASRTHGPFWVQRPGKALACAFVFAVGLSTIYSLTWPLRPGHEPHLAGHDRPGVGLHPVLVLRPGRSQKHFFTCGCTSTTSLASTTLSVSWMKSTEWVLIEEPWEDTGLTSGSSGFGTMEEGNK

SEQ ID NO: 22369 - protein, 899 aa, Kluyveromyces lactis
MSAATEPTKEKPVNNQDSDDEDEDIDQLIEDLQSHHGLDDESEDDEHVAAGSARPVPEELLQTDPSYGLTSDEVTKRRKKYGLNQMSEETENLFVKFLMFFIGPIQFVMEAAAILAAGLEDWVDFGVICGLLFLNAAVGFIQEYQAGSIVDELKKTLANSAVVIRDGNLVEVPSNEVVPGDILQLEDGVVIPADGRLVTEDCFIQIDQSAITGESLAVDKRFGDSTFSSSTVKRGEAFMIVTATGDSTFVGRAAALVNKAAAGSGHFTEVLNGIGTILLILVIVTLLLVWVASFYRTNKIVRILRYTLAITIVGVPVGLPAVVTTTMAVGAAYLAKKQAIVQKLSAIESLAGVEILCSDKTGTLTKNKLSLHEPYTVEGVDPDDLMLTACLAASRKKKGLDAIDKAFLKSLISYPRAKAALTKYKLLEFHPFDPVSKKVTAIVESPEGERIICVKGAPLFVLKTVEEEHPIPEDVRENYENKVAELASRGFRALGVARKRGEGHWEILGVMPCMDPPRDDTAQTVNEARHLGLRVKMLTGDAVGIAKETCRQLGLGTNIYNAERLGLGGGGDMPGSELADFVENADGFAEVFPQHKYNVVEILQQRGYLVAMTGDGVNDAPSLKKADTGIAVEGATDAARSAADIVFLAPGLSAIIDALKTSRQIFHRMYSYVVYRIALSLHLEIFLGLWIAILNRSLNIDLVVFIAIFADVATLAIAYDNAPYSPKPVKWNLRRLWGMSVILGIILAIGTWITLTTMFVPKGGIIQNFGSIDGVLFLQISLTENWLIFITRAAGPFWSSIPSWQLSGAVLIVDIIATMFCLFGWWSQNWNDIVTVVRVWIFSFGVFCVMGGAYYMMSESEAFDRFMNGKSRRDKPSGRSVEDFLMAMQRVSTQHEKEN

SEQ ID NO: 22370 - protein, 952 aa, Zostera marina
MAGKGLDDIKNETVDLEKIPIEEVFEQLKCTRQGLSTTEGESRLAIFGANKLEEKKENKILKFLGFMWNPLSWVMEAAALMAIVLANGDGNPPDWQDFLGIVVLLVINSTISFIEENNAGNAAAALMAGLAPKTKVLRDGSWSEQEASILVPGDIVSIKLGDIVPADARLLEGDPLKIDQSALTGESLPVTRNPGSEVFSGSTCKQGEIDAVVIATGVHTFFGKAAHLVDSTNNVGHFQKVLTAIGNFCIVSIAIGIVIEIIVMWPIQRRKYRDGIDNLLVLLIGGIPIAMPTVLSVTMAIGSHKLAEQGAITKRMTAIEELAGMDVLCSDKTGTLTLNKLSVDKNLIEVFARGADKELVVLLAARSSRTENQDAIDTAMVGMLADPKEARANIQEVHFLPFNPVDKRTALTYIDEKGNWHRCSKGAPEQIMTLCNCKPDMKAKIHSVIDKYAERGLRSLGVGQQEVPEKNKESPGGPWQFVGVLPLFDPPRHDSAETIRRALDLGVNVKMITGDQLAIGKETGRRLGMGTNMYPSSSLLGDHKDPAVGTIGIDELIEKADGFAGVFPEHKYEIVKRLQDKKHICGMTGDGVNDAPALKKADIGIAVADATDAARGASDIVLTEPGLSVIISAVLSSRCIFQRMKNYTIYAVSITIRIVLGFMLIALIWKFDFSPFMVLIIAILNDGTIMTISKDRVKPSPLPDSWKLKEIFATGVVLGSYMAVMTVVFFWIMKDTSFFSDKFGVRSISNSEDEMMGALYLQVSIISQALIFVTRSRSWSFMERPGLLLVTAFFIAQMCATFIAVYADWGFARVKGVGWGWGGIIWLYSMVTFFPLDILKFITRYVLSGRGWENITENKTAFTSKKDYGREEREAQWATAQRTLHGLQTAESTTNIFPDKGGYRELSEIAEQAKRRAEVARLRELNTLKGHVESVVKLKGLDIETIQQNYTV

SEQ ID NO: 22371 - protein, 265 aa, Dunaliella salina
CSDKTGTLTLNKLSIDKSMVVPVGPMGVDEIMKMGALSANTVTEEPIDMVLWESYPERDTIKRDYKHTKYFPFNPNDKITIATCLEYATGKVFRVLKGSPQVVLGKAWNAAELDATVNQKMVDFANRGFRALGLAIADGDGKEGTKWEMLALLPLFDPPRHDTKDTIEHCQTQGIQVKMITGDHLLIGKETTRMLGMGTEMFPSEVMIKARNGDASQLHGYKNFVEMVETCNTFAQVFPEHKFEIVKILQDANHVVGMTGDGVND

SEQ ID NO: 22372 - protein, 1081 aa, Chlamydomonas reinhardtii
MGNEGEVKVAVNGTSIEEVNFEKIDLKEALSILNTTPHGLSSAEADKRLAEYGPNRLPESKRIPLLVFLGYMWNPLSWAMEAAAIIAIALLDYADFALIVGLLFLNAVISYVEESSADNAIKALAGALAPKCKVIRDGTLQTMEAVNLVPGDVVVMKFGDIVAADVKLFSDDPQHPFDSHSEEVPMQIDQAALTGESLPAKKHTGDVAFSGSAIKAGERHAVVYATGINTFFGRAAALISGTHNVANLQIIMTKIGGVCLVTIGVWVVIELAVQFGHYGHGCTSGEEGCPTLTNMLVILVGGIPIAMPTVLSVTLALGAAKLAKEGAIVARMSAVEEMAGMDILCSDKTGTLTLNKLSIDMNTIYKCEPGITNDDVAKYGALSADVAGEEPIDMVLFNNYANAKDLAARYKKIKWVPFNPTDKFTAITLMDQETGRVFRLLKGSPQVVLGKAYNKDTLADNVNAKMVEFANRGFRSLGVAMAEGDGADGKHEWHMLALLPLFDPPRHDTKDTIEYCHGQGIEVKMVTGDHLLIGKETAKMLGMGTVMYPSEVLIKAKNGDKGALGDFRDVTHMVESCNGFAEVFPEHKYEIVAILQEADHVVGMTGDGVNDAPALKKADVGIAVAGATDAARGAADIVLTEAGLSAIKTAVLGARKIFQRMTTYSKYTVAMTFRICFTFGLLTVIYDWYFPTILIVIMAVFNDGAMIALAKDRVEPSRQPNAWNLKNIFLMGIVYGLYLTLSTWALYQTACKTSFFEDHFPIFSLDDRHITLQNWCTGYITNQLNLNPTASICTMPTYLAQFDSQAACIEEMGGEQIINQCMAEQRYIRGAMLRSLIYNHVSISGQALVLVVRNQGFSLMERAGSLTYIAFVLAQIGSTVISVFGFGGYVPPRHRFTDCQFCSYSDYTPVKFFPSKEVPMAGTESVYTASVLGCLGYVLVAWIWTGIWYVLLDPIKWALCWMLNEDGFRDMATMKHERRQELGRTSQQKAADVGVTGMTVPTASNPLGRASIQKPVTMVLDRASAALVPVHRTSDGLVRVSADPAKARDLARRSRLNEGMQRTSGGAHAAGHTGQKEITRA

SEQ ID NO: 22373 - protein, 1053 aa, Chlamydomonas reinhardtii
  unsure (1)..(1053): unsure at all Xaa locations
MAEQEKPKEEHAPINFDENHEEKQAEELIKVHGRNELEEKHTPSWLIFLRQLYQPMPIMIWIAAIVEGAIENWADMGILLGIQFINATLRLVGQAYETTKAGDAVAALKASLKPLATAKRDGKWANIDAGNLVPGDLVLLASGSAVPADCLINHGTVDIDQAALTGESLPVTMHKGDSAKMGSTVVRGETEATVEFTGKNTFFGKTASMLQQSGGELGHLQKILLTIMFVLVVTSFILFTVVLLVASIPIAIEIVCTTTLALGSRELSRHGAIVTRLAAIEDMAGMNMLCSDKTGTLTLNKMAIQDDTPTYLPGLDQRKLLHLGALAAKWHEPPRDALDTLVLTCETQDLSALDVYEQIDYMPFDPTVKRTEGTIKDKRDGTTFKVTKGAPHIILKLTHDERIHHMVDETVAAFGQRGIRCLAIARTLGDDLNTWHMAGLLTFLDPPRPDTKDTIHKVMAYGVDVKMITGDNILIAKETARVLGMGTNIQDPKSLPTMDAEGKAPKDLGKKYGKIIMEADGFAQVYPEHKYLIVEALRQNGFACGMTGDGVNDAPALKRADVGVAVQGATAPLAPPPTIVLTEPGLSTIVHGIVTARCIFQRMKNFINYRIAATLQLLTFFFIAVFALPPIDYPQGMWPTCNTPAAVGSPTCCPETYTYDNVTSTVTMEWLRDNQGNDEIANNLNGVCFTDGEPWPDFFKMPVLMLMLITLLNDGTLISIGYDHVKPSAMPEKWNLPALFAISIVLGMVACGSSLLLLWAALDSWNTNGIFQKWGLGGMPYGKVTTIIYLKVSVSDFLTLFSARTHDGFFWSARPSPILMGAALLALSLSTILACVWPKGHTDKQLSMGLAYETDPHSNTLMPLWIWIYCVFWWFVQDFMKVAAYWMMHRYNWFDINTSMAINKRDANKVDDRHDPLARGSVGLVEGKLLAAKVEEAQAKVNAAIKHDQATNLGRASANXGRVSANLKQAGMARHSGNPKGADVEGAAQTVENVLLHLDEARGELDPKVQQEIAPAIEGVREAAEKLAANTAAALGGANPEQTLAKISSKRHM

SEQ ID NO: 22374 - protein, 349 aa, Chlamydomonas reinhardtii
MGNEGEVKVAVNGTSIEEVNFEKIDLKEALSILNTTPHGLSSAEADKRLAEYGPNRLPESKRIPLLVILGYMWNPLSWAMEAAAIIAIALLDYADFALIVGLLFLNAVISYVEESSADNAIKALAGALAPKCKVIRDGTLQTMEAVNLVPGDVVVMKFGDIVAADVKLFSDDPQHPFDSHSEEVPMQIDQAALTGESLPAKKHTGDVAFSGSAIKAGERHAVVYATGINTFFGRAAALISGTHNVANLQIIMTKIGGVCLVTIGVWVVIELAVQFGHYGHGCTSGEEGCPTLTNMLVILVGGIPIAMPTVLSVTLALGAAKLAKEGAIVARMSAVEEMAGMDILCSDKT

SEQ ID NO: 22375 - protein, 1228 aa, synthetic construct
MEEVIKNAHTYDVEDVLKFLDVNKDNGLKNEELDDRRLKYGLNELGVEKKKSIFELILNQFDDLLVKILLLAAFISFVLTLLDMKHKKTEICDFIEPLVIVLILILNAAVGVWQECNAEKSLEALKELQPTKAKVLRDGKWEIIDSKYLYVGDIIELSVGNKTPADARIIKIYSTSLKVEQSMLTGESCSVDKYAEKMEDSYKNCEIQLKKNILFSSTAIVCGRCIAVVINIGMKTEIGHIQHAVIESNSEDTQTPLQIKIDLFGQQLSKIIFVICVTVWIINFKHFSDPIHGSFLYGCLYYFKISVALAVAAIPEGLPAVITTCLALGTRRMVKKNAIVRKLQSVETLGCTTVICSDKTGTLTTNQMTTTVFHLFRESDSLTEYQLCQKGDTYYFYESSNLTNDIYAGESSFFNKLKDEGNVEALTDDGEEGSIDEADPYSDYFSSDSKKMKNDLNNNNNNNNNSSRSGAKRNIPLKEMKSNENTIISRGSKILEDKINKYCYSEYDYNFYMCLVNCNEANIFCNDNSQIVKKFGDSTELALLHFVHNFDILPTFSKNNKMPAEYEKNTTPVQSSNKKDKSPRGINKFFSSKNDNSHITSTLNENDKNLKNANHSNYTTAQATTNGYEAIGENTFEHGTSFENCFHSKLGNKINTTSTHNNNNNNNNNSNSVPSERISSWRNECKQIKIIEFTRERKLMSVIVENKKKEIILYCKGAPENIIKNCKYYLTKNDIRPLNETLKNEIHNKIQNMGKRALRTLSFAYKKLSSKDLNIKNTDDYYKLEQDLIYLGGLGIIDPPRKYVGRAIRLCHMAGIRVFMITGDNINTARAIAKEINILNKNEGDDEKDNYTNNKNTQICCYNGREFEDFSLEKQKHILKNTPRIVFCRTEPKHKKQIVKVLKDLGETVAMTGDGVNDAPALKSADIGIAMGINGTEVAKEASDIVLADDNFNTIVEAIKEGRCIYNNMKAFIRYLISSNIGEVASIFITALLGIPDSLAPVQLLWVNLVTDGLPATALGFNPPEHDVMKCKPRHKNDNLINGLTLLRYIIIGTYVGIATVSIFVYWFLFYPDSDMHTLINFYQLSHYNQCKAWNNFRVNKVYDMSEDHCSYFSAGKIKASTLSLSVLVLIEMFNALNALSEYNSLFEIPPWRNMYLVLATIGSLLLHVLILYIPPLARIFGVVPLSAYDWFLVFLWSFPVIILDEIIKFYAKRKLKEEQRTKKIKID

SEQ ID NO: 22376 - protein, 976 aa, Blumeria graminis
MAQNGATVFEEDEKLGEYGNLVRYISNFKDGRRMSTSGASILDLPQKKKWYQFGKTEQVADGFYETPVEWLQTDWKNGLTTTEVEARRKKVGFNELTTEKENMFLTFVSYFRGPILYVMELAVLLAAGLRDWIDFGVIIGILMLNAIVGWYQEKQAADVVASLKGDIALRTTVIRDGQQYEIKARELVPGDIVIVEDGNVVPADCRIISAYDNPNGWAEYQRELEAQAGESNNEKDDDDEIGEKHGSGYALLAIDQSAMTGESLAVDKYVADVIYYTTGCKRGKAYAIVTHSAKMSFVGRTASLVSGAQDQGHFKAIMNSIGTALLVLVVAFILASWVGGFFHHLPIATPEGSSINLLHYALILLIVGVPVGLPVVTTTTLAVGAAYLAKEKAIVQKLTAIESLAGVDVLCSDKTGTLTANQLSIREPFVADGVDVNWMMAVAALASSHNVKSLDPIDKVTILTLKRYPRAKEILSQGWRTEKFTPFDPVSKRITAIVIKDGVTYTCAKGAPKAILNLSNCSKEDAEMYKSKVTEFARRGFRSLGVAVKKGDGDWQLLGMLPMFDPPREDTASTIAEAQVLGLSVKMLTGDAIAIAKETCKMLALGTKVYNSERLIHGGLSGTTQHDLVEKADGFAEVFPEHKYQVVEMLQQRGHLTAMTGDGVNDAPSLKKSDCGIAVEGATEAAQAASDIVFLAPGLSTIVSAIKIARQIFQRMKAYIQYRIALCLHLEIYLVTSMIIINETVRVDLIVFLALFADLATIAVAYDNAHFEIRPVEWQLPKIWIISVVLGILLAIGTWILRGSLFLPNGGMIDNFGSIQGMLFLQISLTENWLIFVTRGDETYPAFALVAAIFGVDVLATLFCIFGWLTGGAGEQSDPATLNALLSTDGRTSIVTVIVVWCYSIAVTIVIAIVYHIMNKAAWLDNLGRFKRSRADTQMENIIMHLSKIAIQHERDENGNSRFALVPKALEAEDDD

SEQ ID NO: 22377 - protein, 953 aa, Mesembryanthemum crystallinum
MVGGNSSMSLQEIKDEKVDLEKIPIEEVFDSLKCSREGLSSAEGANRLQIFGPNKLEEKKDSKFLKFLGFMWNPLSWVMEAAALMAIVLANGDHKPPDWQDFVGIIILLVINSTISFIEENNAGNAAAALMANLAPKTKVLRDGRWGEQEASILVPGDIISIKLGDIVPADARLLEGDALKIDQSALTGESMPVTKNPGEEVFSGSTCKQGELEAVVIATGVHTFFGKAAHLVDSTNQVGHFQKVLTSIGNFCICSIAIGMLIEIIVMYPIQRRKYRDGIDNLLVLLIGGIPIAMPTVLSVTMAIGSHRLSQQGAITKRMTAIEEMAGMDVLCSDKTGTLTLNKLTVDRNLVEVFAKGVEKEYVILLAARASRTENQDAIDAAIVGMLADPKEARAGIREVHFLPFNPVDKRTALTYIDADGNWHRASKGAPEQILTLCRCKEDVKKKAHGVIEKFADRGLRSLAVARQEVPEKTKESPGGPWQFVGLLPLFDPPRHDSAETIKRALNLGVNVKMITGDQLAIGKETGRRLGMGTNMYPSSSLLGQDKDSNVAGLPVDELIEKADGFAGVFPEHKYEIVKRLQDRKHICGMTGDGVNDAPALKRADIGIAVADATDAARSASDIVLTEPGLSVIISAVLTSRAIFQRMKNYTIYAVSITIRVVFGFMFIALIWKFDFAPFMVLIIAILNDGTIMTISKDRVKPSPLPDSWKLKEIFATGIVLGGYQAIMTVVFFWLVRDTTFFVDKFHVKPLTDGQMMAALYLQVSAISQALIFVTRSRSWSFAERPGLMLLGAFVVAQLIATLIAVYANWSFAKIEGMGWGWALAVWIYTLVTYIPLDILKFTIRYALSGRAWNNLLDNKTAFTTKKDYGKEEREAQWAAAQRTMHGLQPPETTNLFPEKSNYRELSEIAEQAKRRAEVARLRELHTLKGHVESVVKLKGLDIDTIQQHYTV

SEQ ID NO: 22378 - protein, 1228 aa, Plasmodium falciparum 3D7
MEEVIKNAHTYDVEDVLKFLDVNKDNGLKNEELDDRRLKYGLNELEVEKKKSIFELILNQFDDLLVKILLLAAFISFVLTLLDMKHKKIEICDFIEPLVIVLILILNAAVGVWQECNAEKSLEALKELQPTKAKVLRDGKWEIIDSKYLYVGDIIELSVGNKTPADARIIKIYSTSLKVEQSMLTGESCSVDKYAEKMEDSYKNCEIQLKKNILFSSTAIVCGRCIAVVINIGMKTEIGHIQHAVIESNSEDTQTPLQIKIDLFGQQLSKIIFVICVTVWIINFKHFSDPIHGSFLYGCLYYFKISVALAVAAIPEGLPAVITTCLALGTRRMVKKNAIVRKLQSVETLGCTTVICSDKTGTLTTNQMTTTVFHLFRESDSLTEYQLCQKGDTYYFYESSNLTNDIYAGESSFFNKLKDEGNVEALTDDGEEGSIDEADPYSDYFSSDSKKMKNDLNNNNNNNNNSSRSGAKRNIPLKEMKSNENTIISRGSKILEDKINKYCYSEYDYNFYMCLVNCNEANIFCNDNSQIVKKFGDSTELALLHFVHNFDILPTFSKNNKMPAEYEKNTTPVQSSNKKDKSPRGINKFFSSKNDNSHITSTLNENDKNLKNANHSNYTTAQATTNGYEAIGENTFEHGTSFENCFHSKLGNKINTTSTHNNNNNNNNNSNSVPSECISSWRNECKQIKIIEFTRERKLMSVIVENKKKEIILYCKGAPENIIKNCKYYLTKNDIRPLNETLKNEIHNKIQNMGKRALRTLSFAYKKLSSKDLNIKNTDDYYKLEQDLIYLGGLGIIDPPRKYVGRAIRLCHMAGIRVFMITGDNINTARAIAKEINILNKNEGDDEKDNYTNNKNTQICCYNGREFEDFSLEKQKHILKNTPRIVFCRTEPKHKKQIVKVLKDLGETVAMTGDGVNDAPALKSADIGIAMGINGTEVAKEASDIVLADDNFNTIVEAIKEGRCIYNNMKAFIRYLISSNIGEVASIFITALLGIPDSLAPVQLLWVNLVTDGLPATALGFNPPEHDVMKCKPRHKNDNLINGLTLLRYIIIGTYVGIATVSIFVYWFLFYPDSDMHTLINFYQLSHYNQCKAWNNFRVNKVYDMSEDHCSYFSAGKIKASTLSLSVLVLIEMFNALNALSEYNSLFEIPPWRNMYLVLATIGSLLLHVLILYIPPLARIFGVVPLSAYDWFLVFLWSFPVIILDEIIKFYAKRKLKEEQRTKKIKID

SEQ ID NO: 22379 - protein, 69 aa, Gossypium hirsutum
VKILQEKKHVVGMTGDGVNDAPALKKADIGIAVADATDAARSAADIVLTEPGLSVIISAVLTSRAIFQR

SEQ ID NO: 22380 - protein, 453 aa, Cucumis sativus
KFLGFMWNPLSWVMEAAAIMAIALANGGGKPPDWEDFVGIICLLVINSTISFIEENNAGNAAAALMAGLAPKTKVLRDGKWSEQEAAILVPGDIVSVKLGDIIPADARLLEGDPLKVDQSALTGESLPVTKNPGDEIFSGSTCKQGEIEAVVIATGVHTFFGKAAHLVDSTHQVGHFQKVLTAIGNFCICSIALGMLIEIIGMCPIQHRKYRDGIDNLFVLLIGGIPIAMPTVLSVTMAIGSHKLSQQGAITKRMTAIEEMAGMDVLCSDKTGTLTLNKLSVDVNLVEVFAKGVDKQHVILLAARASRTENQDAIDAAIVGMLADPKEARAGIREVHFFPFNPVDKRTALTYIDSDGNWHRASKGAPEQILTLCNCKEDVKKKAHAVIDKFAERGLRSLAVGRQEVPEKRKESPGSPWQFVGLLPLFDPPRHDSGETIKRALNLGVNVKMITG

SEQ ID NO: 22381 - protein, 948 aa, Arabidopsis thaliana
MSSLEDIKNETVDLEKIPIEEVFQQLKCSREGLTTQEGEDRIQIFGPNKLEEKKESKLLKFLGFMWNPLSWVMEMAAIMAIALANGDGRPPDWQDFVGIICLLVINSTISFIEENNAGNAAAALMAGLAPKTKVLRDGKWSEQEAAILVPGDIVSIKLGDIIPADARLLEGDPLKVDQSALTGESLPVTKHPGQEVFSGSTCKQGEIEAVVIATGVHTFFGKAAHLVDSTNQVGHFQKVLTAIGNFCICSIAIGMVIEIIVMYPIQRRKYRDGIDNLLVLLIGGIPIAMPTVLSVTMAIGSHRLSQQGAITKRMTAIEEMAGMDVLCSDKTGTLTLNKLSVDKNLVEVFCKGVEKDQVLLFAAMASRVENQDAIDAAMVGMLADPKEARAGIREVHFLPFNPVDKRTALTYIDGSGNWHRVSKGAPEQILELAKASNDLSKKVLSIIDKYAERGLRSLAVARQVVPEKTKESPGAPWEFVGLLPLFDPPRHDSAETIRRALNLGVNVKMITGDQLAIGKETGRRLGMGTNMYPSSALLGTHKDANLASIPVEELIEKADGFAGVFPEHKYEIVKKLQERKHIVGMTGDGVNDAPALKKADIGIAVADATDAARGASDIVLTEPGLSVIISAVLTSRAIFQRMKNYTIYAVSITIRIVFGFMLIALIWEFDFSAFMVLIIAILNDGTIMTISKDRVKPSPTPDSWKLKEIFATGVVLGGYQAIMTVIFFWAAHKTDFFSDTFGVRSIRDNNHELMGAVYLQVSIISQALIFVTRSRSWSFVERPGALLMIAFLIAQLIATLIAVYANWEFAKIRGIGWGWAGVIWLYSIVTYFPLDVFKFAIRYILSGKAWLNLFENKTAFTMKKDYGKEEREAQWALAQRTLHGLQPKEAVNIFPEKGSYRELSEIAEQAKRRAEIARLRELHTLKGHVESVVKLKGLDIETPSHYTV

SEQ ID NO: 22382 - protein, 949 aa, Arabidopsis thaliana
MSGLEDIKNETVDLEKIPIEEVFQQLKCTREGLTTQEGEDRIVIFGPNKLEEKKESKILKFLGFMWNPLSWVMEAAALMAIALANGDNRPPDWQDFVGIICLLVINSTISFIEENNAGNAAAALMAGLAPKTKVLRDGKWSEQEAAILVPGDIVSIKLGDIIPADARLLEGDPLKVDQSALTGESLPVTKHPGQEVFSGSTCKQGEIEAVVIATGVHTFFGKAAHLVDSTNQVGHFQKVLTSIGNFCICSIAIGIAIEIVVMYPIQHRKYRDGIDNLLVLLIGGIPIAMPTVLSVTMAIGSHRLSQQGAITKRMTAIEEMAGMDVLCSDKTGTLTLNKLSVDKNLVEVFCKGVEKDQVLLFAAMASRVENQDAIDAAMVGMLADPKEARAGIREVHFLPFNPVDKRTALTYIDSDGNWHRVSKGAPEQILDLANARPDLRKKVLSCIDKYAERGLRSLAVARQVVPEKTKESPGGPWEFVGLLPLFDPPRHDSAETIRRALNLGVNVKMITGDQLAIGKETGRRLGMGTNMYPSAALLGTDKDSNIASIPVEELIEKADGFAGVFPEHKYEIVKKLQERKHIVGMTGDGVNDAPALKKADIGIAVADATDAARGASDIVLTEPGLSVIISAVLTSRAIFQRMKNYTIYAVSITIRIVFGFMLIALIWEFDFSAFMVLIIAILNDGTIMTISKDRVKPSPTPDSWKLKEIFATGIVLGGYQAIMSVIFFWAAHKTDFFSDKFGVRSIRDNNDELMGAVYLQVSIISQALIFVTRSRSWSFVERPGALLMIAFVIAQLVATLIAVYADWTFAKVKGIGWGWAGVIWIYSIVTYFPQDILKFAIRYILSGKAWASLFDNRTAFTTKKDYGIGEREAQWAQAQRTLHGLQPKEDVNIFPEKGSYRELSEIAEQAKRRAEIARLRELHTLKGHVESVAKLKGLDIDTAGHHYTV

SEQ ID NO: 22383 - protein, 949 aa, Arabidopsis thaliana
MSGLEDIKNETVDLEKIPIEEVFQQLKCTREGLTTQEGEDRIVIFGPNKLEEKKESKILKFLGFMWNPLSWVMEAAALMAIALANGDNRPPDWQDFVGIICLLVINSTISFIEENNAGNAAAALMAGLAPKTKVLRDGKWSEQEAAILVPGDIVSIKLGDIIPADARLLEGDPLKVDQSALTGESLPVTKHPGQEVFSGSTCKQGEIEAVVIATGVHTFFGKAAHLVDSTNQVGHFQKVLTSIGNFCICSIAIGIAIEIVVMYPIQHRKYRDGIDNLLVLLIGGIPIAMPTVLSVTMAIGSHRLSQQGAITKRMTAIEEMAGMDVLCSDKTGTLTLNKLSVDKNLVEVFCKGVEKDQVLLFAAMASRVENQDAIDAAMVGMLADPKEARAGIREVHFLPFNPVDKRTALTYIDSDGNWHRVSKGAPEQILDLANARPDLRKKVLSCIDKYAERGLRSLAVARQVVPEKTKESPGGPWEFVGLLPLFDPPRHDSAETIRRALNLGVNVKMITGDQLAIGKETGRRLGMGTNMYPSAALLGTDKDSNIASIPVEELIEKADGFAGVFPEHKYEIVKKLQERKHIVGMTGDGVNDAPALKKADIGIAVADATDAARGASDIVLTEPGLSVIISAVLTSRAIFQRMKNYTIYAVSITIRIVFGFMLIALIWEFDFSAFMVLIIAILNDGTIMTISKDRVKPSPTPDSWKLKEIFATGIVLGGYQAIMSVIFFWAAHKTDFFSDKFGVRSIRDNNDELMGAVYLQVSIISQALIFLTRSRSWYFVERPGALLMIAFVIAQLVATLIAVYADWTFAKVKGIGWGWAGVIWIYSIVTYFPQDILKFAIRYILSGKAWASLFDNRTAFTTKKDYGIGEREAQWAQAQRTLHGLQPKEDVNIFPEKGSYRELSEIAEQAKRRAEIARLRELHTLKGHVESVAKLKGLDIDTAGHHYTV

SEQ ID NO: 22384 - protein, 949 aa, Arabidopsis thaliana
MASGLEDIVNENVDLEKIPIEEVFQQLKCSREGLSGAEGENRLQIFGPNKLEEKKESKLLKFLGFMWNPLSWVMEAAAIMAIALANGGGKPPDWQDFVGIVCLLVINSTISFVEENNAGNAAAALMAGLAPKTKVLRDGKWSEQEASILVPGDIVSIKLGDIIPADARLLEGDPLKVDQSALTGESLPATKGPGEEVFSGSTCKQGEIEAVVIATGVHTFFGKAAHLVDSTNQVGHFQKVLTAIGNFCICSIAVGIAIEIVVMYPIQRRHYRDGIDNLLVLLIGGIPIAMPTVLSVTMAIGSHKLSQQGAITKRMTAIEEMAGMDVLCSDKTGTLTLNKLSVDKNLIEVYCKGVEKDEVLLFAARASRVENQDAIDAAMVGMLADPKEARAGIREIHFLPFNPVDKRTALTFIDSNGNWHRVSKGAPEQILDLCNARADLRKRVHSTIDKYAERGLRSLAVSRQTVPEKTKESSGSPWEFVGVLPLFDPPRHDSAETIRRALDLGVNVKMITGDQLAIAKETGRRLGMGSNMYPSSSLLGKHKDEAMAHIPVEDLIEKADGFAGVFPEHKYEIVKKLQERKHICGMTGDGVNDAPALKKADIGIAVADATDAARGASDIVLTEPGLSVIISAVLTSRAIFQRMKNYTIYAVSITIRIVFGFMLIALIWKFDFSPFMVLIIAILNDGTIMTISKDRVKPSPTPDSWKLKEIFATGVVLGGYMAIMTVVFFWAAYKTDFFPRTFHVRDLRGSEHEMMSALYLQVSIVSQALIFVTRSRSWSFTERPGYFLLIAFWVAQLIATAIAVYGNWEFARIKGIGWGWAGVIWLYSIVFYFPLDIMKFAIRYILAGTAWKNIIDNRTAFTTKQNYGIEEREAQWAHAQRTLHGLQNTETANVVPERGGYRELSEIANQAKRRAEIARLRELHTLKGHVESVVKLKGLDIETDGHYTV

SEQ ID NO: 22385 - protein, 949 aa, Arabidopsis thaliana
MASGLEDIVNENVDLEKIPIEEVFQQLKCSREGLSGAEGENRLQIFGPNKLEEKKESKLLKFLGFMWNPLSWVMEAAAIMAIALANGGGKPPDWQDFVGIVCLLVINSTISFVEENNAGNAAAALMAGLAPKTKVLRDGKWSEQEASILVPGDIVSIKLGDIIPADARLLEGDPLKVDQSALTGESLPATKGPGEEVFSGSTCKQGEIEAVVIATGVHTFFGKAAHLVDSTNQVGHFQKVLTAIGNFCICSIAVGIAIEIVVMYPIQRRHYRDGIDNLLVLLIGGIPIAMPTVLSVTMAIGSHKLSQQGAITKRMTAIEEMAGMDVLCSDKTGTLTLNKLSVDKNLIEVYCKGVEKDEVLLFAARASRVENQDAIDAAMVGMLADPKEARAGIREIHFLPFNPVDKRTALTFIDSNGNWHRVSKGAPEQILDLCNARADLRKRVHSTIDKYAERGLRSLAVSRQTVPEKTKESSGSPWEFVGVLPLFDPPRHDSAETIRRALDLGVNVKMITGDQLAIAKETGRRLGMGSNMYPSSSLLGKHKDEAMAHIPVEDLIEKADGFAGVFPEHKYEIVKKLQERKHICGMTGDGVNDAPALKKADIGIAVADATDAARGASDIVLTEPGLSVIISAVLTSRAIFQRMKNYTIYAVSITIRIVFGFMLIALIWKFDFSPFMVLIIAILNDGTIMTISKDRVKPSPTPDSWKLKEIFATGVVLGGYMAIMTVVFFWAAYKTDFFPRTFHVRDLRGSEHEMMSALYLQVSIVSQALIFVTRSRSWSFTERPGYFLLIAFWVAQLIATAIAVYGNWEFARIKGIGWGWAGVIWLYSIVFYFPLDIMKFAIRYILAGTAWKNIIDNRTAFTTKQNYGIEEREAQWAHAQRTLHGLQNTETANVVPERGGYRELSEIANQAKRRAEIARLRELHTLKGHVESVVKLKGLDIETAGHYTV

SEQ ID NO: 22386 - protein, 954 aa, Arabidopsis thaliana
MAGNKDSSWDDIKNEGIDLEKIPIEEVLTQLRCTREGLTSDEGQTRLEIFGPNKLEEKKENKVLKFLGFMWNPLSWVMELAAIMAIALANGGGRPPDWQDFVGITVLLIINSTISFIEENNAGNAAAALMAGLAPKTKVLRDGKWSEQEAAILVPGDIISIKLGDIVPADGRLLDGDPLKIDQSALTGESLPVTKHPGQEVYSGSTCKQGELEAVVIATGVHTFFGKAAHLVDSTNQEGHFQKVLTAIGNFCICSIAIGMLIEIVVMYPIQKRAYRDGIDNLLVLLIGGIPIAMPTVLSVTMAIGSHRLSQQGAITKRMTAIEEMAGMDVLCSDKTGTLTLNKLTVDKSMVEVFVKDLDKDQLLVNAARASRVENQDAIDACIVGMLGDPREAREGITEVHFFPFNPVDKRTAITYIDANGNWHRVSKGAPEQIIELCNLREDASKRAHDIIDKFADRGLRSLAVGRQTVSEKDKNSPGEPWQFLGLLPLFDPPRHDSAETIRRALDLGVNVKMITGDQLAIGKETGRRLGMGTNMYPSSALLGQDKDESIASLPVDELIEKADGFAGVFPEHKYEIVKRLQEMKHICGMTGDGVNDAPALKRADIGIAVADATDAARSASDIVLTEPGLSVIVSAVLTSRAIFQRMKNYTIYAVSITIRIVMGFMLLALIWKFDFSPFMVLIVAILNDGTIMTISKDRVKPSPLPDSWKLKEIFATGVVLGTYLAVMTVVFFWAAESTDFFSAKFGVRSISGNPHELTAAVYLQVSIVSQALIFVTRSRSWSYVERPGFWLISAFFMAQLIATLIAVYANWNFARIRGIGWGWAGVIWLYSIVFYIPLDILKFIIRYSLSGRAWDNVIENKTAFTSKKDYGKGEREAQWAQAQRTLHGLQPAQTSDMFNDKSTYRELSEIADQAKRRAEVARLRERHTLKGHVESVVKQKGLDIEAIQQHYTL

SEQ ID NO: 22387 - protein, 949 aa, Arabidopsis thaliana
MSELDHIKNESVDLVRIPMEEVFEELKCTKQGLTANEASHRLDVFGPNKLEEKKESKLLKFLGFMWNPLSWVMEVAALMAIALANGGGRPPDWQDFVGIVCLLLINSTISFIEENNAGNAAAALMAGLAPKTKVLRDNQWSEQEASILVPGDVISIKLGDIIPADARLLDGDPLKIDQSSLTGESIPVTKNPSDEVFSGSICKQGEIEAIVIATGVHTFFGKAAHLVDNTNQIGHFQKVLTSIGNFCICSIALGIIVELLVMYPIQRRRYRDGIDNLLVLLIGGIPIAMPSVLSVTMATGSHRLFQQGAITKRMTAIEEMAGMDVLCCDKTGTLTLNKLTVDKNLVEVFAKGVGKEHVFLLAARASRIENQDAIDAAIVGMLADPKEARAGVREVHFFPFNPVDKRTALTYVDSDGNWHRASKGAPEQILNLCNCKEDVRRKVHGVIDKFAERGLRSLAVARQEVLEKKKDAPGGPWQLVGLLPLFDPPRHDSAETIRRALNLGVNVKMITGDQLAIGKETGRRLGMGTNMYPSSALLGQVKDSSLGALPVDELIEKADGFAGVFPEHKYEIVHRLQQRNHICGMTGDGVNDAPALKKADIGIAVVDATDAARGASDIVLTEPGLSVIISAVLTSRAIFQRMKNYTIYAVSITIRIVFGFMFIALIWQFDFSPFMVLIIAILNDGTIMTISKDRMKPSPQPDSWKLRDIFSTGVVLGGYQALMTVVFFWVMKDSDFFSNYFGVRPLSQRPEQMMAALYLQVSIISQALIFVTRSRSWSYAECPGLLLLGAFVIAQLVATFIAVYANWSFARIEGAGWGWAGVIWLYSFLTYIPLDLLKFGIRYVLSGKAWLNLLENKTAFTTKKDYGKEEREAQWAAAQRTLHGLQPAEKNNIFNEKNSYSELSQIAEQAKRRAEVVRLREINTLKGHVESVVKLKGLDIDTIQQHYTV

SEQ ID NO: 22388 - protein, 931 aa, Arabidopsis thaliana
MEEVFEELKCTKQGLTANEASHRLDVFGPNKLEEKKESKLLKFLGFMWNPLSWVMEVAALMAIALANGGGRPPDWQDFVGIVCLLLINSTISFIEENNAGNAAAALMAGLAPKTKVLRDNQWSEQEASILVPGDVISIKLGDIIPADARLLDGDPLKIDQSSLTGESIPVTKNPSDEVFSGSICKQGEIEAIVIATGVHTFFGKAAHLVDNTNQIGHFQKVLTSIGNFCICSIALGIIVELLVMYPIQRRRYRDGIDNLLVLLIGGIPIAMPSVLSVTMATGSHRLFQQGAITKRMTAIEEMAGMDVLCCDKTGTLTLNKLTVDKNLVEVFAKGVGKEHVFLLAARASRIENQDAIDAAIVGMLADPKEARAGVREVHFFPFNPVDKRTALTYVDSDGNWHRASKGAPEQILNLCNCKEDVRRKVHGVIDKFAERGLRSLAVARQEVLEKKKDAPGGPWQLVGLLPLFDPPRHDSAETIRRALNLGVNVKMITGDQLAIGKETGRRLGMGTNMYPSSALLGQVKDSSLGALPVDELIEKADGFAGVFPEHKYEIVHRLQQRNHICGMTGDGVNDAPALKKADIGIAVVDATDAARGASDIVLTEPGLSVIISAVLTSRAIFQRMKNYTIYAVSITIRIVFGFMFIALIWQFDFSPFMVLIIAILNDGTIMTISKDRMKPSPQPDSWKLRDIFSTGVVLGGYQALMTVVFFWVMKDSDFFSNYFGVRPLSQRPEQMMAALYLQVSIISQALIFVTRSRSWSYAECPGLLLLGAFVIAQLVATFIAVYANWSFARIEGAGWGWAGVIWLYSFLTYIPLDLLKFGIRYVLSGKAWLNLLENKTAFTTKKDYGKEEREAQWAAAQRTLHGLQPAEKNNIFNEKNSYSELSQIAEQAKRRAEVVRLREINTLKGHVESVVKLKGLDIDTIQQHYTV

SEQ ID NO: 22389 - protein, 954 aa, Arabidopsis thaliana
MAGNKDSSWDDIKNEGIDLEKIPIEEVLTQLRCTREGLTSDEGQTRLEIFGPNKLEEKKENKVLKFLGFMWNPLSWVMELAAIIGIALANGGGRPPDWQDFVGITVLLIINSTISFIEENNAGNAAAALMAGLAPKTKVLRDGKWSEQEAAILVPGDIISIKLGDIVPADGRLLDGDPLKIDQSALTGESLPVTKHPGQEVYSGSTCKQGELEAVVIATGVHTFFGKAAHLVDSTNQEGHFQKVLTAIGNFCICSIAIGMLIEIVVMYPIQKRAYRDGIDNLLVLLIGGIPIAMPTVLSVTMAIGSHRLSQQGAITKRMTAIEEMAGMDVLCSDKTGTLTLNKLTVDKSMVEVFVKDLDKDQLLVNAARASRVENQDAIDACIVGMLGDPREAREGITEVHFFPFNPVDKRTAITYIDANGNWHRVSKGAPEQIIELCNLREDASKRAHDIIDKFADRGLRSLAVGRQTVSEKDKNSPGEPWQFLGLLPLFDPPRHDSAETIRRALDLGVNVKMITGDQLAIGKETGRRLGMGTNMYPSSALLGQDKDESIASLPVDELIEKADGFAGVFPEHKYEIEKRLQEMKHICGMTGDGVNDAPALKRADIGIAAADATDAARSASDIVLTEPGLSVIVSAVLTSRAIFQRMKNYTIYAVSITIRIVMGFMLLALIWKFDFSPFMVLIVAILNDGTIMTISKDRVKPSPLPDSWKLKEIFATGVVLGTYLAVMTVVFFWAAESTDFFSAKFGVRSISGNAHELTAAVYLQVSIVSQALIFVTRSRSWSYVERPGFWLISAFFMAQLIATLIAVYANWNFARIRGIGWGWAGVIWLYSIVFYIPLDILKFIIRYSLSGRAWDNVIENKTAFTSKKDYGKGEREAQWAQAQRTLHGLQPAQTSDMFNDKSTYRELSEIADQAKRRAEVARLRERHTLKGHVESVVKQKGLDIEAIQQHYTL

SEQ ID NO: 22390 - protein, 949 aa, Arabidopsis thaliana
MAADISWDEIKKENVDLEKIPVDEVFQQLKCSREGLSSEEGRNRLQIFGANKLEEKVENKFLKFLGFMWNPLSWVMEAAAIMAIVLANGGGRPPDWQDFVGITCLLIINSTISFIEENNAGNAAAALMANLAPKTKVLRDGRWGEQEAAILVPGDLISIKLGDIVPADARLLEGDPLKIDQSALTGESLPATKHQGDEVFSGSTCKQGEIEAVVIATGVHTFFGKAAHLVDSTNNVGHFQKVLTAIGNFCICSIGIGMLIEIIIMYPIQHRKYRDGIDNLLVLLIGGIPIAMPTVLSVTMAIGSHRLSQQGAITKRMTAIEEMAGMDVLCSDKTGTLTLNKLTVDKNLIEVFSKDVDKDYVILLSARASRVENQDAIDTSIVNMLGDPKEARAGITEVHFLPFNPVEKRTAITYIDTNGEWHRCSKGAPEQIIELCDLKGETKRRAHEIIDKFAERGLRSLGVARQRVPEKDKESAGTPWEFVGLLPLFDPPRHDSAETIRRALDLGVNVKMITGDQLAIGKETGRRLGMGTNMYPSSSLLENKDDTTGGVPVDELIEKADGFAGVFPEHKYEIVRKLQERKHIVGMTGDGVNDAPALKKADIGIAVDDATDAARSASDIVLTEPGLSVIVSAVLTSRAIFQRMKNYTIYAVSITIRIVLGFMLVALIWEFDFSPFMVLIIAILNDGTIMTISKDRVKPSPIPDSWKLKEIFATGVVLGTYMALVTVVFFWLAHDTTFFSDKFGVRSLQGKDEELIAVLYLQVSIISQALIFVTRSRSWSFVERPGLLLLIAFFVAQLIATLIATYAHWEFARIKGCGWGWCGVIWIYSIVTYIPLDILKFITRYTLSGKAWNNMIENRTAFTTKKDYGRGEREAQWALAQRTLHGLKPPESMFEDTATYTELSEIAEQAKKRAEVARLREVHTLKGHVESVVKLKGLDIDNLNQHYTV

SEQ ID NO: 22391 - protein, 948 aa, Arabidopsis thaliana
MATEFSWDEIKKENVDLERIPVEEVFEQLKCSKEGLSSDEGAKRLEIFGANKLEEKSENKFLKFLGFMWNPLSWVMESAAIMAIVLANGGGKAPDWQDFIGIMVLLIINSTISFIEENNAGNAAAALMANLAPKTKVLRDGKWGEQEASILVPGDLISIKLGDIVPADARLLEGDPLKIDQSALTGESLPTTKHPGDEVFSGSTCKQGEIEAVVIATGVHTFFGKAAHLVDSTNNVGHFQKVLTSIGNFCICSIGLGMLIEILIMYPIQHRTYRDGIDNLLVLLIGGIPIAMPTVLSVTMAIGSHRLSQQGAITKRMTAIEEMAGMDVLCSDKTGTLTLNKLSVDKSLIEVFPKNMDSDSVVLMAARASRIENQDAIDASIVGMLGDPKEARAGITEVHFLPFNPVDKRTAITYIDESGDWHRSSKGAPEQIIELCNLQGETKRKAHEVIDGFAERGLRSLGVAQQTVPEKTKESDGSPWEFVGLLPLFDPPRHDSAETIRRALELGVNVKMITGDQLAIGIETGRRLGMGTNMYPSTSLLGNSKDESLVGIPIDELIEKADGFAGVFPEHKYEIVKKLQERKHICGMTGDGVNDAPALKKADIGIAVADATDAARSASDIVLTEPGLSVIISAVLTSRAIFQRMKNYTIYAVSITIRIVLGFMLVALIWRFDFAPFMVLIIAILNDGTIMTISKDRVKPSPVPDSWKLNEIFATGVVLGTYMALTTVLFFWLAHDTDFFSKTFGVRSIQGNEEELMAALYLQVSIISQALIFVTRSRSWSFVERPGFLLLIAFVIAQLVATLIAVYANWGFARIVGCGWGWAGGIWVYSIITYIPLDILKFIIRYALTGKAWDNMINQKTAFTTKKDYGKGEREAQWALAQRTLHGLPPPEAMFNDNKNELSEIAEQAKRRAEVARLRELHTLKGHVESVVKLKGLDIDTIQQHYTV

SEQ ID NO: 22392 - protein, 954 aa, Prunus persica
MGGDKAISLEEIKNESVDLERIPIEEVFEQLKCTREGLTGDEGANRLQVFGPNKLEEKKESKLLKFLGFMWNPLSWVMEAAAVMAIALANGGGRPPDWQDFVGIVVLLVINSTISFIEENNAGNAAAALMAGLAPKTKVLRDGRWTEQEASILVPGDIISIKLGDIVPADARLLEGDPLKIDQSALTGESLPVTKNPSEEVFSGSTCKQGEIEAVVIATGVHTFFGKAAHLVDSTNQVGHFQKVLTAIGNFCICSIAVGILIELIVMYPIQKRKYRDGIDNLLVLLIGGIPIAMPTVLSVTMAIGSHRLSQQGAITKRMTAIEEMAGMDVLCSDKTGTLTLNKLSVDRNLIEVFAKGVEKEHVMLLAARASRTENQDAIDAAIVGMLADPKEARVGIREVHFLPFNPVDKRTALTYIDSDGNWHRASKGAPEQILALCNCKEDFKKRVHAVIDKFAERGLRSLAVARQQVPEKTKESPGTPWQFVGLLPLFDPPRHDSAETIRRALNLGVNVKMITGDQLAIGKETGRRLGMGTNMYPSSALLGQDKDASIASLPVDELIEKADGFAGVFPEHKYEIVKRLQERKHICGMTGDGVNDAPALKKADIGIAVADATDAARGASDIVLTEPGLSVIISAVLTSRAIFQRMKNYTIYAVSITIRIVFGFMFIALIWKFDFAPFMVLIIAILNDGTIMTISKDRVKPSPQPDSWKLKEIFATGIVLGGYMALMTVVFFWLMKDTKFFSNTFNVRHLGDRPEQMMAALYLQVSIVSQALIFVTRSRSWSFVERPGLLLLGAFMVAQLVATLIAVYANWAFARIEGCGWGWAGVIWLFSVVTYFPLDLLKFAIRYILSGKAWDNLLENKTAFTTKKDYGKEEREAQWAAAQRTLHGLQPPETNNLFSEKNSYRELSEIAEQAKRRAEVARLRELHTLKGHVESVVKLKGLDIDTIQQHYTV

SEQ ID NO: 22393 - protein, 896 aa, Mesorhizobium loti
MGVRWRYPHADRREGHQPLHVVLMIGEAGQQSVSPQDGAYWSIETNDLLLRLDTSVSGLASSEAASRLAKFGRNTLASTSSASALAVFARQFRSPLVLILIFAACVSAFVGDGQEAAIIGAIVLASCVLSFTQEYGASRATEALKQRISRKAIVLRDGAECSVAAEEIVPGDVIRLSAGNLIPADGIILDARDFNVSEAVLTGETFPAVKTPGRSAPDAALTLRTNAVFTGTSVRSGTATVLAAATGTRTEFASIAAALERQIPETGFARGIRLFGYLMTEIMLAIVILVFFANLLLHRPLIESLLFSLALAVGLTPELLPAIISVTLARGARAMAANGVIVRRLDAIENLGSMDLLCTDKTGTLTEGVIHLDGWLDVDGNPSTDVLLWARLNATLQTGLKNPLDEAIAGVPGEGASLAAFTKVDEIPYDFIRKRLSVVVRPKDAQDLLITKGAVQNVLETCSFVRTAKGLEPLNEMHRAAIDEKFRRWSADGFRVLGLAIRRFESQKTFSRKDEIDLTFAGFLLFLDPPKKGVKETLAELAQRGIAVKVISGDNRYVAAHLAQAIGLRADRIMTGEELSKLTKSALFAGVQHTDLFVEIDPNQKERIVQALRSRGRVVGYLGDGINDAPALHEADIGISVDSAVDVAREAADIILLKQDLGVLVRGVDDGRKTFANTMKYISITTSANFGNMISMAVASLFLPFLPLLAKQILLNNFLSDVPSLAIASDNVDPDQLRRPRHWDIRFVRRFMISFGLVSSLFDFATFAFLLFFARATEAAFQTAWFVESLLTELAIVLIVRTHRAFWASRPSPLLAWLTLAVGIVAIMIPYLPFAAWFGFVPLPLPVLVGLVAITALYLLASEATKRWFFGQESRARKKKLLAGQRSFLDRLVAKV

SEQ ID NO: 22394 - protein, 1103 aa, Dunaliella acidophila
MSGKERTEENGAVKQDTKEQVKKSADNGDKGVDEVDFAKIGLEDAFKYLNCSEHGLSGAEAEARLKQHGPNKLPDNSRNPVLVYFGYMWNPLAWAMEAAAIIAIALVDGADFALIVGLLIINATISFVEESNADKAIKALSAALAPKAMALRNGAMVTIDAVDLVPGDVILIRIGNVVPADVKLLPEHGADDYETPVQIDQAALTGESLPAKKFTGNVAFSGSTVKQGERHAVVYATGVNTFFGRAAALISGTHNVANIQRVMNRIGGLCLITIGVWVVIEVPVQFAHYKHSCVAGKEGCPTLLNMLVILVGAIPIAMPTVLSVTLALGAYKLAREGAIVTRMSAVEEMAGLDVLCSDKTGTLTLNKLSIDPSNVFPVGTMDIPEVMKFGALSANIITEEPIDMVLWESYPEREKLKSEYKHTKYFPFNPNDKITIATVLEIATGRVFRVLKGSPQVVLAKAWNAQALDGPVNEKIKEYAGRGFRSLGIAMAEGDGKDGTKWEMLAVLPMFDPPRHDTKETIERCMKQGIAVKMVTGDHLLIGKETAKMLGMGTEMYPSEVLIKARNGDVEAPHGYKNYVAMVEACNGFAQVFPEHKFEIVEILQEAHHRVGMTGDGVNDAPALKKAHVGVAVADATDAARGAADIVLTEPGLSTIVTAVIGARKIFKRMTTYAKYTISVTFRIAFTFGLLTVIYDWYFPTILIVILAVFNDGAMIALSKDRVVASVLPSTWNLATIFVPGFVYAMWLTLSSWALYQVATHSTFFERMTPLPSLNTQHATLISWCEDEISSKLGVNPQDSLCTYPSYADQLNECKGSVSLSSQVPGVPTILDQCVTEQRYIRDALTRALIYTHLSVSGQAVVFVVRTSGFSLKEVAGVSTYVAFALAQFGATMFGIFGLGGYNKPRQNFDNCQFCDYSTHNRVLFFNSEVEPRAGTESVYTASVIGCGGYVIVAWIWAALFYTALDPLKWGLMWIMNDDGFRDRHAWRKSNHEAMERRSREQLDNKEFAGPSGMVPANFSNPLGRASMSKPVSALLDRKSASLVAINRSSMTVSHDPNHALNIGRRSMIGRPSGPLGRNSNTGQSNPLNSSSVEIKPDAPNKV

SEQ ID NO: 22395 - protein, 822 aa, Glycine max
  unsure (1)..(822): unsure at all Xaa locations
XPRVRPRVRPRVXAHASAHASADAWVISIKLGDIIPADARLLEGDPLSVDQSALTGESLPVTKSPSDEVFSGSTVKKGEIEAVVIATGVHTFFGKAAHLVDSTNQVGHFQKVLTAIGNFCICSIAVGIVIELIVMYPIQHRRYRDGIDNLLVLLIGGIPIAMPTVLSVTMAIGSHRLSQQGAITKRMTAIEEMAGMDVLCSDKTGTLTLNKLSVDRNLIEVFAKGVEKEYVILLAARASRTENQDAIDAAIVGMLADPKEARAGIREVHFLPFNPVDKRTALTYIDSDGNWHRSSKGAPEQILNLCNCKEDVRKRVHGTIDKFAERGLRSLGVARQEVPEKTKDSPGAPWQFVGLLPLFDPPRHDSAETITRALNLGVNVKMITGDQLAIGKETGRRLGMGTNMYPSSALLGQSKDAAISALPVDELIEKADGFAGVFPEHKYEIVKRLQERKHICGMTGDGVNDAPALKKADIGIAVADATDAARSASDIVLTEPGLSVIISAVLTSRAIFQRMKNYTIYAVSITIRIVFGFMFIALIWKFDFAPFMVLIIAILNDGTIMTISKDRVKPSPMPDSWKLREIFATGVVLGSYMALMTVVFFWVMKDTDFFSDKFGVRPLRNSPGEMMAALYLQVSIISQALIFVTRSRSWSFVERPGLLLLGAFFIAQLVATFIAVYANWGFARIKGMGWGWAGVIWLYSVVTYIPLDILKFAIRYVLSGKAWDNLLENKTAFTTKKDYGKEEREAQWATAQRTLHGLQPPETTNLFNDKNSYRELSEIAEQAKRRAEVARLRELHTLKGHVESVVKLKGLDIDTIQQHYTV

SEQ ID NO: 22396 - protein, 527 aa, Glycine max
  unsure (1)..(527): unsure at all Xaa locations
XPEQILNLAHNKSDIERRVHAVIDKFAERGLRSLAVAFQDVPDGRKESPGGPWQFIGLLSLFDPPRHDSAETIRRALNLGVNVKMITGDQLAIGKETGRRLGMGTNMYPSSALLGQDKDESIVALPIDELIEKADGFAGVFPEHKYEIVKRLQARKHICGMTGDGVNDAPALKKADIGIAVADATDAARSASDIVLTEPGLSVIISAVLTSRAIFQRMKNYTIYAVSITIRIVLGFMLLALIWKFDFPPFMVLIIAILNDGTIMTISKDRVKPSPLPDSWKLAEIFTTGVVLGSYLAMMTVIFFWAAYKTNFFPRVFGVSTLEKTAHDDYRKLASAIYLQVSTISQALIFVTRSRGWSYVERPGILLVTAFVIAQLIATLIAVYANWSFAAIEGIGWGWAGVIWLYNIIFYIPLDPIKFLIRYALSGRAWDLVIEQRIAFTRQKDFGKEQRELQWAHAQRTLHGLQPADTKFNERTHVSELNQMAEEAKRRAEIARLRELHTLKGHVESVVRLKGLDIDTIQQAYTL

SEQ ID NO: 22397 - protein, 350 aa, Glycine max
  unsure (1)..(350): unsure at all Xaa locations
MGGISLEEIKNENVDLERIPIEEVFEQLKCSRAGLTSEEGANRLQVFGPNKLEEKKESKFLKFLGFMWNPLSWVMEAAAIMAIALANGGGRPPDWQDFVGIIALLVINSTISFIEENNAGNAAAALMAGLAPKTKVLRDNRWSEQDAAILVPGDIISIKLGDIIPADARLLEGDPLSVDQSALTGESLPVTKSPSDEVFSGSTVKKGEIEAVVIATGVHTFFGKAAHLVDSTNQVGHFQKVLTAIGNFCICSIAVGIIIELIVMYPIQHRKYRDGIDNLLVLLIGGIPIAMPTVLSVTXXAIGSHRLSQQGAITKRMTAIEEMAGXMDVLCSDKTGTLTLXKLSVDXNLI

SEQ ID NO: 22398 - protein, 966 aa, Medicago truncatula
MVEGTMSLDAVIKEAVDLENIPIDEVFDNLKCTKEGLTCEEVQERLELFGYNKLEEKKESKILKFLGFMWNPLSWVMEAAAIMAIAMAHGGRNMDGTKKQGDYQDFVGIIILLIINSTISFIEENNAGNAAAALMARLAPKAKVLRDGKWSEEDASVLVPGDIVSIKLGDIIPADARLLEGDPLKIDQSALTGESLPVTKHPGEGIYSGSTCKQGEIEAIVIATGVHTFFGKAAHLVENTTHVGHFQKVLTSIGNFCICSIAIGMVIEIIVIYGVHGKGYRNGIDNLLVLLIGGIPIAMPTVLSVTMAIGSHKLSQQGAITKRMTAIEEMAGMDVLCSDKTGTLTLNKLTVDKDMIEVFAKGVDKDLVVLMAARASRLENQDAIDCAIVSMLADPKEARTGIKEVHFLPFNPTDKRTALTYIDAAGNMHRVSKGAPEQILNLARNKAEIAQKVHSMIDKFAERGLRSLGVARQEVPEGSKDSPGGPWEFVALLPLFDPPRHDSAETIRRALDLGVSVKMITGDQLAIGKETGRRLGMGTNMYPSSSLLGDNKDQLGAVSIDDLIENADGFAGVFPEHKYEIVKRLQARKHICGMTGDGVNDAPALKIADIGIAVADSTDAARSASDIVLTEPGLSVIISAVLTSRAIFQRMKNYTIYAVSITIRIVLGFMLLNSFWSFDSPPFMVLIIAILNDGTIMTISKDRVKPSPLPDSWKLSEIFATGVILGTYLAIMTVIFFWIVMETNFFPDNFGVHRFRPDLKAPVTSEMTEKLASAVYLQVSTISQALIFVTRSRGWSYTERPGLLLVFAFAIAQLVATVISAQATWKIAGIRGIGWGWAGVIWLFNIVTYVFLDPLKFVVAYQQSGRAWNLVVNQRTAFTNKNDFGKEAREAAWAAEQRTLHGLRSAEIKGFAEKHNHREINTMADEAKRRAGLARLRELHTLKGRVESFAKLRGLDIDTMNGHYTV

SEQ ID NO: 22399 - protein, 965 aa, Medicago truncatula
MVEGTMSLDAVIKEAVDLENIPIDEVFDNLKCTKEGLTCEEVQERLELFGYNKLEEKKESKILKFLGFMWNPLSWVMEAAAIMAIAMAHGGRNMDGTKKQGDYQDFVGIIILLIINSTISFIEENNAGNAAAALMARLAPKAKVLRDGKWSEEDASVLVPGDIVSIKLGDIIPADARLLEGDPLKIDQSALTGESLPVTKHPGEGIYSGSTCKQGEIEAIVIATGVHTFFGKAAHLVENTTHVGHFQKVLTSIGNFCICSIAIGMVIEIIVIYGVHGKGYRNGIDNLLVLLIGGIPIAMPTVLSVTMAIGSHKLSQQGAITKRMTAIEEMAGMDVLCSDKTGTLTLNKLTVDKDMIEVFAKGVDKDLVVLMAARASRLENQDAIDCAIVSMLADPKEARTGIKEVHFLPFNPTDKRTALTYIDAAGNMHRVSKGAPEQILNLARNKAEIAQKVHSMIDKFAERGLRSLGVARQEVPEGSKDSPGGPWEFVALLPLFDPPRHDSAETIRRALDLGVSVKMITGDQLAIGKETGRRLGMGTNMYPSSSLLGDNKDQLGAVSIDDLIENADGFAGVFPEHKYEIVKRLQARKHICGMTGDGVNDAPALKIADIGIAVADSTDAARSASDIVLTEPGLSVIISAVLTSRAIFQRMKNYTIYAVSITIRIVLGFMLLNSFWSFDSPPFMVLIIAILNDGTIMTISKDRVKPSPLPDSWKLSEIFATGVILGTYLAIMTVIFFWIVMETNFFPNFGVHRFRPDLKAPVTSEMTEKLASAVYLQVSTISQALIFVTRSRGWSYTERPGLLLVFAFAIAQLVATVISAQATWKIAGIRGIGWGWAGVIWLFNIVTYVFLDPLKFVVAYQQSGRAWNLVVNQRTAFTNKNDFGKEAREAAWAAEQRTLHGLRSAEIKGFAEKHNHREINTMADEAKRRAELARLRELHTLKGRVESFAKLRGLDIDTMNGHYTV

SEQ ID NO: 22400 - protein, 268 aa, Medicago truncatula
CSDKTGTLTLNKLSVEQNLIEVFAKGVEKDYVILLAARASRTENQDAIDAAIVGMLADPKEARAGVREVHFFPFNPVDKRTALTYIDADGNWHRSSKGAPEQILNLCNCKEDVRKKAHSTIDKFAERGLRSLGVARQEIPEKDKDSPGAPWQFVGLLPLFDPPRHDSAETITRALNLGVNVKMITGDQLAIAKETGRRLGMGTNMYPSSSLLGQSKDAAVFALPVDELIEKADGFAGVFPDTKYWNKRKLQERKTYMWEMTGGGKNDA

SEQ ID NO: 22401 - protein, 266 aa, Medicago truncatula
  unsure (1)..(266): unsure at all Xaa locations
CSDKTGTLPLNKLTVDQNLVEVFAKGVDADAVVLMAARASRLENQDAIDTAIVGMLADPKEARAGIQEVHFLPFNPTDKRTALTYIDQDGKMHRVSKGAPEQILNLAHNRTDIERRVHSVIDKFAERGLRSLAVATKXVPDGRKESPGTPWQFIGLMPLFDPPRHDSAETIRRALNLGVNVKMITGDQLAIGKETGRRLGMGTNMYPSSALLGQNKDESIAALPVDDLIEKADGFAGVFLEHKYEIVKRLQARKHICDDRGWSKRS

SEQ ID NO: 22402 - protein, 951 aa, Phaseolus vulgaris
MGGISLEEIKNENVDLERIPIEEVFEQLKCSRAGLTSDEGANRLQVFGPNKLEEKKESKFLKFLGFMWNPLSWVMEAAAIMAIALANGGGRPPDWQDFVGIIALLVINSTISFIEENNAGNAAAALMAGLAPKTKVLRDGRWSEQDAAILVPGDIISIKLGDIIAADARLLEGDPLSVDQSALTGESLPVTKSSSDEVFSGSTVKKGEIEAVVIATGVHTFFGKAAHLVDSTNQVGHFQKVLTAIGNFCICSIAIGIAIELIVMYPIQHRKYRDGIDNLLVLLIGGIPIAMPTVLSVTMAIGSHRLSQQGAITKRMTAIEEMDGMDVLCSDKTGTLTLNKLSVDRNLIEVFAKGVEKEYVILLAARASRTENQDAIDAAIVGMLADPKEARSGIREVHFLPFNPVDKRTALTYIDSDGNWHRSSKGAPEQIITLCNCKEDVRKKVHAVIDKFAERGLRSLGVARQEVPEKSKDGAGGPWQFVGLLPLFDPPRHDSAETIRRALNLGVNVKMITGDQLAIGKETGRRLGMGTNMYPSSALLGQDKDASISALPVDELIDKADGFAGVFPEHKYEIVKRLQERKHICGMTGDGVNDAPALKKADIGIAVADATDAARSASDIVLTEPGLSVIISAVLTSRAIFQRMKNYTIYAVSITIRIVFGFLFIALIWKFDFAPFMVLIIAILNDGTIMTISKDRVKPSPLPDSWKLREIFATGVVLGSYMALMTVIFFWAMKDTNFFSNKFGVRSLRLSPEEMMAALYLQVSIISQALIFVTRSRSWSFAERPGLLLLGAFLIAQLVATFIAVYANWGFARIKGMGWGWAGVIWLYSVVTYIPLDILKFAIRYILSGKAWDNLLENKTAFTTKKDYGKEEREAQWAAAQRTLHGLQPPETSNLFNDKNSYRELSEIAEQAKRRAEVARLRELHTLKGHVESVVKLKGLDIDTIQQHYTV

SEQ ID NO: 22403 - protein, 245 aa, Sesbania rostrata
TVDKNLIEVFAKGVEKEYVILLAARASRTENQDAIDAAIVGMLADPKEARAGIREVHFLPFNPVDKRTALTYIDSDGNWHRSSKGAPEQILNLCNCKEDVRKRVHTAIDKFAERGLRSLGVARQEVPEKNKDSPGAPWQFVALLPLFDPPRHDSAETITRALNLGVNVKMITGDQLAIAKETGRRLGMGTNMYPSSSLLGQSKDASVSALPVDELIEKADGFAGVFPEHKYEIVKRLQERKHICG

SEQ ID NO: 22404 - protein, 245 aa, Sesbania rostrata
TVDKNLIEVFAKGVDKEHVLLLAARASRTENQDAIDAAVVGTLADPKEARAGIREVHFFPFNPVDKRTALTYIDSDGNWHRASKGAPEQIMTLCNLRDDAKKKIHAIIDKFAERGLRSLAVARQEVPEKSKDSAGGPWQFVGLLSLFDPPRHDSAETIRRALNLGVNVKMITGDQLAIAKETGRRLGMGTNMYPSASLLGQDKDASIAALPIEELIEKADGFAGVFPEHKYEIVKKLQERKHICG

SEQ ID NO: 22405 - protein, 245 aa, Sesbania rostrata
TVDKNLIEVFAKGVDKEHVLLLAARASRTENQDAIDAAVVGTLADPKEARAGIREVHFFPFNPVDKRTALTYIDSDGNWHRASKGAPEQIMTLCNLRDDAKKKIHAMIDKFAERGLRSLAVARQEVPEKSKESAGGPWQFVGLLSLFDPPRHDSAETIRRALHLGVNVKMITGDQLAIAKETGRRLGMGTNMYPSATLLGQGKDSNIAALPVEELIEKADGFAGVFPEHKYEIVKKLQERKHICG

SEQ ID NO: 22406 - protein, 245 aa, Sesbania rostrata
TVDKNLVEVFAKGVDADTVVLMAARASRLENQDAIDTAIVGMLADPKEARAGIQEVHFLPFNPTDKRTALTYIDQDGKMHRVSKGAPEQILNLAHNKTDIERRVHAVIDKFAERGLRSLAVAYQEVPDGRKESAGGPWQFIGLMPLFDPPRHDSAETIRRALNLGVNVKMITGDQLAIGKETGRRLGMGTNMYPSSALLGQDKDESIAALPIDELIEKADGFAGVFPEHKYEIVKRLQARKHICG

SEQ ID NO: 22407 - protein, 245 aa, Sesbania rostrata
TVDKNLVEVFAKGVDADTVVLMAARASRLENQDAIDTAIVGMLADPKEARVGIQEIHFLPFNPTDKRTALTYIDRDGKMHRVSKGAPEQILNLAHNKSDIERRVHVVIDKFAERGLRSLAVAYQEVPDGRKESAGGPWQFIGLMPLFDPPRHDSAETIRRALNLGVNVKMITGDQLAIGKETGRRLGMGTNMYPSSALLGQDKDESISALPIDELIEKADGFAGVFPEHKYEIVKRLQARKHICG

SEQ ID NO: 22408 - protein, 951 aa, Vicia faba
MGGISLEEIKNENVDLERIPVEEVFEQLKCSKEGLSSDEGANRLQVFGPNKLEEKKESKFLKFLGFMWNPLSWVMEAAAIMAIALANGSGRPPDWQDFVGIISLLVINSTISFIEENNAGNAAAALMAGLAPKTRVLRDGRWSEEDTAILVPGDIISIKLGDIIPADARLLEGDALSVDQSALTGESLPATKNPSDESFSGSTVKKGEIEAVVIATGVHTFFGKAAHLVDNTNQVGHFQKVLTAIGNFCICSIALGILIELVVMYPIQHRKYRDGIDNLLVLLIGGIPIAMPTVLSVTMAIGSHRLSQQGAITKRMTAIEEMAGMDVLCSDKTGTLTLNKLSVDKNLIEVFAKNVEKDYVILLAARASRTENQDAIDAAIVGMLANPKEARAGVREIHFFPFNPVDKRTALTYIDSDGNWHRSSKGAPEQILNLCNCKEDVRKKAHSVIDKFAERGLRSLGVARQEVPEKNKDSPGAPWQFVGLLPLFDPPRHDSAETITRALNLGVNVKMITGDQLAIAKETGRRLGMGTNMYPSSSLLGQSKDAAVAALPVDELIEKADGFAGVFPEHKYEIVKRLQERKHICGMTGDGVNDAPALKRADIGIAVADATDAARGASDIVLTEPGLSVIISAVLTSRAIFQRMKNYTIYAVSITIRIVFGFMFIALIWKFDFAPFMVLIIAILNDGTIMTISKDRVKPSPLPDSWKLKEIFATGVVLGSYMALMTVVFFWLMKDTDFFSDKFGVRSIRKNPDEMMAALYLQVSIISQALIFVTRSRSWSFLERPGLLLLGAFMIAQLVATFIAVYANWGFARIKGMGWGWAGVIWVYSLVTYFPLDILKFVIRYVLSGKAWDNLLENKTAFTTKKDYGKEEREAQWATAQRTLHGLQSPETTNLFNDKNSYRELSEIAEQAKRRAEVARLRELHTLKGHVESVVKLKGLDIDTMQQHYTV

SEQ ID NO: 22409 - protein, 952 aa, Vicia faba
MATNKSITLEEIKNETVDLEHIPVEEVFEQLKCTKEGLSLEEGANRLQIFGPNKLEEKKESKLLKFLGFMWNPLSWVMEAAALMAIGLANGDGKPPDWQDFVGIVCLLVINSTISFIEENNAGNAAAALMAGLAPETKVLRDGKWSEQEAAILVPGDIISIKLGDIVPADARLLEGDPLKIDQSALTGESLPVTRSPGQEVFSGSTCKQGEIEAVVIATGVHTFFGKAAHLVDSTNQVGHFQKVLTAIGNFCICSIAVGMLAEIIVMYPIQHRKYRDGIDNLLVLLIGGIPIAMSTVLSVTTAIGSHRLSQQGAITKRMTAIEEMAGMDVLCSDKTGTLTLNKLSVDKNLIEVFEKGVDKEHVMLLAARASRIENQDAIDAAIVGTLADPKEARAGVREVHFLPFNPVDKRTALTYIDSNGNWHRASKGAPEQIMNLCNLREDAKRNIHAIIDKFAERGLRSLAVSRQEVPEKTKESAGGPWQFVGLLSLFDPPRHDSAETIRRALHLGVNVKMITGDQLAIAKETGRRLGMGTNMYPSATLLGQDKDASIAALPVEELIEKADGFAGVFPEHKYEIVKKLQERKHICGMTGDGVNDAPALKKADIGIAVADATDAARGASDIVLTEPGLSVIISAVLTSRAIFQRMKNYTIYAVSITIRIVFGFMFIALIWKFDFSPFMVLIIAILNDGTIMTISKDRVVPSPLPDSWKLNEIFATGIVLGGYLALMTVIFFWAIKETHFFPDKFGVRHLIHDEMMSALYLQVSIVSQALIFVTRSRGWSFLERPGALLVIAFLIAQLIATLIAVYANWGFAKVQGIGWGWAGVIWLYSIVFYIPLDVMKFAIRYILSGKAWNNLLDNKTAFTTKKDYGKEEREAQWAHAQRTLHGLQPPESSGIFNEKSSYRELSEIAEQAKRRAEVARLRELHTLKGHVESVVKLKGLDIDTIQQHYTV

SEQ ID NO: 22410 - protein, 963 aa, Vicia faba
FFSFSHNMAAISLEQIKNESVDLEKIPIEEVFAQLKCTREGLSSTEGESRIQIFGPNKLEEKKESKFLKFLGFMWNPLSWVMEAAAVMAIALANGGGQPPDWQDFVGIVCLLVINSTISFIEENNAGNAAAALMAGLAPKTKVLRDGKWSEQEAAILVPGDIISIKLGDIIPADARLLEGDPLKVDQAALTGESLPVTRHPGQEVFSGSTCKQGEIEAVVIATGVHTFFGKAAHLVDNTNNVGHFQMVLKSIGNFCICSIAVGMLAEIIVMYPIQHRKYRDGIDNLLVLLIGGIPIAMPTVLSVTMAIGSHKLSQQGAITKRMTAIEEMAGMDVLCSDKTGTLTLNKLSVDRNLIEVFIKGMDKEHVILLAARAARTENQDAIDAAIVGMLADPKEARAEITEVHFLPFNPNDKRTALTYIDNKDGTWHRASKGAPEQIIELCNMREDAQKKIHSMIEKFAERGLRSLGVARQEVPEKTKESAGAPWQFVGLLSVFDPPRHDSAETIRQALNLGVNVKMITGDQLAIAKETGRRLGMGTNMYPSATLLGLDKDSSVASMPVEELIEKADGFAGVFPEHKYEIVKKLQERKHICGMTGDGVNDAPALKKADIGIAVADATDAARGASDIVLTEPGLSVIISAVLTSRAIFQRMKNYTIYAVSITIRIVFGFMFIALIWKFDFSPFMILIIAILNDGTIMTISKDRVKPSPLPDSWKLKEIFATGVMLGGYQALMTVIFFWIVQGTKFFPDRFGVRHIHDNPDELTAALYLQVSIVSQALIFVTRSRSGLMLNAPGLLLLGAFLIAQLIATLIAVYANWAFARIQGIGWGWAGVIWLYSIIFYIPLDIIKFATRYFLSGKAWSNLENKTAFTTKKDYGKGEREAQWAHAQRTLHGLEPPESSGIFHEKNSYRELSEIAEQAKRRAEVARLRELHTLKGHVESVVKLKGLDIDTIQQHYTVYKGNT

SEQ ID NO: 22411 - protein, 956 aa, Vicia faba
MAAISLEQIKNESVDLEKIPIEEVFAQLKCTREGLSSTEGESRIQIFGPNKLEEKKESKFLKFLGFMWNPLSWVMEAAAVMAIALANGGGQPPDWQDFVGIVCLLVINSTISFIEENNAGNAAAALMAGLAPKTKVLRDGKWSEQEAAILVPGDIISIKLGDIIPADARLLEGDPLKVDQAALTGESLPVTRHPGQEVFSGSTCKQGEIEAVVIATGVHTFFGKAAHLVDNTNNVGHFQMVLKSIGNFCICSIAVGMLAEIIVMYPIQHRKYRDGIDNLLVLLIGGIPIAMPTVLSVTMAIGSHKLSQQGAITKRMTAIEEMAGMDVLCSDKTGTLTLNKLSVDRNLIEVFIKGMDKEHVILLAARAARTENQDAIDAAIVGMLADPKEARAEITEVHFLPFNPNDKRTALTYIDNKDGTWHRASKGAPEQIIELCNMREDAQKKIHSMIEKFAERGLRSLGVARQEVPEKTKESAGAPWQFVGLLSVFDPPRHDSAETIRQALNLGVNVKMITGDQLAIAKETGRRLGMGTNMYPSATLLGLDKDSSVASMPVEELIEKADGFAGVFPEHKYEIVKKLQERKHICGMTGDGVNDAPALKKADIGIAVADATDAARGASDIVLTEPGLSVIISAVLTSRAIFQRMKNYTIYAVSITIRIVFGFMFIALIWKFDFSPFMILIIAILNDGTIMTISKDRVKPSPLPDSWKLKEIFATGVMLGGYQALMTVIFFWIVQGTKFFPDRFGVRHIHDNPDELTAALYLQVSIVSQALIFVTRSRSGLMLNAPGLLLLGAFLIAQLIATLIAVYANWAFARIQGIGWGWAGVIWLYSIIFYIPLDIIKFATRYFLSGKAWSNLENKTAFTTKKDYGKGEREAQWAHAQRTLHGLEPPESSGIFHEKNSYRELSEIAEQAKRRAEVARLRELHTLKGHVESVVKLKGLDIDTIQQHYTVYKGNT

SEQ ID NO: 22412 - protein, 948 aa, Oryza sativa (japonica cultivar-group)
MTGRAHPPIVIENIPIEEVFEQLKCTREGLSSEEGNRRIEMFGPNKLEEKKESKILKFLGFMWNPLSWVMEMAAIMAIALANGGGKPPDWEDFVGIIVLLVINSTISFIEENNAGNAAAALMANLAPKTKVLRDGRWGEQEAAILVPGDIISIKLGDIVPADARLLEGDPLKIDQSALTGESLPVTKNPGDEVFSGSTCKQGEIEAVVIATGVHTFFGKAAHLVDSTNQVGHFQTVLTAIGNFCICSIAVGIVIEIIVMFPIQHRAYRSGIENLLVLLIGGIPIAMPTVLSVTMAIGSHKLSQQGAITKRMTAIEEMAGMDVLCSDKTGTLTLNKLSVDKNLVEVFTKGVDKDHVLLLAARAFRTETQDAIDAAMVGMLADPKEARAGIREVHFLPFNPVDKGTALTYIDADGNWHRASKGAPEQILTLCNCKEDVKRKVHAVIDKYAERGLRSLAVARQEVPEKSKESAGGPWQFVGLLPLFDPPRHDSAETIRKALHLGVNVKMITGDQLAIGKETGRRLGMGTNMYPSSALLGQNKDASLEALPVDELIEKADGFAGVFPEHKYEIVKRLQEKKHIVGMTGDGVNDAPALKKADIGIAVADATDAARSASDIVLTEPGLSVIISAVLTSRCIFQRMKNYTIYAVSITIRIVLGFLLIALIWKYDFSPFMVLIIAILNDGTIMTISKDRVKPSPLPDSWKLKEIFATGIVLGSYLALMTVIFFWAMHKTDFFTDKFGVRSIRNSEHEMMSALYLQVSIVSQALIFVTRSRSWSFIERPGLLLVTAFMLAQLVATFLAVYANWGFARIKGIGWGWAGVIWLYSIVFYFPLDIFKFFIRFVLSGRAWDNLLENKIAFTTKKDYGREEREAQWATAQRTLHGLQPPEVASNTLFNDKSSYRELSEIAEQAKRRAEIARLRELNTLKGHVESVVKLKGLDIDTIQQNYTV

SEQ ID NO: 22413 - protein, 997 aa, Cryptococcus neoformans var. neoformans
MSDHEKVGHTEEIPTKESSLENKVQGEEVPAAAAADEEPRKKREYKEMEHKTEGDLHAKVDMNTIQFTAADLYDKDKVDIEHVVMEEVYQLLQCTDAGLTEAEATDRIGIFGPNKLEEKSENVLLQFLSFMWNPLSWVMEGAALVAIALSNGGGTPPDWQDFVGIILLLFVNSTIGFVEERNAGNAVKALMDSLAPKARVKRDGQWKEIESSELVPGDLIAFKHGDVCPSDCRLVEAIDVSMDQAALTGESLPVGKHEGDECFSGSTCKQGEAEGIVIATGPNTFFGRAATLVGQDNDQVGHLQQVLARIGTFCLVSIGIFVLLEILILYADFRYPYRRGLDNILVLLIGGIPIAMPTVLSVTLAVGAQQLAKHKAIVTRITAIEELAGVTILCSDKTGTLTTNKLTIDKENVKCYSKWDVEGVCLLAAYASRTENQDAIDGCVVGTLPDPQQARAGIKLLDFKPFNPVDKRTEITYRDEMDGGKLKRATKGMTGIIIEICTRNKTNELEDQLEADVEEFARRGLRALAVAFEDVAGDDPSAEGNGFELVGLLSIFDPPRSDTKKTIDDAMALGVKVKMVTGDQLAIAKETGRRLGLGDHMYPAKVLKEGPEAGSKHANLDEMIMDADGFAGVFPEHKFEIVKRIQNLGHLCAMTGDGANDAPALSRANVGIAVEGATDAARGAADIVLTEPGLSTIVHAIYGSRVIFQRMRNYAIYACAVTIRIVLCFAIMAFAWRFDFPPFMVLIIAVLNDGTIMTLSLDRVLPSTTPDSWDLAEVFSFGVAYGVYLSASTIALYATMENTTFFEDRFGVEPLKGNSYGGHMVIYLQVAIISQALIFVTRSHGPSWTERPSVALMLAFCLAQLVSSIIAAYADWSFSQVHSVSGGWIGIVWIWNIVWYFPLDGIKFIMKKTVIAALQRRKARKAGPAVADAALHRAPSRHESLYSNRTNFLTRAANRLRGGAKISMSQNELQRFSSIQAQQSGAALTRAHSRPAA

SEQ ID NO: 22414 - protein, 952 aa, Lycopersicon esculentum
MAKAISLEEIKNETVDLEKIPIEEVFEQLKCSREGLTSDEGANRLQIFGPNKLEEKKESKILKFLGFMWNPLSWVMEMAAIMAIALANGDGKPPDWQDFVGIVCLLVINSTISFIEENNAGNAAAALMAGLAPKTKVLRDGRWSEQEAAILVPGDIISVKLGDIVPADARLLEGDPLKIDQSALTGESLPVTKNPGDEVFSGSTCKQGELEAVVIATGVHTFFGKAAHLVDSTNNVGHFQKVLTAIGNFCICSIAIGMLVEIIVMYPIQHRKYRDGIDNLLVLLIGGIPIAMPTVLSVTMAIGSHRLSQQGAITKRMTAIEEMAGMDVLCSDKTGTLTLNKLSVDRSLVEVFTKGVDKEYVLLLAARASRVENQDAIDACMVGMLADPKEARAGIREVHFLPFNPVDKRTALTYIDSNGNWHRASKGAPEQILDLCNCKEDVRRKVHSMIDKYAERGLRSLAVARQEVPEKSKESTGGPWQFVGLLPLFDPPRHDSAETIRRALNLGVNVKMITGDQLAIAKETGRRLGMGTNMYPSASLLGQDKDSSIASLPVEELIEKADGFAGVFPEHKYEIVKKLQERKHIVGMTGDGVNDAPALKKADIGIAVADATDAARGRSDIVLTEPGLSVIISAVLTSRAIFQRMKNYTIYAVSITIRIVFGFMLIALIWKYDFSAFMVLIIAILNDGTIMTISKDRVKPSPMPDSWKLNEIFATGVVLGGYQALMTVIFFWAMHDTSFFTDKFGVKDIRESDEEMMSALYLQVSIISQALIFVTRSRSWSFVERPGALLMIAFLIAQLVATLIAVYADWTFARVKGCGWGWAGVIWIFSIVTYFPLDIMKFAIRYILSGKAWNNLLDNKTAFTTKKDYGKEEREAQWALAQRTLHGLQPPEASNLFNEKNSYRELSEIAEQAKRRAEMARLRELHTLKGHVESVVKLKGLDIETIQQHYTV

SEQ ID NO: 22415 - protein, 952 aa, Nicotiana plumbaginifolia
MAKAISLEEIKNETVDLEKIPIEEVFEQLKCTREGLSADEGASRLQIFGPNKLEEKNESKILKFLGFMWNPLSWVMEAAAVMAIALANGDGKPPDWQDFIGIICLLVINSTISFIEENNAGNAAAALMAGLAPKTKVLRDGRWSEQEAAILVPGDIISVKLGDIIPADARLLEGDPLKIDQSALTGESLPVTKNPGDEVFSGSTCKQGELEAVVIATGVHTFFGKAAHLVDSTNNVGHFQKVLTAIGNFCICSIAIGMLVEIIVMYPIQHRKYRDGIDNLLVLLIGGIPIAMPTVLSVTMAIGSHRLSQQGAITKRMTAIEEMAGMDVLCSDKTGTLTLNKLSVDRNLVEVFAKGVDKEYVLLLAARASRVENQDAIDACMVGMLADPKEARAGIREVHFLPFNPVDKRTALTYIDNNNNWHRASKGAPEQILDLCNAKEDVRRKVHSMMDKYAERGLRSLAVARRTVPEKSKESPGGRWEFVGLLPLFDPPRHDSAETIRRALNLGVNVKMITGDQLAIAKETGRRLGMGTNMYPSASLLGQDKDSAIASLPIEELIEKADGFAGVFPEHKYEIVKKLQERKHIVGMTGDGVNDAPALKKADIGIAVADATDAARGASDIVLTEPGLSVIISAVLTSRAIFQRMKNYTIYAVSITIRIVFGFMFIALIWKYDFSAFMVLIIAILNDGTIMTISKDRVKPSPMPDSWKLKEIFATGVVLGGYQALMTVVFFWAMHDTDFFSDKFGVKSLRNSDEEMMSALYLQVSIISQALIFVTRSRSWSFLERPGMLLVIAFMIAQLVATLIAVYANWAFARVKGCGWGWAGVIWLYSIIFYLPLDIMKFAIRYILSGKAWNNLLDNKTAFTTKKDYGKEEREAQWALAQRTLHGLQPPEATNLFNEKNSYRELSEIAEQAKRRAEMARLRELHTLKGHVESVVKLKGLDIETIQQHYTV

SEQ ID NO: 22416 - protein, 954 aa, Nicotiana plumbaginifolia
MADQKGTVSLDDIKKENVDLERIPVDDVFRILISSKEGLASDEAERRLVVFGANKLEEKKENKILKFFGFMWNPLSWVMEVAAVIAIALANGQNRPPDWQDFLGIVVLLVINSTVSFIEENNAGNAAAALMAGLAPKSKVLRDGSWKEMDAAMLVPGDVISIKLGDILPADARLLEGDPLKIDQSALTGESLPVTKHPGEGVFSGSTCKQGEIEAVVIATGISTFFGKAAHLVDSTNNVGHFQKVLTAIGNFCICSILVGIVIEILVMYPIQHRKYRDGIDNLLVLLIGGIPIAMPTVLSVTMAIGSHKLSQQGAITKRMTAIEEMAGMDVLCSDKTGTLTLNKLEVDKNLVEVFAKDIDQDTVILLGARASRVENQDAIDACIVGMLADAKEARAGIQEVHFLPFNPVDKRTAITYIDANGNWHRVSKGAPEQIIELCGLSEDVKRRAHSVIDKFADRGLRSLAVAQQTVPERTKESPGGPWLFVGLLPLFDPPRHDSAETIRRALVLGVNVKMITGDQLAIAKETGRRLGMGTNMYPSSSLLGQHKDENTANLPVDELIEMADGFAGVFPEHKYEIVKKLQERKHICGMTGDGVNDAPALKKADIGIAVADATDAARGASDIVLTEPGLSVIVSAVLTSRAIFQRMKNYTIYAVSITIRIVLGFMLIALIWKFDFSPFMVLIIAILNDGTIMTISKDKVKPSPMPDSWKLREIFATGIVLGTYLAVMTVIFFWAAHQSNFFSDKFGVRSIRDNVHELNSALYLQVSIVSQALIFVTRSRSWSYVERPGLLLLAAFAIAQLVATLIAVYANWGFARIHGIGWGWAGVIWLYSIIFYIPLDILKFAIRYTLSGRAWNNMMENKVAFTSKKDYGKGEREAQWALAQRTLHGLQAPDSSQVFDNKSYKELSEIAEQAKRRAEVARLRELHTLKGHVESVVKLKGLDIETIQQHYTV

SEQ ID NO: 22417 - protein, 952 aa, Solanum tuberosum
MAKAISLEEIKNETVDLEKIPIEEVFEQLKCSREGLTSDEGANRLQIFGPNKLEEKKESKILKFLGFMWNPLSWVMEAAAIMAIALANGNGKPPDWQDFVGIVCLLVINSTISFIEENNAGNAAAALMAGLAPKTKVLRDGRWSEQEAAILVPGDIISVKLGDIVPADARLLEGDPLKIDQSALTGESLPVTKNPGDEVFSGSTCKQGELEAVVIATGVHTFFGKAAHLVDSTNNVGHFQKVLTAIGNFCICSIAVGMLIEIIVMYPIQHRKYRDGIDNLLVLLIGGIPIAMPTVLSVTMAIGSHRLSQQGAITKRMTAIEEMAGMDVLCSDKTGTLTLNKLSVDKTLVEVFVKGVDKEYVLLLPARASRVENQDAIDACMVGMLADPKEARAGIREVHFLPFNPVDKRTALTYIDNNGNWHRASKGAPEQILDLCNCKEDVRRKVHSMIDKYAEAGLRSLAVARQEVPEKSKESAGGPWQFVGLLPLFDPPRHDSAETIRRALNLGVNVKMITGDQLAIAKETGRRLGMGTNMYPSASLLGQDKDSSIASLPVEELIEKADGFAGVFPEHKYEIVKKLQERKHIVGMTGDGVNDAPALKKADIGIAVADATDAARGASDIVLTEPGLSVIISAVLTSRAIFQRMKNYTIYAVSITIRIVFGFMLIALIWKYDFSAFMVLIIAILNDGTIMTISKDRVKPSPMPDSWKLNEIFATGVVLGGYQALMTVLFFWAMHDTKFFSDKFGVKDIRESDEEMMSALYLQVSIISQALIFVTRSRSWSFVERPGALLMIAFLIAQLVATLIAVYADWTFARVKGCGWGWAGVIWIFSIVTYFPLDIMKFAIRYILSGKAWNNLLDNKTAFTTKKDYGKEEREAQWALAQRTLHGLQPPEASNLFNEKNSYRELSEIAEQAKRRAEMARLRELHTLKGHVESVVKLKGLDIETIQQHYTV

SEQ ID NO: 22418 - protein, 235 aa, Populus alba
TVLSVTMAIGSHKLSQQSAITKRMTAIEEMAGMDVLCSDKTGTLTLNKLSIDKNLIEVFAKGVDKDYVILLAARASRVENQDAIDAAMVGMLADPKEARAGIREVHFLPFNPVDKRTALTYIDAAGNWHRASKGAPEQIPPPLCNCREDVKKKVHSCIDKFAERGLRSLAVARQQVPEKSKESPGGPWEFVGLLNLFDPPRHDSAETIRRALNLGVNVKMITGDQLAIAKETGRR

SEQ ID NO: 22419 - protein, 234 aa, Populus alba
TVLSVTMAIGSHRLSQQGAITKRMTAIEEMAGMDVLCSDKTGTLTLNKLTVDRSLIEVFAKGMEKEHVMLLAARASRTENQDAIDAAIVGMLADPKEARAGIREVHFLPFNPVDKRTALTYIDSDGNWHRASKGAPEQILTLCNCKEDVKKKVHSVIDKFAERGLRSLGVAKQEVPEKSKDAAGAPWQLVGLLPLFDPSKHDSAETIRRALHLGVNVKMITGDQLAIGKETGRR

SEQ ID NO: 22420 - protein, 186 aa, Nepenthes alata
CSDKTGTLTLNKLSIDKNLIEMFVKGVEKDHVILLAARASRTENQDAIDAAMVGMLADPKEARAGIREVHFLPFNPVDKRTALTYIDDNGNWHRASKGAPEQILDLCGCREDVRKKVHSVIEKFAERGLRSLAVARQEVPEKNKDSPGGPWQFVGLLPLFDPPRHDSAETIRKALNLGVNVKMITG

SEQ ID NO: 22421 - protein, 198 aa, Nepenthes alata
GMDVLCSDKTGTLTLNKLTVDKNLIEVFAKGIDANTVVLMAARASRTENQDAIDAAIVGTLADPKEARAGIHEVHFLPFNPTDKRTALTYIDGQGKMHRVSKGAPEQILNLAHNKSDIERRVHAVIDKFAERGLRSLAVAYQEVPEGAKESPGGPWQFIGLMPLFDPPRHDSAETIRRALNLGVNVKMITGDQLAIGK

SEQ ID NO: 22422 - protein, 201 aa, Nepenthes alata
TGTLTLNKLTVDKNLIEVFAKGIDANTVVLMAARASRTENQDAIDAAIVGTLADPKEARAGIHEVHFLPFNPTDKRTALTYIDGQGQMHRVSKGAPEQILNMAHNKSDIERRVHAVIDKFAERGLRSLAVAYQEVTEKRMESPGGPWQFIGLMPLFDPPRHDSAETIRRALNLGVSVKMITGDQLAIAKETGRRLGMGTNM

SEQ ID NO: 22423 - protein, 182 aa, Nepenthes alata
CSDKTGTLTLNKLTVDKNLIEVFAKGTDANTVVLMAARASRTENQDAIDAAIVGTLADPKEARAGIHEVHFLPFNPVDKRTALTYIDDNGNWHRASKGAPEQILDLCGCREDVRKKVHSVIEKFAERGLRSLAVARQEVPEKNKDSPGGPWQFVGLLPLFDPPRHDSAETIRKALNLGVNVK

SEQ ID NO: 22424 - protein, 191 aa, Nepenthes alata
KTGTLTLNNLTVDKNLIEVFAKGIDANTVVLMAARASRTENQDAIDAAIVGTLADPKEARAGIHEVHFLPFNPTDKRTALTYIDGQGKMHRVSKGAPEQILNLAHNKSDIERRVHAVIDKFAERGLRSLAVAYQEVPEGAKENPGGPWQFIGLMPLFDPPRHDSAETIRRALNLGVNVKMITGDQLAIGKE

SEQ ID NO: 22425 - protein, 190 aa, Nepenthes alata
GMDVLCSDKTGTLTLNNLTVDKNLIEVFAKGADADTVVLIAARASRTENQDAIDTAIVGMLADPKEARAGIQEVHFLPFNPTDKRTALTYIDGQGQMHRVSKGAPEQILNMAHNKSDIERRVHAAIDKFAERGLRSLAVAYQEVTEKRMESPGGPWQFIGLMPLFDPPRHDSAETIRRALNLGVSVKMIT

SEQ ID NO: 22426 - protein, 1058 aa, Dictyostelium discoideum
MDNNQIPKNSPESSAINSAESSPKSNVSSDVLHENHHKEQQQLQQQLQQEQQQQQLPTTPQSEPTQRVNNNEEGIEMDRIAENSNINVPSDVGESSLKTISGYPSSKNTEAGSSSSGKKEEDYNYRSTWVPKLHQELFENPEVLESRRTKQRASNYRKTLEREKEGIKPLDNILEELKANANGLTKAEAQKRLEEVGPNAIPDVKRYPILEFLYFMWNPLSWTMEVAAIVSIALLDWVDFILICALLLLNATIGFIEENTAGNAVEALKNSLVSQIRCMRDGEWVMLPSPDLVPGDVVMLKIGAIIPADCRVIEAEQVKIDQSSLTGESLPVTKKIGDEVYSGSAMKQGEAKCVVTATGVNTFFGRAANLVQETEGHGHLQVILRNIGLFCISFIAIWVLVELLVDFLGYDGYCHGVGGGRCLPLNNALVLLVGGIPIAMPTVLSVTMAIGATQLSKKKAIVSRLASIEELAAMDILCSDKTGTLTLNILTVDEPLPVGDTPKEDIVFHAFLACSEAKTKMQSIRQSQTIVVIPIQMLTTLVMKSLNITHSTQKIKKQWVFVNANGKQFKTAKGAPQIILREADNYKQVGEAVEKEIENLADRGYRALGVSVSYDAPDFKVWHFEGLIPLFDPPRHDTEDTIKRALEMGVSVKMITGDQLAIAKETARRLGMGGNLFTIPYLENNDLGISEGEVIEMADGFAEMWPEHKYKVVDQLQKRKHVVGMTGDGVNDAPALKKAQIGIAVAGATDAARSVSDIVLTSSGLSVIIDAIISSRKIFQRMRNYVIYSVAATVRICTTFGILTVAWNFKFPTIATVIIAILNDGTMLTISKDRVRARNEPDQWNLFEVFTMALCYGFYLVGSTIVFFAIIHDGTWFHDAINLRILTDNELRGLIYLQVSISGLATIFVSRSQGFSYFERPGNLVIFAFVMSQIVATFIGVYGFRGYPHDSFSDNPDYPVHGTNFQGCGWGWAVCAWIWCFLWYIPMDFIKLGVTYILRGKIEPINKDALRKIYGWFGKEIPKEATQVSHKVAEQQAKRDALHAQETHHKSVVTDNKV

SEQ ID NO: 22427 - protein, 349 aa, Hordeum vulgare
  unsure (1)..(349): unsure at all Xaa locations
AIVGMTGXGVNDAPXLKKADIGIAVDDATDAARSASDIVLTEPGLSVIISAVLTSRCIFQRMKNYTIYAVSITIRIVLGFLLIALIWKFDFAPFMVLIIAILNDGTIMTISKDRVKPSPLPDSWKLNEIFATGVVLGTYLALMTVVFFWIIHRTDFFTNKFGVRSIRENETEKMSALYLQVSIVSQALIFVTRSRSWSFVERPGFLLVIAFLLAQLVATLIAVYANWGFARISGIGWGWAGVIWLFSIVFYFPLDIFKFFIRFVLSGRAWDNLLQNKTAFTTKENYGKGEREAQWATAQRTLHGLQAPEPASHTLFNDKSSYRELSEIAEQAKRRAEIARLRELNTLKG

SEQ ID NO: 22428 - protein, 329 aa, Hordeum vulgare
GMDVLCSDKTGTLTLNKLSVDKNLVEVFAKGVDKEHVLLLAARASRVENQDAIDACMVGMLADPKEARAGIREVHFLPFNPTDKRTALTYIDAEGNWHRASKGAPEQIITLCNFKEDVKRKVHSVIEKYAERGLRSLAVARQEVPEKSKDSAGGPWQFIGLLPLFDPPRHDSAETIRKALVLGVNVKMITGDQLAIGKETGRRLGMGTNMYPSSALLGQSKDGSLESLPVDELIEKADGFAGVFPEHKYEIVKRLQEKKHIVGMTGDGVNDAPALKKADIGIAVDDATDAARSASDIVLTEPGLSVIISAVLTSRCIFQRMKNYTIAAV

SEQ ID NO: 22429 - protein, 240 aa, Hordeum vulgare
DAEGNWHRASKGAPEQIITLCNFKEDVKRKVHSVIEKYAERGLRSLAVARQEVPEKSKDSAGGPWQFIGLLPLFDPPRHDSAETIRKALVLGVNVKMITGDQLAIGKETGRRLGMGTNMYPSSALLGQSKDGSLESLPVDELIEKADGFAGVFPEHKYEIVKRLQEKKHIVGMTGDGVNDAPALKKADIGIAVDDATDAARSASDIVLTEPGLSVIISAVLTSRCIFQRMKNYTIAAVRA

SEQ ID NO: 22430 - protein, 116 aa, Hordeum vulgare
WLFSIVFYFPLDIFKFFIRFVLSGRAWDNLLQNKTAFTTKENYGKGEREAHWATAQRTLHGLQAPEPASHTLFNDKSSYRELSEIADQAQRRAEIARLRELNTLQGHVESVVKLKG

SEQ ID NO: 22431 - protein, 950 aa, Oryza sativa
MGGLEEIKNEAVDLENIPIEEVFEQLKCTREGLSSEEGNRRIEMFGPNKLEEKKESKILKFLGFMWNPLSWVMEMAAIMAIALANGGGKPPDWEDFVGIIVLLVINSTISFIEENNAGNAAAALMANLAPKTKVLRDGRWGEQEAAILVPGDIISIKLGDIVPADARLLEGDPLKIDQSALTGESLPVTKNPGDEVFSGSTCKQGEIEAVVIATGVHTFFGKAAHLVDSTNQVGHFQTVLTAIGNFCICSIAVGIVIEIIVMFPIQHRAYRSGIENLLVLLIGGIPIAMPTVLSVTMAIGSHKLSQQGAITKRMTAIEEMAGMDVLCSDKTGTLTLNKLSVDKNLVEVFTKGVDKDHVLLLAARASRTENQDAIDAAMVGMLADPKEARAGIREVHFLPFNPVDKRTALTYIDADGNWHRASKGAPEQILTLCNCKEDVKRKVHAVIDKYAERGLRSLAVARQEVPEKSKESAGGPWQFVGLLPLFDPPRHDSAETIRKALHLGVNVKMITGDQLAIGKETGRRLGMGTNMYPSSALLGQNKDASLEALPVDELIEKADGFAGVFPEHKYEIVKRLQEKKHIVGMTGDGVNDAPALKKADIGIAVADATDAARSASDIVLTEPGLSVIISAVLTSRCIFQRMKNYTIYAVSITIRIVLGFLLIALIWKYDFSPFMVLIIAILNDGTIMTISKDRVKPSPLPDSWKLKEIFATGIVLGSYLALMTVIFFWAMHKTDFFTDKFGVRSIRNSEHEMMSALYLQVSIVSQALIFVTRSRSWSFIERPGLLLVTAFIAQLVATFLAVYANWGFARIKGIGWGWAGVIWLYSIVFYFPLDIFKFFIRFVLSGRAWDNLLENKIAFTTKKDYGREEREAQWATAQRTLHGLQPPEVASNTLFNDKSSYRELSEIAEQAKRRAEIARLRELNTLKGHVESVVKLKGLDIDTIQQNYTV

SEQ ID NO: 22432 - protein, 994 aa, Rana sylvatica
MENAHTKTTEECLAYFGVNENTGFSQEQVKKNFEKYGPNELPAEEGKSIWELVAEQFEDLLVRILLLAAIIPFVLAWFEEGEETITAFVEPFVILLILIANAIVGVWQERNAEDAIEALKEYEPEMGKVYRSDRKSVQRIKAREIVPGDIVEIAVGDKVPADIRLISIKSTTLRIDQSILTGESVSVIKHTDVVPDLRAVNQDKKNMLFSGTNVGAGKAIGIVIATGANTEIGKIRDEMAATEQEKTPLQQKLDEFGEQLSKVISLICVAVWLINIGHFNDPIHGGSWIKGAVYYFKIAVALAVAAIPEGLPAVITTCLALGTRRMAKKNAIVRSLPSVETLGCTSVICSDKTGTLTTNQMSVCRMFVLDKVEGDVASLNEFTITGSTYAPEGDVQKNDKNVKAGQYDGLVELATICALCNDSSLDFNEAKGVFEKVGEATETALTTLVEKMNVFNTEVKSLSKVERANACNSVIKQLMKKEFTLEFSRDRKSMSVYCTPAKASRAAVGNKMFVKGAPEGVIDRCNYVRVGTTRVPFTSAIKDKINAVVKEWGTGRDTLRCLALATRDTPPKREDMVLEDATKFAEYETDLTFVGCVGMLDPPRKEVMGSIQLCRDAGIRVIMITGDNKGTAIAICRRIGIFSENDDVSTRAYTGREFDDLPPAEQREAVKHASCFARVEPSHKSKIVEFLQSCDEITAMTGDGVNDAPALKKAEIGIAMGSGTAVAKTASEMVLADDNFATIVAAVEEGRAIYNNMKQFIRYLISSNVGEVVCIFLTAALGLPEALIPVQLLWVNLVTDGLPATALGFNPPDLDIMDRPPRSPKEPLISGWLFFRYLAIGGYVGAATVGAAAWWFMYADDGPNVTFYQLSHFMQCSEDNPEFEGHECEVFESPVPMTMALSVLVTIEMCNALNSLSENQSLIRMPPWVNFWLLGSICLSMSLHFLILYVEPLPMIFKLTPLNVEQWFVVLKISFPVILLDELLKFVARNYLEG

SEQ ID NO: 22433 - protein, 866 aa, Triticum aestivum
  unsure (1)..(866): unsure at all Xaa locations
RPPXDWQDFVGIIVLLVINSAPPRPRTRRXAGNAAAALMANLAPKTKVLRDGRWGEQEASILVPGDIVSIKLGDIVPADARLLEGDPLKIDQSGLTGESLPVTKNPGDEVFSGSTCKQGEIEAVVIATGVHHTFFGKAAHLVDSTNQVGHFQQVLTAIGNFCIVSIAVGIVIEIIVMFPIQRRKYRAGIENLLVLLIGGIPIAMPTVLSVTMAIGSHKLSQQGAITKRMTAIEELAGMDVLCSDKTGTLTLNKLSVDKNLVEVFAKGVDKEHVLLLAARASRVENQDAIDACMVGMLADPKEARAGIREVHFLPFNPTDKRTALTYIDAEGNWHRASKGAPEQIITLCNCKEDVKRKVHSVIEKYAERGLRSLAVARQEVPEKSKDSPGGPWQFIGLLPLFDPPRHDSAETIRKALVLGVNVKMITGDQLAIGKETGRRLGMGTNMYPSSALLGQSKDGSLESLPVDELIEKADGFAGVFPEHKYEIVKRLQEKKHIVGMTGDGVNDAPALKKADIGIAVDDATDAARSASDIVLTEPGLSVIISAVLTSRCIFQRMKNYTIYAVSITIRIVLGFMLIALIWKFDFAPFMVLIIAILNDGTIMTISKDRVKPSPLPDSWKLNEIFATGVVLGTYLALMTVVFFWVIHKTDFFTNKFGVRSIRDSEFEMMSALYLQVSIVSQALIFVTRSRSWSFVERPGFLLVTAFLLAQLVATLIAVYANWEFARIKGIGWGWAGVIWLFSIVFYFPLDIFKFFIRFVLSGRAWDNLLQNKTAFTTKENYGKGEREAQWATAQRTLHGLQAPEPASHTLFNDKSSYRELSEIAEQAKRRAEIARLRELNTLKGHVESVVKLKGLDIDTINQNYTV

SEQ ID NO: 22434 - protein, 950 aa, Lilium longiflorum
MAASISLEEIKNETVDLERIPVEEVFTQLKCTKEGLTTAEGEQRLQIFGPTSSRRRKRASSSSFWASCGILSRGSWRLRLSWPLCWPMEGVSLQIGRILLVSWFSSSSIKKTASTRKTRMRMRPMPARHQTNPKPRCSEMVGGQQEAAILVPGDIISIKLGDIVPADARLLEGDPLKIDQSALTGESLPVTKNPGDEVFSGSTCKQGEIEAIVIATGVHTFFGKAAHLVDSTNNVGHFQIVLTAIGNFCICSIALGMLVEVVVMYPIQHRKYREGIDNLLVLLIGGIPIAMPTVLSVTMAIGSHRLSEQGAITKRMTAIEEMAGMDVLCSDKTGTLTLNKLTVDKNLIEVFAKDTDKDGVLLYAARASRVENQDAIDACIVGMLADPKEARAGIQEVHFLPFNPVEKRTANTYIDSNGKWHRASKGAPEQIIDLCNLKEDVKRKVHEIIDKFADRGLRSLGVARQQVPEASKESTGGPWEFMGLLPLFDPPRHDSAETIRRALHLGVNVKMITGDQLAIGKETGRRLGMGTNMYPSSTLLGDKIHEATGLPIDELIEKADGFAGVFPEHKYEIVKRLQDRKHICGMTGDGVNDAPALKKADIGIAVADATDAARSASDIVLTEPGLSVIVSAVLTSRAIFQRMKNYTIYAVSITIRIVLGFMLIALIWRFDFSPFMVLIIAILNDGTIMTISKDRVKPSPMPDSWKLKEIFATGVILGAYLALMTVIFFWIAHDTDHFTKAFGVRPIGDDINQLTSALYLQVSIVSQALIFVTRSRSWSFVERPGLLLVTAFLAAQLVATLIAVYASWGFARIDGIGWGWAGVIWIFSIVTYFPLDILKFIIRYALSGRAWDNLIQNKTAFTSKKDYGKGEREAQWATAQRTLHGLQTADTSNLFNDKNNYRELSEIAEQAKRRAEVARLRELHTLKGHVESVVKLKGLDIDTIQQHYTV

SEQ ID NO: 22435 - protein, 927 aa, Pneumocystis carinii
MSEEGKALIHETVYYKHTSTFEISETTKDLEKGGEEECLLDDEDNDIEALIDELESQGGDQEDNIEDTEFQSQRQVPEELLATDTRIGLTSQEVVNRRKKYGLNKMKEEKENMIIKFLMYFVGPIQFVMEAAAILAASLQDWVDFGVICALLLLNAFVGFIQEFQAGSIVDELKKTLALKATVLRDGRLIDIEAEEVVPGDILQLEEGSIVPADGRIVTEEAYIQVDQSSITGESLAVDKHKGDNIYSSSVVKRGETFMVVTATGDGTFVGHAASLVNKASCGTGHFTDVLNRIGTILLVLVVFTLFVVYISAFYRSSTTITILKYTLAITIIGVPVGLPAVVTTTMAVGAAYLAKKKAIVQKLSAIESLAGVEILCSDKTGTLTKNDLSLAEPYTVEGISCDELMLTACLAASRKKKGLDAIDKAFLKALRNYPVVRSAISKYNLVEFHPFDPVSKKVTAIVESPSGERIACVKGAPLFVLRTVEEDQPVPEDIQNAYKDKVAEFASRGYRSLGIARKTGNSNWEILGIMPCSDPPRCDTARTISEAIRLGLRIKMLTGDAVGIAKETARQLGMGTNVYNAERLGLGGGGDMPGSEVYDFVEAADGFAEVFPQHKYNVVEILQQRGYLVAMTGDGVNDAPSLKKADTGIAVEGASDAARSAADIVFLAPGLSAIIDALKTSRQIFHRMYAYVVYRIALSLHLEIFLGLWIVIFNHLMILELVVFIAIFADIATLAIAYDNAPYSLLPTKWNLPKLWGISLLLGAALAIGSWIALTTIYINDNTFGIVQGYGNVDAVMFLEISLTENWLIFITRANGPFWSSLPSWQLFGAVFLVDVIATIFCIFGWFTGTKEHGLERTSIITVVRVWLFSLGVFCIMAGIYYLLSDSVAFDNIMHGKSVKKNSKQRSLEDFVVALQRMSTKHEKGE

SEQ ID NO: 22436 - protein, 224 aa, Pneumocystis carinii
DDIDALIDDLESQDGDQEDNIEDTEFQSQRQVPEELLATDTRIGLTSQEVINRRKKYGLNKMKEEKENMIIKFLMYFVGPIQFVMEAAAILAAGLQDWVEFGVICALLLLNAFVGFIQEFQAGSIVDELKKTLALKATVLRDGRLIDIEAEEVVPGDILQLEEGSIVPADGRIVTEEAYLQVDQSAITGESLAVDIHKGDSIYSSSVAKPGETFMVVTATGDRT

SEQ ID NO: 22437 - protein, 495 aa, Glomus intraradices
NKHEVPGYKVTGLVPFNPNTKMSNATVVINETNEVFRVATGAPQVIIKLVGGNDDAVHAVNTLAGRGLRALGVARTIPGDLETYELVGMITLLDPPRPDSAETIRRCNEYGVEVKMITGDQLIIAKEVAHRLGMSRVILDAGHLVDPDKSDEEVTQHCERADGFAQVIPEHKYRVVELLQKRGLLVGMTGDGVNDAPALKKANVGIAVHGCTDAARSAADIVLLAPGLSTIVDGITTSRAIFQRMRSYALYRITSTVHFLMFFFCIDLIEDWQMSAILLILIALLNDAATLVIAVDNAKISQKPDKWRLGQLITLSLVLGTLLTAASFAHYYIAKDVFHFDSEKIATVMYLHISSCPHFVIFSTRLSGYFWENIPSITFIIAVLGTQVFAMLISIYGLLTPKIGWGWGVTTICISLGYFVFLDFVKVQLFRYWSFELTAKLWPSKTRRTKLQDRKAYAINHARIVGNISKVRKVVIMSRVLLAFKKKSSTKAIEV

SEQ ID NO: 22438 - protein, 1010 aa, Schizosaccharomyces pombe
MQRNNGEGRPEGMHRISRFLHGNPFKNNASPQDDSTTRTEVYEEGGVEDSAVDYDNASGNAAPRLTAAPNTHAQQANLQSGNTSITHETQSTSRGQEATTSPSLSASHEKPARPQTGEGSDNEDEDEDIDALIEDLYSQDQEEEQVEEEESPGPAGAAKVVPEELLETDPKYGLTESEVEERKKKYGLNQMKEEKTNNIKKFLSFFVGPIQFVMELAAALAAGLRDWVDFGVICALLLLNATVGFVQEYQAGSIVDELKKTMALKASVLRDGRVKEIEASEIVPGDILHLDEGTICPADGRLITKDCFLQVDQSAITGESLAVDKHQNDTMYSSSTVKRGEAFMVVTATADSTFVGRAASLVGAAGQSQGHFTEVLNGIGTILLVLVILTLLCIYTAAFYRSVRLAALLEYTLAITIIGVPVGLPAVVTTTMAVGAAYLAKKKAIVQKLSAIESLAGVEILCSDKTGTLTKNRLSLGEPYCVEGVSPDDLMLTACLASSRKKKGLDAIDKAFLKALRNYPKAKDQLSKYKVLDFHPFDPVSKKITAYVEAPDGQRITCVKGAPLWVFKTVQDDHEVPEAITDAYREQVNDMASRGFRSLGVARKADGKQWEILGIMPCSDPPRHDTARTIHEAIGLGLRIKMLTGDAVGIAKETARQLGMGTNVYNAERLGLSGGGDMPGSEVNDFVEAADGFAEVFPQHKYAVVDILQQRGYLVAMTGDGVNDAPSLKKADAGIAVEGASDAARSAADIVFLAPGLSAIIDALKTSRQIFHRMYAYVVYRIALSLHLEIFLGLWLIIRNQLLNLELIVFIAIFADVATLAIAYDNAPYAMKPVKWNLPRLWGLATIVGILLAIGTWIVNTTMIAQGQNRGIVQNFGVQDEVLFLQISLTENWLIFITRCSGPFWSSFPSWQLSGAVLVVDILATLFCIFGWFKGGHQTSIVAVIRIWMYSFGIFCLIAGVYYILSESSSFDRWMHGKHKERGTTRKLEDFVMQLQRTSTHHEAEGKVTS

SEQ ID NO: 22439 - protein, 919 aa, Schizosaccharomyces pombe
MADNAGEYHDAEKHAPEQQAPPPQQPAHAAAPAQDDEPDDDIDALIEELFSEDVQEEQEDNDDAPAAGEAKAVPEELLQTDMNTGLTMSEVEERRKKYGLNQMKEELENPFLKFIMFFVGPIQFVMEMAAALAAGLRDWVDFGVICALLMLNAVVGFVQEYQAGSIVDELKKSLALKAVVIREGQVHELEANEVVPGDILKLDEGTIICADGRVVTPDVHLQVDQSAITGESLAVDKHYGDPTFASSGVKRGEGLMVVTATGDSTFVGRAASLVNAAAGGTGHFTEVLNGIGTILLVLVLLTLFCIYTAAFYRSVRLARLLEYTLAITIIGVPVGLPAVVTTTMAVGAAYLAEKQAIVQKLSAIESLAGVEVLCSDKTGTLTKNKLSLGEPFTVSGVSGDDLVLTACLAASRKRKGLDAIDKAFLKALKNYPGPRSMLTKYKVIEFQPFDPVSKKVTAYVQAPDGTRITCVKGAPLWVLKTVEEDHPIPEDVLSAYKDKVGDLASRGYRSLGVARKIEGQHWEIMGIMPCSDPPRHDTARTISEAKRLGLRVKMLTGDAVDIAKETARQLGMGTNIYNAERLGLTGGGNMPGSEVYDFVEAADGFGEVFPQHKYAVVDILQQRGYLVAMTGDGVNDAPSLKKADTGIAVEGATDAARSAADIVFLAPGLSAIIDALKTSRQIFHRMYSYVVYRIALSLHLEIFLGLWLIIRNQLLNLELVVFIAIFADVATLAIAYDNAPYSMKPVKWNLPRLWGLSTVIGIVLAIGTWITNTTMIAQGQNRGIVQNFGVQDEVLFLEISLTENWLIFVTRCNGPFWSSIPSWQLSGAVLAVDILATMFCIFGWFKGGHQTSIVAVLRIWMYSFGIFCIMAGTYYILSESAGFDRMMNGKPKESRNQRSIEDLVVALQRTSTRHEKGDA

SEQ ID NO: 22440 - protein, 898 aa, Pichia angusta
MSATEPTKEKVPLQEDDEEEEDIDQLVMELQSNHGADDGDEEDEVQDHSSFKVVPEELLRTDPKVGLTSEEVAKRRKKFGPNQMAEEKENLVLKFCMFFIGPIQFVMEAAAILAAGLEDWVDFGVICGLLMLNACVGFIQEYQAGSIVDELKKTLANTATVIRDGHPVEIAASEVVPGDILQLEDGVVIPADGKLVSDECFLQVDQSALTGESLAVDKRSGDPTFSSSTVKRGEALMIVTATGDSTFVGRAAALVNKASGGQGHFTEVLNGIGTALLVLVIVTLLVVWTSAFTEPQKIVRILRYTLAITIVGVPVGLPAVVTTTMAVGAAYLAKKQAIVQKLSAIESLAGVEILCSDETGTLTKNKLSLHEPYTVEGVEPDDLMLTACLAASRKKKGLDAIDKAFLKSLINYPRARAALTKYKMLEFQPFDPVSKKVTAYVESPEGERIICVKGAPLFVLKTVQEDHPIPEDILEKYENKVAEFASRGFRSLGVARKRGEGHWEILGIMPCMDPPRDDTAKTVNEAKELGLRVKMLTGDAVGIAKETCRQLGLGTNIFDADRLGLSGGGDLSGSELFDFVENADGFAEVFPQHKNNVVEILQKRGYLVTMTGGGVNDAPSLKKADTGIAVEGASDSARSAADIVFLAPGLSAIIDALKTSRQIFHRMYAYVVYRIVLSLHLEIFLGLWIAILNESLNIDLVVFIAIFADVATLAIAYDNAPFDQKPVKWNLPRLWGMSIVMGVILAVGTWITLTTMFLPKGGIIQNFGSIVDGVLFLQISLTENWLIFVTRATGPFWSSIPSWQLSGAVLIVDIIATMFTLFGWWSQNWNDIVTVVRVWIWSFGVFCVLGGAYVIMSESEKFDRFMNGKPLKERPPQRTLEDFMVAMNRVSTQHEKSN

SEQ ID NO: 22441 - protein, 947 aa, Saccharomyces cerevisiae
MSSTEAKQYKEKPSKEYLHASDGDDPANNSAASSSSSSSTSTSASSSAAAVPRKAAAASAADDSDSDEDIDQLIDELQSNYGEGDESGEEEVRTDGVHAGQRVVPEKDLSTDPAYGLTSDEVARRRKKYGLNQMAEENESLIVKFLMFFVGPIQFVMEAAAILAAGLSDWVDVGVICALLLLNASVGFIQEFQAGSIVDELKKTLANTATVIRDGQLIEIPANEVVPGEILQLESGTIAPADGRIVTEDCFLQIDQSAITGESLAAEKHYGDEVFSSSTVKTGEAFMVVTATGDNTFVGRAAALVGQASGVEGHFTEVLNGIGIILLVLVIATLLLVWTACFYRTVGIVSILRYTLGITIIGVPVGLPAVVTTTMAVGAAYLAKKQAIVQKLSAIESLAGVEILCSDKTGTLTKNKLSLHEPYTVEGVSPDDLMLTACLAASRKKKGLDAIDKAFLKSLIEYPKAKDALTKYKVLEFHPFDPVSKKVTAVVESPEGERIVCVKGAPLFVLKTVEEDHPIPEDVHENYENKVAELASRGFRALGVARKRGEGHWEILGVMPCMDPPRDDTAQTINEARNLGLRIKMLTGDAVGIAKETCRQLGLGTNIYNAERLGLGGGGDMPGSELADFVENADGFAEVFPQHKYRVVEILQNRGYLVAMTGDGVNDAPSLKKADTGIAVEGATDAARSAADIVFLAPGLSAIIDALKTSRQIFHRMYSYVVYRIALSLHLEIFLGLWIAILNNSLDINLIVFIAIFADVATLTIAYDNAPYAPEPVKWNLPRLWGMSIILGIVLAIGSWITLTTMFLPNGGIIQNFGAMNGVMFLQISLTENWLIFVTRAAGPFWSSIPSWQLAGAVFAVDIIATMFTLFGWWSENWTDIVSVVRVWIWSIGIFCVLGGFYYIMSTSQAFDRLMNGKSLKEKKSTRSVEDFMAAMQRVSTQHEKSS

SEQ ID NO: 22442 - protein, 947 aa, Saccharomyces cerevisiae
MSSTEAKQYKEKPSKEYLHASDGDDPANNSAASSSSSSSTSTSASSSAAAVPRKAAAASAADDSDSDEDIDQLIDELQSNYGEGDESGEEEVRTDGVHAGQRVVPEKDLSTDPAYGLTSDEVARRRKKYGLNQMAEENESLIVKFLMFFVGPIQFVMEAAAILAAGLSDWVDVGVICALLLLNASVGFIQEFQAGSIVDELKKTLANTATVIRDGQLIEIPANEVVPGEILQLESGTIAPADGRIVTEDCFLQIDQSAITGESLAAEKHYGDEVFSSSTVKTGEAFMVVTATGDNTFVGRAAALVGQASGVEGHFTEVLNGIGIILLVLVIATLLLVWTACFYRTVGIVSILRYTLGITIIGVPVGLPAVVTTTMAVGAAYLAKKQAIVQKLSAIESLAGVEILCSDKTGTLTKNKLSLHEPYTVEGVSPDDLMLTACLAASRKKKGLDAIDKAFLKSLIEYPKAKDALTKYKVLEFHPFDPVSKKVTAVVESPEGERIVCVKGAPLFVLKTVEEDHPIPEDVHENYENKVAELASRGFRALGVARKRGEGHWEILGVMPCMDPPRDDTAQTINEARNLGLRIKMLTGDAVGIAKETCRQLGLGTNIYNAERLGLGGGGDMPGSELADFVENADGFAEVFPQHKYRVVEILQNRGYLVAMTGDGVNDAPSLKKADTGIAVEGATDAARSAADIVFLAPGLSAIIDALKTSRQIFHRMYSYVVYRIALSLHLEIFLGLWIAILNNSLDINLIVFIAIFADVATLTIAYDNAPYAPEPVKWNLPRLWGMSIILGIVLAIGSWITLTTMFLPNGGIIQNFGAMNGVMFLQISLTENWLIFVTRAAGPFWSSIPSWQLAGAVFAVDIIATMFTLFGWWSENWTDIVSVVRVWIWSIGIFCVLGGFYYIMSTSQAFDRLMNGKSLKEKKSTRSVEDFMAAMQRVSTQHDKSS

SEQ ID NO: 22443 - protein, 918 aa, Saccharomyces cerevisiae [sequence omitted]

SEQ ID NO: 22444 - protein, 918 aa, Saccharomyces cerevisiae
MTDTSSSSSSSSASSVSAHQPTQEKPAKTYDDAASESSDDDDIDALIEELQSNHGVDDEDSDNDGPVAAGEARPVPEEYLQTDPSYGLTSDEVLKRRKKYGLNQMADEKESLVVKFVMFFVGPIQFVMEAAAILAAGLSDWVDFGVICGLLMLNAGVGFVQEFQAGSIVDELKKTLANTAVVIRDGQLVEIPANEVVPGDILQLEDGTVIPTDGRIVTEDCFLQIDQSAITGESLAVDKHYGDQTFSSSTVKRGEGFMVVTATGDNTFVGRAAALVNKAAGGQGHFTEVLNGIGIILLVLVIATLLLVWTACFYRTNGIVRILRYTLGITIIGVPVGLPAVVTTTMAVGAAYLAKKQAIVQKLSAIESLAGVEILCSDKTGTLTKNKLSLHEPYTVEGVSPDDLMLTACLAASRKKKGLDAIDKAFLKSLKQYPKAKDALTKYKVLEFHPFDPVSKKVTAVVESPEGERIVCVKGAPLSALKTVEEDHPIPEDVHENYENKVAELASRGFRALGVARKRGEGHWEILGVMPCMDPPRDDTAQTVSEARHLGLRVKMLTGDAVGIAKETCRQLGLGTNIYNAERLGLGGGGDMPGSELADFVENADGFAEVFPQHKYRVVEILQNRGYLVAMTGDGVNDAPSLKKADTGIAVEGATDAARSAADIVFLAPGLSAIIDALKTSRQIFHRMYSYVVYRIALSLHLEIFLGLWIAILDNSLDIDLIVFIAIFADVATLAIAYDNAPYSPKPVKWNLPRLWGMSIILGIVLAIGSWITLTTMFLPKGGIIQNFGAMNGIMFLQISLTENWLIFITRAAGPFWSSIPSWQLAGAVFAVDIIATMFTLFGWWSENWTDIVTVVRVWIWSIGIFCVLGGFYYEMSTSEAFDRLMNGKPMKEKKSTRSVEDFMAAMQRVSTQHEKET

SEQ ID NO: 22445 - protein, 920 aa, Zygosaccharomyces rouxii
MSDERITEKPPHQQPESEGEPVPEEEVEEETEEEVPDEQSSEDDDIDGLIDELQSQEAHEEAEEDDGPAAAGEARKIPEELLQTDPSVGLSSDEVVNRRKKYGLNQMREESENLLVKFLMFFIGPIQFVMEAAAVLAAGLEDWVDFGVICGLLFLNAGVGFIQEFQAGSIVEELKKTLANTATVIRDGSVQEAPANEIVPGDILKLEDGTVIPADGRLVTEECFLQVDQSSITGESLAVDKHYGDEVFSSSTVKRGEGFMIVTATGDNTFVGRAASLVNAAAGGQGHFTEVLNGIGVILLVLVVITLLLIWTACFYRTVRIVPILRYTLGITIVGVPVGLPAVVTTTMAGGAAYLAKKQAIVQKLSAIESLAGVEILCSDKTGTLTKNKLSLHEPYTVEGVSSDDLMLTACLAASRKKKGLDAIDKAFLKSLAQYPKAKGALTKYKVLEFHPFDPVSKKVTAVVESPEGERIICVKGAPLFVLKTVEEDHPIPEDVHENYENKVAELASRGFRALGVARKRGEGHWEILGVMPCMDPPRDDTAATVNEAKRLGLSVKMLTGDAVGIAKETCRQLGLGTNIYDAERLGLGGGGSMPGSEMYDFVENADGFAEVFPQHKFAVVDILQQRGYLVAMTGDGVNDAPSLKKADTGIAVEGATDAARSAADIVFLAPGLSAIIDALKTSRQIFHRMYAYVVYRIALSLHLEIFLGLWIAILNHSLDIDLIVFIAIFADVATLAIAYDNAPFSPSPVKWNLPRLWGMSIMMGIILAAGTWITLTTMFLPKGGIIQNFGSIDGILFLEISLTENWLIFITRAVGPFWSSIPSWQLAGAVFVVDVVATMFTLFGWWSQNWTDIVTVVRIYIWSIGIFCCLGGAYYLMSESETFDRLMNGKPLKENKSTRSVEDFLASMRRVSTQHEKGN

SEQ ID NO: 22446 - protein, 916 aa, Ajellomyces capsulatus
MAHSAASGAASAAHFEKKTPEVAHEEKKPPLPEEEDEDEDMDALIEELESQDGHIDIEDDEDGEPGGARPVPDELLTTDTRHGLTDAEVVARRKKYGLNQMKEEKENLVLKFLSYFVGPIQFVMEAAAILAAGLEDWVDFGVICALLLLNACVGFVQEFQAGSIVDELKKTLALKAVVLRNGRLTEVEAPEVVPGDILQVEEGTIIPADGRIVTEEAFLQVDQSAITGESLAVDKHKGDTCYASSAVKRGEAFMVITATGDNTFVGRGPALVNAASAGTGHFTEVLNGIGTVLLILVILTLLVVWVSSFYRSNSIVTILEFTLAITIIGVPVGLPAVVTTTMAVGAAYLAKKKAIVQKLSAIESLAGVEILCSDKTGTLTKNKLSLAEPYCVSGVDPEDLMLTACLAASRKKKGIDAIDKAFLKSLRYYPRAKSVLTQYKVLEFHPFDPVSKKVSAVVLSPQGERITCVKGAPLSVLKTVEEDHPIPDEVDSAYKNKVAEFATRGFRSLGVARKRGEGSWEILGIMPCSDPPRHDTAKTINEAKTLGLSIKMLTGDAVGIARETSRQLGLGTNVYNAERLGLGGGGTMPGSEVYDFVEAADGFAEVFPQHKYNVVEILQQRGYLVAMTGDGVNDAPSLKKADTGIAVEGASDAARSAADIVFLAPGLSAIIDALKTSRQIFHRMYAYVVYRIALSLHLEIFLGLWIAILNTSLNLQLVVFIAIFADIATLAIAYDNAPFSKTPVKWNLPKLWGMSVLLGIVLAVGTWITLTTMLVGSENGGIVQNFGRTHPVLFLEISLTENWLIFITRANGPFWSSIPSWQLSGAILLVDIIATLFTIFGWFVGGQTSIVAVVRIWVFSFGCFCVLGGLYYLLQGSAGFDNMMHGKSPKKNQKQRSLEDFVVSLQRVSTQHEKSS

SEQ ID NO: 22447 - protein, 988 aa, Aspergillus fumigatus
MAERRISYAPDVENGDHSRHAENEGNLDEYTALNRYISTARDGRRGSTSSAGARSLQQKKKPWYAFWRKDAETGGAFVCPDEWLETDLRTGLASSEIETRRKKGGWNELTTEKTNFFVQFIGYFRGPILYVMELAVLLAAGLRDWIDLGVICGILLLNAVVGWYQEKQAADVVASLKGDIAMKAVVIRDGQEQEILARELVTGDIIVVEEGTVIPADIRLICDYDKPEMFETYKEYLATANDDTLKEKDDDDEDGGIEARVGVSLIAVDQSAITGESLAVDKYMADTCYYTTGCKRGKAYAIVTATAKQSFVGKTAALVQGAKDQGHFKAVMDNIGTTLLVLVMFWILAAWIGGFYRHLKIATPEHEDNNLLHYTLILLIIGVPVGLPVVTTTTLAVGAAYLAEQKAIVQKLTAIESLAGVDILCSDKTGTLTANQLSIREPYVNEGVDVNWMMAVAAIASNHNVKNLDPIDKVTILTLRRYPKAREILSRNWVTEKYTPFDPVSKRITTVCTCDGVRYVCAKGAPKAILNMSQCSEEEAAKFREKAAEFARRGFRSLGVAVQKEGEPWQLLGMYPMFDPPREDTAHTIAEAQHLGLSVKMLTGDALAIAKETCKMLALSTKVYDSERLIHGGLAGSAQHDLVEKADGFAEVFPEHKYQVVEMLQQRGHLTAMTGDGVNDAPSLKKADCGIAVEGSTEAAQAAADIVFLAPGLSTIVDAIKLARQIFQRMKAYIQYRIALCLHLEIYLVTSMIIIDETLNSELVVFIALFADLATIAVAYDNAHYEMRPVEWQLPKIWVISIVLGVLLAGATWIMRASLFLNDGGLIQNFGSPQEMIFLEVALTENWLIFVTRGGKTWPSWQLVGAIFVVDVLATLFCVFGWLSGDYRQTSPPSHAEFSVNGDVDIVTVVVIWGYSIGVTIIIAVVYYILTIIPALDNLGRKTRSKADTKIENMIAHLSKLAIEHETDNNGKSYYTLGARAEVEEDDE

SEQ ID NO: 22448 - protein, 920 aa, Neurospora crassa
MADHSASGAPALSTNIESGKFDEKAAEAAAYQPKPKVEDDEDEDIDALIEDLESHDGHDAEEEEEEATPGGGRVVPEDMLQTDTRVGLTSEEVVQRRRKYGLNQMKEEKENHFLKFLGFFVGPIQFVMEGAAVLAAGLEDWVDFGVICGLLLLNAVVGFVQEFQAGSIVDELKKTLALKAVVLRDGTLKEIEAPEVVPGDILQVEEGTIIPADGRIVTDDAFLQVDQSALTGESLAVDKHKGDQVFASSAVKRGEAFVVITATGDNTFVGRAAALVNAASGGSGHFTEVLNGIGTILLILVIFTLLIVWVSSFYRSNPIVQILEFTLAITIIGVPVGLPAVVTTTMAVGAAYLAKKKAIVQKLSAIESLAGVEILCSDKTGTLTKNKLSLHDPYTVAGVDPEDLMLTACLAASRKKKGIDAIDKAFLKSLKYYPRAKSVLSKYKVLQFHPFDPVSKKVVAVVESPQGERITCVKGAPLFVLKTVEEDHPIPEEVDQAYKNKVAEFATRGFRSLGVARKRGEGSWEILGIMPCMDPPRHDTYKTVCEAKTLGLSIKMLTGDAVGIARETSRQLGLGTNIYNAERLGLGGGGDMPGSEVYDFVEAADGFAEVFPQHKYNVVEILQQRGYLVAMTGDGVNDAPSLKKADTGIAVEGSSDAARSAADIVFLAPGLGAIIDALKTSRQIFHRMYAYVVYRIALSIHLEIFLGLWIAILNRSLNIELVVFIAIFADVATLAIAYDNAPYSQTPVKWNLPKLWGMSVLLGVVLAVGTWITVTTMYAQGENGGIVQNFGNMDEVLFLQISLTENWLIFITRANGPFWSSIPSWQLSGAIFLVDILATCFTIWGWFEHSDTSIVAVVRIWIFSFGIFCIMGGVYYILQDSVGFDNLMHGKSPKGNQKQRSLEDFVVSLQRVSTQHEKSQ

SEQ ID NO: 22449 - protein, 920 aa, Neurospora crassa
MADHSASAAPALSTNIESGKFDEKAAEAAAYQPKPKVEDDEDEDIDALIEDLESHDGHDAEEEEEEATPGGGRVVPEDMLQTDTRVGLTSEEVVQRRRKYGLNQMKEEKENHFLKFLGFFVGPIQFVMEGAAVLAAGLEDWVDFGVICGLLLLNAVVGFVQEFQAGSIVDELKKTLALKAVVLRDGTLKEIEAPEVVPGDILQVEEGTIIPADGRIVTDDAFLQVDQSALTGESLAVDKHKGDQVFASSAVKRGEAFVVITATGDNTFVGRAAALVNAASGGSGHFTEVLNGIGTILLILVIFTLLIVWVSSFYRSNPIVQILEFTLAITIIGVPVGLPAVVTTTMAVGAAYLAKKKAIVQKLSAIESLAGVEILCSDKTGTLTKNKLSLHDPYTVAGVDPEDLMLTACLAASRKKKGIDAIDKAFLKSLKYYPRAKSVLSKYKVLQFHPFDPVSKKVVAVVESPQGERITCVKGAPLFVLKTVEEDHPIPEEVDQAYKNKVAEFATRGFRSLGVARKRGEGSWEILGIMPCMDPPRHDTYKTVCEAKTLGLSIKMLTGDAVGIARETSRQLGLGTNIYNAERLGLGGGGDMPGSEVYDFVEAADGFAEVFPQHKYNVVEILQQRGYLVAMTGDGVNDAPSLKKADTGIAVEGSSDAARSAADIVFLAPGLGAIIDALKTSRQIFHRMYAYVVYRIALSIHLEIFLGLWIAILNRSLNIELVVFIAIFADVATLAIAYDNAPYSQTPVKWNLPKLWGMSVLLGVVLAVGTWITVTTMYAQGENGGIVQNFGNMDEVLFLQMSLTENWLIFITRANGPFWSSIPSWQLSGAIFLVDILATCFTIWGWFEHSDTSIVAVVRIWIFSFGIFCIMGGVYYILQDSVGFDNLMHGKSPKGNQKQRSLEDFVVSLQRVSTQHEKSQ

SEQ ID NO: 22450 - protein, 964 aa, Ustilago maydis
MSDVEHQQEKKVTKHRDIDEEHANSGPKHALVDMSTIELKAEDLYDKAKVDIEAIELEDVWTLLQCNEGGLSEEECSRRRAIFGPNKIETEEPNPILQFLSFMWNPLSWVMEGAAIVAIALSNGEGQGPDWPDFVGIVLLLLINSTIGFIEERNAGNAVKALMDSLAPKARCKRDGKWIEIESSDLVPGDVIAFKIGDIVPGDCRLFDAINVSCDQASLTGESLPVNKKLGDQCFSGSICKQGEAEGVVISTGPNTFFGRAATLIGSDDDTTGHLQQVLSRIGLFCMVTIGLFIVLEILILYAGFRYRYRRGIDNILVLLIGGIPIAMPCVLSVTLAVGAQQLAKHKAIVTRITAIEELAGVDILCSDKTGTLTTNKLTIDTELVKLYSDWANVEDVIRLAAYASRTENQDAIDATIVGTLKDPAEARNGIKLLDFKPFNPVDKRTEITYLEEATGKMKRVTKGMTSIIIDLCKRNKTEAQENALEADVEEFANRGLRGLAVAFEEVPSGEVEAEGNGFELLGLLAIFDPPRHDTKETLDNAQALGVRVKMVTGDQLAIAKETGRRLGLGDRMFNSKVLVEGVLPAGSPYKSLDEMILDVDGFAGVFPEHKYEIVKRLQGLGHLTAMTGDGANDAPALARANVGVAVEGATDAARGAADIVLTEPGLSTIVEAIRQSRIIFGRMKNYAAYAAAITIRVVVGFALLAFIWKSDFPPFMVLIIAFLNDGSIMTLSLDTVKPALEPQHWDLTELFFCGSLYGLYQVASTLALYAVIYETTFFEDKFGVTPLHGNPNDPRLHMIMYLQVAILAQALIFVTRSHGFSWMERPSFALMGAFCLAQLISSIIAAYGDWGFTNVHSIEGGWIGIVWVWNIVWYFPMDLVKFFAKFLLRNIRSKKTPAAAHESLSRTTSRADSMYSNRTSFLKRAQRKAGFGGEKKVHMSNTELQRLGSIQAQEASRRLSRTQ

SEQ ID NO: 22451 - protein, 321 aa, Ustilago maydis
DRMFNSKVLVEGVLPAGSPYKSLDEMILDVDGFAGVFPEHKYEIVKRLQGLGHLTAMTGDGANDAPALARANVGVAVEGATDAARGAADIVLTEPGLSTIVEAIRQSRIIFGRMKNYAAYAAAITIRVVVGFALLAFIWKSDFPPFMVLIIAFLNDGSIMTLSLDTVKPALEPQHWDLTELFFCGSLYGLYQVASTLALYAVIYETTFFEDKFGVTPLHGNPNDPRLHMIMYLQVAILAQALIFVTRSHGFSWMERPSFALMGAFCLAQLISSIIAAYSDWGFTNVHSIEGGWIGIVWVWNIVWYFPMDLVKFFAKFLLRN

SEQ ID NO: 22452 - protein, 895 aa, Candida albicans
MSATEPTNEKVDKIVSDDEDEDIDQLVADLQSNPGAGDEEEEEENDSSFKAVPEELLQTDPRVGLTDDEVTKRRKRYGLNQMAEEQENLVLKFVMFFVGPIQFVMEAAAVLAAGLEDWVDFGVICALLLLNAFVGFIQEYQAGSIVDELKKTLANSALVVRNGQLVEIPANEVVPGDILQLEDGTVIPTDGRIVSEDCLLQVDQSAITGESLAVDKRSGDSCYSSSTVKTGEAFMIVTATGDSTFVGRAAALVNKASAGTGHFTEVLNGIGTTLLVFVIVTLLVVWVACFYRTVRIVPILRYTLAITIIGVPVGLPAVVTTTMAVGAAYLAKKQAIVQKLSAIESLAGVEILCSDKTGTLTKNKLSLHEPYTVEGVEPDDLMLTACLAASRKKKGLDAIDKAFLKSLINYPRAKAALPKYKVIEFQPFDPVSKKVTAIVESPEGERIICVKGAPLFVLKTVEDDHPIPEDVHENYQNTVAEFASRGFRSLGVARKRGEGHWEILGIMPCMDPPRDDTAATVNEARRLGLRVKMLTGDAVGIAKETCRQLGLGTNIYDADRLGLSGGGDMAGSEIADFVENADGFAEGFPTNKYNAVEILQSRGYLVAMTGDGVNDAPSLKKADTGIAVEGATDAARSAADIVFLAPGLSAIIDALKTSRQIFHRMYSYVVYRIALSLHLELFLGLWIAILNRSLDINLIVFIAIFADVATLAIAYDNAPYDPKPVKWNLPRLWGMSIVLGIILAIGTWITLTTMLLPKGGIIQNFGGLDGILFLQISLTENWLIFVTRAQGPFWSSIPSWQLSGAVLIVDIIATCFTLFGWWSQNWTDIVTVVRTWIWSFGVFCVMGGAYYLMSTSEAFDNFCNGRKPQQHTDKRSLEDFLVSMQRVSTQHEKST

SEQ ID NO: 22453 - protein, 962 aa, Uromyces viciae-fabae
MSLKEGSDPVHKKNFDKTFEDEIKGTSALVDIGTIQLTAEDLYDKDKVDLEQVHLEDVWKLLQTTEEGLTAEEVQRRLEIFGPNKLESKEVNPLLLFLSFMWNPLSWVMEGAAIVAIGLSNGQGRPPDWQDFLGIMLLLFINAGIGFYEERSAGNAVKALMDSLAPKAKVRRAGVWSEIDSADLVPGDIVAFKIGDVVPSDCRLYDAINVSIDQAALTGESLPSTKHVGDQCFSGSTCKQGEAEGVVIATGPNTFFGRAATLVGADNDSTGHMQAVLAKIGTFCLVSIGIFVVLEIIILYGGFRYQYRRGIDNILVLLIGGIPIAMPTVLSVTLAVGAQQLAKYKAIVTRITAIEELAGVTILCSDKTGTLTTNKLTIDKSTVKTYADFSADEVCVLAAYASRTENQDAIDTCVVGNVGADVARRGIQLLDFKPFNPVDKRTEITYIDTESGQMRRVTKGMTGVIIELCTHNKTEALEQRLESDVEEFARRGLRALAVAYEDVPNAQVDAPGSGFELIGLLSIFDPPRDDTKQTIDDAQALGVKVKMVTGDQLAIAKETGRRLGMGDHMYPSKVLKDGPEPGGKFSSLDEMILDADGFAGVFPEHKYEIVKRLQGLGHLCAMTGDGANDAPALARANVGIAVEGATDAARGAADIVLTEPGLSTIVHAIRQSRIVFQRMRNYSIYACAVTIRIVVGFAVMAFAFKFDFPPFMVLVIALLNDGTIMTLSLDRVLPSSNPDHWDLTEIFTYAIGYGLCLALSTIVLLAVIIHTQFFEDRFGVQPLKDANDPHVHMIIYLQVAIISQALIFVTRSHGWFFMERPSVALFGAFVIAQLISSLIAAYGDWAFTDVRGISATWIAIVWIWNVIWFLPLDLVKFGMRAVIRMFKPPVALNKPIPANQLTRTTSRPASINESLYSNRASFIQRASRRSVLGGRVHADDRELRRFSSAQAVSSGAALSRAQ

SEQ ID NO: 22454 - protein, 898 aa, Escherichia coli
MFKEIFTRLIRHLPSRLVHRDPLPGAQQTVNTVVPPSLSAHCLKMAVMPEEELWKTFDTHPEGLNQAEVESAREQHGENKLPAQQPSPWWVHLWVCYRNPFNILLTILGAISYATEDLFAAGVIALMVAISTLLNFIQEARSTKAADALKAMVSNTATVLRVINDKGENGWLEIPIDQLVPGDIIKLAAGDMIPADLRILQARDLFVAQASLTGESLPVEKAATTRQPEHSNPLECDTLCFMGTTVVSGTAQAMVIATGANTWFGQLAGRVSEQESEPNAFQQGISRVSMLLIRFMLVMAAGGAVNQWLHQRRLVGSALFALSVAVGLTPEMLPMIVTSTLARGAVKLSKQKVIVKHLDAIQNFGAMDILCTDKTGTLTQDKIVLENHTDISGKTSERVLHSAWLNSHYQTGLKNLLDTAVLEGTDEESARSLASRWQKIDEIPFDFERRRMSVVVAENTEHHQLVCKGALQEILNVCSQVRHNGEIVPLDDIMLRKIKRVTDTLNRQGLRVVAVATKYLPAREGDYQRADESDLILEGYIAFLDPPKETTAPALKALKASGITVKILTGDSELVAAKVCHEVGLDAGEVVIGSDIETLSDDELANLAQRTTLFARLTPMHKERIVTLLKREGHVVGFMGDGINDAPALRAADIGISVDGAVDIAREAADIILLEKSLMVLEEGVIEGRRTFANMLKYIKMTASSNFGNVFSVLVASAFLPFLPMLPLHLLIQNLLYDVSQVAIPFDNVDDEQIQKPQRWNPADLGRFMIFFGPISSIFDILTFCLMWWVFHANTPETQTLFQSGWFVVGLLSQTLIVHMIRTRRVPFIQSCASWPLMIMTVIVMIVGIALPFSPLASYLQLQALPLSYFPWLVAILAGYMTLTQLVKGFYSRRYGWQ

SEQ ID NO: 22455 - protein, 974 aa, Leishmania donovani
MSSKKYELDAAAFEDKPESHSDAEMTPQKPQRRQSVLSKAVSEHDERATGPATDLLPPSKGLTTEEAEELLKKYGRNELPEKKTPSWLIYVRGLWGPMPAALWIAIIIEFALENWPDGAILFAIQIANATIGWYETIKAGDAVAALKNSLKPTATVYRDSKWQQIDAAVLVPGDLVKLASGSAVPADCSINEGVIDVDEAALTGESLPVTMGPEHMPKMGSNVVRGEVEGTVQYTGSLTFFGKTAALLQSVESDLGNIHVILRRVMFSLCAISFMLCMCCFIYLLARFYETFRHALQFAVVVLVVSIPIALEIVVTTTLAVGSKHLSKHKIIVTKLSAIEMMSGVNMLCSDKTGTLTLNKMEIQEQCFTFEEGNDLKSTLVLAALAAKWREPPRDALDTMVLGAADLDECDNYQQLNFVPFDPTTKRTAATLVDRRSGEKFDVTKGAPHVILQMVYNQDEINDEVVDIIDSLAARGVRCLSVAKTDQQGRWHMAGILTFLDPPRPDTKDTIRRSKEYGVDVKMITGDHLLIAKEMCRMLDLDPNILTADKLPQIKDANDLPEDLGEKYGDMMLSVGGFAQVFPEHKFMIVETLRQRGYTCAMTGDGVNDAPALKRADVGIAVHGATDAARAAADMVLTEPGLSVVVEAMLVSREVFQRMLSFLTYRISATLQLVCFFFIACFSLTPKAYGSVDPHFQFFHLPVLMFMLITLLNDGCLMTIGYDHVIPSERPQKWNLPVVFVSASILAAVACGSSLMLLWIGLEGYSSQYYENSWFHRLGLAQLPQGKLVTMMYLKISISDFLTLFSSRTGGHFFFYMPPSPILFCGAIISLLVSTMAASFWHKSRPDNVLTEGLAWGQTNAEKLLPLWVWIYCIVWWFVQDVVKVLAHICMDAVDLFGCVSDASGSGPIKPYSDDMKVNGFEPVKKPAEKSTEKALNSSVSSASHKALEGLREDTHSPIEEASPVNVYVSRDQK

SEQ ID NO: 22456 - protein, 974 aa, Leishmania donovani
MSSKKYELDAAAFEDKPESHSDAEMTPQKPQRRQSVLSKAVSEHDERATGPATDPVPPSKGLTTEEAEELLKKYGRNELPEKKTPSWLIYVRGLWGPMPAALWIAIIIEFALENWPDGAILFAIQIANATIGWYETIKAGDAVAALKNSLKPTATVYRDSKWQQIDAAVLVPGDLVKLASGSAVPADCSINEGVIDVDEAALTGESLPVTMGPEHMPKMGSNVVRGEVEGTVQYTGSLTFFGKTAALLQSVESDLGNIHVILRRVMFSLCAISFMLCMCCFIYLLARFYETFRHALQFAVVVLVVSIPIALEIVVTTTLAVGSKHLSKHKIIVTKLSAIEMMSGVNMLCSDRTGTLTLNKMEIQEQCFTFEEGNDLKSTLVLAALAAKWREPPRDALDTMVLGAADLDECDNYQQLNFVPFDPTTKRTAATLVDRRSGEKFDVTKGAPHVILQMVYNQDEINDEVVDIIDSLAARGVRCLSVAKTDQQGRWHMAGILTFLDPPRPDTKDTIRRSKEYGVDVKMITGDHLLIAKEMCRMLDLDPNILTADKLPQIKDANDLPEDLGEKYGDMMLSVGGFAQVFPEHKFMIVETLRQRGYTCAMTGDGVNDAPALKRADVGIAVHGATDAARAAADMVLTEPGLSVVVEAMLVSREVFQRMLSFLTYRISATLQLVCFFFIACFSLTPKAYGSVDPHFQFFHLPVLMFMLITLLNDGCLMTIGYDHVIPSERPQKWNLPVVFVSASILAAVACGSSLMLLWIGLEGYSSQYYENSWFHRLGLAQLPQGKLVTMMYLKISISDFLTLFSSRTGGHFFFYMPPSPILFCGAIISLLVSTMAASFWHKSRPDNVLTEGLAWGQTNAEKLLPLWVWIYCIVWWFVQDVVKVLAHICMDAVDLFGCVSDASGSGPIKPYSDDMKVNGFEPVKKPAEKSTEKALNSSVSSASHKALEGLREDTHSPIEEASPVNVYVSRDQK

SEQ ID NO: 22457 - protein, 974 aa, Leishmania donovani
MSSKKYELDAAAFEDKPESHSDAEMTPQKPQRRQSVLSKAVSEHDERATGPATDLLPPSKGLTTEEAEELLKKYGRNELPEKKTPSWLIYVRGLWGPMPAALWIAIIIEFALENWPDGAILFAIQIANATIGWYETIKAGDAVAALKNSLKPTATVYRDSKWQQIDAAVLVPGDLVKLASGSAVPADCSINEGVIDVDEAALTGESLPVTMGPEHMPKMGSNVVRGEVEGTVQYTGSLTFFGKTAALLQSVESDLGNIHVILRRVMLALCAISFILCMCCFIYLLARFYETFRHALQFAVVVLVVSIPIALEIVVTTTLAVGSKHLSKHKIIVTKLSAIEMMSGVNMLCSDKTGTLTLNKMEIQEQCFTFEEGNDLKSTLVLAALAAKWREPPRDALDTMVLGAADLDECDNYQQLNFVPFDPTTKRTAATLVDRRSGEKFDVTKGAPHVILQMVYNQDEINDEVVDIIDSLAARGVRCLSVAKTDQQGRWHMAGILTFLDPPRPDTKDTIRRSKEYGVDVKMITGDHLLIAKEMCRMLDLDPNILTADKLPQIKDANDLPEDLGEKYGDMMLSVGGFAQVFPEHKFMIVETLRQRGYTCAMTGDGVNDAPALKRADVGIAVHGATDAARAAADMVLTEPGLSVVVEAMLVSREVFQRMLSFLTYRISATLQLVCFFFIACFSLTPKAYGSVDPNFQFFHLPVLMFMLITLLNDGCLMTIGYDHVIPSERPQKWNLPVVFVSASILAAVACGSSLMLLWIGLEGYSSQYYENSWFHRLGLAQLPQGKLVTMMYLKISISDFLTLFSSRTGGHFFFYVPPSPILFCGAIISLLVSTMAASFWHKSRPDNVLTEGLAWGQTNAEKLLPLWVWIYCIVWWFVQDVVKVLAHICMDAVDLFGCVSDASGSGPIKPYSDDMKVNGFEPVKKPAEKSTEKALNLSVSSGPHKALEGLREDTHVLNESTSPVNAFSPKVKK

SEQ ID NO: 22458 - protein, 257 aa, Trypanosoma brucei
DKTGTLTLNKMEIQEQCFTFEKGHDLRSLLVLSALAAKWREPPRDALDTMVLGAADLDECDNYEQLEFVPFDPTTKRTAATLVDKRSGEKFSVTKGAPHVILQMVYNQDEINDSVVDIIDKLASRGIRCLSVAKTDSAGRWHLCGILTFLDPPRPDTKETIRRSRQYGVDVKMITGDHVLIAKEMCRMLDLDPNILTVEKLPKVDVNNMPSDLGEKYGDMMLSVGGFAQVFPEHKFLIVEALRQRGYTCAMTGDGVN

SEQ ID NO: 22459 - protein, 917 aa, Trypanosoma cruzi
MNQKNDNSVLNNSNNGNFNEQHPPQKSQKRQSVLSKAISEHKEDGVDEVPMLPPSKGLTTAEAKELLAKYGRNELPEKKTPSWLIFARNLWGPMPFVLWVAIIIEFALENWPDGAILLAIQLANATIGWYETIKAGDAVAALKNSLKPVATVHRDGTWQQLDAALLVPGDLVKLASGSAVPADCSINEGVIDVDEAALTGESLPVTMGTDHMPKMGSNVVRGEVDGTVQYTGQNTFFGKTAVLLQSVESDLGNIHVILSRVMVVLTSFSFTLCLICFIYLMVKFKESFRRSLQFSVVVLVVSIPIALEIVVTTTLAVGSKKLSRHKIIVTKLTAIEMMSGVNMLCSDKTGTLTLNKMEIQDQCFTFEKGYDLRSVLVLAALAAKWREPPRDALDTMVLGAADLDECDNYTQTEFVPFDPTTKRTAATLVDKRTNEKFSVTKGAPHVIIQLVYNQDEINDQVVEIIDSLAARGVRCLSVAKTDSQGRWHLCGILTFLDPPRPDTKETIRRSKQYGVDVKMVTGDHVLIAKEMCRMLNLDPNILTADKLPKVDVNDLPDDLGEKYGEMMLGVGGFAQVFPEHKFMIVEALRQYGFTCAMTGDGVNDAPALKRADVGIAVQGATDAARAAADMVLTGPGLSVVVEAMLVSRQVFQRMLSFLTYRISATLQLVCFFFIACFSLTPRNYGSVDADFQFFHLPVLMFMLITLLNDGCLMTIGYDRVVPSKLPQRWNLPVVFTIAIILAAVACSSSLMLLWIALEGWGEETYPNSWFKALGLAQLKQGKVVTLLYLKISISDFLTLFSSRTGGRWFFTMAPGLVLLIGAIISLFVSSMVASFWHTSRPDGLLTEGLAWGDTNSERLLPLWVWIYCIVWWLIQDAVKVGAHMLMEWMDLFGCVSKAYGGKVVEQYMENKITEPAN

SEQ ID NO: 22460 - protein, 925 aa, Trypanosoma cruzi
MNQKNDKSVLNNSNNGNFNEQHPPQKPQKRQSVLSKAISEHKEDGVDEVPMLPPSKGLTTAEAEELLAKYGRNELPEKKTPSWLIFVRNLWGPMPFALWVAIIIEFALENWPDGAILLAIQLANATIGWYETIKAGDAVAALKNSLKPVATVHRDGAWKQLDAALLVPGDLVKLASGSAVPADCSINEGVIDVDEAALTGESLPVTMGTDHMPKMGSNVVRGEVDGTVQYTGQNTFFGKTAVLLQSVESDLGNIHVILSRVMVVLTSFSFTLCLICFIYLMVKFKESFRRSLQFSVVVLVVSIPIALEIVVTTTLAVGSKKLSRHKIIVTKLTAIEMMSGVNMLCSDKTGTLTLNKMEIQDQCFTFEKGHDLRSVLVLAALAAKWREPPRDALDTMVLGAADLDECDNYTQTEFVPFDPTTKRTAATLVDKRTNEKFSVTKGAPHVIIQLVYNQDEINDQVVEIIDSLAARGVRCLSVAKTDSQGRWHLCGILTFLDPPRPDTKETIRRSKQYGVDVKMITGDHVLIAKEMCRMLNLDPNILTADKLPKVDVNDLPDDLGEKYGEMMLGVGGFAQVFPEHKFMIVEALRQYGFTCAMTGDGVNDAPALKRADVGIAVQGATDAARAAADMVLTGPGLSVVVEAMLVSRQVFQCMLSFLTYRISATLQLVCFFFIACFSLTPRNYGSADADFQFFHLPVLMFMLITLLNDGCLMTIGYDRVVPSKLPQRWNLPVVFTIAIILAAVACGSSLMLLWIALEGWSDETYPNSWFKALGLAQLKQGKVVTLLYLKISISDFLTLFSSRTGGRWFFTMAPGLVLLIGAIISLFVSSMVASFWHTSRPDGLLTEGLAWGDTNSERLLPLWVWIYCIVWWLIQDAVKVGTHKLMEWMDLFGCVSRAYGGKVVEQYEDETPNSGNKNESKEPTV

SEQ ID NO: 22461 - protein, 875 aa, Trypanosoma cruzi
MLPPSKGLTTAEAEELLAKYGRNELPEKKTPSWLIFVRNLWGPMPFALWVAIIIEFALENWPDGAILLAIQLANATIGWYETIKAGDAVAALKNSLKPVATVHRDGAWQQLDAALLVPGDLVKLASGSAVPADCSINEGVIDVDEAALTGESLPVTMGTDHMPKMGSNVVRGEVDGTVQYTGQNTFFGKTAVLLQSVESDLGNIHVILSRVMVVLTSFSFTLCLICFIYLLAEFYETFRRSLQFSVVVLVVSIPLALEIVVTTTLAVGSKKLSRHKIVVTKLTAIEMMSGVNMLCSDKTGTLTLNKMEIQDQCFTFEKGYDLRSVLVLAALAAKWREPPRDALDTMVLGAADLDECDNYTQTEFVPFDPTTKRTAATLVDKRTNEKFSVTKGAPHVIIQLVYNPDEINDQVVEIIDSLAARGVRCLSVAKTDSQGRWHLCGILTFLDPPRPDTKETIRRSKQYGVDVKMITGDHVLIAKEMCRMLNLDPNILTADKLPKVDVNDMPDDLGEKYGEMMLGVGGFAQVFPEHKFMIVEALRQYGFTCAMTGDGVNDAPALKRADVGIAVQGATDAARAAADMVLTGPGLSVVVEALLVSRQVFQCMLSFLTYRISATLQLVCFFFIACFSLTPRNYGSVDADFQFFHLPVLMFMLITLLNDGCLMTIGYDRVVPSKLPQRWNLPVVFTIAIILAAVACGSSLMLLWIALEGWGEETYPNSWFKALGLAQLKQGKVVTLLYLKISISDFLTLFSSRTGGRWFFTMAPGLVLLIGAIISLFVSSMVASFWHTSRPDGLLTEGLAWGDTNSERLLPLWVWIYCIVWWLIQDAVKVGAHMLMEWMDLFGCVSKAYGGKVVEQYEDETSNSGNKNESKEPTV

SEQ ID NO: 22462 - protein, 508 aa, Trypanosoma cruzi
DPTTKRTAATLVDKRTNEKFSVTKGAPHVIIQLVYNQDEINDQVVEIIDSLAARGVRCLSVAKTDSQGRWHLCGILTFLDPPRPDTKETIRRSKQYGVDVKMITGDHVLIAKEMCRMLNLDPNILTADKLPKVDVNDLPDDLGEKYGEMMLGVGGFAQVFPEHKFMIVEALRQYGFTCAMTGDGVNDAPALKRADVGIAVQGATDAARAAADMVLTGPGLSVVVEAMLVSRQVFQCMLSFLTYRISATLQLVCFFFIACFSLTPRNYGSADADFQFFHLPVLMFMLITLLNDGCLMTIGYDRVVPSKLPQRWNLPVVFTIAIILAAVACGSSLMLLWIALEGWSDETYPNSWFKALGLAQLKQGKVVTLLYLKISISDFLTLFSSRTGGRWFFTMAPGLVLLIGAIISLFVSSMVASFWHKSRPDGLLTEGLAWGDTNSERLLPLWVWIYCIVWWLIQDAVKVGAHKLMEWMDLFGCVSRAYGGKVVEQYEDETPNSGNKNESKEPTV

SEQ ID NO: 22463 - protein, 245 aa, Trypanosoma cruzi
MNQKNDKSVLNNSNNGNFNEQHPPQKPQKRQSVLSKAISEHKEDDVDEVPMLPPSKGLTTAEAEELLAKYGRNELPEKKTPSWLIFVRNLWGPMPFALWVAIIIEFALENWPDGAILLVIQLANATIGWYETIKAGDAVAALKNSLKPVATVHRDGAWKQLDAALLVPGDLVKLASGSAVPADCSINEGVIDVDEAALTGESLPVTMGTDHMPKMGSNVVRGEVDGTVQYTGQNTFFGKTAVLLQ

SEQ ID NO: 22464 - protein, 1011 aa, Trypanosoma brucei brucei
MLPENLPTDPAAMTPAAVAAALRVDTKVGLSSNEVEERRQAFGINELPSEPPTPFWKLVLAQFEDTLVRILLLAATVSFAMAVVENNAADFVEPFIILLILILNATVGVWQENRAEGAIEALKSFVPKTAVVLRDGDIKTVNAEELVPGDVVEVAVGNRVPADMRVVELHSTTLRADQSILNGESVEAMKQIEAVKGRQERFPACMVYSGTAIVYGKALCVVVRTGASTEIGTIERDVREQEEVKTPLQVKLDEFGVLLSKVIGYICLVVFAVNLVRWYATHKPTKNETFFTRYIQPSVHCLKVAVALAVAAIPEGLPAVVTTCLALGTRRMAQHNALVRDLPSVETLGRCTVICSDKTGTLTTNMMSVLHAFTLKGDGSIKEYELKDSRFNIVSNSVTCEGRQVSSPLEQDGALTKLANIAVLCNDASLHHNAATVQVEKIGEATEAALLVMSEKFANIKGDSAVNAFRTLCEGKWKKNATLEFTRKRKSMSVHVTSTVTGSPASSTNNLFVKGAPEEVLRRSTHVMQDNGAVVQLSATHRKRIIEQLDKISGGANALRCIGFAFKPTKAVQHVRLNDPATFEDVESDLTFVGACGMLDPPREEVRDAIVKCRTAGIRVVVITGDRKETAEAICCKLGLLSSTADTTGLSYTGQELDAMTPAQKREAVLTAVLFSRTDPSHKMQLVQLLKDERLICAMTGDGVNDAPALKKADIGIAMGSGTEVAKSASKMVLADDNFATVVKAVQEGRAIYNNTKQFIRYLISSNIGEVVCILVTGLFGLPEALSPVQLLWVNLVTDGLPATALGFNAPDRDIMEQRPRRMEEPIVNGWLFMRYMVIGVYVGLATVGGFLWWFLRHGFSWHDLTTYTACSDMTNGTCLLLANPQTARAIALSILVVVEMLNALNALSENASLIVSRPSSNVWLLFAIFSSLSLHLIIMYVPFFAKLFNIVPLGVDPHVVQQAQPWSILTPTNFDDWKAVIVFSVPVIFLDELLKFITRRMEKAQEKKKD

SEQ ID NO: 22465 - protein, 1039 aa, Toxoplasma gondii
MDEASRRAAELEAAADKLEQTETVTVNYDTRGLTSDQVADLRKKYGWNEVKPHQVPEWFKVLKKYLSLVPMLLIVAALFSVCVVEDNMRDWFSFALLLFLNNSMVWADYIGQRSAHNAIAAVEKLGAPVCQVKRDGQWQNRQVRDLVPGDVVHLKAGVIMPADGVFVTKGTTITVDESALTGESVPIRKRPGAPLLSGSVVDRGEGEMLVTKTGNDSFYGKTLSLLARAERQGYLETVLHRTSLFITFVASCCAAFLFFWQSFNSDWKLIIPERRYLIALKHAFILIASVAPAAMPVVTTTVLSVGALIITKQNAAVSRLSAIEEAAGVVILFSDKTGTLTKNQLSLFKEESMIEPGYDEETMLLYASLCSDTQEPEPIDRTINAAADMTERAKYQILEYVPFNPVDKRTEATVVSPEGKKFITTKGAPHVIRDLVCYEDQKLREQLNELILNKAKRGLRTLGVAVKPVPDGVAGDAPRWKLVGYLSLFDPPREDTAATIQRANELGIRVIMVTGDQQAIAVETARQLHMGTNIVGPEIWKEEKETGLVQGKALAEFIETVDGFAGVFPEHKYAIVNAMMDAHKLVAMTGDGVNDAPALKRATIGIAVSGATQAARAAADIILFAPGLKTIITVMSLSRQIFKRVESYIIFRIYTSLIILGMWWGCIVILRYQFPSWTLVLMSMINDFVLMSCSRDRVASSTSPMIWSMLRVICLSTWLGFLATVSILLYVVFADPSHCVNWWPRWGLPKFTPDWPLPVSEHFMSYQTNAGVWLLMTVLIQFSFQSVRTRGLFCRYNENNQFPALVIIIPQICAVVVTIFLSIYWKIAWRPGSGPRMVGINWGQAWVTIFWGILWFFVMDATKIGFYKYAWPVITRNVVYKSIAETACQREIENNNVASKVMQNTVHFLEERERNVEKLEEKVEDAFLAAVTDAGELVKNDHGKSHIDRKEHKVSPEPGKTSTEDEVSLPRKDANSFVVSITSEEGACRTGFDDADAGTAKHRVAVDQKNREVSRSSGKTSIPLHPDVGKGCAVPSITR

SEQ ID NO: 22466 - protein, 1228 aa, Plasmodium falciparum
MEEVIKNAHTYDVEDVLKFLDVNKDNGLKNEELDDRRLKYGLNELEVEKKKSIFELILNQFDDLLVKILLLAAFISFVLTLLDMKHKKIEICDFIEPLVIVLILILNAAVGVWQECNAEKSLEALKELQPTKAKVLRDGKWEIIDSKYLYVGDIIELSVGNKTPADARIIKIYSTSLKVEQSMLTGESCSVDKYAEKMEDSYKNCEIQLKKNILFSSTAIVCGRCIAVVINIGMKTEIGHIQHAVIESNSEDTQTPLQIKIDLFGQQLSKIIFVICVTVWIINFKHFSDPIHGSFLYGCLYYFKISVALAVAAIPEGLPAVITTCLALGTRRMVKKNAIVRKLQSVETLGCTTVICSDKTGTLTTNQMTTTVFHLFRESDSLTEYQLCQKGDTYYFYESSNLTNDIYAGESSFFNKLKDEGNVEALTDDGEEGSIDEADPYSDYFSSDSKKMKNDLNNNNNNNNNSSRSGAKRNIPLKEMKSNENTIISRGSKILEDKINKYCYSEYDYNFYMCLVNCNEANIFCNDNSQIVKKFGDSTELALLHFVHNFDILPTFSKNNKMPAEYEKNTTPVQSSNKKDKSPRGINKFFSSKNDNSHITSTLNENDKNLKNANHSNYTTAQATTNGYEAIGENTFEHGTSFENCFHSKLGNKINTTSTHNNNNNNNNNSNSVPSECISSWRNECKQIKIIEFTRERKLMSVIVENKKKEIILYCKGAPENIIKNCKYYLTKNDIRPLNETLKNEIHNKIQNMGKRALRTLSFAYKKLSSKDLNIKNTDDYYKLEQDLIYLGGLGIIDPPRKYVGRAIRLCHMAGIRVFMITGDNINTARAIAKEINILNKNEGDDEKDNYTNNKNTQICCYNGREFEDFSLEKQKHILKNTPRIVFCRTEPKHKKQIVKVLKDLGETVAMTGDGVNDAPALKSADIGIAMGINGTEVAKEASDIVLADDNFNTIVEAIKEGRCIYNNMKAFIRYLISSNIGEVASIFITALLGIPDSLAPVQLLWVNLVTDGLPATALGFNPPEHDVMKCKPRHKNDNLINGLTLLRYIIIGTYVGIATVSIFVYWFLFYPDSDMHTLINFYQLSHYNQCKAWNNFRVNKVYDMSEDHCSYFSAGKIKASTLSLSVLVLIEMFNALNALSEYNSLFEIPPWRNKYLVLATIGSLLLHVLILYIPPLARIFGVVPLSAYDWFLVFLWSFPVIILDEIIKFYAKRKLKEEQRTKKIKID

SEQ ID NO: 22467 - protein, 1115 aa, Plasmodium yoelii
MENILKYAHIYNVEDVLRAVKVDENRGLSENEIRKRIMQYGFNELEVEKKKGILELILNQFDDLLVKILLLAAFVSFALTLLDMKDNEVALCDFIEPVVILMILILNAAVGVWQECNAEKSLEALKQLQPTKAKVLRDGKWEIIDSKYLTVGDIIELSVGNKTPADARIVKIFSTSIKAEQSMLTGESCSVDKYVEKLDESLKNCEIQLKKNILFSSTAIVAGRCTAVVIKIGMNTEIGNIQHAVIESNNEETDTPLQIKIDSFGKQLSKIIFIICVHVWIINFKHFSDPIHESFLYGCLYYFKISVALAVAAIPEGLPAVITTCLALGTRRMVKKNAIVRKLQSVETLGCTTVICSDKTGTLTTNQMTATVFHIFRESNTLKEYQLCQRGDTFFFYETNQDDENDSFFNKLKESPNNESSYKKKISKNIIDDDDDDTDYEREPLINMKSNVNTIISRGSKIIDDKINKYIYSDFDYHFYMCLCNCNEASILCNVNNKIVKTFGDSTELALLHFVHNFNILPNNTKNNKISMEYEKINNITKQNSDLNGGHDSSTYKKNKISDKKSEPTFPSKCVSAWRNECTIMRIIEFTRERKLMSVVVENSKNEYILYCKGAPENIINRCKYYMSKNDIRPLTDSLKNEILNKIKNMGKRALRTLSFAYKKVKSNDINIKNSEDYYKLEHDLIYIGGLGIIDPPRKYVGKAISLCHLAGIRVFMITGDNIDTAKAIAKEINILNHDDTDKYSCCFNGREFEDLPLEKQKYILKNYQQIVFCRTEPKHKKNIVKILKDLGETVAMTGDGVNDAPALKSADIGIAMGINGTQVAKEASDIILADDNFNTIVEAIKEGRCIYNNMKAFIRYLISSNIGEVASIFITAILGIPDSLAPVQLLWVNLVTDGLPATALGFNPPEHDVMKCKPRHRNDNLINGLTLLRYIVIGTYVGIATVSIFIYWYMFYPDMDNHTLINFYQLSHYNQCKTWSNFNVNKVYDMSEDLCSYFSAGKVKASTLSLSVLVLIEMFNALNALSEYNSLFVLPPWRNMYLVLATIGSLFLHCLIIYFPPLAGIFGVVPLTLHDWFLVFLWSFPVIIIDEIIKFYAKKQLNKELGYGQKLKTQ

SEQ ID NO: 22468 - protein, 908 aa, Salmonella typhimurium
MTDMNIENRKLNRPASENDKQHKKVFPIEAEAFHSPEETLARLNSHRQGLTIEEASERLKVYGRNEVAHEQVPPALIQLLQAFNNPFIYVLMALAGVSFITDYWLPLRRGEETDLTGVLIILTMVSLSGLLRFWQEFRTNRAAQALKKMVRTTATVLRRGPGNIGAVQEEIPIEELVPGDVVFLAAGDLVPADVRLLASRDLFISQSILSGESLPVEKYDVMADVAGKDSEQLPDKDKSLLDLGNICLMGTNVTSGRAQAVVVATGSRTWFGSLAKSIVGTRTQTAFDRGVNSVSWLLIRFMLIMVPVVLLINGFSKGDWVEASLFALAVAVGLTPEMLPMIVSSNLAKGAIAMSRRKVIVKRLNAIQNFGAMDVLCTDKTGTLTQDNIFLEHHLDVSGVKSSRVLMLAWLNSSSQSGARNVMDRAILRFGEGRIAPSTKARFIKRDELPFDFVRRRVSVLVEDAQHGDRCLICKGAVEEMMMVATHLREGDRVVALTETRRELLLAKTEDYNAQGFRVLLIATRKLDGSGNNPTLSVEDETELTIEGMLTFLDPPKESAGKAIAALRDNGVAVKVLTGDNPVVTARICLEVGIDTHDILTGTQVEAMSDAELASEVEKRAVFARLTPLQKTRILQALQKNGHTVGFLGDGINDAPALRDADVGISVDSAADIAKESSDIILLEKDLMVLEEGVIKGRETFGNIIKYLNMTASSNFVNVFSVLVASAFIPFLPMLAIHLLIQNLMYDISQLSLPWDKMDKEFLRKPRKWDAKNIGRFMLWIGPTSSIFDITTFALMWYVFAANNVEAQALFQSGWFIEGLLSQTLVVHMLRTQKIPFIQSRATLPVLLTTGLIMAIGIYIPFSPLGAMVGLEPLPLSYFPWLVATLLSYCLVAQGMKRFYIKRFGQWF

SEQ ID NO: 22469 - protein, 908 aa, Salmonella typhimurium
MTDMNIENRKLNRPASENDKQHKKVFPIEAEAFHSPEETLARLNSHRQGLTIEEASERLKVYGRNEVAHEQVPPALIQLLQAFNNPFIYVLMALAGVSFITDYWLPLRRGEETDLTGVLIILTMVSLSGLLRFWQEFRTNRAAQALKKMVRTTATVLRRGPGNIGAVQEEIPIEELVPGDVVFLAAGDLVPADVRLLASRDLFISQSILSGESLPVEKYDVMADVAGKDSEQLPDKDKSLLDLGNICLMGTNVTSGRAQAVVVATGSRTWFGSLAKSIVGTRTQTAFDRGVNSVSWLLIRFMLIMVPVVLLINGFSKGDWVEASLFALAVAVGLTPEMLPMIVSSNLAKGAIAMSRRKVIVKRLNAIQNFGAMDVLCTDKTGTLTQDNIFLEHHLDVSGVKSSRVLMLAWLNSSSQSGARNVMDRAILRFGEGRIAPSTKARFIKRDELPFDFVRRRVSVLVEDAQHGDRCLICKGAVEEMMMVATHLREGDRVVALTETRRELLLAKTEDYNAQGFRVLLIATRKLDGSGNNPTLSVEDETELTIEGMLTFLDPPKESAGKAIAALRDNGVAVKVLTGDNPVVTARICLEVGIDTHDILTGTQVEAMSDAELASEVEKRAVFARLTPLQKTRILQALQKNGHTVGFLGDGINDAPALRDADVGISVDSAADIRKESSDIILLEKDLMVLEEGVIKGRETFGNIIKYLNMTASSNFVNVFSVLVRSAFIPFLPMLAIHLLIQNLMYDISQLSLPWDKMDKEFLRKPRKWDAKNIVRFMLWIGPTSSIFDITTFALMWYVFAANNVEAQALFQSGWFIEGLLSQTLVVHMLRTQKIPFIQSRATLPVLLTTGLIMAIGIYIPFSPLGAMVGLEPLPLSYFPWLVATLLSYCLVAQGMKRFYIKRFGQWF

SEQ ID NO: 22470 - protein, 1002 aa, Porcellio scaber
MENSHCASFQDALQFFGLREETGLTDQQVKDNQAKYGPNELPAEEGKSLLTLILEQFDDLLVKILLLAAIISFVLACFEEGEETVTAFVEPFVILLILIANAIVGVWQERNAESAIEALKEYEPEMGKVVRASKAGVQKIRAREIVPGDIVEISVGDKIPADIRLMKIYSTTLRIDQSILTGESVSVIKHTDPIPDPKAVNQDKKNILFSGTNVAAGKARGIVIGTGLNTAIGAIRTQMAETEEIRTPLQQKLDEFGEQLSKVISIICVAVWAINIGHFNDPAHGGSWIKGAIYYFKIAVALAVAAIPEGLPAVITTCLALGTRRMAKKNAIVRSLPSVETLGCTSVICSDKTGTLTTNQMSVSRMFVIDKAEGNDCSLLEFEITGSTYEPIGDIFLKGQKVKGTDFEGLQEIATISLMCNDSSIDFNEFKNIFEKVGEATETALIVLGEKINPYVVSKVGLDRRSAALVSKQDMDTKWKKEFTLEFSRDRKSMSSYCIPQKPTRLGSGPKMFVKGAAEGVLDRCTHARVGTQKVPMTQGIKDKILAVTRDYGCGRDTLRCLALATIDNPIKPEDMDLGDATKFYTYEVNMTFVGVVGMLDPPRKEVRDSIQQCRLAGIRVIVITGDNKATAEAICRRIGVFGENEDTTGKSYSGREFDELSPAEQLNACMKSRLFSRVEPFHKSKIVEYLQSQNEISAMTGDGVNDAPALKKAEIGIAMGSGTAVAKSASEMVLADDNFSSIVAAVEEGRAIYNNMKQFIRYLISSNIGEVVSIFLTAALGLPEALIPVQLLWVNLVTDGLPATALGFNPPDLDIMQKPPRKADESLISGWLFFRYMAIGGYVGAGTVFAAAYWFMYDPTGPHLNYYQLSHHLSCLGEPENFEGVDCNIFSHPAPMTMALSVLVTIEMLNALNSLSENQSLVAMPPWSNIWLLAAMALSMTLHFIILYVDILSTVFQVMPLSPAQWIAVLKISLPVVLLDETLKLVARRYTDVPAEIIKQW

SEQ ID NO: 22471 - protein, 993 aa, Mizuhopecten yessoensis
MEYAHTKSCEEVLEYFNVETDGLSEEQVKTNTEKYGPNELPTEEGKPLWELILEQFDDLLVKILLLAAIISFVLAWFEESEEQVTAFVEPFVILTILICNAVVGVWQEKNAEDAIEALKEYEPEIAKVVRKGQRGVQKIRASLLVPGDIVEISVGDKIPADIRILHIYSTTLRIDQSILTGESVSVIKHTDPIPDPRAVNQDKKNILFSGTNISAGKCKGIAFGTGLNTAIGKIRDEMMETETEKTPLQQKLDEFGTQLSKVITIICICVWAINIGHFNDPAHGGSWMKGAIYYFKIAVALAVAAIPEGLPAVITTCLALGTRRMAKKNAIVRSLPSVETLGCTSVICSDKTGTLTTNQMSVCKMFVFNKVEGADIQTQQFEITGSTYAPEGDVYLGGKKVKTCDYDGLEEMATICAMCNDSSVDYNDTKGVYEKVGEATETALTVLCEKMNFFNTGRSGLNLREQGTVCNHVIQQMWSKEFTLEFSRDRKSMSVYCTPNKPSKIPGGTNMFAKGAPEGLLDRCTHVRVGKDKVPMSPAIKNEILKYTKAYGTGRDTLRCLALATIDAPPRREDMDLEDSRKFIQYETNMTFVGVVGMLDPPRMEVFDSIKNCRKAGIRVIVITGDNKATAEAICRRIGVFGENESTEGMSFTGREFDDLSHEEQRLAVTKSRLFARVEPAHKSKIVEYLQGEGEISAMTGDGVNDAPALKKAEIGIAMGSGTAVAKSASEMVLADDNFATIVSAVEEGRAIYNNMKQFIRYLISSNIGEVVCIFLTAALGIPEALIPVQLLWVNLVTDGLPATALGFNPPDMDIMKKPPRNAKEGLITGWLFFRYMAIGGYVGCATVGAAAWWFMVYDKGPQLNYYQLTHHSQCLAQDERFLGVDCKVFDHPAPMTMALSVLVVIEMLNALNSLSENQSLLVMPPWCNKWLLGAMALSMGLHFCILYIDVMSTIFQITPLGFEEWFAVLKISMPVILIDETLKFCARKFTDA

SEQ ID NO: 22472 - protein, 994 aa, Placopecten magellanicus
MEYAHTKSTEEVLEYFNVEESGLSEEQVKANTEKYGPNELPTEEGKPLWELILEQFDDLLVKILLLAAIISFVLVWFEESEEQVTAFVEPFVILTILICNAVVGVWQEKNAEDAIEALKEYEPEIAKVVRKGHRGVQKIRASLLVPGDIVEISVGDKIPADVRILQIYSTTLRIDQSILTGESVSVIKHTDPIPDPRAVNQDKKNILFSGTNISAGKCKGIAIGTGLNTAIGKIRDEMMETETEKTPLQQKLDEFGTQLSKVITIICICVWAINIGHFNDPAHGGSWMKGAIYYFKIAVALAVAAIPEGLPAVITTCLALGTRRMAKKNAIVRSLPSVETLGCTSVICSDKTGTLTTNQMSVCKMFVFNKVEGNGIQTQQFEITGSTYAPEGDVYLGGKKVKTCDYEGLEEMATICAMCNDSSVDYNDTKGLYEKVGEATETALTVLCEKMNFFNTSRGGMSLREQGTVCNHVIQQMWSKEFTLEFSRDRKSMSVFCTPNKPTKVPGGSKMFAKGAPEGLLDRCTHVRVGKDKVPMSPAIKNEIMKYTKIYGTGRDTLRCLALATIDAPPRREDMDLEDARKFIQYETNMTFVGVVGMLDPPRMEVFDSIKNCRKAGIRVIVITGDNKATAEAICRRIGVFGENESTEGMSYTGREFDDLSPEEQRLAVMKSRLFARVEPAHKSKIVEYLQGEGEISAMTGDGVNDAPALKKAEIGIAMGSGTAVAKSASEMVLADDNFATIVSAVEEGRAIYNNMKQFIRYLISSNIGEVVCIFLTAALGIPEALIPVQLLWVNLVTDGLPATALGFNPPDMDIMKKPPRNAKEGLITGWLFFRYMAIGGYVGCATVGAAAWWFMVYDKGPQLNYYQLTHHMQCLAEPKMFPGIDCKIFGAPEPMTMALSVLVTIEMLNALNSLSENQSLLVMPPWCNKWLLGAMALSMGLHFCILYIDIMSTIFQITPLGFEEWFAVLKISFPVILIDETLKFFCARKFTDA

SEQ ID NO: 22473 - protein, 1020 aa, Procambarus clarkii
MDDAHCFPVEDVVAKFGVNIENGLSASQVKDYQAKYGPNELPAEEGKSLLQLILEQFYDLLVKILLLAAIISFVLACFEEGEETVTAFVEPFVILLILIANAIVGVWQERNAESAIEALKEYEPEMGKVVRSNKHGVQKVRAREIVPGDIVEVSVGDKIPADIRLVKIFSTTLRIDQSILTGESVSVIKHADAIPDPKAVNQDKKNILFSGTNVSAGKARGVVIGTGLATAIGKIRTQMAETEEIKTPLQQKLDEFGEQLSKVISIICVAVWAINIGHFNDPAHGGSWIKGAIYYFKIAVALAVAAIPEGLPAVITTCLALGTRRMAKKNAIVRSLPSVETLGCTSVICSDKTGTLTTNQMSVSRMFIMDKVEGNDSSLLEFEVTGSTYEPIGDVYLKNTKVKGSDFEGLQELSTISFMCNDSSIDFNEFKNVFEKVGEATETALIVLGEKINPYNMSKSGLDRRSAAIIARHDMETKWKKEFTLEFSRDRKSMSSYCVPLKPTRLGTGPKMFCKGAPEGVLDRCTHVRVGTQKVPLTAGVKEKILSVTRDYGCGRDTLRCLGLATIDNPMKPEDMDLGEASKFYTYEVNMTFVGVVGMLDPPRKEVKDSIQRCRDAGIRVIVITGDNKATAEAICRRIGVFKEDEDTTGMSYSGREFDELSPEEQRQACIRSRLFSRVEPFRKSKIVEYLQGENEISAMTGDGVNDAPALKKAEIGIAMGSGTAVAKSASEMVLADDNFSSIVAAVEEGRAIYNNMKQFIRYLISSNVGEVVSIFLTAALGLPEALIPVQLLWVNLVTDGLPATALGFNPPDLDIMDKPPRRADESLISGWLFFRYMAIGGYVGAATVFAASWWFMYDPTGPHLNYYQLSHHLQCLGDPENFEGLDCNIFSHPAPMTMALSVLVTIEMLNALNSLSENQSLLIMPPWVNFWLLAAMALSMTLHFIILYIDILSTVFQVMPLSVAQWVAVLKISFPVLLLDETLKFIARNYTDGENNLYKCHWIVLAWATYFAYIKIYFF

SEQ ID NO: 22474 - protein, 1002 aa, Procambarus clarkii
MDDAHCFPVEDVVAKFGVNIENGLSASQVKDYQAKYGPNELPAEEGKSLLQLILEQFDDLLVKILLLAAIISFVLACFEEGEETVTAFVEPFVILLILIANAIVGVWQERNAESAIEALKEYEPEMGKVVRSKKHGVQKVRAREIVPVDIVEVSVGDKIPADIRLVKIFSTTLRIDQSILTGESVSVIKHTDAIPDPKAVNQDKKNILFSGTNVSAGKARGVVIGTGLATAIGKIRTQMAETEEIKTPLQQKLDEFGEQLSKVISIICVAVWAINIGHFNDPAHGGSWIKGAIYYFKIAVALAVAAIPEGLPAVITTCLALGTRRMAKKNAIVRSLPSVETLGCTSVICSDKTGTLTTNQMSVSRMFIMDKVEGNDSSLLEFEVTGSTYEPIGDVYLKNTKVKGSDFEGLQELSTISFMCNDSSIDFNEFKNVFEKVGEDTETALIVLGEKINPYNMSKSGLDRRSAAIIARHDMETKWKKEFTLEFSRDRKSMSSYCVPLKPTRLGTGPKMFCKGAPEGVLDRCTHVRVGTQKVPLTAGVKEKILSVTRDYGCGRDTLRCLGLATIDNPMKPEDMDLGEASKFYTYEVNMTFVGVVGMLDPPRKEVKDSIQRCRDAGIRVIVITGDNKATAEAICRRIGVFKEDEDTTGMSYSGREFDELSPEEQRQACIRSRLFSRVEPFHKSKIVEYLQGENEISAMTGDGVNDAPALKKAEIGIAMGSGTAVAKSASEMVLADDNFSSIVAAVEEGRAIYNNMKQFIRYLISSNVGEVVSIFLTAALGLPEALIPVQLLWVNLVTDGLPATALGFNPPDLDITDKPPRRADESLISGWLFFRYMAIGGYVGAATVFAASWWFMYDPTGPHLNYYQLPHHLQCLGDPENFEGLDCNIFSHPAPMTMALSVLVTIEMLNALNSLSENQSLLIMPPWVNFWLLAAMALSMTLHFIILYIDILSTVFQVMPLSVAQWVAVLKISFPVLLLDETLKFIARNYTDVPEQIKQQW

SEQ ID NO: 22475 - protein, 185 aa, Talaromyces emersonii
  unsure (1)..(185): unsure at all Xaa locations
SVKMLTGXAIAIAKETCKMLALGTKVYNSERLIHGGLTGSRVHDLVERADGFAEVFPEHKYQVVEMLQQRGHLTAMTGDGVNDAPSLKKSDCGIAVEGATEAAQAAADIVFLAPGLSTIVDSIKVARQIFQRMKAYIQYRIALCLHLEIYLVTSMIIINETIRADLIVFIALFADLATIAVAYDN

SEQ ID NO: 22476 - protein, 954 aa, Kosteletzkya virginica
MASSKGISLEEIRNETVDLEKIPIEEVFEQLKCTKEGLSSEEGANRLQIFGPNKLEEKKESKILKFLGFMWNPLSWVMEAAAIMAIALANGEGKPPDWQDFVGIVCLLVINSTISFIEENNAGNAAAALMAGLAPKTKVLRDGKWSEQEAAILVPGDIISVKLGDIIPADARLLEGDPLKVDQSALTGESLPVTKHPGQEVFSGSTCKQGEIEAVVIATGVHTFFGKAAHLVDSTNQVGHFQKVLTAIGNFCICSIAVGMLVEIIVMYPIQHRKYRDGIDNLLVLLIGGIPIAMPTVLSVTMAIGSHRLSQQGAITKRMTAIEEMAGMDVLCSDKTGTLTLNKLTVDKNLIEVFVKDGDKDHVLLLAARASRVENQDAIDAAIVGTLADPREARASITEVHFLPFNPVDKRTAITYIDSNGNWHRASKGAPEQILALCNAKEDFKKKVHSIIDKFAERGLRSLAVSRQQVPEKSKESAGAPWQFVGLLSLFDPPRHDSAETIRQTLHLGVNVKMITGDQLAIAKETGRRLGMGTNMYPSASLLGQDKDANIAALPVEELIEKADGFAGVFPEHKYEIVKKLQERKHICGMTGDGVNDAPALKKADIGIAVADATDAARSASDIVLTEPGLSVIISAVLTSRAIFQRMKNYTIYAVSITIRIVFGFLFIALIWKFDFSPFMVLIIAILNDGTIMTISKDRVKPSPLPDSWKLKEIFATGIVLGGYLALMTVIFFWAMHDTDFFSEKFSVRSLRGSENEMMGALYLQVSIVSQALIFVTRSRSWSYAERPGLLLLSAFIIAQLVATLIAVYANWGFARIKGIGWGWAGVIWLYSIVFYVPLDFIKFAIRYILSGKAWLTLFENKTAFTTKKDYGKEEREAQWALAQRTLHGLQPPETSNLFHEKNSYRELSEIAEQAKRRAEVARLRELHTLKGHVESVVKLKGLDIDTIQQHYTV

SEQ ID NO: 22477 - protein, 241 aa, Kosteletzkya virginica
DKTGTLTLNKLTVDRTLIEVFTKGVEKEHVLLYAARASRIENQDAIDAAIVGMLADPKEARAGIREIHFLPFNPVDKRTALTYIDSDGNWHRASKGAPEQILDLCHCKEDVRRKVHSVIDKFAERGLRSLAVARQQVPEKSKDAPGAPWQLIGLFPLFDPPRHDSAETIRRALNLGVNVKMITGDQLAIAKETGRRLGMGTNMYPSSSLLGQDKDASIASLPVDELIEKADGFAGVFPEHK

SEQ ID NO: 22478 - protein, 1000 aa, Heliothis virescens
MEDAHSKSVDEVLGYFGTDPDKGLSADQVKRNQDKYGPNELPAEEGKSIWQLVLEQFDDLLVKILLLAAIISFVLALFEEHEDAFSAFVEPFVILLILIANAVVGVWQERNAESAIEALKEYEPEMGKVIRGDKSGVQKIRAKEIVPGDVVEVSVGDKIPADIRLIKIYSTTIRIDQSILTGESVSVIKHTDPIPDPRAVNQDKKNILFSGTNVAAGKARGIVIGTGLNTAIGKIRTEMSETEEIKTPLQQKLDEFGEQLSKVISVICVAVWAINIGHFNDPAHGGSWIKGAVYYFKIAVALAVAAIPEGLPAVITTCLALGTRRMAKKNAIVRSLPSVETLGCTSVICSDKTGTLTTNQMSVSRMFIFEKIEGGDSSFLEFEITGSTYEPIGDVYLKGQKIKAAEFDALHELGTICVMCNDSAIDFNEFKQAFEKVGEATETALIVLAEKMNPFNVPKTGLDRRSCAIVVRQEIETKWKKEFTLEFSRDRKSMSTYCTPLKPSRLGNGPKLFVKGAPEGVLERCTHARVGTAKVPLNSTLKNRILDLTRQYGTGRDTLRCLALATADSPLKPDEMDLGDSTKFYTYEVNLTFVGVVGMLDPPRKEVFDSIVRCRAAGIRVIVITGDNKATAEAICRRIGVFTEEEDTTGKSFSGREFDDLPVSEQRAACAKARLFSRVEPAHKSKIVEFLQSMNEISAMTGDGVNDAPALKKAEIGIAMGSGTAVAKSAAEMVLADDNFSSIVAAVEEGRAIYNNMKQFIRYLISSNIGEVVSIFLTAALGLPEALIPVQLLWVNLVTDGLPATALGFNPPDLDIMDKPPRKADEGLISGWLFFRYMAIGGYVGAATVGAASWWFMYSPFGPQMSYWQLTHHLQCLSGGDEFKGIDCKIFTDPHPMTMALSVLVTIEMLNAMNSLSENQSLVTMPPWSNMWLVGSMALSFTLHFVILYVEVLSAVFQVTPLSIDEWVTVMKFSIPVVLLDEVLKFVARKISDAQPTWKL

SEQ ID NO: 22479 - protein, 1136 aa, Plasmodium yoelii yoelii
  unsure (1)..(1136): unsure at all Xaa locations
MENILKYAHIYNVEDVLRAVKVDENRGLSENEIRKRIMQYGFNELEVEKKKGILELILNQFDDLLVKILLLAAFVSFALTLLDMKDNEVALCDFIEPVVILMILILNAAVGVWQECNAEKSLEALKQLQPTKAKVLRDGKWEIIDSKYLTVGDIIELSVGNKTPADARIVKIFSTSIKAEQSMLTGESCSVDKYVEKLDESLKNCEIQLKKNILFSSTAIVAGRCTAVVIKIGMNTEIGNIQHAVIESNNEETDTPLQIKIDSFGKQLSKIIFIICVTVWIINFKHFSDPIHESFLYGCLYYFKISVALAVAAIPEGLPAVITTCLALGTRRMVKKNAIVRKLQSVETLGCTTVICSDKTGTLTTNQMTATVFHIFRESNTLKEYQLCQRGDTFFFYETNQDDENDSFFNKLKESPNNESSYKKKISKNIIDDDDDDTDYEREPLINMKSNVNTIISRGSKIIDDKINKYIYSDFDYHFYMCLCNCNEASILCNVNNKIVKTFGDSTELALLHFVHNFNILPNNTKNNKISMEYEKINNITKQNSDLNGGHDSSTYKKNKISDKKSEPTFPSKCVSAWRNECTIMRIIEFTRERKLMSVVVENSKNEYILYCKGAPENIINRCKYYMSKNDIRPLTDSLKNEILNKIKNMGKRALRTLSFAYKKVKSNDINIKNSEDYYKLEHDLIYIGGLGIIDPPRKYVGKAISLCHLAGIRVFMITGDNIDTAKAIAKEINILNHDDTDKYSCCFNGREFEDLPLEKQKYILKNYQQIVFCRTEPKHKKNIVKILKDLGETVAMTGDGVNDAPALKSADIGIAMGINGTQVAKEASDIILADDNFNTIVEAIKEGRCIYNNMKAFIRYLISSNIGEVASIFITAILGIPDSLAPVQLLWVNLVTDGLPATALGKRRPTLITTFLPRFSPRFCSVFTPFSLLTTSHHFSLLRIQPPRARRNEVQAPTQKRQFNKRANPAXIHSHRNIYMDNHTLINFYQLSHYNQCKTWSNFNVNKVYDMSEDLCSYFSAGKVKASTLSLSVLVLIEMFNALNALSEYNSLFVLPPWRNMYLVLATIGSLFLHCLIIYFPPLAGIFGVVPLTLHDWFLVFLWSFPVIIIDEIIKFYAKKQLNKELGYGQKLKTQ

SEQ ID NO: 22480 - protein, 1467 aa, Plasmodium yoelii yoelii
MSSEKQSVIPNRANIKGEVNNNPNNQINDVSNSPINNNSSIVENGQDTVETNKNSVNTNIQNDKIGEKNVNEHSMPQKRRPTERERRTQRIEKAKTEKVDAGRRRGERDRAENKKEENKKEENKKEENKKEENKKEENKKEENKKEENKKEENKKEENKGEENKGEENKGEEKKGEEKKGEEKKGEEKKGEEMDKKAEKVDAEKVDAEKKEEENKGEENKGEEMDKSEKVDAEKKGDEQKGDEKKGDEKKGDEKKGDEGGKNEKEDGEETDNKEMLGKAKLEEENQLVESNVEKEEGYRNHYASESIENLCKEFDLADVNTGLNFEQVKINRERYGENHIEKDSITPIWLIFLSQYYSPVVMLLLIAALASLALNEVVEGISIITIVTLNACLATYMEKSSGDAIAKLAEMASPQCTVLRNGQKMIIPSRDVVVGDVVVITAGDSISADLRLIEVIELKTNESLLTGESEDIKKSLVPTDYTTPFCTNLCFATTSVTNGCGKGIVISTGLNTQVGKIASQLKKSSEGSKLTPLQVSLNRLGGLIGLIAIIVLMFIITLAILINYRDPAHADKDPLLVIIIIGVGFAVSSVPEGLPMVVTITLSAGAKDMVRKNANVRKLPAVETLGCCSVICSDKTGTLTEGKMTAINIVTFCKNSKLHDKNELTKTYDFYPTKGFDPSGGIFDSLELTSEIKKKIVLAKNKNISYDSILKNYGNPENKNLNVYKTRSLMLAAYLNSYDTTLSKNLKTGKWEIQGNMSEGPIVVAAAKAGYNIFNDSENDSENYLKKFKRLEDLEITFNSSRKMKVIFYKLIENNKFENINLKNHQKNVTYTHIAFIKGAPDKLIDISTNLLKETQEEIQVSWDKQINENEKLILTNKNIELSQKALRVLAVCIKPLTDKQIEQLRTYEDADERLQFIKTDEQGGFIPLGYIASFDPPRSGVKEAIQTCRNAQVKVIMITGDQKTTAIAIGKLIGLINNKKSEDEIRDNEQHGVDNNGSSSSNGDMIQAIECSELHINKNPNEPILPDDELDKFVDNILIYSRAQPEDKITIVQSLKRKGYLVAMTGDGVNDAPALKAADIGVAMGINGTEVAKGASEMILIDDNFCTVVSAIDVGRTIYSNIQKFVCFLLGTNIGEILYLSISIITQMPFPLEALQILFLNLMTDGCPAVALSREPPNADNMKTPPRPKKQPIMTKKWWLYGIIPHTIFEAICVLLSLAFSLYICTGSYTLNDIHNSCKTVNIQNASNPSESFEYKYFCSTYEYRVSPDYIGWITNLNFWDPRENKPVTFWGAAKGKIKNITPTHESIHQDIRIIMQDGCLGNLEEDEYGWCKPPSNVTAQSNDEHINGTFNKHFEDISSKGSKRGRTIAFISAVWCEMLRAYTVRSWEPFYKVFNRNMWMHLACSISATMTFLATCIPGITAILNTTCLLWWQYLFGIFWAMVNLILDEIIPKVIYRRKYMSIKN

SEQ ID NO: 22481 - protein, 1003 aa, Halocynthia roretzi
METSFAKSKEEVLDYFGVSETKGLSLDQVKENQEKYGKNELPAEEGKSVWEMLVEQFEDLLVRILLLAAIISFVLALFEDSEETITAFVEPLVILLILIANAVVGVWQERNAESAIEALKEYEPEMGKVLRQDRASVQRIRAKEIVPGDIVEVAVGYKVPADIRLISIKSTTLRVDQAILTGESVSVIKHTDCVPDLRAVNQDKKNMLFSGTNIAAGKATGIVIGTGSQTEIGKIRNEMAETENEKTPLQQKLDEFGEQLSKIITLICIAVWAINIGHFNDPVHGGSWIKGAVYYFKIAVALAVAAIPEGLPAVITTCLALGTRRMAKKNAIVRSLPSVETLGCTSVICSDKTGTLTTNQMSVCRMFVCKNIDSENNANFHQFTVAGSTYEPVGDVMIDGKKVNPGSFDALAELSTICALCNDSSLDFNENKGIYEKVGEATETALTVLCEKLNVFKTDVSGMSKAQRANACNQVIKNIMKKVFTLEFSRDRKSMSAYCEPSNPESPIGAKMFVKGAPEGILDRCTHVRIGNQKIWMTASIREQIMKLIKEYGTGRDTLRCLALGTIDNPPNPDQMDLTESTKFAQYESAITFVGVVGMLDPPRTEVFQAIQECKAAGIRVIVITGDNKATAEAICRRIGIFGEDECTEGLAYTGREFDDLSEEEQFQACLRARLFARVEPSHKSKIVGYLQRNGDVTAMTGDGVNDAPALKKAEIGIAMGSGTAVAKTAAEMVLADDNFTSIVSAVEEGRAIYNNMKQFIRYLISSNIGEVVCIFLAAALGVPEALIPVQLLWVNLVTDGLPATALSFNPPDLDIMNKQPRSTKDNLINGWLLCRYCVIGGYVGAATVGASTWWFVMAETGPQMSWWQVTHYMQCLTNPELFEGISCKIFVDPHPMTMALSVLVIIELCNALNSISENQSIIVMPPWRNMWLIGAIMLSLSLHFVILHVDPFPMVFQICPLSFTEWMMVLKISLPVIFIDEILKYVARNYIENESIAEKKTQ

SEQ ID NO: 22482 - protein, 898 aa, Escherichia coli O157:H7
MFKEIFTRLIRHLPSRLVHRDPLPGAQQTVNTVVPPSLSAHCLKMAVMPEEELWKTFDTHPEGLNQAEVESAREQHGENKLPAQQPSPWWVHLWVCYRNPFNILLTILGAISYATEDLFAAGVIALMVAISTLLNFIQEARSTKAADALKAMVSNTATVLRVINDKGENGWLEIPIDQLVPGDIIKLAAGDMIPADLRILQARDLFVAQASLTGESLPVEKAATTRQPEHSNPLECDTLCFMGTTVVSGTAQAMVIATGANTWFGQLAGRVSEQESEPNAFQQGISRVSMLLIRFMLVMAPVVLLINGYTKGDWWEAALFALSVAVGLTPEMLPMIVTSTLARGAVKLSKQKVIVKHLDAIQNFGAMDILCTDKTGTLTQDKIVLENHTDISGKTSERVLHSAWLNSHYQTGLKNLLDTAVLEGTDEESARSLASRWQKIDEIPFDFERRRMSVVVAENTEHHQLVCKGALQEILNVCSQVRHNGEIVPLDDIMLRKIKRVTDTLNRQGLRVVAVATKYLPAREGDYQRADESDLILEGYIAFLDPPKETTAPALKALKASGITVKILTGDSELVAAKVCHEVGLDAGEVVIGSDIETLSDDELANLAQRTTLFARLTPMHKERIVTLLKREGHVVGFMGDGINDAPALRAADIGISVDGAVDIAREAADIILLEKSLMVLEEGVIEGRRTFANMLKYIKMTASSNFGNVFSVLVASAFLPFLPMLPLHLLIQNLLYDVSQVAIPFDNVDDEQIQKPQRWNPADLGRFMIFFGPISSIFDILTFCLMWWVFHANTPETQTLFQSGWFVVGLLSQTLIVHMIRTRRVPFIQSCASWPLMIMTVIVMIVGIALPFSPLASYLQLQALPLSYFPWLVAILAGYMTLTQLVKGFYSRRYGWQ

SEQ ID NO: 22483 - protein, 994 aa, Rana esculenta
MEQAHTKTTEECLAYFGVNENTGLSLDQVKKNFDKFGPNELPAEEGKSLWELVAEQFEDLLVRILLLAAIISFVLAWFEEGEETVTAFVEPFVILLILIANAVVGVWQERNAEDAIEALKEYEPEMGKVYRSDRKSVQRIKARELVPGDIVEVAVGDKVPADIRLISIKSTTLRIDQSILTGESVSVIKHTEVVPDTRAVNQDKKNMLFSGTNVGAGKAVGVVIATGPNTEIGKIRDEMAATEQEKTPLQQKLDEFGEQLSKVISLICVAVWLINIGHFNDPIHGGSWIKGAIYYFKIAVALAVAAIPEGLPAVITTCLALGTRRMAKKNAIVRSLPSVETLGCTSVICSDKTGTLTTNQMSVCRMFVIDKVEGDVTSLNEFTITGSTYAPEGDVQKNDKNVKAGQYDGLVELATICALCNDSSLDFNESKGVFEKVGEATETALTTLVEKMNVFNTDVKSLSKVERANACNSVIKQLMKKEFTLEFSRDRKSMSVYCIPAKASRAAVGNKMFVKGAPEGVIDRCNYVRVGTTRVPLTSAIKDKILSVVKEWGTGRDTLRCLALATRDTPPKREDMVLDEATRFIEYETDLTFVGCVGMLDPPRKEVMGSIQLCREAGIRVIMITGDNKGTAIAICRRIGIFGEDDDVSGRAFTGREFDDLPPAEQREACKRASCFARVEPAHKSKIVEFLQSFDEITAMTGDGVNDAPALKKAEIGIAMGSGTAVAKTASEMVLADDNFSTIVAAVEEGRAIYNNMKQFIRYLISSNVGEVVCIFLTAALGLPEALIPVQLLWVNLVTDGLPATALGFNPPDLDIMDRPPRSPKEPLISGWLFFRYMAIGGYVGAATVGAAAWWFMYADDGPNVTFYQLSHFMQCTEDNPDFEGHECEIFESPVPMTMALSVLVTIEMCNALNSLSENQSLIRMPPWSNFWLLGSICLSMSLHFLILYVEPLPMIFKLTPLNVEQWFIVLKMSFPVILLDELLKFVARNYLEG

SEQ ID NO: 22484 - protein, 902 aa, Salmonella enterica subsp. enterica serovar Typhi
MLKTITRQLFARLNRHLPYRLVHRDPLPGAQTAVNATIPPSLSERCLKIAAMEQETLWRVFDTHPEGLNAAEVTRAREKHGENRLPAQKPSPWWVHLWVCYRNPFNILLTILGGISYATEDLFAAGVIALMVGISTLLNFVQEARSTKAADALKAMVSNTATVLRVINENGENAWLELPIDQLVPGDIIKLAAGDMIPADLRIIQARDLFVAQASLTGESLPVEKVATTREPRQNNPLECDTLCFMGTNVVSGTAQAVVMATGADTWFGQLAGRVSEQDNEQNAFQKGISRVSMLLIRFMLVMAPVVLIINGYTKGDWWEAALFALSVAVGLTPEMLPMIVTSTLARGAVKLSKQKVIVKHLDAIQNFGAMDILCTDKTGTLTQDKIMLENHTDISGKPSEHVLHCAWLNSHYQTGLKNLLDTAVLEGVDETAARQLSGRWQKIDEIPFDFERRRMSVVVAEDSNVHQLVCKGALQEILNVCTQVRHNGDIVPLDDNMLRRVKRVTDTLNRQGLRVVAVATKYLPAREGDYQRIDESDLILEGYIAFLDPPKETTAPALKALKASGITVKILTGDSELVAAKVCHEVGLDAGDVVIGSDIEGLSDDALAALAARTTLFARLTPMHKERIVTLLKREGHVVGFMGDGINDAPALRAADIGISVDGAVDIAREAADIILLEKSLMVLEEGVIEGRRTFSNMLKYIKMTASSNFGNVFSVLVASAFLPFLPMLPLHLLIQNLLYDVSQVAIPFDNVDEEQIQKPQRWNPADLGRFMVFFGPISSIFDILTFCLMWWVFHANTPETQTLFQSGWFVVGLLSQTLIVHMIRTRRLPFIQSRAAWPLMAMTLLVMVVGVSLPFSPLASYLQLQALPLSYFPWLIAILAGYMTLTQLVKGFYSRRYGWQ

SEQ ID NO: 22485 - protein, 908 aa, Salmonella enterica subsp. enterica serovar Typhi
MTDMNIENRKLNRPASENDKQHKKVFPIEAEAFHSPEETLARLNSHRQGLTIEEAGERLKVYGRNEVAHEQVPPVLVQLLQAFNNPFIYVLMALAGVSFITDYWLPLRRGEETDLTGVLIILTMVSLSGLLRFWQEFRTNRAAQALKKMVRTTATMLRRGPGNIGAVQEEIPIEELVPGDVVFLAAGDLVPADVRLLASRDLFISQLILSGESLPVEKYDVMADVAGKDSEQLPDKDKSLLDLGNICLMGTNVTSGRAQAVVVATGSRTWFGSLAKSIVGTRTQTAFDRGVNSVSWLLIRFMLIMVPVVLLINGFSKGDWVEASLFALAVAVGLTPEMLPMIVSSNLAKGAIAMSRRKVIVKRLNAIQNFGAMDVLCTDKTGTLTQDNIFLEHHLDVSGVKSSRVLMLAWLNSSSQSGARNVMDRAILRFGEGRIAPSTKARFIKRDELPFDFVRRRVSVLVEDAQHGDRCLICKGAVEEMMMVATHLREGDRVVALTETRRELLLAKTEDYNAQGFRVLLIATRKLDGSGNNPTLSVEDETELTIEGMLTFLDPPKESAGKAIAALRDNGVAVKVLTGDNPVVTARICLEVGIDTHDILIGTQVEAMSDAELASEVEKRAVFARLTPLQKTRILQALQKNGHTVGFLGDGINDAPALRDADVGISVDSAADIAKESSDIILLEKDLMVLEEGVIKGRETFGNIIKYLNMTASSNFGNVFSVLVASAFIPFLPMLAIHLLIQNLMYDISQLSLPWDKMDKEFLRKPRKWDAKNIGRFMLWIGPTSSIFDITTFALMWYVFAANNVEAQALFQSGWFIEGLLSQTLVVHMLRTQKIPFIQSRATLPVLLTTGLIMAIGIYIPFSPLGAMVGLEPLPLSYFPWLVATLLSYCLVAQGMKRFYIKRFGQWF

SEQ ID NO: 22486 - protein, 997 aa, Felis catus
MENAHTKTVEEVLGYFGVNESTGLSLEQVKKLKERWGSNELPAEEGKTLLELVIEQFEDLLVRILLLAACISFVLAWFEEGEETITAFVEPFVILLILVANAIVGVWQERNAENAIEALKEYEPEMGKVYRQDRKSVQRIKAKDIVPGDIVEIAVGDKVPADIRLTSIKSTTLRVDQSILTGESVSVIKHTDPVPDPRAVNQDKKNMLFSGTNIAAGKAMGVVVATGVNTEIGKIRDEMVATEQERTPLQQKLDEFGEQLSKVISLICIAVWIINIGHFNDPVHGGSWIRGAIYYFKIAVALAVAAIPEGLPAVITTCLALGTRRMAKKNAIVRSLPSVETLGCTSVICSDKTGTLTTNQMSVCRMFILDKVEGDTCSLNEFTITGSTYAPIGEVHKDDKPVKCHQYDGLVELATICALCNDSALDYNEAKGVYKKFGEATETALTCLVEKMNVFDTELKGLSKIERANACNSVIKQLMKKEFTLEFSRDRKSMSVYCTPNKPSRTSMSKMFVKGAPEGVIDRCTHIRVGSTKVPMTPGVKQKVMSVIREWGSGSDTLRCLALATHDNPLRREEMNLEDSANFIKYETNLTFVGCVGMLDPPRIEVASSVKLCRQAGIRVIMITGDNKGTAVAICRRIGIFGQDEDVTSKAFTGREFDELSPSAQRDACLNARCFARVEPSHKSKIVEFLQSFDEITAMTGDGVNDAPALKKSEIGIAMGSGTAVAKTASEMVLADDNFSTIVAAVEEGRAIYNNMKQFIRYLISSNVGEVVCIFLTAALGFPEALIPVQLLWVNLVTDGLPATALGFNPPDLDIMNKPPRNPKEPLISGWLFFRYLAIGCYVGAATVGAAAWWFIAADGGPRVSFYQLSHFLQCKDDNPDFEGVDCAIFESPYPMTMALSVLVTIEMCNALNSLSENQSLLRMPPWENIWLVGSICLSMSLHFLILYVEPLPLIFQITPLNLTQWLMVLKISLPVILMDETLKFVARNYLEPAILE

SEQ ID NO: 22487 - protein, 783 aa, Ferroplasma acidarmanus
MIKSSDSLEDLFKKLNTSKAGLSGNEASSRLHTYGYNEVSEKKESSILKFLKKFWTPISWMLELTIIITFILGKYDDSLIILFLLIFNGVISFTQESKADNAVELLKKKLSAQARVLRDGKWNVIETKFLVPGDIVHLRLGDVVPADIKIIDDELEIDQSALTGESLSVTRKKGDTIYSSSVVKRGECNGLVTETGSKTYFGKTTELVEIAKTKSHIEELIMKIIKDLIAIDTILVIALILFSIYRGVDITEVIPFALVILIASIPVALPATFTIAMSLGALHMSKRGEIVTRLSAIEDAASMDTLCMDKTGTITENKLTIKTPKVYTGDELSLIKYASYASQRKSEDPIDDAILDYADLKSVKIDYANRSKFTPFDPSIKRTEAIINEAGKSVKIVKGAPQVISELTGNVPETYENDIKYFSSQGFRIISVAAGTDKLEILGVIPLYDPPRKDSRDLITELKQLSVSPVMITGDNSLIAEEVAGEIGLEKKLCNAENIKGNYAGASDCSVFAEVFPEDKYYIVKALQKSGHIVGMTGDGVNDSPALKQAEFGVAVASATDVAKASASVVLTHSGLTDIVDGIKSGRRIYQRMLTYTLNKIIKVIQIVFFLTLSFFVVGFFVTTAFDVILLIFANDFVTMAIATDNVGYSIKPERWNVNSLISSSVILAAFLVVESFIFLYIGLYAGLRISQIHTFIFDMLVFSGQFTVYMVRERKRFSNSMPSKILLLSSIVDIIIISFISYYGILVTAIPLKFILISIGLTFIWMVFMDTIKNVVFRHYKL

SEQ ID NO: 22488 - protein, 902 aa, Salmonella typhimurium LT2
MLKIITRQLFARLNRHLPYRLVHRDPLPGAQTAVNATIPPSLSERCLKVAAMEQETLWRVFDTHPEGLNAAEVTRAREKHGENRLPAQKPSPWWVHLWVCYRNPFNILLTILGGISYATEDLFAAGVIALMVGISTLLNFVQEARSTKAADALKAMVSNTATVLRVINENGENAWLELPIDQLVPGDIIKLAAGDMIPADLRIIQARDLFVAQASLTGESLPVEKVAATREPRQNNPLECDTLCFMGTNVVSGTAQAVVMATGAGTWFGQLAGRVSEQDNEQNAFQKGISRVSMLLIRFMLVMAPVVLIINGYTKGDWWEAALFALSVAVGLTPEMLPMIVTSTLARGAVKLSKQKVIVKHLDAIQNFGAMDILCTDKTGTLTQDKIVLENHTDISGKPSEHVLHCAWLNSHYQTGLKNLLDTAVLEGVDETAARQLSGRWQKIDEIPFDFERRRMSVVVAEDSNVHQLVCKGALQEILNVCTQVRHNGDIVPLDDNMLRRVKRVTDTLNRQGLRVVAVATKYLPAREGDYQRIDESDLILEGYIAFLDPPKETTAPALKALKASGITVKILTGDSELVAAKVCHEVGLDAGDVIIGSDIEGLSDDALAALAARTTLFARLTPMHKERIVTLLKREGHVVGFMGDGINDAPALRAADIGISVDGAVDIAREAADIILLEKSLMVLEEGVIEGRRTFSNMLKYIKMTASSNFGNVFSVLVASAFLPFLPMLPLHLLIQNLLYDVSQVAIPFDNVDEEQIQKPQRWNPADLGRFMVFFGPISSIFDILTFCLMWWVFHANTPETQTLFQSGWFVVGLLSQTLIVHMIRTRRLPFIQSRAAWPLMAMTLLVMVVGVSLPFSPLASYLQLQALPLSYFPWLIAILVGYMTLTQLVKGFYSRRYGWQ

SEQ ID NO: 22489 - protein, 908 aa, Salmonella typhimurium LT2
MTDMNIENRKLNRPASENDKQHKKVFPIEAEAFHSPEETLARLNSHRQGLTIEEASERLKVYGRNEVAHEQVPPALIQLLQAFNNPFIYVLMALAGVSFITDYWLPLRRGEETDLTGVLIILTMVSLSGLLRFWQEFRTNRAAQALKKMVRTTATVLRRGPGNIGAVQEEIPIEELVPGDVVFLAAGDLVPADVRLLASRDLFISQSILSGESLPVEKYDVMADVAGKDSEQLPDKDKSLLDLGNICLMGTNVTSGRAQAVVVATGSRTWFGSLAKSIVGTRTQTAFDRGVNSVSWLLIRFMLIMVPVVLLINGFSKGDWVEASLFALAVAVGLTPEMLPMIVSSNLAKGAIAMSRRKVIVKRLNAIQNFGAMDVLCTDKTGTLTQDNIFLEHHLDVSGVKSSRVLMLAWLNSSSQSGARNVMDRAILRFGEGRIAPSTKARFIKRDELPFDFVRRRVSVLVEDAQHGDRCLICKGAVEEMMMVATHLREGDRVVALTETRRELLLAKTEDYNAQGFRVLLIATRKLDGSGNNPTLSVEDETELTIEGMLTFLDPPKESAGKAIAALRDNGVAVKVLTGDNPVVTARICLEVGIDTHDILTGTQVEAMSDAELASEVEKRAVFARLTPLQKTRILQALQKNGHTVGFLGDGINDAPALRDADVGISVDSAADIAKESSDIILLEKDLMVLEEGVIKGRETFGNIIKYLNMTASSNFGNVFSVLVASAFIPFLPMLAIHLLIQNLMYDISQLSLPWDKMDKEFLRKPRKWDAKNIGRFMLWIGPTSSIFDITTFALMWYVFAANNVEAQALFQSGWFIEGLLSQTLVVHMLRTQKIPFIQSRATLPVLLTTGLIMAIGIYIPFSPLGAMVGLEPLPLSYFPWLVATLLSYCLVAQGMKRFYIKRFGQWF

SEQ ID NO: 22490 - protein, 1200 aa, Mus musculus
MAVVGNAVPCGARPGGARDNGSPQPGSRLRPGLAAGPALIANGDELVAAVWPYRRLALLRRLTVLPFAGLLYPAWLGAAASGCWGWGSSWTQIPEAALLALATICLAHALTVLSGHWSVHAHCALTCTPEYDPNKVTFVKVVPTPNNGSTELVALHRDKGEDGLEVLSFEFQKIKYSYDALEKKQFLSVAFPVGNAFSYYQSNRGFQEDSEIRAAEKKFGSNKAEMVVPDFSELFKERATAPFFVFQVFCVGLWCLDEYWYYSVFTLSMLVAFEASLVQQQMRNMSEIRKMGNKPHMIQVYRSRKWRPVASDDIVPGDIVSIGRSPQENLVPCDVLLLRGRCIVDEAMLTGESVPQMKEPIEDLSPDRVLDLQADARLHVIFGGTKVVQHIPPQKATSGLKPVDNGCVAFVLRTGFNTSQGRLLRTILFGVKRVTANNLETFIFILFLLVFAIAAAAYVWVEGTKDPSRNRYKLFLECTLILTSVVPPELPIELSLAVNTSLIALAKLYMYCTEPFRIPFAGKVEVCCFDKTGTLTSDSLVVRGVAGLRDGKEVTPVSSIPIETHRALASCHSLMQLDDGTLVGDPLEKAMLTAVDWTLTKDEKVFPRSIKTQGLKIHQRFHFASALKRMSVLASYEKLGSTDLCYIAAVKGAPETLHSMFSQCPPDYHHIHTEISREGARVLALGYKELGHLTHQQAREIKREALECSLKFVGFIVVSCPLKADSKAVIREIQNASHRVVMITGDNPLTACHVAQELHFIDKAHTLILHPPSEKGQPCEWRSIDSSIVLPLTLGSPKALALEHALCLTGDGLAHLQAVDPQQLLCLIPHVQVFARVAPKQKEFVITSLKELGYVTLMCGDGTNDVGALKHADVGVALLANAPERVVERRRRPRDSPVLSNSGPRVSRSTKQKSALLSPEEPPASHRDRLSQVLRDLEEESTPIVKLGDASIAAPFTSKLSSIQCICHVIKQGRCTLVTTLQMFKILALNALILAYSQSVLYLEGVKFSDFQATLQGLLLAGCFLFISRSKPLKTLSRERPLPNIFNLYTILTVMLQFSVHFLSLVYLYREAQARSPEKQEQFVDLYKEFEPSLVNSTVYIMAMAMQMATFAINYKGPPFMESLPENKPLVWSLAVSLLAIIGLLLGSSPDFNSQFGLVDIPVEFKLVIGQVLALDFCLALLADRVLQFFLGTPKLRVPS

SEQ ID NO: 22491 - protein, 1169 aa, Mus musculus
MSADSSLLMGSTPPSYGTLTTGTSIDPLSSSASSVRLSGYCGSPWRAIGYHAAVWMLAGIPWLLFRWKPLWGVRLRLKPCSLAHAETLVIEIKDKEGSSRQLFTVQVQTEALVQGSLELPPQAQAEDGRSQAAVGVTPEGTWQDTSELHRQEEAKQVLRYYVLQGQRYVWMETQQAFCQVSLLDHSRTCDDVHCSSSGLSLQDQATRKTIYGPNVISIPVKSYLQLLADEALNPYYGFQAFSIALWLADHYYWYALCIFLISAISICLALYKTRKQSLTLRDMVKLSVRVQVCRPGGEEEWVDSSELVPGDCLVLPQEGGVMPCDAALVAGECVVNESSLTGESTPVLKTALPEGPKPYCPETHRRHTLFCGTLILQARAYVGPRVLAVVTRTGFCTAKGGLVSSILHPRPISFKFYKHSMKFVAALSVLALLGTVYSIVILYRNRVPVREIVIRALDLVTVVVPPALPAAMTVCTLYAQSRLRAQGIFCIHPLRINLGGKLRLVCFDKTGTLTEDGLDVMGVVPLKGQVLLPLVPEPRHLPLGPLLRALATCHALSQLHDTPVGDPMDLKMVESTGWVLEEGPAAGSAPGSQVLVVMRPPPGGPRQQEEPPVPVSVLCRFPFSSALQRMDVVVTWPGATQPEAYVKGSPELVASLCSPETVPSDFSQVLQSYTAAGYRVVALAGKPLPIAPSLEAAQQLTRDTVERELSLLGLLVMRNLLKPQTAPVIQTLRKTGIRTVMVTGDNLQTAVTVARACGMVGAQEHLAVIHATHPEQGQPAALEFLPTESSAVMNGAKATGYPTVPEPQFCHLALSGSTFAVLRKHFPKLLPKVLVQATVFARMAPEQKTELVCELQRLQYCVGMCGDGANDCGALKAADVGISLSQAEASVVSPFTSSMASIECVPTVIREGRCSLDTSFSVFKYMALYSLTQFISVLILYTINTNLGDLQFLAIDLVITTTVAVLMSRTGPALTLVRARPPGALLSVPVLGSLLLQVALVAGIQLGGYFLVIAQPWFVPLNRTVPAPDNLPNYENTVVFSLSGFQYLILAAAVSKGAPFRQPLYTNVPFLVALALLGSVLVGLILVPGLLQGPLGLRNIVDSSFKLLLLGLVAFNFVGAFMLESVLDQCLPACLRWLRPKRASKKQFKRLQQELAEHPWPTLPVGSVR

SEQ ID NO: 22492 - protein, 1169 aa, Mus musculus
MSADSSLLMGSTPPSYGTLTTGTSIDPLSSSASSVRLSGYCGSPWRAIGYHAAVWMLAGIPWLLFRWKPLWGVRLRLKPCSLAHAETLVIEIKDKEGSSRQLFTVQVQTEAVVQGSLELPPQAQAEDGRSQAAVGVTPEGTWQDTSELHRQEEAKQVLRYYVLQGQRYVWMETQQAFCQVSLLDHGRTCDDVHCSSSGLSLQDQATRKTIYGPNVISIPVKSYLQLLADEALNPYYGFQAFSIALWLADHYYWYALCIFLISAISICLALYKTRKQSLTLRDMVKLSVRVQVCRPGGEEEWVDSSELVPGDCLVLPQEGGVMPCDAALVAGECVVNESSLTGESTPVLKTALPEGPKPYCPETHRRHTLFCGTLILQARAYVGPRVLAVVTRTGFCTAKGGLVSSILHPRPISFKFYKHSMKFVAALSVLALLGTVYSIIILYRNRVPVREIVIRALDLVTVVVPPALPAAMTVCTLYAQSRLRTQGIFCIHPLRINLGGKLRLVCFDKTGTLTEDGLDVMGVVPLKGQVLLPLVPEPCHLPLGPLLRALATCHALSQLHDTPVGDPMDLKMVESTGWVLEEGPAAGSAPGSQVLVVMRPPPGGPRQQEEPPVPVSVLCRFPFSSALQRMDVVVTWPGATQPEAYVKGSPELVASLCSPETVPSDFSQVLQSYTAAGYRVVALAGKPLPIAPSLAAAQQLTRDTVERELSLLGLLVMRNLLKPQTAPVIQTLRKTGIRTVMVTGDNLQTAVTVARACGMVGAQEHLAVIHATHPEQGQPAALEFLPTESSAVMNGAKATGYPTVPEPQSCHLALSGSTFAVLRKHFPKLLPKVLVQATVFARMAPEQKTELVCELQRLQYCVGMCGDGANDCGALKAADVGISLSQAEASVVSPFTSSMASIECVPTVIREGRCSLDTSFSVFKYMALYSLTQFISVLILYTINTNLGDLQFLAIDLVITTTVAVLMSRTGPALTLVRARPPGALLSVPVLGSLLLQVALVAGIQLGGYFLVIAQPWFVPLNRTVPAPDNLPNYENTVVFSLSGFQYLILAAAVSKGAPFRQPLYTNVPFLVALALLGSVLVGLILVPGLLQGPLGLRNIVDSSFKLLLLGLVAFNFVGAFMLESVLDQCLPACLRWLRPKRASKKQFKRLQQELAEHPWPTLPVGSVR

SEQ ID NO: 22493 - protein, 1216 aa, Mus musculus
MEKSKKDGHQAVLNEGEENELEVFGYHTQNLRRALCLVTAILTLGAVQLMFYWRPEWWVWTSCIPCPLQEADTILLRTTDEFRRYMRKKVFCLHLSTLKFPISKNPEEPLVADHHSVINQAVMKPELKLRCIQVQKIRYVWDFLKKRFQKVGLLEDSNSCFDIHHTFGLGLTNEEQEVRRLVCGPNSIEVEIQPIWKLLVKQVLNPFYVFQAFTLTLWLSQGYIEYSVAIIILTVISIVLSVYDLRQQSVKLHKLVEEHNKVQVTITVRDKGLQELESRLLVPGDILILPGKISLPCDAILIDGSCVVNEGMLTGESIPVTKTPLPQTENTMPWKSHSLEDYRKHVLFCGTEVIQVKPSAQGLVRAVVLQTGYNTAKGDLVRSILYPRPLNFKLYNDAFKFMVFLACVGVVGFFYALGVYMYHEVPPRETATMALILLSATVPPVLPAALTIGNVYAQKRLKKEKIFCISPQRINMCGQINLVCFDKTGTLTEDGLDLWGTVPTAGNCFQAVHSFASGEAVPWGPLCAAMTSCHSLILLDGTIQGDPLDLKMFEGTGWNMEDSQVASCKFGMADSSTVIKPGPKASQSPVDSITILRQFPFSSGLQRMSVIAQLAGDLHLHVYMKGAPEMVARFCRSETVPKNFSQELRNYTVQGFRVIALAHKTLKMERLSDMDHLAREKVESELAFLGLLIMENRLKKETRPVLKELSEARIRTVMVTGDNLQTAITVAKNSEMIPVGSQVVIVEANEPGDLVPASVTWQLVGTQEPGSGKKDTYIDIGNSSVPAGKGYHFAMSGKSYQVLFHHFYSMLPQILVNGTIFARMSPGQKSSLVEEFQKLNYYVGMCGDGANDCGALKMAHAGISLSEQEASVASPFTSKTANIECVPHLIREGRAALVSSFGVFKYLTMYGIIQFIGTSLLYWQLQLFGNYQYLLQDVAITLMVSLTMSINHAYPKLAPYRPAGQLLSPQLLLSVFMNSCFTCIVQVCTFLTVKQQPWYCEVYKYSECFLVNQSNLSANVSLDRNWTGNATLVPASVLSFEGTTLWPIVTFNCISAAFIFSKGKPFRKPIYANYLFSLLLASAAGLTIFILFCDFQDLYRKMEFIPTPTSWRVSILIAAFVQFCVAFFVVDAVLQNRELWLFIKKEFGFYSKSQYRILQRKLAEDSTWPPVNRTDYAVNGKNGFYVNRAYESPEEVPKGKLKLEEQASEQHFWTRL

SEQ ID NO: 22494 - protein, 878 aa, Mus musculus
MGDHLEKSQHALLNEGDENEMEIFGYRTQGCRKALCLIGSIFSLGMLPLVFYWRPAWRVWANCVPCSLQEADVVLLKTTDEFKIYSWKKVIWISLSALSSTSGLTPDHPLITDEGYIINRAIRKPDLKVRYIKVQKIRYVWNNLEGQFQKIGSLEDWLSSAKIHQKFGLGLTSEEQEIRRLICGPNAIDVEITPIWKLLIKEVLNPFYIFQLFSVCLWFSEDYKEYALAIILMSVISIALTVYDLRQQSVKLHHLVESHNSITVSVYERKAGAQDLESRLLVPGDLLILTGSRVQMPCDAILIDGSCVVDEGMLTGESIPVTKTPLSQTASSVPWKMQSEADPRRHVLFCGTEVIQAKAAGSGAVRAVVLQTGFNTAKGDLVRSILYPKPMNFKLYRDAIRFLLCLVGTATIGMVYTLCVYVLSGEPPEEVVRKALDVITIAVPPALPAALTTGIIYAQRRLKKKGIFCISPQRINVCGQLNLVCFDKTGTLTRGGLDPWGVVPCDQNGFQAVHSFASGKALPQGPLCAAMASCHSLILLDGTIQGDPLDLKMFEATKWEMTASGDDFHIKEMLAHTIVVKPTDMVAQVPAEGLAIVHQFPFSSALQRMTVIVQEMGGGRLAFMKGAPERVASFCQPDTVPTSFISELQIYTTQGFRVIALAYKKLEMDCPTTALMREKVESDLVFLGLLILENRLKEETKPVLEELISARIRTVMITGDNLQTAITVARKSGMVSEGQKVILVEANEATGSSSASISWKLVEEKKPGPFGSQDTYINIREEVPENGRDGSYHFALSGKSFHVISQYFSSLLPKLVMNNFLGSSCVFAFSWVLLYVSIVIPRIPLVQLSVKLKIFQDMAEKAVFSMAAGFNYTGHLKK

SEQ ID NO: 22495 - protein, 650 aa, Mus musculus
MGSTPPSYGTLTTGTSIDPLSSSASSVRLSGYCGSPWRAIGYHAAVWMLAGIPWLLFRWKPLWGVRLRLKPCSLAHAETLVIEIKDKEGSSRQLFTVQVQTEALVQGSLELPPQAQAEDGRSQAAVGVTPEGTWQDTSELHRQEEAKQVLRYYVLQGQRYVWMETQQAFCQVSLLDHSRTCDDVHCSSSGLSLQDQATRKTIYGPNVISIPVKSYLQLLADEALNPYYGFQAFSIALWLADHYYWYALCIFLISAISICLALYKTRKQSLTLRDMVKLSVRVQVCRPGGEEEWVDSSELVPGDCLVLPQEGGVMPCDAALVAGECVVNESSLTGESTPVLKTALPEGPKPYCPETHRRHTLFCGTLILQARAYVGPRVLAVVTRTGFCTAKGGLVSSILHPRPISFKFYKHSMKFVAALSVLALLGTVYSIVILYRNRVPVREIVIRALDLVTVVVPPALPAAMTVCTLYAQSRLRAQGIFCIHPLRINLGGKLRLVCFDKTGTLTEDGLDVMGVVPLKGQVLLPLVPEPRHLPLGPLLRALATCHALSQLHDTPVGDPMDLKMVESTGWVLEEGPAAGSAPGSQVLVVMRPPPGGPRQQVSCRVTGPWGLGVGLSQPLSSPPTHRKSHQCQSASSAASPSPLPCSGWMW

SEQ ID NO: 22496 - protein, 1174 aa, Mus musculus
MGDHLEKSQHALLNEGDENEMEIFGYRTQGCRKALCLIGSIFSLGMLPLVFYWRPAWRVWANCVPCSLQEADVVLLKTTDEFKIYSWKKVIWISLSALSSTSGLTPDHPLITDEGYIINRAIRKPDLKVRYIKVQKIRYVWNNLEGQFQKIGSLEDWLSSAKIHQKFGLGLTSEEQEIRRLICGPNAIDVEITPIWKLLIKEVLNPFYIFQLFSVCLWFSEDYKEYALAIILMSVISIALTVYDLRQQSVKLHHLVESHNSITVSVYERKAGAQDLESRLLVPGDLLILTGSRVQMPCDAILIDGSCVVDEGMLTGESIPVTKTPLSQTASSVPWKMQSEADPRRHVLFCGTEVIQAKAAGSGAVRAVVLQTGFNTAKGDLVRSILYPKPMNFKLYRDAIRFLLCLEPPEEVVRKALDVITIAVPPALPAALTTGIIYAQRRLKKKGIFCISPQRINVCGQLNLVCFDKTGTLTRGGLDPWGVVPCDQNGFQAVHSFASGKALPQGPLCAAMASCHSLILLDGTIQGDPLDLKMFEATKWEMTASGDDLHIKEMLAHTIVVKPTDMVGQVPAEGLAIVHQFPFSSALQRMTVIVQEMGGGRLAFMKGAPERVASFCQPDTVPTSFISELQIYTTQGFRVIALAYKKLEMDCPTTALMREKVESDLVFLGLLILENRLKEETKPVLEELISARIRTVMITGDNLQTAITVARKSGMVSEGQKVILVEANEATGSSSASISWKLVEEKKPGPFGSQDTYINIREEVPENGRDRSYHFALSGKSFHVISQYFSSLLPKILINGTIFARMSPGQKSSLVEEFQKLDYFVGMCGDGANDCGALKMAHVGISLSEQEASVASPFTSKTPNIECVPHLIKEGRAALVTSFCMFKYMALYSMIQYVGVLLLYWKTNSLSNYQFLFQDLAITTLIGVTMNLNGANPKLVPFRPAGRLISPPLLLSVVLNILLSLAMHIVGFILVQKQPWYIMDYHSVCPVRNESASALAASPSVPEKTRSNSTFASFENTTIWFLGTINCIFVALVFSKGKPFRQPTYTNYIFVLVLILQMGVCLFILFADIPEMHRRLDLLCTPVLWRVYILIMISSNFVVSLAVEKAIIENRALWIAVKRCFGYQSKSQYRIWQRNLANDSSWPPLNQTSYSDMQGVSYSNPVFESNEEQL

SEQ ID NO: 22497 - protein, 898 aa, Mus musculus
MPCDAILIDGSCVVDEGMLTGESIPVTKTPLSQTASSVPWKMQSEADPRRHVLFCGTEVIQAKAAGSGAVRAVVLQTGFNTAKGDLVRSILYPKPMNFKLYRDAIRFLLCLVGTATIGMVYTLCVYVLSGEPPEEVVRKALDVITIAVPPALPAALTTGIIYAQRRLKKKGIFCISPQRINVCGQLNLVCFDKTGTLTRGGLDPWGVVPCDQNGFQAVHSFASGKALPQGPLCAAMASCHSLILLDGTIQGDPLDLKMFEATKWEMTASGDDFHIKEMLAHTIVVKPTDMVAQVPAEGLAIVHQFPFSSALQRMTVIVQEMGGGRLAFMKGAPERVASFCQPDTVPTSFISELQIYTTQGFRVIALAYKKLEMDCPTTALMREKVESDLVFLGLLILENRLKEETKPVLEELISARIRTVMITGDNLQTAITVARKSGMVSEGQKVILVEANEATGSSSASISWKLVEEKKPGPFGSQDTYINIREEVPENGRDGSYHFALSGKSFHVISQYFSSLLPKILINGTIFARMSPGQKSSLVEEFQKLDYFVGMCGDGANDCGALKMAHVGISLSEQEASVASPFTSKTPNIECVPHLIKEGRAALVTSFCMFKYMALYSMIQYVGVLLLYWKTNSLSNYQFLFQDLAITTLIGVTMNLNGANPKLVPFRPAGRLISPPLLLSVVLNILLSLAMHIVGFILVQKQPWYIMDYHSVCPVRNESASALAASPSVPEKTRSNSTFASFENTTIWFLGTINCIFVALVFSKGKPFRQPTYTNYIFVLVLILQMGVCLFILFADIPEMHRRLDLLCTPVLWRVYILIMISSNFVVSLAVEKAIIENRALWIAVKRCFGYQSKSQYRIWQRNLANDSSWPPLNQTSYSDMQGVSYSNPVFESNEEQL

SEQ ID NO: 22498 - protein, 77 aa, Mus musculus
MCGLKVSALKAPVLKPHPCPRLPGPVSTGTKDPSRNRYKLFLECTLILTSVVPPELPIELSLAVNTSLIALAKLCEC

SEQ ID NO: 22499 - protein, 1293 aa, Rattus norvegicus
MKAQSSGRSWDSKAERYPKDSLRPYMTISGFFGDSHSPVVDSTLTCTFMILGDVPIGEIFGYRTQGCRKALCLIGSIFSLGMLPLVFYWRPAWRVWANCVPCSLQEADIVLLRTTVPVEVGRAGSLRAILEMLQSSHDDATRKATGDLEERGEQRTFQSHCGTPLENLVFSKRERVSETVRGKDEFKIYSWKKVMWISLSALSSTSGLTPDHPLIADEEFIINRAIRKPDLKVRYIKVQKIRYVWNNLEGQFQKIGSLEDCLSSAKIHQKFGLGLTSEEQEIRSEEKESGIEPFYECTGDVFSFIAVDEWPICGFSCRRLICGPNAIDVEIIPIWKLLVKEVLNPFYIFQLFSVCLWFSEDYKEYALAIILMSVISIALTVYDLRQQSVKLHHLVESHNSITVSVYERKAGAQDLESRLLVPGDLLILTGSRVQMPCDAVLIDGSCVVDEGMLTGESIPVTKTPLSQTASSAPWKMQSEADPRRHILFCGTEVIQAKAAGSGTVRAVVLQTGFNTAKGDLVRSILYPKPMNFKLYRDAIRFLLCLVGTATIGMIYTLCVYVLSGEPPEEVVRKALDVITIAVPPALPAALTTGIIYAQRRLKKKGIFCISPQRINVCGQLNLVCFDKTGTLTRGGLDLWGVVPCDQNGFQAVHSFASGEAVPWGPLCAAMATCHSLILLDGTIQGDPLDLKMFEATQWEMTVSGDDFHNKEMLAHTMVVKPPDTVGQRMTVIVQETGGGRMAFMKGAPERVASFCQPDTVPTTFISELQVYTTQGFRVIALAYKKLETDCPTTTLMRSVKSELEVDRENRCHNLKYRYFEPRKGCAELDVVLMLFTGLLCFLSSVMEKVESDLIFLGLLILENRLKEETRPVLEELISARIRTAMITGDNLQTAITVARKSGMVSEGQKVILVEANEATDSSSASITWKLVEEKKHGLFGSQDTYINIREEVPENGREGNYHFALSGKSFQVISQHFSSLLPKILINGTIFARMSPGQKSSLVEEFQKLDYFVGMCGDGANDCGKTNSLSNYQFLFQDLAITTLIGVTMNLNGANPKLVPFRPAGRLISPPLLLSVILNILLSLAMHIVGFILVQKQPWYSMDYHSVCPVRNESVSALSASPNVPEKTRSNSTFASFENTTIWFLGTINCIVVALVFSKGKPFRQPTYTNYIFVLVLILQMGVCLFILFADIPELHRRLDLLCTPVLWRVYILIMVSSNFVVSLAVEKAIIENRALWTAVKRCFGYHSKSQYRVWQRNLATDSSWPPLNQTSYSDMQGVSYSNPVFESNEEQL

SEQ ID NO: 22500 - protein, 2326 aa, Rattus norvegicus
MDNILKTINLFKNTKGNKIFFGSFNPNLSDHDQFPYIYQIAAKDTYLFHGMVSLMFHFGWTWIGLVISDDDQGIQFLSDLREEMQRHAICLAFVNMIPETMQIYKTRVKIYDQQLMTSSAKVVIIYGEVNSTLELSFRRWAYLGAQRIWITTSQWDVITHKKDFSLDFSHGTVTFAHHHNDIAVFRNFMQTINTSMYPVDISQSMLQWNHFNCSISKNKKKMDCFTFKNPLEWLIQHTFDMVLSEEGYNLYNAVYAVAHTYHKLILQQVESQKMEEPKGLFTDCQQVTSLLKTIEFTNPVGELVDTKHKENQCATYDIFITWNFPQGLGLKVKIGSYFPCLPQSQQLHISEDWEWVTGETLIPPSVCSMTCTAGFRKIHQKETADCCFDCVQCQENEIANDTADMEQCVKCPDDSYANLEQSQCLQRVVTFLAYEDPLGMALGCMALSFSAITILVLVTFVKYKDTPIVKANNRILSYILLISLVFCFLCSLLYIGHPNQATCILQQTTFAIFFTVAISTVLAKTITVVTAFKLTTPERRIKKIMIKGAINLLIPICTLIQLVLCAVWLVISPPFIDRDIQSEHGKELLGQRKLKIEKKILLSFLDECNRCAPWFIVSGSLTLRAWERLGKDLDKETTLKIEKKILLSFLDECNRCAPWFIVSGSLTLRAWERLGKDLDKETTPCIWLRRTTLANWLDPVSNRAMGTGAIQAALSKITQGASSGNGDTSIDNSANSYITTLIMMHNGSFPSLPGQGIRKLVNSTCRRVLPTCPPYKAFPPKFTPCQSPFHRPKQFLPGFEFSPPLSNAQYDRKRNKTGKRNFWPWYQWVLSNEQGAYTSLTPFARLLGEEFTLYNISAIRTNNNTSLVGVKINSLIANDAAVGAPFCLILCSLTEPNCFWRIKKSEDNDGDLRSDCGFVLFTDEDPIEEDFYNRIINFRIPGRKYEFFLVLFFATDEINKNPNLLSNMSLSFSIIVGLCEDTLGVLEKAYSHKNNNFELINYYCRMKQCCDVELTGPSWTTSLKLSIYSRKPKIFFGSFNPNLSDHDQFPYIYQIAAKDTYLFHGMVSLMFHFGWTWIGLVISDDDQGIQFLSDLREEIQRHEICLAFVNMIPETMQIFKTRLKIYDQQLMTSSAKVVVIYGEMNSTLELSFRRWAYLGAQRIWITTSQWDVTTHKKDFSLDFFHGTVTFAHHHNDIAVFRNFMQTINTSKYPIDISQSMLHWNHFNCSISKNNNKMDCLTFNNSLEWLAQHTFDMALSDEGYNLYNAVYAVAHTYHELIFQQVESQKMEEPKGICADCQQVASLLKTRVFTNPVGELVNMNHKENQCAKYDIFMIWNFPQGLGLKVKIGSYFPCLPQSQQLHISENWEWVTGETVVVCSVTCTAGFRKIHQKQTADCCFDCVQCQENEIANDTDMEQCVRCPDDSYANLEQTQCLQRAVTFLAYEDPLGMALGCMALSFSAITTLVLVTFVKYRDTPIVKANNRILSYILLISLVFCFLCSLLFIGHPNQATCILQQTTFAIFFTVAISTVLAKTITVVTAFKLTTPGRRIRRMMIKGATNLLIPICTLIQLVLCGIWLVTSPPFIDRDTQSEHGKIVIICNKGSDIAFHFVLGYLGSLALGSFTVAFLARNLPDRFNEAKFLTFSMLVFYSVWITFLPVYHSTRGKHSTFQATVEMAKEERKIINKGQEDEMEIHGYNLCRWKLAMVCVGVICTGGFLLLLLYWMPEWRVKATCVRAAVKDCEVVLLRTTDEFRIWFCAKIHFLSLENQPNLNAKSLVNKVSNGHAVCLTEENRCEMNKYSQILINGTCIVNESMLTGESVPVTKTNLPNPSVDVKEIEEEQYSPETHKQHTLFCGTTVIQTRFYTGEFVKAIVVRTGFRTSKGQLVRSILYPKPTDFKLFRDDYLFLLCLVVVAGIGFIYTIVNTILNEKEVQEIIIKSLDIITITVPPALPAGIVYAQRRLKKVGIFCISPQRINICGQLNLVCFDKTGTLTEDGLDLWGIQRVENTRFLLPEDNVCNEMLFPFSSALQRMSVVARTLGDKRMDAYMKGAPEVIASLCKPETVPVDFEKELEDYTKQGFHVIALAHRKLESKLTWHKNKLKQETPAVLEDLHKANIRTVMVTGNNMLTAVSVARDCGTILPQDKVIIAEALHPKDGKVAKINWHYTDSLTQCSESLEDLQVTRYHFAMNGKSFLVILEHFQDLVPKLMLHGTVFARMAPDQKTQLVEALQNVDYFVGICFWRINFNEVKDEALGMTCSFILETVQKPTDKDYFNQTLNVLKVHFYFPHVHVQGFHICSFESEMGPKDSSLALAMVSFILSFK

SEQ ID NO: 22501 - protein, 1330 aa, Rattus norvegicus
MPWKSHSLEDYRKHVLFCGTEVIQVKPSGQGPVRAVVLQTGYNTAKGDLVRSILYPRPLNFKLYNDAFKFMVFLACIGVVGFFYALGVYLYHEVIILSIDVASIALPQTVSWTLDFETNKDSKLLHSSYATDICRYVPPRETVTMALILLTATVPPVLPAALTIGNVYAQKRLKKKKIFCISPQRINMCGQINLVCFDKVGSKLTRGQGFRLRKYSGSREIAEGEHVLEADGCCCQGLQIPTTHLWEPGISLASSSPPHLDSGLRLDRLYCKLTNILAGGGSCLALGSVFQPVDHCLLVGDKLSDSFLFAQLSEENFFQKIMVSPKEKGGPTVLGKRGKNPNSALKRQQVPPWGASCVVALAESPHTEPLSDKISGQDNQQGQSNKALAQCHVEVGSFQGSHAKRRRFRMTSSAVTGTLTEDGLDLWGTVPTAGNCFQAVHSFASGEAVPWGPLCAAMASCHSLILLDGTIQGDPLDLKMFEGTGWNMEDGQVASCKYSTADSGTVIKPGPNASQSPVDSITILRQFPFSSGLQRMSVIAQLAGDLRLHVYMKGAPEMVARFCSSETVPKNFPQELRNYTVQGFRVIALAHKTLKMEKVSDVERLAREKVESELAFLGLLIMENRLKNETRPVLQELSEARIRTVMVTGMCASRAQQVTRRSGKCVTEEGGPVTLQHLRAGTTFSEAATVSSLPRPPILSRIEQETQRERCWLGVCSLEMYTWVGGEINSYKTTQKSQNTFNGQQQTNGETSSFQWLSLCHLGDNLQTAITVAKNSEMIPVGSQVIIVEANEPGDLVPASVTWQLVGTQEPGSEKKVAQQAPERSLIPHKSTGIRTAPCLAGKLARVSQGSQQCFRSPCRNHAFRFQDTYIDIGNSSVPCGKGYHFAMSGKSYQVLFHHFYSMLPQILVNGTVFARMSPGQKSSLVEEFQKLNYYVGMCGDGANDCGALKMAHAGISLSEQEASVASPFTSKVANIECVPHLIREGRAALVSSFGVFKYLTMYGIIQFIGTSLLYWQLQLFGNYQYLLQDVAITLMVSLTMSINHAYPKLAPYRPAGQLLSPQLLLSVFMNSCFTCIVLVCTFLSVKQQPWYCEVYKYSECFLVNQSNFSTNMGLERNWTGNATLVPASVLSFEGTTLWPIVTFNCISAAFIFSKGKPFRKPIYTNYIYRRMEVSVARCASVMTQMCQGYAWTAVYSYTFNQTFCRVEMELYSSPVTVGVALTSSKQTCLVDAILQNRELWLFIKKEFGFYSKSQYRILQRKLAEDSTWPPTNRTDYAVNGKNGLYINRAYESPEQVNFFEVLNLMLLTQQTFHDRRQLVNQTREQQPPD

SEQ ID NO: 22502 - protein, 1226 aa, Anopheles gambiae str. PEST
FLKAKACAPSEGNLTCQNPRKDHVTSTMGTGTKRLTAGSGSLDELVQYATIHIPLPVVLSGAVMPFMVVYALWLYLWVFVYGIEEYQDAGLLFLAGIGFTQIFVCLCCFWSVHVQTFLNCRRTKVPCAGAVVKVVPTENNGSSELVRIRQTKAEGDAKLDGELTYWFLFQKTKYIWDPNKAQFRSVEFPIHKTYEEYFESKGHLDDADVTLAQATYGDNEMEMVVPEFLELFKERATAPFFVFQIFSVLLWCLDEYMYYSLFTLCMLVIFECVLVQQQLRSLSEIRKMGNKPYQINVFRNRRWRPISSAKLVPGDLVSVTRSQDENIVPCDLLLIRGSCIVDESMLTGESVPQMKESLENNTDEHDKVLDIEADGKLHVLFRGTKVVQHSAPSKGAMRSPDNGCIGYVLRTGFNTSQGKLLRTILFGVKRVTENNLETFAFILFLLVFAVAAATYVWIKGTEDPERNRYKLFLECTLILTSIIPPDLPIELSLAVNTSLLQLSKVYVYCTEPFRMPFAGKVQICCFDKTGTLTSDNLLVEGVAGLKQDTSIVPIGEIPEATAHVLGSCHSLVQLDEGLVGDPLEKATLTAIDWNLTKGDSCVPKRGKFKALRIYHRFHFSSSLKRMSVLAGYLMPFSNETCYIGTVKGAPEVIVKMLKTVPEHYERTYLEYSRRGARVLALGYKSFGTLDNNTVRELKRDDVERDLEFAGFIIISCPLKPDSKYAIKEIIQASHKVMMITGDNPLTACHVAKELRFSRRTIVILTPPEELNGSTTGAGEWHWESINRELRLPLDSRTVKELYKEYDFCITGEGLQYLGRERHAYLQQLIPYATVFARFAPKQKEYVLTTLKKLGYYTLMCGDGTNDVGALKHAHVGVSLLSHMPSRSERKQQREQQEEKEEKKKALKASGPNAGAIEDGSNNRRQLTPRERAIMRARENQSAAQERLQKALKEMDEEQVQIVKLGDASIAAPFTSRLTSINCVCHIIKQGRCTLVTTLQMFKILALNALISAYCQSVLYIDGVKHSDAQLTLHGLLTAACFLFITRSKPLKVLSKQAPLPNIFNLYSVTTILAQFAVHFSALIYMVHEANARTPPREGKVKLNVDLAPDEKQEFEPNIVNSTVYIIGIAMQIATVAVNYKGHPFMESLRENRLLSYAIFSSSAIVFCLALGIVPDLLEMFEVIDFDADFRRILVGVLIADMVLAYLVDRVCSFLFGETRGKTDIIT

SEQ ID NO: 22503 - protein, 1036 aa, Anopheles gambiae str. PEST
KTFLCYVGFLLTFGILRLVMHWRQHWLLLATHRECSLDRAEKVLIHEAYQRKHDLYYVKDVITLSGDVVSTMRYFSCKKLRYIWCDQAKKFVKLQGLDVEVPSVLIHHTKGLSVYEQSIRRLIYGSNEIFIPLRSVLTLLFLEVLNPFYVFQIFSVVLWFFYEYYYYAVVIILMSAFGITVSIIQTQRNQRALYSTVRSTDTAMVVRDTMLSESIETRFLVPGDVLEIPATGCTMQCDAVLLSGNCILDESMLTGESVPVTKTPLPLRRDLIYNRKEHARHTLFCGTRVIQTRYIGSEKVLVKVLNTGNITAKGGLVRSILYPPPVDYKFEKDSYKFITVLGIVAFCGFVYTLYTKISRSIGAVKIIVESLDLITIAVPPALPAAMTVGRMYAQKRLKRSNIYCISPRAINVSGSIDCVCFDKTGTLTEDGLDMWGVLPKDSTNSFQIPLKDVGRLPMSDHLLFGMVTCHSITFVNGEMRGDPLDLKIFESTGWILEEANVSDETKYDMLFPTIVKPPRGDSCDELNLELDVAYDNSNDIGIVREFSFTSALQRMSVVTRKVSDNHFNVYVKGSPEMISSLCRPESIPEDFQSKLGFYAHQGYRIIAIAYKQLDKKLNYPKVQKIAREKVECELEFLGFVILENRLKTDTEEVIESLNAANIRSVMVTGDNLLTAASVAHDCGMILAGQNLVTVTAHADKANPDRYFLSYDITGQPQLTHSIDTCTITTQLSDKEHRIVIEPASDHDCHSLATDIGSIKVVANGVPGKLGPGGGSSFRFALTGKTWAIINEHFPELVSTITTYGTVFARMSPDQKQHLITGLQQLGYYVAMCGDGANDCGALKAAHTGISLSEAESSVASPFTSKNPTIACVPNVIKEGRAALVTSFGIFKFMAAYSLVQFASVVILYSIDSNLTDWQYLYIDLFIISIVAFFFGKTSSYDGPLVKQTPSNSLISLAPLLSLALHMMVAIGMQLAGWYHVQAQPWFEPFNYTSDRELNDHGCFENYTIFAISCYQYLILAIVFSKGAPYRKSIFSN

SEQ ID NO: 22504 - protein, 797 aa, Giardia lamblia ATCC 50803
MEVSMTVSASLQELRRLFIYCTEPFKIMNAGKLRICCFDKTGTLCDCEVKVVGFISNSEDDRANHLERIISSAELVKRANRSLENRSFTGDLVSHLVLSSAQSLFVHHDKLIGDPLEQAIYADGKIYSIQTDGVVSLALTHPWQVTVTRRFALSNRLKRMSVVATATCNSKAISKTIVATKGAPEVIKELCTPQSVPYWHDDCLNELAAQGYRILSFAYRELESSDETLTRANAEDGLTFLGFIVTDSNLKPDTREAIEIIKASGHRCAVISGDNVISVGVVSIRSGILPASRPLYNLERFDECAQTCLFTRLNIRTHHSAPTEFDFPSELEVTEKNVKAIARQYSLAVTNNSAFIALLAHSKCGPMFIPRIHVFARMTPEQKADIIRVMQGTAPTLFCGDGSNDVEGLRSADVGVALWEATDYKEKKAEADRIEASAKESAIVRQQRIQAAVAQIPKPSILGPSGTPASQQLIYTEARRRSAEKNTKLTDEMRYLIWEQNKYWSEVRRVSRSGSTSLVDKIFGMSNDGIMSGWSQAFDIEDEGKSLQLGDAAIAAPFTAKSGTIGGVLDIIRQGRCSLVTLIMTYKTLALKCIVGAYSMSVLTLDGVRYSEQQLMASGVSQMFILFNINKSKPLRRISRIPAPDNIISAYALVSLALQVLVHVLIMSLLVHLLSTEKTTVPFDVKFQPSLVNTVVFLLGMYQDLAINVVNYPGEPYMLSLTQFKKLWRGVIVSVVATLVLTMQWLPELNEALGLITMDGHVQRTVMTFGLLDVLLCLGIERASFHILGPKPISDDA

SEQ ID NO: 22505 - protein, 591 aa, Giardia lamblia ATCC 50803
MGLIHSEELVDVRLLSPRKWSRNPLKVTTCALYAIVLLVVILSGARAAMLYNSLPAASKALEYPLRKLNLFEEMKIAPPPLSPTILNGLLYHDVGIHFRVVLFLLLVPIAVHIITILIEFWVVEVRAVMSFSLVKNPRDASVIFATPRCGSGQPCFLTMHHEVQHTGKSPVATSPEDFSYVSYFYFQQIKYVWIDKENKFISVSDDLSSQQTSLEVLLRSADKGLSSAEHSQATILYGENRLAVPLLTLGHLFVEHILSPFFMFQLFTSILWLFDDFAVYSFFTSVMLLFMEGGNILTKFNRMKESRKMISNPCQVEVHRDCEWVVASSTSLVPGDLVRFTVDNLQAAMERQSSQAEKQRKSAQDTQLKQLGVPSIHILLSRMGRMFLSGSYPTENYAIMQREKNIGFSTQIPADLLITKNVAVVDESLLTGESAVQMKDSIWESDLLLNKTLDDAKEIPFNQDRDASHILYAGTTLVSVSSEPVEAVVLRTGFEMSQGQLIRKILFDTERTSATTKDAVQFLVIMFVIACIASIYTFVRGYVTQICPLNRLILERFNSLCLCYSPRASYGGFHDGFRFTSRAPPLIYILH

SEQ ID NO: 22506 - protein, 372 aa, Saccharomyces pastorianus
IQSKLILDCILIITSVVPPELPMELTMAVNSSLAALSKFYVYCTEPFRIPFAGRIDVCCFDKTGTLTGEDLVFEGLAGISEDGENIRHLYSAAEAPESTILVIGAAHALVKLDDGDVVGDPMEKATLKAIGWAVEKKNTTFREGTGKLNVIRRFQFSSALKRSASIASHDDTLFAAVKGAPETIRERLSNIPKNYDDIYKSFTRSGSRVLALASKQLPKLSQPKIEELTRDEVESDLIFNGFLIFHCPLKEDAIETIKMLNESSHRSVMITGDNPLTAVHVAKEVGIVFGETLILDRAGKSDDGQLLFRDVEETITIPFDPSKDTFDHSQLFDRYDIAVTGYALSALDGHSQLRDLLRQAWVYARVSPSQKE

SEQ ID NO: 22507 - protein, 133 aa, Saccharomyces pastorianus
EIQRVTEAGSLQTFFQFQKKRFLWHEDEQVFSSPKFLVDESPKVGDFQKSKGHSGDLTHLRRLYGENSFDIPIPTFMELFKEHAVAPLFVFQVFCVALWLLDEFWYYSLFNLFMIISMEAAAVFQRLTALKEF

SEQ ID NO: 22508 - protein, 2400 aa, Plasmodium falciparum 3D7
MYKNIFFPHDNIKKETYKVYYYHTNNLIHDEYRISYIECYKKKKKKIVTILHYVFCILSLGLLPLILSWFPIFYFRLLHSACTLNECEKVLIITKDGNKYIKKIKKIKFNHNVCYVMNDVFFSEDQSMSSMYNDKEQNKNNFNYFSRDYTFRDQNIMNERKDNINLKDHIKLSGHINLKDNIKLSGHINLKDNIKLSGHINLKDNIKLSGHINFKDNINFKDSIYPCDEILHVDNIPLHNNLNINSHQPFDETTEYNKSRLQDNNRITYIFEFLDIRYVYIKKKNIFVELYFNINYPFSYMHLMCTGLRNEKLINDRKILYGECNLNIKSDSFIILLFKEIMNPFFIFQIFAMIVWSLDNYIEYTISILFITSISIILELKNTIKNQKKIKNMLNYTCPINVYRYNTSYIISSSELVPGDIYEIKNNMTIPCDTIILSGSVTMSEHMLTGESVPIHKEQLPFEGNAIINKNNKYESNDEKDDYLRIYNNHASINMIKRNHLIEETLGKKDREYKSNTHDLCSMNKLCYINNTYDDVHMKNNKMDYNNNNNNKKKKKINNLNFVKGTYINSNDLLYDDKIGVNIFEDDVNNMKHKFNQRNINYYNKDTNNLEYNNKHRYIYDCLLKKVEAISQKNKIIYSNEDINKYMLYGGTYVLSLYNINKIKYNNKEENRILGLVIKTGFITTKGKIVNNILYHKKKELNLINDSYKFLIILIIYAFFSVFILLYITLSNNEYTNHIIIKCLDIITDAIPPALPTTLTVGISIAISRLKKKFSISCLCPHKINIAGQINTMVFDKTGTLTENNLQFIGIITQNKKNKNMLSDFIHIKEMNTESYIHSKDDNMIHNKNSIISEYYIKDNMKNLHTSSKKKSITKERSNFLVQTIKSCLLKDHYIKEKKKEYYTNNTYCNDLHINDSTCSSYLLNSETKDAYCEYYNIDHLCDINKKNMDINSKNELMGKYSKNELMGKYSKNELMGKTIKNELMGKYSKNELMGKYSKNELMGKYSKNELMGKYSKNELMGKYSKNELMGKYSKNELMGKTIKNQVGVDTNIYHMNCDNDYNYDYPCDYNCNNCNDTYHRLEYHNINKDNSFNIPPEKNKSYNNISEHIKINYPLLFEALACCHTLSKVNNKIMGDVLEILMFNFTNCDMLINNNSFIIKEKKKNCSYDFQKIDGDKNIGANDERCHLNNNLVSYNILKRFEFQSRLQRMSVIVKSTYGNNNDDNNDDDNNNDDDNNDDNNNDDNNNDDNNDDNNNNNYYYNIFCKGSPEKIKELCLKSKIPNNYDEILNKYTKQGMRILSISYKRVKSKNINLLNVKRSFVESNLHFLGFLIFTNNMEKNAPDIIHNLQTSGCQCIMSTGDNVLTSIHVAKKCGIINSNVESIIIGDVIPVVGKNNKQKKKLVWYNHKNDTYLKGHDKTCIDNEFTSIQSQMNSDNICGDNICGDNICGDNIYGDNICGDNIYGDNINGDNINGDNINGDNIYGDNINGDNINGDNINTYDNIYGDNYNLDYCPTEYHKCTYNNSILYRNNFLYKKENKKDKNYKNISTLYEHRTNDIQFDKLCDILINKDPRNVNIVLTGKAFIFLKKKFYSFHLPYYEECKNIVHYIMKKKHKKIKNIINNHNSNLYYHYNIIDTFVKRMNKEYMCFNKLLYKIQQKLLYNLIHNLYKKKKYMNNYYDIDEVHLIGNNNNNNKNNSKEKKLPLKNKMKHIRKNESNDNITFNTYTSNNIYLSKYKYVHHKNYYYPDSCTNLRKKKNSLFYNLKKYIYYEKKKYLQHCLLKHDNYKKVELPRIKDINYSYQMESIKTRNFIHSLSEQFAIFSNLILSFYIIKNDDNNVYNKNYIYNKNYIYNKNSICNKNYICNKNYIYNKNNIYNKNNIYNKKNILTHAKSVLLSGSSKKFLKFFSNIIRRHKLKEKKNKKNIKRYKMNHVNNTSKGHIILNMCTHGFKKDYSSLKNKYRIVNNKGYMLKNDNVYDRHMYNLTDMYRGTQYGCSKKKNKNIYMNNNNNILKNKINRFLEHLLVDKCKRNICHKYTDIKNIKLSIYEYILRTCTVYARMKPKDKSDLILSLKKLPNNSYVGMCGDGANDCLALSCADIGISLCNNNESSICSSFTSNKLCLHSIVHILIEGRASLVNSFQLFKFISLYSIMQCSQVLILYSISNKLTDNQYIFIDIVTILPLSIFMCWTSASEKLSKNIPIGKLFSFPILISIYGQIIIQLFFVMISLVLLMNLSFYKYDKNKVMKEKSDDTYLYKAQNTLLYILCSFQNLFMCISLNIKNEWRKSVFTNIAFIIWMSFLLLMNTCITFFSSEIFLVGWIIDLLKQYLSLITFPFYFRIFLFFILFFNFLCSYSYEKYIIKYFEKREIQKKYNHNHMSSIFCSPQELDTTNVFVTCN

SEQ ID NO: 22509 - protein, 1179 aa, Arabidopsis thaliana
MSSFRVGGKVVEKVDLCRKKQLVWRLDVWPFAILYTVWLTTIVPSIDFSDACIALGGLSAFHILVLLFTTWSVDFKCFVQFSKVNSIDQADACKVTPAKFSGSKEVVPLHFRSQMTDSASSGDMEEIFFDFRKQRFIYSKELGAFSKLPYPTKETFGHYLKCTGHGTEAKIATATEKWGRNVFDYPQPTFQKLMKENCMEPFFVFQVFCVGLWCLDEFWYYSVFTLFMLFMFESTMAKSRLKTLTDLRSVRVDSQTVMVYRSGKWVKLLGTDLLPGDVVSIGRPSTQTGGEDKTVPADMLLLVGSAIVNEAILTGESTPQWKVPIVGQRSDEKLSIKRNKNHVLFGGTKILQHSPDKSFSLKTPDGGCLAVVLRTGFETSQGKLMRTILFSTERVTANSWESGLFILFLVVFAVIAAGYVLVKGLEDPTRSKYKLLLGCSLIITSVIPPELPMELSIAVNTSLLALVRRGIFCTEPFRIPFAGKVDLCCFDKTGTLTSDDMEFRGVGGLSNCEEAETDMSKVPVRTLEILASCHALVFVENKLVGDPLEKAALKGIDWSYKADEKALPRRGNGNSVQIMQRYHFASHLKRMSVIVRIQEEYLAFVKGAPETIQERLVDVPAQYIETYKRYTRQGSRVLALAYKRLPDMMVSEARDMDRDAVESDLTFAGFAVFNCPIRPDSAPVLLELKNSSHDLVMITGDQALTACHVAGQVHIVSNPVLILGRSGSGNEYKWVSPDEKEIIPYSEKEIETLAETHDLCIGGDSIEMLQATSAVLRVIPFVKVFARVAPQQKELILTTFKAVGRGTLMCGDGTNDVGALKQAHVGVALLNNKLPLSPSDSSKDDKSKSKKSKLPLEPASKTITQNGEGSSKGKIPPQNRHLTAAELQRQKLKKIMDDLNNDEGDGRSAPLVKLGDASMASPFTAKHASVAPVTDIIRQGRSTLVTTLQMFKILGLNCLATAYVLSVMYLDGVKLGDVQATISGVLTAAFFLFISHARPLQTLSAERPHPSVFSVYLFLSLIGQFAVHLTFLVYSVKEAEKHMPEECIEPDASFHPNLVNTVSYMVSMMLQVATFAVNYMGHPFNQSIRENKPFFYALIAGAGFFTVIASDLFRDLNDSLKLVPLPQGLRDKLLIWASLMFIICYSWERLLRWAFPGKISSWKHKQRAVTANLEKKKKV

SEQ ID NO: 22510 - protein, 254 aa, Glycine max
  unsure (1)..(254): unsure at all Xaa locations
XARGCSKWVKLSGIDLLPGDVVSIGRSSGQNGEEKSVPADMLLLAGSVIVNEAXILTGESTTQWEISIAGRAMEETLSAKRDKNHVLFGGTKILQHTPDKSFPLKTPDGGCLAVILRTGFETSQGKLMRTILFSTERVTANSWESGFFILFLVVFALIAAGYVLVKGLEDPTRSKYKLILSCSLIVTSVIPPELPMELSIAVNTSLIALARRGIFCTEPFRIPFAGKVDICCFDKTGTLTSDDMDFPGIVGLNG

SEQ ID NO: 22511 - protein, 229 aa, Glycine max
  unsure (1)..(229): unsure at all Xaa locations
MSSFHVGGKVVDQVDLLRKKRWPWRLDVWPFAILYGAWLSTILPSLDFVDAAIVFGALVSLHILVFLFTGWSVDFKCFAHYSKVKNIDQADSCKITPAKFSGSKEVVPLHSRKSSAASSSAVDLEENYFDFRKQCFVHSKEKGTFCKLSYPTKETFGYYLKCSGHGSEAKVLAATEKWGRNVFDYPQPTFQKLMKEHCMEPFFVFQVFCVGLWCLDEYWYYSLFTLFMX

SEQ ID NO: 22512 - protein, 119 aa, Glycine max
  unsure (1)..(119): unsure at all Xaa locations
XSDDMELSGIVGLNGTTYMESDTSKVPLRTVEILAFCHALLLVENKLCGDPLEKAELNGIDWSYKSDARTLAKEVYGHPVQIAHRCHFGFYFXRXMKLSIAHHEEYSLFDKGAPXVVHX

SEQ ID NO: 22513 - protein, 1208 aa, Dictyostelium discoideum
KEDENQVEFNLHVFLICSSMALHFGWYLFNLGSIDYKCFVTMKKVDNIKCATHAKVTPGKHMGMKQLCPISRHLHRAPSSISSASSTSVNIVGNGSNVGKISTKHLSEKEFKDLQYSIEFQKRKLVYNPDKKQFEKIKFHIPLDSEELLNQARSYETDEQIELAAMKYGLNRFDIPIPTFLALYKEQAIAPFFVFQVFCVLLWCLEEYVFYCLFSLFMLLVFEATVVKSRLSNLNSLRNMSSKPTFPIYVYRLNQWKQINTTEILPGDIVSIGRGASEATSTLPCDMILLSGGCVVNEAMLTGESTPHHKESIKDRKSTKPLDLKNEKIHILYGGTTIVQHTPSEKLARVSKPPDRGCIAYAYKTGFNTNQGRLMRTIWFSSERVTANNKESFLFILFLLTFAIAASAYLFNKGIRENNRSKYKLLLNCIMVITSVVPPELPMELSLAVNNSLISLIKLGIYCTEPFRIPFAGKVDVCCFDKTGTLTTDDLVLQGIANCPKKYITANNDHEDVDIDSTTTDTTTTNTTTTTTTTTSTTKEEQESSLTSTTFVQPSELADVIQFILAGCHSLVLIDNKLVGDPMEMAGLKSIPFTCKADKISHQKKPINIEIVHRYHFSSELKRMTTICNVVYTKNLQCNTYAFSKGAPEIMKPFFNDKSLPDNYDQCFKSYSRQGSRVLALGYKRFESGLNVSQYKSMERDSVESNLEFGGFIIFDCPLKPDSKESIEMLMNSSHRIVMITGDNSLTACHVGKQLGFVQENKQTIILQKIKNSNNNNNNEKNEEKEENNNNDNDNNNLGEWVSVDESIIIPLENGNENHLNQLDKDYNLCIGGNSLDLVIGDKNLEKDLYLVKVFARVSPEQKQMILTNFKVNGHYTLMAGDGTNDVGALKQAHVGIAILNKGEFKPPPEINLREIFNQAKQRQMQEQLRRNGDPRAAAELAQKQAADLAQRMQQDNEVQMVKLGDASIAAPFTSKSSAVKPITHIIRQGRCTLVTTFQMYKILALNSLITAYGLSVLYLDGVKLGDTQATISGMLIAVCFLFISTSKPLMKLANKRPNPNLFSPYMMCSILLQFALHLVCIIFIVHQSQLRIGTNRPDPDSPFAPNLLNSAVFLMSNAMQVATFAVNYKGHPFMQSLSENKPLLYALSFVWGLGLLLATEIIPPLNSMLELVEFPDSTFRLYMVGAIILDLVGAWFIEKVCSVLLKN

SEQ ID NO: 22514 - protein, 1175 aa, Oryza sativa
  unsure (1)..(1175): unsure at all Xaa locations
MARFEVGGKSVEGVDLLRRRHWASRLDFWPFLALYALWLVVVVPALDFTDALVVLGALSASHXLAFLFTAWSVDFRAFVGYSKVKDIRAANSCKVTPAKFSGSKEIVPLHIQKTVTSSSAAGETEEIYFDFRKQRFIYSSQEDNFFKLRYPTKEPFEHYIKGTGYGTEAKINTAVDKWGRNIFEYPQPTFQKLMKEQCMEPFFVFQVFCVGLWCLDEYWYYSLFTLFMLFLFESTMAKNRLKTLTELRRVKVDNQIVATYRCGKWVRIPGTELLPGDIVSIGRSVSGEDRSVPADMLLLAGSAIVNEAILTGESTPQWKVPLAGRGPEETLSVKRDKNHILFGGTKILQHTPDKSINLRAPDGGCIAFVLRTGFETSQGKLMRTILFSTERVTANSKESGLFILFLLFFAVIASGYVLVKGLEDPTRSRYKLFLSCSLILTSVIPPELPMELSIAVNTSLIALARRGIFCTEPFRIPFAGKVDICCFDKTGTLTSDDMEFQGVVSLEDDEELITDANKLPLRTQEVLSSCHALVFVDNKLVGDPLEKAAIKGIDWIYTSDEKAISKKSGGQPVKIVHRYHFASHLKRMSVVVSIHEKYYAFIKGAPETIQERLVDLPAGYVETYKKYTRQGSRVLALAYKLLPDMPVNEARSLERDQVESDLTFAGFAVFNCPIRSDSGAVLQELEQSSHDLVMITGDQALTACHVAGQVHICSKPVLILTRTKTGGFEWVSPDETDRAPYSAEEVAAVSGSHDLCISGDCFEMLQRTDAVIQVIPYVKVFARVAPEQKELVLTTFKTVGRVTLMCGDGTNDVGALKQAHVGIALLNAEPVQKSDTKSQASKSENKQGKLKKPKPSRSSSQLTQPANSSARASSSRPLTAAERQRERLQKMMDEMNEESDGRSAPIVKLGDASMASPFTAKHASVAPTLDIIRQGRSTLVTTLQMFKILGLNCLATAYVLSVMYLDGVKLGDVQATISGVFTAAFFLFISHARPLQTLSAERPHPNIFCAYVFLSILGQFAMHLFFLISAVNEATKYMPEECIEPDSEFHPNLVNTVSYMVNMMIQVATFAVNYMGHPFNQSITENKPFKYALYAAVAFFTVITSDMFRDLNDYMKLEPLPEGMRGKLMLWAILMFCGCYGWERILRWAFPGKMPAWEKRQKQAIANREKKHEXD

SEQ ID NO: 22515 - protein, 1211 aa, Schizosaccharomyces pombe
MGSKALITSPDISSGQLYIKLPTFFHLYVWPFALFVYPYIGYVYQNKLYSEEVRYLTYIAVGTIHALFWLAGEWNTKVYCLMTCRKTDKVEQATHILVTPSKIGESSSVEPITKLVLPDSQTIQYSFSFQRKRFIYEPEKGCFANITFPMDEPSTIGTLKKSTGLTNIQSEIFLYRYGKNCFDIPIPTFGTLFKEHAVAPFFVFQIFCCVLWCLDDYWYFSLFSMFMIIALECSVVWQRQRTLTEFRTMSIKPYEIQVYRNKHWFPISTEDLLPNDVVSVLHNKEDSGLPCDLLLLSGSCVVNEAMLSGESTPLVKESIELRPEEAVIDVDELDKNAVLFGGTRVLQVTQSPFCKLKTPDNGVPAIVLRTGFETSQGSLVRTMVFSSEKVTANNRESLYFILFLLVFAIAASGYVWHVGSKTERSRYKLMLDCVMIITSVVPSELPMELSMAVNASLGALSKYYIYCTEPFRIPLSGHLDICCFDKTGTLTEEHMVVQGIAGVNRKDPYSLEKLSDASNDAILAIATAHTLVLLEQEGETPKVVGDPMEKATVENLGWSIEKKNFVSAPEGSVFYKGKVQIIRNFQFSSALKRQSSVSNVRVSGGSFKTFVSVKGAPEVIATMLREVPKDYEKIYKDYGRKGSRVLALGYKYFKNYIPENQVSDLSRESIESDLVFAGFLIFTSPLKEDARQTVQMLNNSSHRCMMITGDNPLTAVYVAEQVGIVEKPTLVLDIKHENEKILEWKSTDDTINLPMNPHKSLEASLYEKYDLCITGRALSQIINPDVIMSIFTHAWVYARVSPSQKEFMISTLKHNGYITLMCGDGTNDVGALKQAHVGVALLNASEEDMLEMQERARNQKLMGVYEKQIQLAKRFNLPTPPVPPALCHAFPPGPNNPHREKTQEGLNKVLEDLETKKASDVQLTEAEKAAERRANLANKMFDTLANASDDEAPKLKLGDASVAAPFTSKLAVVSSITNIVRQGRCTLVALVQMHKILALNCLITAYSLSVLHLDGIKFGDTQYTISGMLMSVCFYCVSRARPLETLSKERPQAGIFNTYIIGSVLGQFAIHIVTLIYITRVVYLYEDPLEKVDLEETFKPSLLNTAIYLLQLIQQVSTFAINYQGRPFREALSENKGMYYGLLGIAFVAIAGVTEFSPELNAKLQLVKMAYNFQIQLLATMVVDYAACWIIEELMKKYFRDNKPKEIVLRN

SEQ ID NO: 22516 - protein, 1211 aa, Schizosaccharomyces pombe
MGSKALITSPDISSGQLYIKLPTFFHLYVWPFALFVYPYIGYVYQNKLYSEEVRYLTYIAVGTIHALFWLAGEWNTKVYCLMTCRKTDKVEQATHILVTPSKIGESSSVEPITKLVLPDSQTIQYSFSFQRKRFIYEPEKGCFANITFPMDEPSTIGTLKKSTGLTNIQSEIFLYRYGKNCFDIPIPTFGTLFKEHAVAPFFVFQIFCCVLWCLDDYWYFSLFSMFMIIALECSVWWQRQRTLTEFRTMSIKPYEIQVYRNKHWFPISTEDLLPNDVVSVLHNKEDSGLPCDLLLLSGSCVVNEAMLSGESTPLVKESIELRPEEAVIDVDELDKNAVLFGGTRVLQVTQSPFCKLKTPDNGVPAIVLRTGFETSQGSLVRTMVFSSEKVTANNRESLYFILFLLVFAIAASGYVWHVGSKTERSRYKLMLDCVMIITSVVPSELPMELSMAVNASLGALSKYYIYCTEPFRIPLSGHLDICCFDKTGTLTEEHMVVQGIAGVNRKDPYSLEKLSDASNDAILAIATAHTLVLLEQEGETPKVVGDPMEKATVENLGWSIEKKNFVSAPEGSVFYKGKVQIIRNFQFSSALKRQSSVSNVRVSGGSFKTFVSVKGAPEVIATMLREVPKDYEKIYKDYGRKGSRVLALGYKYFKNYIPENQVSDLSRESIESDLVFAGFLIFTSPLKEDARQTVQMLNNSSHRCMMITGDNPLTAVYVAEQVGIVEKPTLVLDIKHENEKILEWKSTDDTINLPMNPHKSLEASLYEKYDLCITGRALSQIINPDVIMSIFTHAWVYARVSPSQKEFMISTLKHNGYITLMCGDGTNDVGALKQAHVGVALLNASEEDMLEMQERARNQKLMGVYEKQIQLAKRFNLPTPPVPPALCHAFPPGPNNPHREKTQEGLNKVLEDLETKKASDVQLTEAEKAAERRANLANKMFDTLANASDDEAPKLKLGDASVAAPFTSKLAVVSSITNIVRQGRCTLVALVQMHKILALNCLITAYSLSVLHLDGIKFGDTQYTISGMLMSVCFYCVSRARPLETLSKERPQAGIFNTYIIGSVLGQFAIHIVTLIYITRVVYLYEDPLEKVDLEETFKPSLLNTAIYLLQLIQQVSTFAINYQGRPFREALSENKGMYYGLLGIAFVAIAGVTEFSPELNAKLQLVKMAYNFQIQLLATMVVDYAACWIIEELMKKYFRDNKPKEIVLRN

SEQ ID NO: 22517 - protein, 1315 aa, Schizosaccharomyces pombe
MASPKMIRSKRSTSSIASKNSLNSYLASSLMSHDSIFDGPGLGTSIPSSVSSFHHQTLRPSSDASVSQFSMDYLQSEYNLNRYNDGESIAASRDYQSLLRDNGSGVYSDEEEITEMMLEELNIHPVLRRESVGEAAGLSEDGCCQILYLVEEDLEVGIAGYKTNKSRYRLYQAICLLTLGLAYLIFRWLPKYFIRFVGTREPLATADWLTIETQWGELSKLDIQIQPYENSLSSIFGASIRVAAPEGTENDPFIENFRYVNYRYMKLIFHPLLDRFLIQQDWKDPRWIRDTSVVKEGLERDAINDRLCIFGENLIDLELKSVSQLLIDEVLHPFYIFQVFSIILWSMDSYYYYAICILIISVVSILGSLIETRKTLRRMREMSRFTCPVRVYRDGFWTSISSTDLVIGDVFEISDPELTIFPADALLLSGDCIVNESMLTGESIPVSKIPATDQSMKELFSFSKNIPASLCKHFLFSGTKIIQVRKPFVNEKEEGASLAMVVRTGFNTTKGALVRSMIFPKPTNFSFYRDSFRFITAMFIIALIGFVFSSINLLTLGVPIATIIIRALDLITIVVPPALPATLTIGTTFAISRLRKQGIFCISPQRVNVSGKLDLISFDKTGTLTEDGLDIMGVSVIEGSELGDLRSNSGNLCSKDLLSNDSPSNLLYTMATCHMLRYVDGELVGDPLDIKMFKFTHWSYSEENFLNKKMSSEQAEDAAYVRTQQLIPPTVSPPWNSPSNNYTESDLELGIVRTFEFVSQLRRMAVIVKHGKFKKMDAYVKGAPEIMPSICKPESFPANYQEVLDYYTHNGFRVIACASKQLENCTWAKAQRMKREQVECDLDFCGFIVFENKLKSTTATVIRELNDARIRTVMCTGDNVLTSICVGKRCGMLPEDGYVFLPRFDEESESADEASRQLVWQAIENNEIFLDPHTLRPNVDFADHEPVSIELARLKDFHIALTGDVFRWLVDYAPLNVFHHILLKAQIFARMSPSEKNELVSCFQNLNYCVGFCGDGANDCGALKAADVGISLSEAEASVAAPFTSKWFEITCVLDVIKDGRAALVTSFSCFQYMALYSAIQFITVSILYTTNSNLGDFQFLFIDLVIILPIAVFMGRSRPYHRLAHKRPTANLVSKRILSPLIGQIVLICIIQYITLRIVRREPWYIPPPANSSDTNITNSDVTALFLISCFQYIFIGVVLSIGPPYREKVWRNYSFTAVVVVLLILTVKLIRLQNHKNFFMKLFQLTPTSKSFQNFLIFAGVIYYLLAASGQNYIFISMTNFISHLNNRLLNRRTKVSKKLYKRLFADLQNEQV

SEQ ID NO: 22518 - protein, 1096 aa, Schizosaccharomyces pombe
MDSIELKQLVPENDSEPGTPRQLLFQHYDISNEETIGIKPFKSIPAKVYILRVTEILTLGLLHLILTWLPEFRLKWIEAPCSNEDVEFVAISDPSGTSSIEKVSSICLKNDIQTSSFVLPSGKTRYFEYKKLRFYLEPLNLQWVLMPLETSAYSLVTSTPAYIQNGLDTFTIAKLRQVYGSNSLVSTKKSIVTILLNEVLHPFYLFQAVSVLIWLCDSFVFYSCCIVFISSYSIFLSVKESKESENRIHSIIGAPQPVTVIRNQVKQTVLADDLVIGDLLYFSNLDLKTCPVDGILFSSSCLLDESMVTGESVPARKFPLEDNSLDSWMIASCNIFSPHLIHAGTKFLKIDSTPSTPCLISVVRTGFRSNKGQLIRNLLYPNLRPSQLYLDSMSFLKTMAILSFVSIVFIAIYLNLYNASFGHVVLRSLDVLTILVPPALPATLSVGIANSIARLSRALIYTTSPESIHNAGCLSTFVFDKTGTLTENSVQLSCVYVKSGSNGLLKQVDADSLSLDSTKLNAHAYRVATCSQSLELVGNELVGDPLEVTLFTQFNGTFCATIRASNTPHPPLFSVSNSFDGPSQIFSIYKALEFDPVLRRMSVICSTSTERSLMLFTKGAPESILAISSQQSIPSNVQEVIHTLSSKGFRIIAFASKNLITPLQELIHLSRSTLESNVTFQGLFVLESPLRESSKDVISSLLRSKMEVSICSGDSLFTSVFVAKHCGALDSCNFIYTAELADSGDDCPQIHFEKIDLQTQNFQPIPDGFSLKDVILEKDSSLCMDGKLLQRLLTMLSFNEIKILLSKLRVLARMSPFDKATYVELCQKYGCKVGFCGDGANDCIALKQADVGVSLSDSEACAAASFVSKKKSIKDVFNVLLEGRCSLILSHRCFQYMVLCAIVQFSGVFFLYLKNYNFNDNQFLFMDLLIIFPLSAAMSYFDPAQNLTSNRPNSTLFGKGRVKDLGIQSVLIWLSHGLLTLILHELNWVELPEWQLEKSNTKNVLVTSIFLLSSLQYLGICIGINQSSEFLSPIWKKKTYVCLCTTIGLCNIYLCFANENHIISRCLQITRLPTLYRFIILFMGVISCCLTSILNM

SEQ ID NO: 22519 - protein, 1215 aa, Saccharomyces cerevisiae
MTKKSFVSSPIVRDSTLLVPKSLIAKPYVLPFFPLYATFAQLYFQQYDRYIKGPEWTFVYLGTLVSLNILVMLMPAWNVKIKAKFNYSTTKNVNEATHILIYTTPNNGSDGIVEIQRVTEAGSLQTFFQFQKKRFLWHENEQVFSSPKFLVDESPKIGDFQKCKGHSGDLTHLKRLYGENSFDIPIPTFMELFKEHAVAPLFVFQVFCVALWLLDEFWYYSLFNLFMIISMEAAAVFQRLTALKEFRTMGIKPYTINVFRNKKWVALQTNELLPMDLVSITRTAEESAIPCDLILLDGSAIVNEAMLSGESTPLLKESIKLRPSEDNLQLDGVDKIAVLHGGTKALQVTPPEHKSDIPPPPDGGALAIVTKTGFETSQGSLVRVMIYSAERVSVDNKEALMFILFLLIFAVIASWYVWVEGTKMGRIQSKLILDCILIITSVVPPELPMELTMAVNSSLAALAKFYVYCTEPFRIPFAGRIDVCCFDKTGTLTGEDLVFEGLAGISADSENIRHLYSAAEAPESTILVIGAAHALVKLEDGDIVGDPMEKATLKAVGWAVERKNSNYREGTGKLDIIRRFQFSSALKRSASIASHNDALFAAVKGAPETIRERLSDIPKNYDEIYKSFTRSGSRVLALASKSLPKMSQSKIDDLNRDDVESELTFNGFLIFHCPLKDDAIETIKMLNESSHRSIMITGDNPLTAVHVAKEVGIVFGETLILDRAGKSDDNQLLFRDVEETVSIPFDPSKDTFDHSKLFDRYDIAVTGYALNALEGHSQLRDLLRHTWVYARVSPSQKEFLLNTLKDMGYQTLMCGDGTNDVGALKQAHVGIALLNGTEEGLKKLGEQRRLEGMKMMYIKQTEFMARWNQPQPPVPEPIAHLFPPGPKNPHYLKALESKGTVITPEIRKAVEEANSKPVEVIKPNGLSEKKPADLASLLLNSAGDAQGDEAPALKLGDASCAAPFTSKLANVSAVTNIIRQGRCALVNTIQMYKILALNCLISAYSLSIIYMAGVKFGDGQATVSGLLLSVCFLSISRGKPLEKLSKQRPQSGIFNVYIMGSILSQFAVHIATLVYITTEIYKLEPREPQVDLEKEFAPSLLNTGIFIIQLVQQVSTFAVNYQGEPFRENIRSNKGMYYGLLGVTGLALASATEFLPELNEAMKFVPMTDDFKIKLTLTLLLDFFGSWGVEHFFKFFFMDDKPSDISVQQVKIASK

SEQ ID NO: 22520 - protein, 1472 aa, Saccharomyces cerevisiae
MDIPSSNQIQHGQRSERNRRMPRASFSSTATTSTAATLTSAMVLDQNNSEPYAGATFEAVPSSIVSFHHPHSFQSSNLPSPHSSGNLEQRGRRLTESEPLVLSSAEQSRSSSRNPSHFRFFTQEQISNAEGASTLENTDYDMAWDATPAYEQDRIYGTGLSSRRSSIRSFSRASSLSNAKSYGSFSKRGRSGSRAPQRLGENSDTGFVYHSATHSSSSLSRYTTRERIPIELESQTDEILEDESSTHSLESSDSRRSASENNRGSFSGHDDVHNQHSEYLKPDYHEKFYPQYAPNLHYQRFYIAEEDLVIGIAAYQTSKFWYIIYNLCCFLTFGLVYLLTRWLPHLKVKLYGVKVPLAKAEWVVIENEFGEFVIQPIDRQWYNRPLSTVLPFENYPNPSYEPNDINLSHHHANEINPNVPILITFEYRYIKFIYSPLDDLFKTNNNWIDPDWVDLSTVSNGLTKGVQEDRELAFGKNQINLRMKTTSEILFNEVLHPFYVFQVFSIILWGIDEYYYYAACIFLISVLSIFDSLNEQKKVSRNLAEMSHFHCDVRVLRDKFWTTISSSELVPGDIYEVSDPNITILPCDSILLSSDCIVNESMLTGESVPVSKFPATEETMYQLCDDFQSTQISSFVSKSFLYNGTNIIRARIAPGQTAALAMVVRTGFSTTKGSLVRSMVFPKPTGFKFYRDSFKYIGFMSLIAIFGFCVSCVQFIKLGLDKKTMILRALDIITIVVPPALPATLTIGTNFALSRLKEKGIFCISPTRLNISGKIDVMCFDKTGTLTEDGLDVLGVQISEPNGVRGQKFGELLSDIRQVFPKFSLNDCSSPLDFKSRNFFMSLLTCHSLRSVDGNLLGDPLDFKMFQFTGWSFEEDFQKRAFHSLYEGRHEDDVFPENSEIIPAVVHPDSNNRENTFTDNDPHNFLGVVRSFEFLSELRRMSVIVKTNNDDVYWSFTKGAPEVISEICNKSTLPADFEEVLRCYTHNGYRVIACAGKTLPKRTWLYSQKVSREEVESNLEFLGFIIFQNKLKKETSETLKSLQDANIRTIMCTGDNILTAISVGREAGLIQCSRVYVPSINDTPLHGEPVIVWRDVNEPDKILDTKTLKPVKLGNNSVESLRECNYTLAVSGDVFRLLFRDENEIPEEYLNEILLNSSIYARMSPDEKHELMIQLQKLDYTVGFCGDGANDCGALKAADVGISLSEAEASVAAPFTSKIFNISCVLDVIREGRAALVTSFACFQYMSLYSAIQFITITILYSRGSNLGDFQFLYIDLLLIVPIAICMSWSKSYEKIDKKRPSANLVSPKILVPLLISVFLVFLFQFIPWIIVQKMSWYIKPIVGGDDAVQSSDNTVLFFVSNFQYILTAIVLSVGPPYREPMSKNFEFIVDITVSIGASLLLMTLDTESYLGKMLQLTPISNSFTMFIIVWVILNYYAQLYIPPSIKGWLKKKKSSKKYKLLIQEEMKLKEV

SEQ ID NO: 22521 - protein, 1318 aa, Neurospora crassa
MAPLVDNAQIQSAELLRPLPLYLHAYVWPFAIIWPIFFRYYLDQDLYDKHINGQEWTFVWSGTIITIQALVWLCTHWNINLRAAFTAKKARSVNDAQLIKVIPVANAGISDICPIVRDTAGGKTNISFLFQKRRFLYNAETNSFSTLTYQIDDEPKPKLEVFQKSKGITTASELDRLEQHYGTNTFDIPVPTFTELFKEHAVAPFFVFQVFCVGLWMLDEYWYYSLFTLFMLVVFESTVVWQRQRTLNEFRSMSIKPYEIYVYRLGQWTETTSDKLLPGDLVSVTRTKEDSGVACDMLLVEGTAIVNEAMLSGESTPLLKDSIQLRPGEAQIEPEGLDKNAFLWGGTKVLQITHGNPDEEKPKLASGVPIPPDNGAMAIVTKTGFETSQGSLVRTMIYSTERVSANNAEALFFILFLLIFALAASWYVWDEGVRKDRKRSKLLLDCVLIVTSVVPPELPMELSLAVNTSLSALAKFAIFCTEPFRIPFAGRIDVACFDKTGTLTGEDLVVEGIAGLGLGHSGTDTPRESDGAHSHMTPVDEAGLETTLVLATAHALVRLDEGDIVGDPMEKATLTALGWSLGQNDMLKTKTGAKSTVLGNVQVKRRFQFSSALKRQSSVATINATDSKTGQKLRGTFVGVKGAPETIMKMLVTVPKDYEETYKYFTRRGSRVLALAYKQLSTENELGASKINDLKRENVEADLTFAGFLVLQCPLKEDAKQAVQMLNESSHRVVMITGDNPLTAVHVAREVEIVDRDVLILDAPEHSVHGEEKLIWRSVDDKVNIEVDPTKPIDPEIIKTKDLCVTGYALAKFKGQVGWKTLLRYTWVYARVSPKQKEDILLGLKDMGYYTLMAGDGTNDVGALKQAHIGVALLNGTQEDLIRIAEHARNNKIKDMYQKQVDLMKRWGQPAPPVPALIAHLYPPGPSNPHYNAAMEREAAKKGITVEKLAKSLHHPAAIETVTSPGAQALINQDPKQRQAAAAQKASSFADKLTSGMMDMEMDDDEPPTLKLGDASVAAPFTSKLRNVVAIPNIIRQGRCTLVATIQMYKILALNCLISAYSLSVLYLEGIKFGDGQITISGMLMSVCFLSISRAKSVEGLSKERPQPNIFNFYIIGSILGQFAVHVVTLIYIARFCDQLEPRSESVDLEAEFSPSLLNSAVYLLQLIQQISTFAVNYQGRPFRESLSENKGMFYGIVGVTAIAFACSTEMVPELNEAMKLVPFKEEFKWTMTIVMILDYVACWLIEVVFKYLFSDLKARDIAVRREDQLERERLRKAEELKKLEEVKRMKEEEEEKARMEKVAEFERRLRARMGGSA

SEQ ID NO: 22522 - protein, 1346 aa, Neurospora crassa
MNGGNDAHHASWRSSQSFDRRRASHDHRPGLYTLGSNQSNASIFEDVEMAHDELYSGPMAESLPTSVSAFNHRRARADSTTSFSFYQEDIDEHFETGEVASVEDLDELPFEDDYEGDVGASEMGSSDLERQAADDDYMLNRRSSTQSRRSGHSRILRRDSGLSASSGHGGNRTSQKVYMVNEDLYIAIAGFRTSTLGLAVYILICLSTFGLGWLLFRWVPRWHVKLVGRPSPLRDCQWVVIENSWNEMAILNVDSKPYGRVLSTVFGTPGKLASYSLDEDYDPILQDLRMLNYRYVRFFYHPLKDKFILCNGWKDPLWTDVQTIRSGIDSDEKSHRDAVFGGNLIDIEEKSTFRLLADEVFHPFYVFQIASLILWSVDEYYYYAIAIFVMSVGSIVATLIETKSTMKRLREISRFVCDVRVLRNGFWRHVSSSDLVPGDIYEVSDPSLSQFPADSLLLGGDCIVNESMLTGESVPVSKTPATDQSLRNLDLGASTVLPEVAKHFLFCGTKIIRARRPQDDHNEEAVALALVVRTGFNTTKGALVRSMLFPKPSGFKFYRDSFRYISVMACVAMVGFAASFVNFIRLNLSWHLIIVRALDLITIVVPPALPATLTIGTNFALGRLKSKKIFCISPQRVNVGGKLDIMCFDKTGTLTEEGLDVLGVRVVDRTNNRFSDILDNPDDLVPRQDHGTGIRDSSDTLKAALYTMATCHSLRSIDDELVGDPLDLKMFEFTRWSFEEGHEGGGATDGEEQGTLQPSIARPPTVDKGYTDADRQDATQNGRAPFELGVLKSFEFVSQLRRASVIVKTFGQKSGDIFVKGAPECMRDICKPESFPADYDDQLNYYTHKGYRVIGCATKHIPKLSWVKAQKMTRHNVESDLDFVGFIIFENKLKPATAPVLKELAESNIGSVMVTGDNILTAISVARECSLINKTAHCFVGRFVAGHSRDPNAKLQWESIDNPIYQLDDRTLLPLPPPPEGDVSLPYDISNLRNYSLAVSGDVFRWVIDYAPPEVMRRMLVTGKVFARMSPDEKHELVEKLQSIDYCCGFCGDGANDCGALKAADVGISLSEAEASVAAPFTSRVFDIRCVPEVIREGRAALVTSFSCFKYMSLYSAIQFTSVSFLYASASNLGDFQFLFIDLALILPIAVFMSWAGPFPELCRKRPTADLVSRKVLVPLLGQMFICIFIQTMAFIAVREQPWFIPPKVEHEKVNIRNSENTALFLTSCFEYILAGVVLNAGRPFRQPPWNNWPFVAAIAATLAFTGYMILGPAAGLVSLMDLTPISWDFKMFIFTLGIMYFVLAWVGEHVMFQRLARLIGKVSQSLTREPKKRKEYKVILERMIC

SEQ ID NO: 22523 - protein, 221 aa, Trichomonas vaginalis
DKTGTLTSEEYKLVGVDTLNAPAAPKNKTIKGNYFSSPSEMPVESMWVVGGCHSLIRGKYGKLIGDSLESAAFQQMHFKLNSDKSATYGDISITPIKEYHFSSELKRMTVVCNVSGRTQPIAVIKGAPEAVQPLLTTVPSDYKQAYLKYARRGCRVLVLGYRILEFNYDPSTAKRDDIEKNFIFAGFAIFDAPLKRGSEDTVVELLKSQHRVIIITGDGVN

SEQ ID NO: 22524 - protein, 1877 aa, Plasmodium yoelii
MVNFCKPDKLLIEYSELRCICFFYIFLLLCFFIWVFHKKWMRDNIEKKHKLKNYQAIFKSENVEFFNYIYESDDPNEIVVKQKGYKNCYIGFLLKKISIFLYICTHLIIIALISNEYCIKTNNEILWNARALEFFIFFLLSLTITYGILIIRKHIQSLFLKPSLLKDSDYVIIYTINEEYNTFYNTNYFKKYISHINHMIHTFIKKKKKNIKKNIKKWNFQKYNILFLQFVCNLLDIIQNYIPFPIFLEKIIKNIKESKVSHLNTHSFHDTKKKTHNLYTNPLFIENDVESLSDSEIRASNSHIESSQCVVEKKKRKEEARQTKFSLHKVQVKKNEKNVKYFFFRSMKYLYNEEKDAFINISYSIEEKVKSFNFNYILKKGGLNNNEIINNLNQYGYNNIHLDVNSFFINLKRELLDGIYMFQLYLTYKNLFWKEMITSIIWIVISILSVIKKVLKNQKNKKEIYDNIQSNSNINVTVYRNGLEQNISSNNLTIGDIIIVKSKMTIPCDCLLLTGQVLVDESLLTGESKPMKKIATSNENRSQIFKNEKEQNNDTSFSINEQNKINANNMLYAGTNIISIFNSPENIYAIVINVSIYTYKGKYMQSVLFPNPLLFKYDSQLPIVFIFTIIFSFFCFYFQIKYLGFNMTSIFYTIGTLSQILPVWTPVVLNIGLNISTNRLKNENNICCIAPSRIPICGKIRVFFFDKTGTITNHNLEFSGIHFCNNILSPQKNLVSKYFEKKNLEPVASDDISASVLTSSRPNTSPLTLTELATNDKKERDKKERDKKGRDKKERDKKGRDKKERDKKERDNKESDNRIDKNSAKNGENTKSGNSYYCSVYNEEEENINSTTLEKLNLNKNIREQNYNQTNKIEIIDKSSNSEKDDFKSPNFSICEKNSQSSNDDLFQSYDEGEYQKHSEHIPIKDEKIYTNHQSSHFDQLGKDEEIRKDAEIRKDEEIRKDEEIRKNEENFNGHSNLSANSNNINYFPNKLIKEENRKKKKKNSRHDENNNISNINKHFINSNSSINSVTSLLYNSKLIWSNKITLENMPDNYNLIVYALAGCACIYDDDNIIYGNEIDKKLYETTDMVIHNYINGDNINVKRISLKLGSIYKSFDVIKTFEFDYYTKISTTLTYGYFDFTEKVYIVFSKGSFDKIYQKCIKTDELYFYKQKEQEYSKNGFYVIALAFKIIYDLPKNKKKNNFYNLSRDEMETDMNFLSLIMFNNHIKVDAHYVIQTLKDSRIRPIILTGDNAYNCLYVGNKIGLFNNINTYESFYSLNVNSNNNIDHSNKKKNTNFSNNNSFNLSDIKFMPFENLFKYSSESKNFKENMNVNQIYDNNNDNDDDNDDNDDDNDNDNDNNNNSNSNNNNGDDDNNGVAKKKRQNSKYNTINTINQYGSNILDIDASKIEEEYLLESYKNMNPVNDDTYNYDQNIIVYGYILNNELIFVNIHNDNKINNTIVLYKDIYKEIILTGEAYNYIRDHIFKIQNFENETNSNLIHTNNNNNTFKQNPFLEQYKNFLLKVRIFSRLTPNNKMEIIKDFTKFDYISGMCGDGSNDCGALKTSHAGLALSNSDTSVVAPFSAKNENLKSVIDILREGRACLVTSINCYKYMLLYGFMISIIKIILFMRAHAIMSEYGYLFFDNIILLLLAKSMTLSKPEYKLKTQTPTSSIIGAQTILSLLCTLIVNFFFLYIIMFKFFFLCNLPSSYDINSSAPKSSWWLMSDNYESFLTCIWFCFQIVNSAFILTLGGKYRKHIFSNYTFMIYYVLINLFLFYLTIGGPNKLTCLFRMNCNDEISRQTKFKILELFSYSAGGLSFYGPNGNNILSTQVKIKFLFLNFLNIIINILISKYVLCERFYNIVRKIFKIQNRRIPT

SEQ ID NO: 22525 - protein, 1133 aa, Tetrahymena thermophila
MRVSSIEAEMENPIDVDKTDVEGELKIKQVTLLRENIVKKIVFFLVAIFCSDRPSVLKKVFYEEVSKQEEATHVYVLASDLTDYIEEASLKENPEEGGEKSIYFVNRLQKYIYHKKQNKFRAIEYFIQGKSYSEIANNKPLATGRVDQLLAYYGKSEIEINVPSFLTLMWREFKKPINFLLYFGIIVWGIEQMYVSTAITVVFTTTINSLICIYIRGVMQKLKDACLNNTSVIVQRHNGQGYQEITVASNMIAPGDIVLFKREVTLPFDCVILEGSCQVTEANITGENVAIGKCQIPTDHHNDIFKYESSKSHTLFQGTQLMKIEDDILKVIVVRTGFGSYKGQIIRALLYPKPFNKKFQQQAVKLTILMATLLLIGFLSTLSRLLDIELPPLFIAFRFLDILIYSAPPGMPMLIAITNFVGLKRLKNNQILGQDPNSASQAGRIQTLCFDKTGTLTEDKVDLIGYQLKGQNQTFDKIQCQDPNNISIEHKLFSICHEVTKINNKLLGDLMDVKMAEFSTLDIDYDHEAKQHYSKSGNKRFYCIQVNQFHSEYQSMSVVCKEVDMITKEFKHYFFIKGSPEKIQSLSHVQSSEKAQLSTLINEGYRILGFGYKEIPQSEIDAFLDLSREQQEANVQSLGFLIYKNNLKPDTQEVIKEFKEACYNIKVISGDNPITTLKISQELEIVNRKNPTVIINFEETENVKSHLIITEIQPDNSTQVIDFSSAQNEQDYINKQMSYCCDAFLNNKSFCFSGKAHYYFQLKAKTDHISFKPEWVKMQDKSVQKIISFYQMLIINTNVFARTQPEQKQTIVRLLKESDQIVCMVGDGANDCSAIREADVGISFAEADGQFSSSYVSLSTSLSCVKRVLLEGRVNLSNSVEIFKGYLQVALLRYLGFLTLAYFYSSYSSGQMDWQALASGYFLVYLILGCNTPLKKLEKSVFDDNLFSIYNVTSVLFGFTLHILSIVGCVESLHASPIYKEVNSLDAENNFQFETQHNTVLNFNILINFFYVIISNHIGKPMKDRYYKNTIAIYYDLGLIYTCKCMILQVLLILEHTHHGLIFLILLLDQEFSSSLTVQVYFSLPMNLFLPEEFSLNFTQEVKKEKELLICNSSSTILEVDYNLRLNYFQQNF

SEQ ID NO: 22526 - protein, 973 aa, Encephalitozoon cuniculi
MHIIYKERPLHKRLYVIPLYVLPAMLLTSGYPQAMFVFTLLVSGTMFLSTFWSNKVRILFSMDLNSKGSYILYRGSLCKLKDGVFEYEKSGYLVTGEKIVRLRANTEKPFGYFMKWEEKRDEFVEAELLKHFKKNRFDIVPPSFSELFLQHAVSPLFVFQVFSGLLWCLDEYVYQAMFSLVMLVVLESGLVFQRMMTARHFRRMSHSNVDVEILYDSRMNAKKGEGVMGSSENLFPGDVVKISSSIHVPCDLLLVKGSCAVNEAMLSGESVPLTKEDISERDAEDIFDGGRDRRHILYAGTEIVMMKDSPLVCFVLHTGFETEKGGLVRKMMCAEEVTVNDREAFIFILALLVFAIVASFYAYREGKKMGKSNYKLLLEVILILTNVVPTELPMELSMAVNSCVRALARKGVYCLEPFRIPYAGKVNVCCFDKTGTLTETVMEVAAVKHETENSVSVLASCHSLLSLNGKVTGDPLETSIYEHLRNTEPLNSKCLEHTIHKAYSFCSELRRMTVVVEAKGKRFVGMKGAPEVVKLYLDSVPEFYDDYKKYAADGYRVLALGFKPIEKQDKYDRTDVESKLSFAGFILFDCKLKKNVRKTIESLHGSGHKVIMITGDNVLTARNVSKKIGISDKAVEGSEIDKVLESDEFFSVSIFARADPAHKEKIIEKYNKAGRYTLMCGDGTNDVGALKSAHVGIALMEAPVAVKKKGEPKTREERMMESISKDLGEDKINLGDASVAAPFTAKTGSLDSVLDIIRQGRSALVTTIQMYKILALNSLVSAFSLSVLDCMGVRYGDVQLTASGLLIGFAFMFLTQSRPLEEISKKRPLTNIINPYIVSSVVLQVVVHIASFFIMIGRIRNVETPVYSEKFSPSLMNSALFFLSTTQQISTFLVNYIGRPFRESLLENKKLLGCLLILLFVIHQLVMGSNDELRVKMEVVDMGSAKMFVYAVLVMDIVLCYLVEKVCFHVFML

SEQ ID NO: 22527 - protein, 1146 aa, Encephalitozoon cuniculi
MKPLKMFVGIKQEKPFISVEGRKRRISTGFYNVLCVLTLGGFHMVCRYLPKVKHFLLSSPCSLSDADCVIVTSQNGRREFVDVLAYSTEEIPSLRRYSLEGKARVVDSLFSRLIYDVVSRRFVVPPEQKAVFRDFEELYSTEISKSPETERAEAIQRNIFYGRNVTSLPIPGVFDIVVKNTLNITFLSNIICLFVWRAVDYHNYAFVMGMLMLYSFVFTNWEEISHSIGMKKLVKRRTVKILRGGRFVEVDSREVYPGNIIYIEPCKEFPCDALVIRGDAITNECLLTGETVPIYKNADQLSVVYSGTDVLKSISTIPMSTNLRNENLCRVRSLTSKNRSRAAGMVGSIDVLGNSAVGMVLRTGFQTTRGQILKNMLNAKPVHNRFIREAEIIILGIVMVAMAVGIGMAYVLNKMGFDASTNLMYSLDLFFTFANPAIPTYLRVGTQLCYKKLIKKNIYCSNLNKIHLAGRIDTAVFDKTGTLTCEGLDLLCIDDLNRPVDDINKVAMVTRLGLSTCHLVYELDGRYSGDTLDLKMFIFSSSKLVQHENTRSVVIGGHNRIYGPILKEYNDSEEMVYYQKDRTHGGRFADIDGNADEEDKDLSPVLLDVDEGAKFNLSDECGEGQDGEINAVIMKTYEFDSNIRRMSVVVDDGDRKYVFTKGSPESIQEILKERPRGYEEKAKEYSLGGYRVISLAYKEISESADRASDESEMKFLALIVFSNKLKENSRRTVDELNKANIRNIMCTGDNILTAISVGKECRIVEEFVPVIFPVLEENAKSIFDVDWLCVGDEEEFTFDKVRLSLYRGNDRVSNNEFVVACEGREFDFFRNTHYFEFILEKGAIFARFNPGQKKALIENLRASGKITMFCGDGANDSGALSSADVGLALGQNEASLAANFTSSEISSVLDLIKEGRSAFVTSTATFKYVVSYCAIAYVVLVFLVLRKKFLSDLQTIHGDLLVSIPIAYMLTCFDASDKLFPSPPDTFLLPKKDFVPFCLTIALECLVLWILSLYGEPCPEISTQSITAELMFFVSTFIYIFNALYLSDCSPHRQSLKDNVLFKTFISFMILSTIAFLMVVYLFPEWTFLWLRGYNFVETDGFEIGLVLISAFSVTIAVFVVQPLVGRMLGDKSMQDMVPSKPEEKI

SEQ ID NO: 22528 - protein, 1178 aa, Caenorhabditis elegans
MGVDQLVETIIPYNLRSIATHLYVPPFTIITAIWTYVWLNIFGYEEYYELGMLGYAAIFVILALVLLFCHWMMPVRCFLMCSKQEDVRIASHVCVIPTQNNGWPELVKLMRTTRDKQTKLWFEFQRVHYTWDEESREFQTKTLDTAKPMVFFQKSHGFEVEEHVKDAKYLLGDNKTEMIVPQFLEMFIERATAPFFVFQVFCVGLWCLEDMWYYSLFTLFMLMTFEATLVKQQMKNMSEIRNMGNKTYMINVLRGKKWQKIKIEELVAGDIVSIGRGAEEECVPCDLLLLRGPCIVDESMLTGESVPQMKEPIEDVEKDKIFDIETDSRLHVIFGGTKIVQHTAPGKAAEGMVKSPDGNCICYVIRTGFNTSQGKLLRTIMFGVKKATANNLETFCFILFLLIFAIAAAAYLWIKGSVDETRSKYKLFLECTLILTSVIPPELPIELSLAVNSSLMALQKLGIFCTEPFRIPFAGKVDICCFDKTGTLTTDNLVVEGVALNNQKEGMIRNAEDLPHESLQVLASCHSLVRFEEDLVGDPLEKACLSWCGWNLTKGDAVMPPKTAAKGISGIKIFHRYHFSSAMKRMTVVAGYQSPGTSDTTFIVAVKGAPEVLRNMYADLPSDYDETYTRLTRQGSRVLAMGIRKLGETRVGELRDKKRENFENDLAFAGFVVISCPLKSDTKTMIREIMDSSHVVAMITGDNPLTACHVSKVLKFTKKSLPTLVLDEPADGVDWMWKSVDGTIELPLKPETKNKMERKAFFNSHEFCLTGSAFHHLVHNEHTFLRELILHVKVFARMAPKQKERIINELKSLGKVTLMCGDGTNDVGALKHANVGVALLTNPYDAEKAAEKEKEKKAKIEEARSLVRSGAQLPQRPGAPGAPPAANAARRDAPPGARARAPLPPMANAAQARLDNLMKELEEEEKAQVIKLGDASIAAPFTSKYTSIASICHVIKQGRCTLVTTLQMFKILALNALVSAYSLSALYLDGVKFSDTQATIQGLLLAACFLFISKSKPLKTLSRQRPMANIFNAYTLLTVTLQFIVHFSCLLYIVGLAHEANTEKAPVDLEAKFTPNILNTTVYIISMALQVCTFAVNYRGRPFMESLFENKAMLYSIMFSGGAVFTLASGQATDLMIQFELVVLPEALRNALLMCVTADLVICYIIDRGLNFLLGDMF

SEQ ID NO: 22529 - protein, 1157 aa, Caenorhabditis elegans
MGVDQLVETIIPYNLRSIATHLYVPPFTIITAIWTYVWLNIFGYEEYYELGMLGYAAIFVILALVLLFCHWMMPVRCFLMCSKQEDVRIASHVCVIPTQNNGWPELVKLMRTTRDKQTKLWFEFQRVHYTWDEESREFQTKTLDTAKPMVFFQKSHGFEVEEHVKDAKYLLGDNKTEMIVPQFLEMFIERATAPFFVFQVFCVGLWCLEDMWYYSLFTLFMLMTFEATLVKQQMKNMSEIRNMGNKTYMINVLRGKKWQKIKIEELVAGDIVSIGRGAEEECVPCDLLLLRGPCIVDESMLTGESVPQMKEPIEDVEKDKIFDIETDSRLHVIFGGTKIVQHTAPGKAAEGMVKSPDGNCICYVIRTGFNTSQGKLLRTIMFGVKKATANNLETFCFILFLLIFAIAAAAYLWIKGSVDETRSKYKLFLECTLILTSVIPPELPIELSLAVNSSLMALQKLGIFCTEPFRIPFAGKVDICCFDKTGTLTTDNLVVEGVALNNQKEGMIRNAEDLPHESLQVLASCHSLVRFEEDLVGDPLEKACLSWCGWNLTKGDAVMPPKTAAKGISGIKIFHRYHFSSAMKRMTVVAGYQSPGTSDTTFIVAVKGAPEVLRNMYADLPSDYDETYTRLTRQGSRVLAMGIRKLGETRVGELRDKKRENFENDLAFAGFVVISCPLKSDTKTMIREIMDSSHVVAMITGDNPLTACHVSKVLKFTKKSLPTLVLDEPADGVDWMWKSVDGTIELPLKPETKNKMERKAFFNSHEFCLTGSAFHHLVHNEHTFLRELILHVKVFARMAPKQKERIINELKSLGKVTLMCGDGTNDVGALKHANVGVALLTNPYDAEKAAEKEKEKKAKIEEARSLVRSGAQLPQRPGAPGAPPAANAARPRLDNLMKELEEEEKAQVIKLGDASIAAPFTSKYTSIASICHVIKQGRCTLVTTLQMFKILALNALVSAYSLSALYLDGVKFSDTQATIQGLLLAACFLFISKSKPLKTLSRQRPMANIFNAYTLLTVTLQFIVHFSCLLYIVGLAHEANTEKAPVDLEAKFTPNILNTTVYIISMALQVCTFAVNYRGRPFMESLFENKAMLYSIMFSGGAVFTLASGQATDLMIQFELVVLPEALRNALLMCVTADLVICYIIDRGLNFLLGDMF

SEQ ID NO: 22530 - protein, 1152 aa, Caenorhabditis elegans
MTSEREPLLDTTTRNRVYDTTDNPSTKIMKREKDNPKAKTTSFNQGKLNIGEETCDLYAYKETIGRQILFWLLTIVTLGFYQLLAYWVKSLFVKVRFQPTSHDECEYVMVEDIHGTQTIKEVFKAESDVGLARPTVRSGKQEKVKVMRFFTYRKIKYIWYEKDQEWLNPADMDSAAPFNIYQKLTLDVIGLKEQDVIASRKIYNMNALALALTPILVILFKEVLGPFYLFQCFSVALWYSDNYAYYASVIVIITVGSAAVAVYQMRAQEKRIRNMVGDTISVIVRRDGHDITIDASEIVPMDILILPSNTFILPCDCLLMNGTVIVNEAMLTGESVPVTKASLKEADECGPEIRLSSEHNRHTLFSGTTVLQTRNYKGQPVMARVIRTGFSTLKGQLVRSIMYPKPQEKEALKDVMVFILVLGFIALIGFIYTVIEMVSRGESLKHIIIRSLDIITIVVPPALPAAMSVGIINANSRLKKKKIFCTSPTTVNVCGLINVACFDKTGTLTEDGLDFNCLKAIRKNEDGKPEFTSEFEELDPVKLSAENANLNIVVAAASCHSLTRIDGTLHGDPLELILVEKSKWIIEEAVNSDEETQDFDTVQPTVLRPPPEQATYHPENNEYSVIKQHPFNSALQRMSVIISTPSEHSAHDMMVFTKGSPEMIASLCIPDTIPEDYMEVVDEYAQRGFRLIAVASKAVHLNFAKALKTPRDIMESELEFLGLIVMENRLKDVTLSVINELSVANIRCVMVTGDNLLTAMSVARECGIIRPTKKAFLITHSKTEKDPLGRTKLFIKESVSSSENDIDTDSEVRAFDRKAVLRTATYQMAIAGPTYSVITHEYPELVDRITAMCDVYARMAPDQKAQLIGALQEIGAKVSMCGDGANDCAALKAAHAGISLSQAEASIAAPFTSNVPDIRCVPTVIKEGRCALVTSYAVSKYMAAYSLNEFLSVMLLYNDGTNISDGQFLYIDLVLITLVALFLGNTEASRKLSGIPPPRRLATSAFYFSVFGQMFFNIITQTTGYLLVRGQSWYVPNPEELDNTTTMIGTTVFFTSCCMYLGYAFVYSKGHPYRRSVFTNWLLCGIIFVIGAINMVMIFTNMGFLMNLMGFVYVPSTSMRFILLAISLAGVFLSLLYEHFFVEKVVAIHFER

SEQ ID NO: 22531 - protein, 1127 aa, Caenorhabditis elegans
MSTNNYQTLSQNKADRMGPGGSRRPRNSQHATASTPSASSCKEQQKDVEHEFDIIAYKTTFWRTFFFYALSFGTCGIFRLFLHWFPKRLIQFRGKRCSVENADLVLVVDNHNRYDICNVYYRNKSGTDHTVVANTDGNLAELDELRWFKYRKLQYTWIDGEWSTPSRAYSHVTPENLASSAPTTGLKADDVALRRTYFGPNVMPVKLSPFYELVYKEVLSPFYIFQAISVTVWYIDDYVWYAALIIVMSLYSVIMTLRQTRSQQRRLQSMVVEHDEVQVIRENGRVLTLDSSEIVPGDVLVIPPQGCMMYCDAVLLNGTCIVNESMLTGESIPITKSAISDDGHEKIFSIDKHGKNIIFNGTKVLQTKYYKGQNVKALVIRTAYSTTKGQLIRAIMYPKPADFKFFRELMKFIGVLAIVAFFGFMYTSFILFYRGSSIGKIIIRALDLVTIVVPPALPAVMGIGIFYAQRRLRQKSIYCISPTTINTCGAIDVVCFDKTGTLTEDGLDFYALRVVNDAKIGDNIVQIAANDSCQNVVRAIATCHTLSKINNELHGDPLDVIMFEQTGYSLEEDDSESHESIESIQPILIRPPKDSSLPDCQIVKQFTFSSGLQRQSVIVTEEDSMKAYCKGSPEMIMSLCRPETVPENFHDIVEEYSQHGYRLIAVAEKELVVGSEVQKTPRQSIECDLTLIGLVALENRLKPVTTEVIQKLNEANIRSVMVTGDNLLTALSVARECGIIVPNKSAYLIEHENGVVDRRGRTVLTIREKEDHHTERQPKIVDLTKMTNKDCQFAISGSTFSVVTHEYPDLLDQLVLVCNVFARMAPEQKQLLVEHLQDVGQTVAMCGDGANDCAALKAAHAGISLSEAEASIAAPFTSKVADIRCVITLISEGRAALVTSYSAFLCMAGYSLTQFISILLLYWIATSYSQMQFLFIDIAIVTNLAFLSSKTRAHKELASTPPPTSILSTASMVSLFGQLAIGGMAQVAVFCLITMQSWFIPFMPTHHDNDEDRKSLQGTAIFYVSLFHYIVLYFVFAAGPPYRASIASNKAFLISMIGVTVTCIAIVVFYVTPIQYFLGCLQMPQEFRFIILAVATVTAVISIIYDRCVDWISERLREKIRQRRKGA

SEQ ID NO: 22532 - protein, 1111 aa, Caenorhabditis elegans
MGPGGSRRPRNSQHATASTPSASSCKEQQKDVEHEFDIIAYKTTFWRTFFFYALSFGTCGIFRLFLHWFPKRLIQFRGKRCSVENADLVLVVDNHNRYDICNVYYRNKSGTDHTVVANTDGNLAELDELRWFKYRKLQYTWIDGEWSTPSRAYSHVTPENLASSAPTTGLKADDVALRRTYFGPNVMPVKLSPFYELVYKEVLSPFYIFQAISVTVWYIDDYVWYAALIIVMSLYSVIMTLRQTRSQQRRLQSMVVEHDEVQVIRENGRVLTLDSSEIVPGDVLVIPPQGCMMYCDAVLLNGTCIVNESMLTGESIPITKSAISDDGHEKIFSIDKHGKNIIFNGTKVLQTKYYKGQNVKALVIRTAYSTTKGQLIRAIMYPKPADFKFFRELMKFIGVLAIVAFFGFMYTSFILFYRGSSIGKIIIRALDLVTIVVPPALPAVMGIGIFYAQRRLRQKSIYCISPTTINTCGAIDVVCFDKTGTLTEDGLDFYALRVVNDAKIGDNIVQIAANDSCQNVVRAIATCHTLSKINNELHGDPLDVIMFEQTGYSLEEDDSESHESIESIQPILIRPPKDSSLPDCQIVKQFTFSSGLQRQSVIVTEEDSMKAYCKGSPEMIMSLCRPETVPENFHDIVEEYSQHGYRLIAVAEKELVVGSEVQKTPRQSIECDLTLIGLVALENRLKPVTTEVIQKLNEANIRSVMVTGDNLLTALSVARECGIIVPNKSAYLIEHENGVVDRRGRTVLTIREKEDHHTERQPKIVDLTKMTNKDCQFAISGSTFSVVTHEYPDLLDQLVLVCNVFARMAPEQKQLLVEHLQDVGQTVAMCGDGANDCAALKAAHAGISLSEAEASIAAPFTSKVADIRCVITLISEGRAALVTSYSAFLCMAGYSLTQFISILLLYWIATSYSQMQFLFIDIAIVTNLAFLSSKTRAHKELASTPPPTSILSTASMVSLFGQLAIGGMAQVAVFCLITMQSWFIPFMPTHHDNDEDRKSLQGTAIFYVSLFHYIVLYFVFAAGPPYRASIASNKAFLISMIGVTVTCIAIVVFYVTPIQYFLGCLQMPQEFRFIILAVATVTAVISIIYDRCVDWISERLREKIRQRRKGA

SEQ ID NO: 22533 - protein, 1187 aa, Caenorhabditis elegans
MTLESGDHTLTLFAYRTGPFRTILFYALTVLTLGIFRLILHWKQKWDVKMRMVPCTFEAAEYIYIIDNHNVSELQPVLRKSNATIPTENGEMRKVPELRWFVYRKLEYVWIDDLNSDESVDEISDNDNCWKTSFEIANRIPCRSLLAVSESNFGLTLSEISRRLEFYGRNEIVVQLRPILYLLVMEVITPFYVFQIFSVTVWYNDEYAYYASLIVILSLGSIVMDVYQIRTQEIRLRSMVHSTESVEVIREGTEMTIGSDQLVPGDILLIPPHGCLMQCDSVLMNGTVIVNESVLTGESVPITKVALTDETNDSVFNIEKNSKNVLFCGTQVLQTRFYRGKKVKAIVLRTAYSTLKGQLVRSIMYPKPVDFRFTKDLFKFILFLACISGCGFIYTIIVMIMRGNTLRRIIVRSLDIITITVPPALPAAMSVGIINAQLRLKKKEIFCISPSTINTCGAINVVCFDKTGTLTEDGLDFHVVRPVMSAVNQEIQKVKLEKSNRTEFMGEMTELTSRNGLPFDGDLVKAIATCHSLTRINGVLHGDPLDLILFQKTGWTMEEGIEGDIEEETQRFDNVQPSIIKPTDDKSAEYSVIRQFTFSSSLQRMSVIVFDPREDRPDNMMLYSKGSPEMILSLCDPNTVPEDYLLQVNSYAQHGFRLIAVARRPLDLNFNKASKVKRDAVECDLEMLGLIVMENRVKPVTLGVINQLNRANIRTVMVTGDNLLTGLSVARECGIIRPSKRAFLVEHVPGELDEYGRTKIFVKQSVSSSDEVIEDDASVSISMCSSTWKGSSEGDGFSPTNTEVETPNPVTADSLGHLIASSYHLAISGPTFAVIVHEYPELVDQLCSVCDVFARMAPDQKQSLVEQLQQIDYTVAMCGDGANDCAALKAAHAGISLSDAEASIAAPFTSKVPDIRCVPTVISEGRAALVTSFGIFKYMAGYSLTQFVTVMHLYWISNILTDGQFMYIDMFLITMFALLFGNTPAFYRLAHTPPPTRLLSIASMTSVVGQLIIIGVVQFIVFFSTSQQPWFTPYQPPVDDEVEDKRSMQGTALFCVSMFQYIILALVYSKGPPFRGNLWSNKPIYKKKRSIEAIIDYVPTTNSDHIRRPSINGVTSSRTESTLLSAEGQQLHMTTSKNGKGGENPHSSALFERLISRIGGEPTWLTNPIPPHSLSEPEEPEKLERTY

SEQ ID NO: 22534 - protein, 1256 aa, Caenorhabditis elegans
MTLESGDHTLTLFAYRTGPFRTILFYALTVLTLGIFRLILHWKQKWDVKMRMVPCTFEAAEYIYIIDNHNVSELQPVLRKSNATIPTENGEMRKVPELRWFVYRKLEYVWIDDLNSDESVDEISDNDNCWKTSFEIANRIPCRSLLAVSESNFGLTLSEISRRLEFYGRNEIVVQLRPILYLLVMEVITPFYVFQIFSVTVWYNDEYAYYASLIVILSLGSIVMDVYQIRTQEIRLRSMVHSTESVEVIREGTEMTIGSDQLVPGDILLIPPHGCLMQCDSVLMNGTVIVNESVLTGESVPITKVALTDETNDSVFNIEKNSKNVLFCGTQVLQTRFYRGKKVKAIVLRTAYSTLKGQLVRSIMYPKPVDFRFTKDLFKFILFLACISGCGFIYTIIVMIMRGNTLRRIIVRSLDIITITVPPALPAAMSVGIINAQLRLKKKEIFCISPSTINTCGAINVVCFDKTGTLTEDGLDFHVVRPVMSAVNQEIQKVKLEKSNRTEFMGEMTELTSRNGLPFDGDLVKAIATCHSLTRINGVLHGDPLDLILFQKTGWTMEEGIEGDIEEETQRFDNVQPSIIKPTDDKSAEYSVIRQFTFSSSLQRMSVIVFDPREDRPDNMMLYSKGSPEMILSLCDPNTVPEDYLLQVNSYAQHGFRLIAVARRPLDLNFNKASKVKRDAVECDLEMLGLIVMENRVKPVTLGVINQLNRANIRTVMVTGDNLLTGLSVARECGIIRPSKRAFLVEHVPGELDEYGRTKIFVKQSVSSSDEVIEDDASVSISMCSSTWKGSSEGDGFSPTNTEVETPNPVTADSLGHLIASSYHLAISGPTFAVIVHEYPELVDQLCSVCDVFARMAPDQKQSLVEQLQQIDYTVAMCGDGANDCAALKAAHAGISLSDAEASIAAPFTSKVPDIRCVPTVISEGRAALVTSFGIFKYMAGYSLTQFVTVMHLYWISNILTDGQFMYIDMFLITMFALLFGNTPAFYRLAHTPPPTRLLSIASMTSVVGQLIIIGVVQFIVFFSTSQQPWFTPYQPPVDDEVEDKRSMQGTALFCVSMFQYIILALVYSKGPPFRGNLWSNKPMCALTIFATLLCLFIVIWPTELVLKTLGNVELPSLTFRIFIVIVGAVNAAVSYGFETLFVDFFLLGYWERYKKKRSIEAIIDYVPTTNSDHIRRPSINGVTSSRTESTLLSAEGQQLHMTTSKNGKGGENPHSSALFERLISRIGGEPTWLTNPIPPHSLSEPEEPEKLERTY

SEQ ID NO: 22535 - protein, 964 aa, Caenorhabditis elegans
MLTGESVPVTKASLKEADECGPEIRLSSEHNRHTLFSGTTVLQTRNYKGQPVMIRILKTALIESSVNLKARVIRTGFSTLKGQLVRSIMYPKPQEKEALKDVMVFILVLGFIALIGFIYTVIEMVSRGESLKHIIIRSLDIITIVVPPALPAAMSVGIINANSRLKKKKIFCTSPTTVNVCGLINVACFDKTGTLTEDGLDFNCLKAIRKNEDGKPEFTSEFEELDPVKLSAENANLNIVVAAASCHSLTRIDGTLHGDPLELILVEKSKWIIEEAVNSDEETQDFDTVQPTVLRPPPEQATYHPENNEYSVIKQHPFNSALQRMSVIISTPSEHSAHDMMVFTKGSPEMIASLCIPDTIPEDYMEVVDEYAQRGFRLIAVASKAVHLNFAKALKTPRDIMESELEFLGLIVMENRLKDVTLSVINELSVANIRCVMVTGDNLLTAMSVARECGIIRPTKKAFLITHSKTEKDPLGRTKLFIKESVSSSENDIDTDSEIGAKVSMCGDGANDCAALKAAHAGISLSQAEASIAAPFTSNVPDIRCVPTVIKEGRCALVTSYAVSKYMAAYSLNEFLSVMLLYNDGTNISDGQFLYIDLVLITLVALFLGNTEASRKLSGIPPPRRLATSAFYFSVFGQMFFNIITQTTGYLLVRGQSWYVPNPEELDNTTTMIGTTVFFTSCCMYLGYAFVYSKGHPYRRSVFTNWLLCGIIFVIGAINMVMIFTNMGFLMNLMGFVYVPSTSMRFILLAISLAGVFLSLLYEHFFVEKVVAIHFESCTVTMDLSSWFEFTMYDAVFLVVVLGFFFYWLTRSEQPLPAPPKELAPLPMSDMTVEELRKYDGVKNEHILFGLNGTIYDVTRGKGFYGPGKAYGTLAGHDATRALGTMDQNAVSSEWDDHTGISADEQETANEWETQFKFKYLTVGRLVKNSSEKADYGNRKSFVRGAESLDSIINGGDEGTKKDN

SEQ ID NO: 22536 - protein, 1225 aa, Drosophila melanogaster
MTEAAGATNPGGAAGDAESYGKEMALQSGRPKEPTKLDDLVQYVSLHVRIPTPLTGVVLPFVPLYLSAFYLWINVTGGQENDTTNNDVITADNQTTTDNITTWNDVGFIGVLAIAFLHILTLLFCYWSVHVLAFLTCRRVKLPGANVLAKVVPTPNNGNSKIVPIRSSKLEDGSTQYYFVFQKTKYVWNEDRKTFRAVEFPVNGLLSTYSSSRGLETEEDIKRATQTYGNNEMEMVVPEFHELFIERATAPFFVFQVFSVGLWCMDDYWYYSLFTLFMLIAFECTIVKQQLRNMSEIRKMGNKPYLIYAFRQNKWRHLGSDELLPGDLVSITRSQNDNIVPCDLVILRGSCIVDESMLTGESVPLMKKSLESLDNLDVEMDAEGDGKLFVLFGGTKVVQHTAPTKESLRAPDGGCIGYVIRTGFNTSQGKLLRTILFGANRATENNVETFAFIAFLMVFAVAAASYVWVKGSEDPERNRYKLFLECTLILTSIIPPDLPIELTLAVNTSLIQLTKLFVFCTEPFRIPFAGKVQICCFDKTGTLTTDNLMVEGIAGLAPNGACVPIEKAEGNTVQVLACCHSLALLDDGLVGDPLEKATLAAVDWTLTKMDSVIPKRPQFKPLKIIQRYHFSSALKRMSVLAGHLIPYSNEVKHIGAVKGAPEVIQKMLREVPADYEKVYLEYARRGARVLALGIKDLGTLGAQRVREMKREEVECDLTFAGFLIISCPMKPDSKSVIKELIQSSHKVVMITGDSPLTACHVARELRFTRKKLIILTPPEEDRKNNWSWVSIDGDQSYELDTKPGSKKLSHLLATHDLCITGEGLQYLQQNQPQYMRQLLPQITVCARFAPKQKELVITQLKQLGYCTLMCGDGTNDVGALKHANVGVSLLTSAPVKRKRTEEEQQQAAANAAAIAAQAQANANQQLTTRERALRRRQEHLNQTQARLQNALRDMEEQTMVKLGDASIAAPFTSKSSSIMCVNHIIKQGRCTLVTTLQMFKILALNALIQAYCQSVLYIDGIKFSDTQATMQGIFIAACFLFITRAKPLKTLSKVAPLPNIFNFYTISTILSQFAVHFGTLYYLTSQANILAPPREGKVKLYIDMDAEEKTKYDPNIVSSTVYIICLSLQVATIAVNYKGYPFMESLRSNRMLMYAIGASAALVILLSTGLAPELTEFFEIIDFPTDFRKTLLGVLVLDIVGAFLLDRICSFLFGETRRKSKVLNC

SEQ ID NO: 22537 - protein, 1225 aa, Drosophila melanogaster
MTEAAGATNPGGAAGDAESYGKEMALQSGRPKEPTKLDDLVQYVSLHVRIPTPLTGVVLPFVPLYLSAFYLWINVTGGQENDTTNNDVITADNQTTTDNITTWNDVGFIGVLAIAFLHILTLLFCYWSVHVLAFLTCRRVKLPGANVLAKVVPTPNNGNSKIVPIRSSKLEDGSTQYYFVFQKTKYVWNEDRKTFRAVEFPVNGLLSTYSSSRGLETEEDIKRATQTYGNNEMEMVVPEFHELFIERATAPFFVFQVFSVGLWCMDDYWYYSLFTLFMLIAFECTIVKQQLRNMSEIRKMGNKPYLIYAFRQNKWRHLGSDELLPGDLVSITRSQNDNIVPCDLVILRGSCIVDESMLTGESVPLMKESLESLDNLDVEMDAEGDGKLFVLFGGTKVVQHTAPTKESLRAPDGGCIGYVIRTGFNTSQGKLLRTILFGANRATENNVETFAFIAFLMVFAVAAASYVWVKGSEDPERNRYKLFLECTLILTSIIPPDLPIELTLAVNTSLIQLTKLFVFCTEPFRIPFAGKVQICCFDKTGTLTTDNLMVEGIAGLAPNGACVPIEKAEGNTVQVLACCHSLALLDDGLVGDPLEKATLAAVDWTLTKMDSVIPKRPQFKPLKIIQRYHFSSALKRMSVLAGHLIPYSNEVKHIGAVKGAPEVIQKMLREVPADYEKVYLEYARRGARVLALGIKDLGTLGAQRVREMKREEVECDLTFAGFLIISCPMKPDSKSVIKELIQSSHKVVMITGDSPLTACHVARELRFTRKKLIILTPPEEDRKNNWSWVSIDGDQSYELDTKPGSKKLSHLLATHDLCITGEGLQYLQQNQPQYMRQLLPQITVCARFAPKQKELVITQLKQLGYCTLMCGDGTNDVGALKHANVGVSLLTSAPVKRKRTEEEQQQAAANAAAIAAQAQANANQQLTTRERALRRRQEHLNQTQARLQNALRDMEEQTMVKLGDASIAAPFTSKSSSIMCVNHIIKQGRCTLVTTLQMFKILALNALIQAYCQSVLYIDGIKFSDTQATMQGIFIAACFLFITRAKPLKTLSKVAPLPNIFNFYTISTILSQFAVHFGTLYYLTSQANILAPPREGKVKLYIDMDAEEKTKYDPNIVSSTVYIICLSLQVATIAVNYKGYPFMESLRSNRMLMYAIGASAALVILLSTGLAPELTEFFEIIDFPTDFRKTLLGVLVLDIVGAFLLDRICSFLFGETRRKSKVLNC

SEQ ID NO: 22538 - protein, 993 aa, Drosophila melanogaster
MEMVVPEFHELFIERATAPFFVFQVFSVGLWCMDDYWYYSLFTLFMLIAFECTIVKQQLRNMSEIRKMGNKPYLIYAFRQNKWRHLGSDELLPGDLVSITRSQNDNIVPCDLVILRGSCIVDESMLTGESVPLMKESLESLDNLDVEMDAEGDGKLFVLFGGTKVVQHTAPTKESLRAPDGGCIGYVIRTGFNTSQGKLLRTILFGANRATENNVETFAFIAFLMVFAVAAASYVWVKGSEDPERNRYKLFLECTLILTSIIPPDLPIELTLAVNTSLIQLTKLFVFCTEPFRIPFAGKVQICCFDKTGTLTTDNLMVEGIAGLAPNGACVPIEKAEGNTVQVLACCHSLALLDDGLVGDPLEKATLAAVDWTLTKMDSVIPKRPQFKPLKIIQRYHFSSALKRMSVLAGHLIPYSNEVKHIGAVKGAPEVIQKMLREVPADYEKVYLEYARRGARVLALGIKDLGTLGAQRVREMKREEVECDLTFAGFLIISCPMKPDSKSVIKELIQSSHKVVMITGDSPLTACHVARELRFTRKKLIILTPPEEDRKNNWSWVSIDGDQSYELDTKPGSKKLSHLLATHDLCITGEGLQYLQQNQPQYMRQLLPQITVCARFAPKQKELVITQLKQLGYCTLMCGDGTNDVGALKHANVGVSLLTSAPVKRKRTEEEQQQAAANAAAIAAQAQANANQQLTTRERALRRRQEHLNQTQARLQNALRDMEEQTMVKLGDASIAAPFTSKSSSIMCVNHIIKQGRCTLVTTLQMFKILALNALIQAYCQSVLYIDGIKFSDTQATMQGIFIAACFLFITRAKPLKTLSKVAPLPNIFNFYTISTILSQFAVHFGTLYYLTSQANILAPPREGKVKLYIDMDAEEKTKYDPNIVSSTVYIICLSLQVATIAVNYKGYPFMESLRSNRMLMYAIGASAALVILLSTGLAPELTEFFEIIDFPTDFRKTLLGVLVLDIVGAFLLDRICSFLFGETRRKSKVLNC

SEQ ID NO: 22539 - protein, 1047 aa, Drosophila melanogaster
MHYVATESVQPKKSDKVPSNKIKKVENNNTLVNGCSKTSARSVPLLKYNRPDQDGDSEENITSVLEPNVDEIYSKDSERLVDDSKPCIGLLNPDQEDQMKVCGYRRSLMRTGFCWACIFLTGGLLRLVLHWWRHLYLYATCSQCSLEEAEQVLVTEDYQGKHKMYHVKQIQVLTSSNLKTLLEKEQQSIERTHIECDHVENVLQLSVHFTSAQFKKCSSIRIFRCKQLVYAWNNNTNRFQRINGLDLNIPCSYYHQQRGLPVHEQISRRIVFGDNEITVPLRDFKTLLFLEVLNPFYVFQLFSVILWFTYDYYYYACVILLMSVFGITVSVLQTKKNQDVLQKTVYNTGNAWVVDHKGLSKELPTRAIVPGDIIEIPSSGCTLHCDAILISGNCILDESMLTGESVPVTKTPLPSKRDMIFDKTEHARHTLFCGTKVIQTRYIGSKKVLAFVINTGNITAKGELIRSILYPPPVDYKFEQDSYKFIQFLAIIACVGFIYTLVTKILRGTDPVKIAVESLDLITIVVPPALPAAMTVGRFYAQKRLKTSEIFCISPRSINVAGSINCCCFDKTGTLTEDGLDMWGVVPKSSTNQFQIPLKSVDRLPFDHFLFGMVTCHSITILNGRMMGDPLDLKMFESTGWELEDSNNIPDTEKYGILYPTILRQPRGGLSGMAETESGSKNEIKRQSSVDDLLATVGISPSQKNFDHGIVREFPFTSALQRMSVVTRCLSDQVFNVYCKGSPEMLKKLCKPQSLPDNYSQQLSEFAKKGYRIIAIAFKALSHKMNYTKVQRLSREEVENNMEFLGFVILENRLKPDTTKVINALNAAKIRTIMITGDNILTAISVARDCGIVSPSQSVITVHADPIGDSANIQTNTGTECNFDNSSDKHYKLHYTLDLGSKTSRAYLFKSCFNSNLFDPETPEFTAQVGKTIFHMESTNSLVNESTSSYAESGLPTSDSLASVKTIDTWTHNDAELGIKHTPDESWRRQECIFAMDGKTWQIVKDYFPRNGNSFDTGFYLRPNVTRSETGTSYRTSKLGLLRCHVR

SEQ ID NO: 22540 - protein, 1338 aa, Drosophila melanogaster
MTPHNDSKDSKPCIGLLNPDQEDQMKVCGYRRSLMRTGFCWACIFLTGGLLRLVLHWWRHLYLYATCSQCSLEEAEQVLVTEDYQGKHKMYHVKQIQVLTSSNLKTLLEKEQQSIERTHIECDHVENVLQLSVHFTSAQFKKCSSIRIFRCKQLVYAWNNNTNRFQRINGLDLNIPCSYYHQQRGLPVHEQISRRIVFGDNEITVPLRDFKTLLFLEVLNPFYVFQLFSVILWFTYDYYYYACVILLMSVFGITVSVLQTKKNQDVLQKTVYNTGNAWVVDHKGLSKELPTRAIVPGDIIEIPSSGCTLHCDAILISGNCILDESMLTGESVPVTKTPLPSKRDMIFDKTEHARHTLFCGTKVIQTRYIGSKKVLAFVINTGNITAKGELIRSILYPPPVDYKFEQDSYKFIQFLAIIACVGFIYTLVTKILRGTDPVKIAVESLDLITIVVPPALPAAMTVGRFYAQKRLKTSEIFCISPRSINVAGSINCCCFDKTGTLTEDGLDMWGVVPKSSTNQFQIPLKSVDRLPFDHFLFGMVTCHSITILNGRMMGDPLDLKMFESTGWELEDSNNIPDTEKYGILYPTILRQPRGGLSGMAETESGSKNEIKRQSSVDDLLATVGISPSQKNFDHGIVREFPFTSALQRMSVVTRCLSDQVFNVYCKGSPEMLKKLCKPQSLPDNYSQQLSEFAKKGYRIIAIAFKALSHKMNYTKVQRLSREEVENNMEFLGFVILENRLKPDTTKVINALNAAKIRTIMITGDNILTAISVARDCGIVSPSQSVITVHADPIGDSANIQTNTGTECNFDNSSDKHYKLHYTLDLGSKTSRAYLFKSCFNSNLFDPETPEFTAQVGKTIFHMESTNSLVNESTSSYAESGLPTSDSLASVKTIDTWTHNDAELGIKHTPDESWRRQECIFAMDGKTWQIVKDYFPEEMEILLTRGSIYARMSPDQKQALVIELQNLDYCVAMCGDGANDCGALKVAHAGISLSETEASIASPFTSRNPTISAVLKVIKEGRAALVTSFGIFKYMAAYSLVQFISVMILYSIDSNLTDKQYLYVDLGLISIFAFFFGKTESFDGMLVEQVPLSSLISSTPLASLLLHLTVVTAFQVTCEYIYICKCQFCKHNVILFLNTIIGWVHLHQQPWFKAFEPADEDHLGCFENYTMFCISSFQYIILAFVFSKGAPYRKPLWSNWPLCLAFIVNLCIIVYLVLYPSDWVASFFQLIVPPTMRFRYVMLAYGAASFICHIFVESFLVEYLVFKKYQVKREKNWVTSKQKYMRLEHDISNIKNWPPITEVYEPNNLIDCETEQPTYVSLHAEQNHDTQLGKFPGFC

SEQ ID NO: 22541 - protein, 1314 aa, Drosophila melanogaster
MKVCGYRRSLMRTGFCWACIFLTGGLLRLVLHWWRHLYLYATCSQCSLEEAEQVLVTEDYQGKHKMYHVKQIQVLTSSNLKTLLEKEQQSIERTHIECDHVENVLQLSVHFTSAQFKKCSSIRIFRCKQLVYAWNNNTNRFQRINGLDLNIPCSYYHQQRGLPVHEQISRRIVFGDNEITVPLRDFKTLLFLEVLNPFYVFQLFSVILWFTYDYYYYACVILLMSVFGITVSVLQTKKNQDVLQKTVYNTGNAWVVDHKGLSKELPTRAIVPGDIIEIPSSGCTLHCDAILISGNCILDESMLTGESVPVTKTPLPSKRDMIFDKTEHARHTLFCGTKVIQTRYIGSKKVLAFVINTGNITAKGELIRSILYPPPVDYKFEQDSYKFIQFLAIIACVGFIYTLVTKILRGTDPVKIAVESLDLITIVVPPALPAAMTVGRFYAQKRLKTSEIFCISPRSINVAGSINCCCFDKTGTLTEDGLDMWGVVPKSSTNQFQIPLKSVDRLPFDHFLFGMVTCHSITILNGRMMGDPLDLKMFESTGWELEDSNNIPDTEKYGILYPTILRQPRGGLSGMAETESGSKNEIKRQSSVDDLLATVGISPSQKNFDHGIVREFPFTSALQRMSVVTRCLSDQVFNVYCKGSPEMLKKLCKPQSLPDNYSQQLSEFAKKGYRIIAIAFKALSHKMNYTKVQRLSREEVENNMEFLGFVILENRLKPDTTKVINALNAAKIRTIMITGDNILTAISVARDCGIVSPSQSVITVHADPIGDSANIQTNTGTECNFDNSSDKHYKLHYTLDLGSKTSRAYLFKSCFNSNLFDPETPEFTAQVGKTIFHMESTNSLVNESTSSYAESGLPTSDSLASVKTIDTWTHNDAELGIKHTPDESWRRQECIFAMDGKTWQIVKDYFPEEMEILLTRGSIYARMSPDQKQALVIELQNLDYCVAMCGDGANDCGALKVAHAGISLSETEASIASPFTSRNPTISAVLKVIKEGRAALVTSFGIFKYMAAYSLVQFISVMILYSIDSNLTDKQYLYVDLGLISIFAFFFGKTESFDGMLVEQVPLSSLISSTPLASLLLHLTVVTAFQVTCEYIYICKCQFCKHNVILFLNTIIGWVHLHQQPWFKAFEPADEDHLGCFENYTMFCISSFQYIILAFVFSKGAPYRKPLWSNWPLCLAFIVNLCIIVYLVLYPSDWVASFFQLIVPPTMRFRYVMLAYGAASFICHIFVESFLVEYLVFKKYQVKREKNWVTSKQKYMRLEHDISNIKNWPPITEVYEPNNLIDCETEQPTYVSLHAEQNHDTQLGKFPGFC

SEQ ID NO: 22542 - protein, 658 aa, Drosophila melanogaster
MFASQSKACDSPSETVHLQSLPNHIEDLKFRNSDVETDDDLHFPGIAAKNKILKLSWWHSPVDMHYVATESVQPKKSDKVPSNKIKKVENNNTLVNGCSKTSARSVPLLKYNRPDQDGDSEENITSVLEPNVDEIYSKDSERLVDDSKPCIGLLNPDQEDQMKVCGYRRSLMRTGFCWACIFLTGGLLRLVLHWWRHLYLYATCSQCSLEEAEQVLVTEDYQGKHKMYHVKQIQVLTSSNLKTLLEKEQQSIERTHIECDHVENVLQLSVHFTSAQFKKCSSIRIFRCKQLVYAWNNNTNRFQRINGLDLNIPCSYYHQQRGLPVHEQISRRIVFGDNEITVPLRDFKTLLFLEVLNPFYVFQLFSVILWFTYDYYYYACVILLMSVFGITVSVLQTKKNQDVLQKTVYNTGNAWVVDHKGLSKELPTRAIVPGDIIEIPSSGCTLHCDAILISGNCILDESMLTGESVPVTKTPLPSKRDMIFDKTEHARHTLFCGTKVIQTRYIGSKKVLAFVINTGNITAKGELIRSILYPPPVDYKFEQDSYKFIQFLAIIACVGFIYTLVTKILRGTDPVKIAVESLDLITIVVPPALPAAMTVGRFYAQKRLKTSEIFCISPRSINVAGSINCCCFDKILKYSILRERRERAILAVTKKVSA

SEQ ID NO: 22543 - protein, 521 aa, Drosophila melanogaster
MTPHNDSKDSKPCIGLLNPDQEDQMKVCGYRRSLMRTGFCWACIFLTGGLLRLVLHWWRHLYLYATCSQCSLEEAEQVLVTEDYQGKHKMYHVKQIQVLTSSNLKTLLEKEQQSIERTHIECDHVENVLQLSVHFTSAQFKKCSSIRIFRCKQLVYAWNNNTNRFQRINGLDLNIPCSYYHQQRGLPVHEQISRRIVFGDNEITVPLRDFKTLLFLEVLNPFYVFQLFSVILWFTYDYYYYACVILLMSVFGITVSVLQTKKNQDVLQKTVYNTGNAWVVDHKGLSKELPTRAIVPGDIIEIPSSGCTLHCDAILISGNCILDESMLTGESVPVTKTPLPSKRDMIFDKTEHARHTLFCGTKVIQTRYIGSKKVLAFVINTGNITAKGELIRSILYPPPVDYKFEQDSYKFIQFLAIIACVGFIYTLVTKILRGTDPVKIAVESLDLITIVVPPALPAAMTVGRFYAQKRLKTSEIFCISPRSINVAGSINCCCFDKILKYSILRERRERAILAVTKKVSA

SEQ ID NO: 22544 - protein, 497 aa, Drosophila melanogaster
MKVCGYRRSLMRTGFCWACIFLTGGLLRLVLHWWRHLYLYATCSQCSLEEAEQVLVTEDYQGKHKMYHVKQIQVLTSSNLKTLLEKEQQSIERTHIECDHVENVLQLSVHFTSAQFKKCSSIRIFRCKQLVYAWNNNTNRFQRINGLDLNIPCSYYHQQRGLPVHEQISRRIVFGDNEITVPLRDFKTLLFLEVLNPFYVFQLFSVILWFTYDYYYYACVILLMSVFGITVSVLQTKKNQDVLQKTVYNTGNAWVVDHKGLSKELPTRAIVPGDIIEIPSSGCTLHCDAILISGNCILDESMLTGESVPVTKTPLPSKRDMIFDKTEHARHTLFCGTKVIQTRYIGSKKVLAFVINTGNITAKGELIRSILYPPPVDYKFEQDSYKFIQFLAIIACVGFIYTLVTKILRGTDPVKIAVESLDLITIVVPPALPAAMTVGRFYAQKRLKTSEIFCISPRSINVAGSINCCCFDKILKYSILRERRERAILAVTKKVSA

SEQ ID NO: 22545 - protein, 595 aa, Drosophila melanogaster
MHYVATESVQPKKSDKVPSNKIKKVENNNTLVNGCSKTSARSVPLLKYNRPDQDGDSEENITSVLEPNVDEIYSKDSERLVDDSKPCIGLLNPDQEDQMKVCGYRRSLMRTGFCWACIFLTGGLLRLVLHWWRHLYLYATCSQCSLEEAEQVLVTEDYQGKHKMYHVKQIQVLTSSNLKTLLEKEQQSIERTHIECDHVENVLQLSVHFTSAQFKKCSSIRIFRCKQLVYAWNNNTNRFQRINGLDLNIPCSYYHQQRGLPVHEQISRRIVFGDNEITVPLRDFKTLLFLEVLNPFYVFQLFSVILWFTYDYYYYACVILLMSVFGITVSVLQTKKNQDVLQKTVYNTGNAWVVDHKGLSKELPTRAIVPGDIIEIPSSGCTLHCDAILISGNCILDESMLTGESVPVTKTPLPSKRDMIFDKTEHARHTLFCGTKVIQTRYIGSKKVLAFVINTGNITAKGELIRSILYPPPVDYKFEQDSYKFIQFLAIIACVGFIYTLVTKILRGTDPVKIAVESLDLITIVVPPALPAAMTVGRFYAQKRLKTSEIFCISPRSINVAGSINCCCFDKILKYSILRERRERAILAVTKKVSA

SEQ ID NO: 22546 - protein, 1682 aa, Plasmodium yoelii yoelii
  unsure (1)..(1682): unsure at all Xaa locations
MERKYNILAYKKRKTYFRLDVLLFIFYAYFLHLIFKNKKFEAQPKDYKYLEKIKTELENNDIFHSKNNSFSTSKWLYGENDGNKLNKLKIKKEKEKEKEKDKEKENEKDKENTNSDNTFKPIIVGKYNLIYIFYSIEFVCLLIFIAFHLLTFLLSQWSLSINLFIAYSRLSNKGRDKYIYNLQKFCTHIYIKPIKSEGFQKINKEKGLSKCVKNCLPNKNDTKKKERFNTDYNLYKPKSILVELKKENNDIYFFYKHKKYIFNYETLNFESVKHFDIFNLPFYLNWKGLIECENKISCQENFVKKINKESEILYIDGNIESSYINEWKNLINNIKELYEIECFKKNTKSKCNIIENNEELNENINYQVKGGYEISGKNNKKIGITNIYKNVYKNDYNNDYNNDYNNDYKNVYKSVYNYDCKKNYFEIPYDLYVHNNLNKYGENIYDIPSPCFKNLLYQAMLSPFFIFQFFSIILWMLDSYWYFGIFSIFILIVLESQLINKRIREFSLINSMKMSPQNVYVYRNLQWNIIKSNYLLPGDIYILSNDINGNDNICTCETLLLEGMCITDESILTGESIPLIKASIDKGVAINSNDNDNDNKNLDGTSYYSYFDKIDIKNKHKKHVVYAGSNILLTKNENPEFNNSKLPITGCVGVVLKNGFSTYQGKLVRTIINTSEKINSSSTDSIIFLFILLFFSITSCVYVVYTILKTTDERNLYKILLSASHIITAVIPPEFPITLSLGVTISIXYLYNLKIYCTEPFRLPFSGKSNICAFDKTGTLTEDNMVVLGLYGLDNKMNHIYESNKSIINKQRVPFLSLAVISGCHSLCTINNKLLGDPLEKNIFLKLNCNMKSIDNIYVRSSSYVSNGGNDITSDGGNKFSEFFISSKSLTNLNKRISNFGKENRQVKNNLIEHFFIYKRFFFSSDLQRMTCILQHTGYEGDWFGDLYESDDDTNVDNFCNDIENNIINKNLSNLNKLKKKKKKNISSNSITGSTINRSNNKNDMIKQYIVVSKGSPEIMKNFLKEIPENYDKILNSLSIKGYRVICLAANILDNKIINKNLRREDVEKNLYFCGFLAFLCPIKISTPIYISDIKNAGIKNIMITGDNALTACQVAQDVNMIPYVKDKDILILKISEHYNKGNNLYLKKSETSLSVDEDKQISIGEIKKNTIFNDDQIDILKKEAITNLQNIYKENLNKKKIIEHLINMIENEKNINNMLFFSNRENQKIIPFFIGNEEYIKLCSELFTLCITGNIIEYFFREYKNNINLIDMLINKVHIFCRVSPKNKEIIIKTLNKLGNITIMCGDGTNDMAALKAAHVGVSLLSIKICYKNKDLKNKIDENNNYIHNKSIIEHQNGNYEKQIPNINNCISDYKNVCAKYGNIPQYNLDNNMNAKYYEQIKLYNERKKQLENMMKNMDDSLPLIKLGEASIASPFTYKGNDIKCVKEIISCGRCALSKVIMMYKLMIINSLITAFSVSILTLDGVKLSDAQTTIISLLYTSFIVLISKTTPLESISSYAPPNSLFNITVVLSLLCQIIVHFSILIYGWIIASSFRGPDYVPDIKGDFSPNIVNTCIYYLIYCINLSIFLCNYEGLPFMLPLHKNKELVYIFIGNFFFLFLNIMNIVPYINYFFSLVPFPTYRLKFLFLSLMILDILAPYMFCNFIRYIRLYIFQKYKINL

SEQ ID NO: 22547 - protein, 1879 aa, Plasmodium yoelii yoelii
  unsure (1)..(1879): unsure at all Xaa locations
MVNFCKPDKLLIEYSELRCICFFYIFLLLCFFIWVFHKKWMRDNIEKKHKLKNYQAIFKSENVEFFNYIYESDDPNEIVVKQKGYKNCYIGFLLKKISIFLYICTHLIIIALISNEYCIKTNNEILWNARALEFFIFFLLSLTITYGILIIRKHIQSLFLKPSLLKDSDYVIIYTINEEYNTFYNTNYFKKYISHINHMIHTFIKKKKKNIKKNIKKWNFQKYNILFLQFVCNLLDIIQNYIPFPIFLEKIIKNIKESKVSHLNTHSFHDTKKKTHNLYTNPLFIENDVESLSDSEIRASNSHIESSQCVVEKKKRKEEARQTKFSLHKVQVKKNEKNVKYFFFRSMKYLYNEEKDAFINISYSIEEKVKSFNFNYILKKGGLNNNEIINNLNQYGYNNIHLDVNSFFINLKRELLDGIYMFQLYLTYKNLFWKEMITSIIWIVISILSVIKKVLKNQKNKKEIYDNIQSNSNINVTVYRNGLEQNISSNNLTIGDIIIVKSKMTIPCDCLLLTGQVLVDESLLTGESKPMKKIATSNENRSQIFKNEKEQNNDTSFSINEQNKINANNMLYAGTNIISIFNSPENIYAIVINVSIYTYKGKYMXSVLFPNPLLFKYDSQLPIVFIFTIIFSFFCFYFQIKYLGFNMTSIFYTIGTLSQILPVWTPVVLNIGLNISTNRLKNENNICCIAPSRIPICGKIRVFFFDKTGTITNHNLEFSGIHFCNNILSPQKNLVSKYFEKKNLEPVASDDISASVLTSSRPNTSPLTLTELATNDKKERDKKERDKKGRDKKERDKKGRDKKERDKKERDNKESDNRIDKNSAKNGENTKSGNSYYCSVYNEEEEEENINSTTLEKLNLNKNIREQNYNQTNKIEIIDKSSNSEKDDFKSPNFSICEKNSQSSNDDLFQSYDEGEYQKHSEHIPIKDEKIYTNHQSSHFDQLGKDEEIRKDAEIRKDEEIRKDEEIRKNEENFNGHSNLSANSNNINYFPNKLIKEENRKKKKKNSRHDENNNISNINKHFINSNSSINSVTSLLYNSKLIWSNKITLENMPDNYNLIVYALAGCACIYDDDNIIYGNEIDKKLYETTDMVIHNYINGDNINVKRISLKLGSIYKSFDVIKTFEFDYYTKISTTLTYGYFDFTEKVYIVFSKGSFDKIYQKCIKTDELYFYKQKEQEYSKNGFYVIALAFKIIYDLPKNKKKNNFYNLSRDEMETDMNFLSLIMFNNHIKVDAHYVIQTLKDSRIRPIILTGDNAYNCLYVGNKIGLFNNINTYESFYSLNVNSNNNIDHSNKKKNTNFSNNNSFNLSDIKFMPFENLFKYSSESKNFKENMNVNQIYDNNNDNDDDNDDNDDDNDNDNDNNNNSNSNNNNGDDDNNGVAKKKRQNSKYNTINTINQYGSNILDIDASKIEEEYLLESYKNMNPVNDDTYNYDQNIIVYGYILNNELIFVNIHNDNKINNTIVLYKDIYKEIILTGEAYNYIRDHIFKIQNFENETNSNLIHTNNNNNTFKQNPFLEQYKNFLLKVRIFSRLTPNNKMEIIKDFTKFDYISGMCGDGSNDCGALKTSHAGLALSNSDTSVVAPFSAKNENLKSVIDILREGRACLVTSINCYKYMLLYGFMISIIKIILFMRAHAIMSEYGYLFFDNIILLLLAKSMTLSKPEYKLKTQTPTSSIIGAQTILSLLCTLIVNFFFLYIIMFKFFFLCNLPSSYDINSSAPKSSWWLMSDNYESFLTCIWFCFQIVNSAFILTLGGKYRKHIFSNYTFMIYYVLINLFLFYLTIGGPNKLTCLFRMNCNDEISRQTKFKILELFSYSAGGLSFYGPNGNNILSTQVKIKFLFLNFLNIIINILISKYVLCERFYNIVRKIFKIQNRRIPT

SEQ ID NO: 22548 - protein, 504 aa, Macaca fascicularis
MDKEERKIINQGQEDEMEIYGYNLSRWKLAIVSLGVICTGGFLLLLLYWMPEWRVKATCVRAAIKDCDVVLLRTTDEFKMWFCAKIRVLSLETHPISSPKSMSNKLSNGHAVCLTENPTGENRHGISKYSQAESQQIRYFTHHSVKYFWNDTIHNFDFLKGLDEGVSCTSIYEKHSAGLTKGMHAYRKLLYGVNEIAVKVPSVFKLLIKEVLNPFYIFQLFSVILWSTDEYYYYALAIVVMSIVSIVSSLYSIRKQYVMLHDMVATHSTVRVSVCRVNEEIEEIFSTDLVPGDVMVIPLNGTIMPCDAVLINGTCIVNESMLTGESVPVTKTNLPNPSVDVKGIGDELYNPETHKRHTLFCGTTVIQTRFYTGELVKAIVVRTGFSTSKGQLVRSILYPKPTDFKLYRDAYLFLLCLVAVAGIGFIYTIINSILNEVQVGVIIIESLDIITITVPPALPAAMTAGIVYAQRRLKKIGIFCISPQRINICGQLKKKKKKKKKKKK

SEQ ID NO: 22549 - protein, 1204 aa, Homo sapiens
MAAAAAVGNAVPCGARPCGVRPDGQPKPGPQPRALLAAGPALIANGDELVAAVWPYRRLALLRRLTVLPFAGLLYPAWLGAAAAGCWGWGSSWVQIPEAALLVLATICLAHALTVLSGHWSVHAHCALTCTPEYDPSKATFVKVVPTPNNGSTELVALHRNEGEDGLEVLSFEFQKIKYSYDALEKKQFLPVAFPVGNAFSYYQSNRGFQEDSEIRAAEKKFGSNKAEMVVPDFSELFKERATAPFFVFQVFCVGLWCLDEYWYYSVFTLSMLVAFEASLVQQQMRNMSEIRKMGNKPHMIQVYRSRKWRPIASDEIVPGDIVSIGRSPQENLVPCDVLLLRGRCIVDEAMLTGESVPQMKEPIEDLSPDRVLDLQADSRLHVIFGGTKVVQHIPPQKATTGLKPVDSGCVAYVLRTGFNTSQGKLLRTILFGVKRVTANNLETFIFILFLLVFAIAAAAYVWIEGTKDPSRNRYKLFLECTLILTSVVPPELPIELSLAVNTSLIALAKLYMYCTEPFRIPFAGKVEVCCFDKTGTLTSDSLVVRGVAGLRDGKEVTPVSSIPVETHRALASCHSLMQLDDGTLVGDPLEKAMLTAVDWTLTKDEKVFPRSIKTQGLKIHQRFHFASALKRMSVLASYEKLGSTDLCYIAAVKGAPETLHSMFSQCPPDYHHIHTEISREGARVLALGYKELGHLTHQQAREVKREALECSLKFVGFIVVSCPLKADSKAVIREIQNASHRVVMITGDNPLTACHVAQELHFIEKAHTLILQPPSEKGRQCEWRSIDGSIVLPLARGSPKALALEYALCLTGDGLAHLQATDPQQLLRLIPHVQVFARVAPKQKEFVITSLKELGYVTLMCGDGTNDVGALKHADVGVALLANAPERVVERRRRPRDSPTLSNSGIRATSRTAKQRSGLPPSEEQPTSQRDRLSQVLRDLEDESTPIVKLGDASIAAPFTSKLSSIQCICHVIKQGRCTLVTTLQMFKILALNALILAYSQSVLYLEGVKFSDFQATLQGLLLAGCFLFISRSKPLKTLSRERPLPNIFNLYTILTVMLQFFVHFLSLVYLYREAQARSPEKQEQFVDLYKEFEPSLVNSTVYIMAMAMQMATFAINYKGPPFMESLPENKPLVWSLAVSLLAIIGLLLGSSPDFNSQFGLVDIPVEFKLVIAQVLLLDFCLALLADRVLQFFLGTPKLKVPS

SEQ ID NO: 22550 - protein, 1203 aa, Homo sapiens
AAAAAVGNAVPCGARPCGVRPDGQPKPGPQPRALLAAGPALIANGDELVAAVWPYRRLALLRRLTVLPFAGLLYPAWLGAAAAGCWGWGSSWVQIPEAALLVLATICLAHALTVLSGHWSVHAHCALTCTPEYDPSKATFVKVVPTPNNGSTELVALHRNEGEDGLEVLSFEFQKIKYSYDALEKKQFLPVAFPVGNAFSYYQSNRGFQEDSEIRAAEKKFGSNKAEMVVPDFSELFKERATAPFFVFQVFCVGLWCLDEYWYYSVFTLSMLVAFEASLVQQQMRNMSEIRKMGNKPHMIQVYRSRKWRPIASDEIVPGDIVSIGRSPQENLVPCDVLLLRGRCIVDEAMLTGESVPQMKEPIEDLSPDRVLDLQADSRLHVIFGGTKVVQHIPPQKATTGLKPVDSGCVAYVLRTGFNTSQGKLLRTILFGVKRVTANNLETFIFILFLLVFAIAAAAYVWIEGTKDPSRNRYKLFLECTLILTSVVPPELPIELSLAVNTSLIALAKLYMYCTEPFRIPFAGKVEVCCFDKTGTLTSDSLVVRGVAGLRDGKEVTPVSSIPVETHRALASCHSLMQLDDGTLVGDPLEKAMLTAVDWTLTKDEKVFPRSIKTQGLKIHQRFHFASALKRMSVLASYEKLGSTDLCYIAAVKGAPETLHSMFSQCPPDYHHIHTEISREGARVLALGYKELGHLTHQQAREVKREALECSLKFVGFIVVSCPLKADSKAVIREIQNASHRVVMITGDNPLTACHVAQELHFIEKAHTLILQPPSEKGRQCEWRSIDGSIVLPLARGSPKALALEYALCLTGDGLAHLQATDPQQLLRLIPHVQVFARVAPKQKEFVITSLKELGYVTLMCGDGTNDVGALKHADVGVALLANAPERVVERRRRPRDSPTLSNSGIRATSRTAKQRSGLPPSEEQPTSQRDRLSQVLRDLEDESTPIVKLGDASIAAPFTSKLSSIQCICHVIKQGRCTLVTTLQMFKILALNALILAYSQSVLYLEGVKFSDFQATLQGLLLAGCFLFISRSKPLKTLSRERPLPNIFNLYTILTVMLQFFVHFLSLVYLYREAQARSPEKQEQFVDLYKEFEPSLVNSTVYIMAMAMQMATFAINYKGPPFMESLPENKPLVWSLAVSLLAIIGLLLGSSPDFNSQFGLVDIPVEFKLVIAQVLLLDFCLALLADRVLQFFLGTPKLKVPS

SEQ ID NO: 22551 - protein, 1086 aa, Homo sapiens
MEKWEELNSHQPGEEYDPSKATFVKVVPTPNNGSTELVALHRNEGEDGLEVLSFEFQKIKYSYDALEKKQFLPVAFPVGNAFSYYQSNRGFQEDSEIRAAEKKFGSNKAEMVVPDFSELFKERATAPFFVFQVFCVGLWCLDEYWYYSVFTLSMLVAFEASLVQQQMRNMSEIRKMGNKPHMIQVYRSRKWRPIASDEIVPGDIVSIGRSPQENLVPCDVLLLRGRCIVDEAMLTGESVPQMKEPIEDLSPDRVLDLQADSRLHVIFGGTKVVQHIPPQKATTGLKPVDSGCVAYVLRTGFNTSQGKLLRTILFGVKRVTANNLETFIFILFLLVFAIAAAAYVWIEGTKDPSRNRYKLFLECTLILTSVVPPELPIELSLAVNTSLIALAKLYMYCTEPFRIPFAGKVEVCCFDKTGTLTSDSLVVRGVAGLRDGKEVTPVSSIPVETHRALASCHSLMQLDDGTLVGDPLEKAMLTAVDWTLTKDEKVFPRSIKTQGLKIHQRFHFASALKRMSVLASYEKLGSTDLCYIAAVKGAPETLHSMFSQCPPDYHHIHTEISREGARVLALGYKELGHLTHQQAREVKREALECSLKFVGFIVVSCPLKADSKAVIREIQNASHRVVMITGDNPLTACHVAQELHFIEKAHTLILQPPSEKGRQCEWRSIDGSIVLPLARGSPKALALEYALCLTGDGLAHLQATDPQQLLRLIPHVQVFARVAPKQKEFVITSLKELGYVTLMCGDGTNDVGALKHADVGVALLANAPERVVERRRRPRDSPTLSNSGIRATSRTAKQRSGLPPSEEQPTSQRDRLSQVLRDLEDESTPIVKLGDASIAAPFTSKLSSIQCICHVIKQGRCTLVTTLQMFKILALNALILAYSQSVLYLEGVKFSDFQATLQGLLLAGCFLFISRSKPLKTLSRERPLPNIFNLYTILTVMLQFFVHFLSLVYLYREAQARSPEKQEQFVDLYKEFEPSLVNSTVYIMAMAMQMATFAINYKGPPFMESLPENKPLVWSLAVSLLAIIGLLLGSSPDFNSQFGLVDIPVEFKLVIAQVLLLDFCLALLADRVLQFFLGTPKLKVPS

SEQ ID NO: 22552 - protein, 1158 aa, Homo sapiens [sequence omitted]

SEQ ID NO: 22553 - protein, 1088 aa, Homo sapiens
RDKEDSSWQLFTVQVQTEAIGEGSLEPSPQSQAEDGRSQAAVGAVPEGAWKDTAQLHKSEEAVSVGQKRVLRYYLFQGQRYIWIETQQAFYQVSLLDHGRSCDDVHRSRHGLSLQDQMVRKAIYGPNVISIPVKSYPQLLVDEALNPYYGFQAFSIALWLADHYYWYALCIFLISSISICLSLYKTRKQSQTLRDMVKLSMRVCVCRPGGEEEWVDSSELVPGDCLVLPQEGGLMPCDAALVAGECMVNESSLTGESIPVLKTALPEGLGPYCAETHRRHTLFCGTLILQARAYVGPHVLAVVTRTGFCTAKGGLVSSILHPRPINFKFYKHSMKFVAALSVLALLGTIYSIFILYRNRVPLNEIVIRALDLVTVVVPPALPAAMTVCTLYAQSRLRRQGIFCIHPLRINLGGKLQLVCFDKTGTLTEDGLDVMGVVPLKGQAFLPLVPEPRRLPVGPLLRALATCHALSRLQDTPVGDPMDLKMVESTGWVLEEEPAADSAFGTQVLAVMRPPLWEPQLQAMEEPPVPVSVLHRFPFSSALQRMSVVVAWPGATQPEAYVKGSPELVAGLCNPETVPTDFAQMLQSYTAAGYRVVALASKPLPTVPSLEAAQQLTRDTVEGDLSLLGLLVMRNLLKPQTTPVIQALRRTRIRAVMVTGDNLQTAVTVARGCGMVAPQEHLIIVHATHPERGQPASLEFLPMESPTAVNGVKDPDQAASYTVEPDPRSRHLALSGPTFGIIVKHFPKLLPKVLVQGTVFARMAPEQKTELVCELQKLQYCVGMCGDGANDCGALKAADVGISLSQAEASVVSPFTSSMASIECVPMVIREGRCSLDTSFSVFKYMALYSLTQFISVLILYTINTNLGDLQFLAIDLVITTTVAVLMSRTGPALVLGRVRPPGALLSVPVLSSLLLQMVLVTGVQLGGYFLTLAQPWFVPLNRTVAAPDNLPNYENTVVFSLSSFQYLILAAAVSKGAPFRRPLYTNVPFLVALALLSSVLVGLVLVPGLLQGPLALRNITDTGFKLLLLGLVTLNFVGAFMLESVLDQCLPACLRRLRPKRASKKRFKQLERELAEQPWPPLPAGPLR

SEQ ID NO: 22554 - protein, 1180 aa, Homo sapiens
MSADSSPLVGSTPTGYGTLTIGTSIDPLSSSVSSVRLSGYCGSPWRVIGYHVVVWMMAGIPLLLFRWKPLWGVRLRLRPCNLAHAETLVIEIRDKEDSSWQLFTVQVQTEAIGEGSLEPSPQSQAEDGRSQAAVGAVPEGAWKDTAQLHKSEEAVSVGQKRVLRYYLFQGQRYIWIETQQAFYQVSLLDHGRSCDDVHRSRHGLSLQDQMVRKAIYGPNVISIPVKSYPQLLVDEALNPYYGFQAFSIALWLADHYYWYALCIFLISSISICLSLYKTRKQSQTLRDMVKLSMRVCVCRPGGEEEWVDSSELVPGDCLVLPQEGGLMPCDAALVAGECMVNESSLTGESIPVLKTALPEGLGPYCAETHRRHTLFCGTLILQARAYVGPHVLAVVTRTGFCTAKGGLVSSILHPRPINFKFYKHSMKFVAALSVLALLGTIYSIFILYRNRVPLNEIVIRALDLVTVVVPPALPAAMTVCTLYAQSRLRRQGIFCIHPLRINLGGKLQLVCFDKTGTLTEDGLDVMGVVPLKGQAFLPLVPEPRRLPVGPLLRALATCHALSRLQDTPVGDPMDLKMVESTGWVLEEEPAADSAFGTQVLAVMRPPLWEPQLQAMEEPPVPVSVLHRFPFSSALQRMSVVVAWPGATQPEAYVKGSPELVAGLCNPETVPTDFAQMLQSYTAAGYRVVALASKPLPTVPSLEAAQQLTRDTVEGDLSLLGLLVMRNLLKPQTTPVIQALRRTRIRAVMVTGDNLQTAVTVARGCGMVAPQEHLIIVHATHPERGQPASLEFLPMESPTAVNGVKDPDQAASYTVEPDPRSRHLALSGPTFGIIVKHFPKLLPKVLVQGTVFARMAPEQKTELVCELQKLQYCVGMCGDGANDCGALKAADVGISLSQAEASVVSPFTSSMASIECVPMVIREGRCSLDTSFSVFKYMALYSLTQFISVLILYTINTNLGDLQFLAIDLVITTTVAVLMSRTGPALVLGRVRPPGALLSVPVLSSLLLQMVLVTGVQLGGYFLTLAQPWFVPLNRTVAAPDNLPNYENTVVFSLSSFQYLILAAAVSKGAPFRRPLYTNVPFLVALALLSSVLVGLVLVPGLLQGPLALRNITDTGFKLLLLGLVTLNFVGAFMLESVLDQCLPACLRRLRPKRASKKRFKQLERELAEQPWPPLPAGPLR

SEQ ID NO: 22555 - protein, 1009 aa, Homo sapiens
RYIWIETQQAFYQVSLLDHGRSCDDVHRSRHGLSLQDQMVRKAIYGPNVISIPVKSYPQLLVDEALNPYYGFQAFSIALWLADHYYWYALCIFLISSISICLSLYKTRKQSQTLRDMVKLSMRVCVCRPGGEEEWVDSSELVPGDCLVLPQEGGLMPCDAALVAGECMVNESSLTGESIPVLKTALPEGLGPYCAETHRRHTLFCGTLILQARAYVGPHVLAVVTRTGFCTAKGGLVSSILHPRPINFKFYKHSMKFVAALSVLALLGTIYSIFILYRNRVPLNEIVIRALDLVTVVVPPALPAAMTVCTLYAQSRLRRQGIFCIHPLRINLGGKLQLVCFDKTGTLTEDGLDVMGVVPLKGQAFLPLVPEPRRLPVGPLLRALATCHALSRLQDTPVGDPMDLKMVESTGWVLEEEPAADSAFGTQVLAVMRPPLWEPQLQAMEEPPVPVSVLHRFPFSSALQRMSVVVAWPGATQPEAYVKGSPELVAGLCNPETVPTDFAQMLQSYTAAGYRVVALASKPLPTVPSLEAAQQLTRDTVEGDLSLLGLLVMRNLLKPQTTPVIQALRRTRIRAVMVTGDNLQTAVTVARGCGMVAPQEHLIIVHATHPERGQPASLEFLPMESPTAVNGVKDPDQAASYTVEPDPRSRHLALSGPTFGIIVKHFPKLLPKVLVQGTVFARMAPEQKTELVCELQKLQYCVGMCGDGANDCGALKAADVGISLSQAEASVVSPFTSSMASIECVPMVIREGRCSLDTSFSVFKYMALYSLTQFISVLILYTINTNLGDLQFLAIDLVITTTVAVLMSRTGPALVLGRVRPPGALLSVPVLSSLLLQMVLVTGVQLGGYFLTLAQPWFVPLNRTVAAPDNLPNYENTVVFSLSSFQYLILAAAVSKGAPFRRPLYTNVPFLVALALLSSVLVGLVLVPGLLQGPLALRNITDTGFKLLLLGLVTLNFVGAFMLESVLDQCLPACLRRLRPKRASKKRFKQLERELAEQPWPPLPAGPLR

SEQ ID NO: 22556 - protein, 840 aa, Homo sapiens
MGHFEKGQHALLNEGEENEMEIFGYRTQGCRKSLCLAGSIFSFGILPLVFYWRPAWHVWAHCVPCSLQEADTVLLRTTDEFQIYSWKKVIWIYLSALNSAFGLTPDHPLMTDEEYIINRAIRKPDLKVRCIKVQKIRYVWNYLEGQFQKIGSLEDWLSSAKIHQKFGSGLTREEQEIRRLICGPNTIDVEVTPIWKLLIKEVLNPFYIFQLFSVCLWFSEDYKEYAFAIIIMSIISISLTVYDLREQSVKLHHLVESHNSITVSVCGRKAGVQELESRVLVPGDLLILTGNKVLMPCDAVLIEGSCVVDEGMLTGESIPVTKTPLPKMDSSVPWKTQSEADYKRHVLFCGTEVIQAKAACSGTVRAVVLQTGFNTAKGDLVRSILYPKPVNFQLYRDAIRFLLCLVGTATIGMIYTLCVYVLSGEPPEEVVRKALDVITIAVPPALPAALTTGIIYAQRRLKKRGIFCISPQRINVCGQLNLVCFDKTGTLTRDGLDLWGVVSCDRNGFQEVHSFASGQALPWGPLCAAMASCHSLILLDGTIQGDPLDLKMFEATTWEMAFSGDDFHIKGVPAHAMVVKPCRTASQVPVEGIAILHQFPFSSALQRMTVIVQEMGGDRLAFMKGAPERVASFCQPETVPTSFVSELQIYTTQGFRVIALAYKKLENDHHATTLTRETVESDLIFLGLLILENRLKEETKPVLEELISARIRTVMITGDNLQTAITVARKSGMVSESQKVILIEANETTGSSSASISWTLVEEKKHIMYGNQDNYINIRDEVSDKGREGSYHFALTGKSFHVISQHFSSLLPKILINGTIFARMSPGQKSSLVEEFQKLE

SEQ ID NO: 22557 - protein, 701 aa, Homo sapiens
MSEIEEIFSTDLVPGDVMVIPLNGTIMPCDAVLINGTCIVNESMLTGESVPVTKTNLPNPSVDVKGIGDQLYNPETHKRHTLFCGTTVIQTRFYTGELVKAIVVRTGFSTSKGQLVRSILYPKPTDFKLYRDAYLFLLCLVAVAGIGFIYTIINSILNEVQVGVIIIESLDIITITVPPALPAAMTAGIVYAQRRLKKIGIFCISPQRINICGQLNLVCFDKTGTLTEDGLDLWGIQRVENARFLSPEENVCNEMLVKSQFVACMATCHSLTKIEGVLSGDPLDLKMFEAIGWILEEATEEETALHNRIMPTVVRPPKQLLPESTPAGNQEMELFELPATYEIGIVRQFPFSSALQRMSVVARVLGDRKMDAYMKGAPEAIAGLCKPETVPVDFQNVLEDFTKQGFRVIALAHRKLESKLTWHKVQNISRDAIENNMDFMGLIIMQNKLKQEPPAVLEDLHKANIRTVMVTGDSMLTAVSVARDCGMILPQDKVIIAEALPPKDGKVAKINWHYADSLTQCSHPSAIDPEAIPVKLVHDSLEDLQMTRYHFAMNGKSFSVILEHFQDLVPKLMLHGTVFARMAPDQKTQLIEALQNVDYFVGMCGDGANDCGALKRAHGGISLSELEASVASPFTSKTPSISCVPNLIREGRAALITSSCELALFSIVTYSLDHFIISILISSMLVLFFSDFHNCAFYSLV

SEQ ID NO: 22558 - protein, 842 aa, Homo sapiens [sequence omitted]

SEQ ID NO: 22559 - protein, 290 aa, Homo sapiens
ILTGNKVLMPCDAVLIEGSCVVDEGMLTGESIPVTKTPLPKMDSSVPWKTQSEADYKRHVLFCGTEVIQAKAACSGTVRAVVLQTGFNTAKGDLVRSILYPKPVNFQLYRDAIRFLLCLVGTATIGMIYTLCVYVLSGEPPEEVVRKALDVITIAVPPALPAALTTGIIYAQRRLKKRGIFCISPQRINVCGQLNLVCFDKTGTLTRDGLDLWGVVSCDRNGFQEVHSFASGQALPWGPLCAAMASCHSLILLDGTIQGDPLDLKMFEATTWVSLCSSENLRSFFNARAT

SEQ ID NO: 22560 - protein, 684 aa, Homo sapiens
TDFKLYRDAYLFLLCLVAVAGIGFIYTIINSILNEVQVGVIIIESLDIITITVPPALPAAMTAGIVYAQRRLKKIGIFCISPQRINICGQLNLVCFDKTGTLTEDGLDLWGIQRVENARFLSPEENVCNEMLVKSQFVACMATCHSLTKIEGVLSGDPLDLKMFEAIGWILEEATEEETALHNRIMPTVVRPPKQLLPESTPAGNQEMELFELPATYEIGIVRQFPFSSALQRMSVVARVLGDRKMDAYMKGAPEAIAGLCKPETVPVDFQNVLEDFTKQGFRVIALAHRKLESKLTWHKVQNISRDAIENNMDFMGLIIMQNKLKQETPAVLEDLHKANIRTVMVTGDSMLTAVSVARDCGMILPQDKVIIAEALPPKDGKVAKINWHYADSLTQCSHPSAIDPEAIPVKLVHDSLEDLQMTRYHFAMNGKSFSVILEHFQDLVPKLMLHGTVFARMAPDQKTQLIEALQNVDYFVGMCGDGANDCGALKRAHGGISLSELEASVASPFTSKTPSISCVPNLIREGRAALITSFCVFKFMALYSIIQYFSVTLLYSILSNLGDFQFLFIDLAIILVVVFTMSLNPAWKELVAQRPPSGLISGALLFSVLSQIIICIGFQSLGFFWVKQQPWYEVWHPKSDACNTTGSGFWNSSHVDNETELDELIYKIMKIPQCFLFPVFSTS

SEQ ID NO: 22561 - protein, 624 aa, Homo sapiens
MTAGIVYAQRRLKKIGIFCISPQRINICGQLNLVCFDKTGTLTEDGLDLWGIQRVENARFLSPEENVCNEMLVKSQFVACMATCHSLTKIEGVLSGDPLDLKMFEAIGWILEEATEEETALHNRIMPTVVRPPKQLLPESTPAGNQEMELFELPATYEIGIVRQFPFSSALQRMSVVARVLGDRKMDAYMKGAPEAIAGLCKPETVPVDFQNVLEDFTKQGFRVIALAHRKLESKLTWHKVQNISRDAIENNMDFMGLIIMQNKLKQETPAVLEDLHKANIRTVMVTGDSMLTAVSVARDCGMILPQDKVIIAEALPPKDGKVAKINWHYADSLTQCSHPSAIDPEAIPVKLVHDSLEDLQMTRYHFAMNGKSFSVILEHFQDLVPKLMLHGTVFARMAPDQKTQLIEALQNVDYFVGMCGDGANDCGALKRAHGGISLSELEASVASPFTSKTPSISCVPNLIREGRAALITSFCVFKFMALYSIIQYFSVTLLYSILSNLGDFQFLFIDLAIILVVVFTMSLNPAWKELVAQRPPSGLISGALLFSVLSQIIICIGFQSLGFFWVKQQPWYEVWHPKSDACNTTGSGFWNSSHVDNETELDELIYKIMKIPQCFLFPVFSTS

SEQ ID NO: 22562 - protein, 1149 aa, Mus musculus
MPTMRRTVSEIRSRAEGYEKTDDVSEKTSLADQEEVRTIFINQPQLTKFCNNHVSTAKYNVITFLPRFLYSQFRRAANSFFLFIALLQQIPDVSPTGRYTTLVPLLFILAVAAIKEIIEDIKRHKADNAVNKKQTQVLRNGAWEIVHWEKVNVGDIVIIKGKEYIPADTVLLSSSEPQAMCYIETSNLDGETNLKIRQGLPATSDIKDIDSLMRISGRIECESPNRHLYDFVGNIRLDGHGTVPLGADQILLRGAQLRNTQWVHGIVVYTGHDTKLMQNSTSPPLKLSNVERITNVQILILFCILIAMSLVCSVGSAIWNRRHSGKDWYLHLHYGGASNFGLNFLTFIILFNNLIPISLLVTLEVVKFTQAYFINWDLDMHYEPTDTAAMARTSNLNEELGQVKYIFSDKTGTLTCNVMQFKKCTIAGVAYGQSSQFGDEKTFNDPSLLDNLQNNHPTAPIICEFLTMMAVCHTAVPEREGDKIIYQAASPDEGALVRAAKQLNFVFTGRTPDSVIIDSLGQEERYELLNVLEFTSARKRMSVVVRTPSGKLRLYCKGADTVIYERLAETSKYKEITLKHLEQFATEGLRTLCFAVAEISESDFEEWRAVYHRASTSVQNRLLKLEESYELIEKNLQLLGATAIEDKLQDQVPETIETLMKADIKIWILTGDKQETAINIGHSCRLLKRNMGMIVINEGSLDGTRETLSRHCTTLGDALRKENDFALIIDGKTLKYALTFGVRQYFLDLALSCKAVICCRVSPLQKSEVVEMVKKQVKVITLAIGDGANDVSMIQTAHVGVGISGNEGLQAANSSDYSIAQFKYLKNLLMVHGAWNYNRVSKCILYCFYKNIVLYIIEIWFAFVNGFSGQILFERWCIGLYNVMFTAMPPLTLGIFERSCRKENMLKYPELYKTSQNALDFNTKVFWVHCLNGLFHSVILFWFPLKALQYGTVFGNGKTSDYLLLGNFVYTFVVITVCLKAGLETSYWTWFSHIAIWGSIALWVVFFGIYSSLWPAVPMAPDMSGEAAMLFSSGVFWVGLLSIPVASLLLDVLYKVIKRTAFKTLVDEVQELEAKSQDPGAVVLGKSLTERAQLLKNVFKKNHVNLYRSESLQQNLLHGYAFSQDENGIVSQSEVIRAYDTTKQRPDEW

SEQ ID NO: 22563 - protein, 1164 aa, Mus musculus
MPTMRRTVSEIRSRAEGYEKTDDVSEKTSLADQEEVRTIFINQPQLTKFCNNHVSTAKYNVITFLPRFLYSQFRRAANSFFLFIALLQQIPDVSPTGRYTTLVPLLFILAVAAIKEIIEDIKRHKADNAVNKKQTQVLRNGAWEIVHWEKVAVGEIVKVTNGEHLPADLLSLSSSEPQAMCYIETSNLDGETNLKIRQGLPATSDIKDIDSLMRISGRIECESPNRHLYDFVGNIRLDGHGTVPLGADQILLRGAQLRNTQWVHGIVVYTGHDTKLMQNSTSPPLKLSNVERITNVQILILFCILIAMSLVCSVGSAIWNRRHSGKDWYLHLHYGGASNFGLNFLTFIILFNNLIPISLLVTLEVVKFTQAYFINWDLDMHYEPTDTAAMARTSNLNEELGQVKYIFSDKTGTLTCNVMQFKKCTIAGVAYGHVPEPEDYGCSPDEWQSSQFGDEKTFNDPSLLDNLQNNHPTAPIICEFLTMMAVCHTAVPEREGDKIIYQAASPDEGALVRAAKQLNFVFTGRTPDSVIIDSLGQEERYELLNVLEFTSARKRMSVVVRTPSGKLRLYCKGADTVIYERLAETSKYKEITLKHLEQFATEGLRTLCFAVAEISESDFEEWRAVYHRASTSVQNRLLKLEESYELIEKNLQLLGATAIEDKLQDQVPETIETLMKADIKIWILTGDKQETAINIGHSCRLLKRNMGMIVINEGSLDGTRETLSRHCTTLGDALRKENDFALIIDGKTLKYALTFGVRQYFLDLALSCKAVICCRVSPLQKSEVVEMVKKQVKVITLAIGDGANDVSMIQTAHVGVGISGNEGLQAANSSDYSIAQFKYLKNLLMVHGAWNYNRVSKCILYCFYKNIVLYIIEIWFAFVNGFSGQILFERWCIGLYNVMFTAMPPLTLGIFERSCRKENMLKYPELYKTSQNALDFNTKVFWVHCLNGLFHSVILFWFPLKALQYGTVFGNGKTSDYLLLGNFVYTFVVITVCLKAGLETSYWTWFSHIAIWGSIALWVVFFGIYSSLWPAVPMAPDMSGEAAMLFSSGVFWVGLLSIPVASLLLDVLYKVIKRTAFKTLVDEVQELEAKSQDPGAVVLGKSLTERAQLLKNVFKKNHVNLYRSESLQQNLLHGYAFSQDENGIVSQSEVIRAYDTTKQRPDEW

SEQ ID NO: 22564 - protein, 1148 aa, Mus musculus
MSRATSVGDQLEAPARIIYLNQSHLNKFCDNRISTAKYSVLTFLPRFLYEQIRRAANAFFLFIALLQQIPDVSPTGRYTTLVPLVIILTIAGIKEIIEDFKRHKADNAVNKKKTIVLRNGMWHTIMWKEVAVGDIVKVLNGQYLPADMVLFSSSEPQGMCYVETANLDGETNLKIRQGLSHTTDMQTRDVLMKLSGRIECEGPNRHLYDFTGNLHLDGKSSVALGPDQILLRGTQLRNTQWVFGVVVYTGHDSKLMQNSTKAPLKRSNVEKVTNVQILVLFGILLVMALVSSVGALFWNGSHGGKSWYIKKMDTNSDNFGYNLLTFIILYNNLIPISLLVTLEVVKYTQALFINWDMDMYYIENDTPAMARTSNLNEELGQVKYLFSDKTGTLTCNIMNFKKCSIAGVTYGHFPELAREQSSDDFCRMTSCTNDSCDFNDPRLLKNIEDQHPTAPCIQEFLTLLAVCHTVVPEKDGDEIIYQASSPDEAALVKGAKKLGFVFTGRTPYSVIIEAMGQEQTFGILNVLEFSSDRKRMSVIVRLPSGQLRLYCKGADNVIFERLSKDSKYMEETLCHLEYFATEGLRTLCVAYADLSENEYEEWLKVYQEASIILKDRAQRLEECYEIIEKNLLLLGATAIEDRLQAGVPETIATLLKAEIKIWVLTGDKQETAINIGYSCRLVSQNMALILLKEDSLDATRAAITQHCTDLGNLLGKENDVALIIDGHTLKYALSFEVRRSFLDLALSCKAVICCRVSPLQKSEIVDVVKKRVKAITLAIGDGANDVGMIQTAHVGVGISGNEGMQATNNSDYAIAQFSYLEKLLLVHGAWSYNRVTKCILYCFYKNVVLYIIELWFAFVNGFSGQILFERWCIGLYNVIFTALPPFTLGIFERSCTQESMLRFPQLYRITQNAEGFNTKVFWGHCINALVHSLILFWVPMKALEHDTPVTSGHATDYLFVGNIVYTYVVVTVCLKAGLETTAWTKFSHLAVWGSMLIWLVFFGVYSTIWPTIPIAPDMKGQATMVLSSAYFWLGLFLVPTACLIEDVAWRAAKHTCKKTLLEEVQELETKSRVMGKAMLRDSNGKRMNERDRLIKRLSRKTPPTLFRTGSIQQCVSHGYAFSQEEHGAVTQEEIVRAYDTTKENSRKK

SEQ ID NO: 22565 - protein, 1187 aa, Mus musculus
MDCSLLRTLVRRYCAGEENWVDSRTIYVGHKEPPPGAEAYIPQRYPDNRIVSSKYTFWNFIPKNLFEQFRRIANFYFLIIFLVQLIIDTPTSPVTSGLPLFFVITVTAIKQGYEDWLRHKADNAMNQCPVHFIQHGKLVRKQSRKLRVGDIVMVKEDETFPCDLIFLSSNRADGTCHVTTASLDGESSHKTHYAVQDTKGFHTEADVDSLHATIECEQPQPDLYKFVGRINVYNDLNDPVVRPLGSENLLLRGATLKNTEKIFGVAIYTGMETKMALNYQSKSQKRSAVEKSMNTFLIVYLCILVSKALINTVLKYVWQSEPFRDEPWYNEKTESERQRNLFLRAFTDFLAFMVLFNYIIPVSMYVTVEMQKFLGSYFITWDEDMFDEEMGEGPLVNTSDLNEELGQVEYIFTDKTGTLTENNMAFKECCIEGHVYVPHVICNGQVLPDSSGIDMIDSSPGVCGREREELFFRAICLCHTVQVKDDHCGDDVDGPQKSPDAKSCVYISSSPDEVALVEGVQRLGFTYLRLKDNYMEILNRENDIERFELLEVLTFDSVRRRMSVIVKSTTGEIYLFCKGADSSIFPRVIEGKVDQVRSRVERNAVEGLRTLCVAYKRLEPEQYEDACRLLQSAKVALQDREKKLAEAYEQIEKDLVLLGATAVEDRLQEKAADTIEALQKAGIKVWVLTGDKMETASATCYACKLFRRSTQLLELTTKKLEEQSLHDVLFDLSKTVLRCSGSMTRDSFSGLSTDMHDYGLIIDGAALSLIMKPREDGSSSGNYRELFLEICRNCSAVLCCRMAPLQKAQIVKLIKFSKEHPITLAIGDGANDVSMILEAHVGIGVIGKEGRQAARNSDYAIPKFKHLKKMLLVHGHFYYIRISELVQYFFYKNVCFIFPQFLYQFFCGFSQQTLYDTAYLTLYNISFTSLPILLYSLMEQHVGIDVLKRDPTLYRDIAKNALLRWRVFIYWTFLGVFDALVFFFGAYFIFENTTVTINGQMFGNWTFGTLVFTVMVLTVTLKLALDTHYWTWINHFVIWGSLLFYIAFSLLWGGVIWPFLSYQRMYYVFISMLSSGPAWLGIILLVTVGLLPDVLKKVLCRQLWPTATERTQNIQHQDSISEFTPLASLPSWGAQGSRLLAAQCSSPSGRVVCSRWESEECPVLPLHPGLPHKARYGCCRSSLEMPT

SEQ ID NO: 22566 - protein, 1116 aa, Mus musculus
MFRRTLNRLCAGEEKRVGTRTVFVGNHPISGTEPYIAQRFCDNRIVSSKYTLWNFLPKNLFEQFRRIANFYFLIIFLVQVTVDTPTSPVTSGLPLFFVITVTAIKQGYEDWLRHRADNEVNKSAVYIIENAKRVRKESEKIKVGDVVEVQANETFPCDLILLSSCTTDGTCYVTTASLDGESNCKTHYAVRDTIALCTAESIDNLRATIECEQPQPDLYRFVGRISIYSNSIEAVARSLGPENLLLKGATLKNTKKIYGVAVYTGMETKMALNYQGKSQKCSAVEKSINAFLIVYLFILLTKAAVCTTLKYVWQSSPYNDEPWYNQKTQKERETFQVLKMFTDFLSFMVLFNFIIPVSMYVTVEMQKFLGSFFISWDKDFFDEEINEGALVNTSDLNEELGQVDYVFTDKTGTLTENSMEFIECCIDGHKYKGTTQEVDGLSQTDGPLAYFDKADKNREALFLRALCLCHTVEMKTNDDVDGPVEGAGFTYISSSPDEIALVKGAKRFGFTFLGNQNGYIRVENQRKEIEEYELLHTLNFDSVRRRMSVIVRTQKGDILLFCKGADSSIFPRVHSHQIELTKDHVERNAMDGYRTLCVAFKEIPPDDFERINAQLVEAKMALQDREEKLEKVFDEIETNMNLIGATAVEDKLQDQAAETIEALHAAGLKVWVLTGDKMETAKSTCYACRLFQTNTELLELTTKTIEESERKEDRLHELLIEYRKKLLHEFPKSTRSLKKAWTEHQEYGLIIDGSTLSLILNSSQDCSSNNYKSIFLQICMKCTAVLCCRMAPLQKAQIVRMVKNLKGSPITLSIGDGANDVSMILESHVGIGIKGKEGRQAARNSDYSVPKFKHLKKLLLVHGHLYYVRIAHLVQYFFYKNLCFILPQFLYQFFCGFSQQPLYDAAYLTMYNICFTSLPILAYSLLEQHINIDTLTADPRLYMKITGNAMLQLGPFLHWTFLAAFEGTVFFFGTYFLFQTSSLEDNGKIYGNWTFGTIVFTVLVFTVTLKLALDTRFWTWINHFVIWGSLAFYVFFSFFWGGIIWPFLKQQRMYFVFAQMLCSVSTWLAIILLIFISLFPEILLIVVKNVRRRSARNPNLELPMLLSYKHIDRGCS

SEQ ID NO: 22567 - protein, 589 aa, Mus musculus
MNNSEPQAMCYIETSNLDGETNLKIRQGLPATSDIKDIDSLMRISGRIECESPNRHLYDFVGNIRLDGHGTVPLGADQILLRGAQLRNTQWVHGIVVYTGHDTKLMQNSTSPPLKLSNVERITNVQILILFCILIAMSLVCSVGSAIWNRRHSGKDWYLHLHYGGASNFGLNFLTFIILFNNLIPISLLVTLEVVKFTQAYFINWDLDMHYEPTDTAAMARTSNLNEELGQVKYIFSDKTGTLTCNVMQFKKCTIAGVAYGQSSQFGDEKTFNDPSLLDNLQNNHPTAPIICEFLTMMAVCHTAVPEREGDKIIYQAASPDEGALVRAAKQLNFVFTGRTPDSVIIDSLGQEERYELLNVLEFTSARKRMSVVVRTPSGKLRLYCKGADTVIYERLAETSKYKEITLKHLEQFATEGLRTLCFAVAEISESDFEEWRAVYHRASTSVQNRLLKLEESYELIEKNLQLLGATAIEDKLQDQVPETIETLMKADIKIWILTGDKQETAINIGHSCRLLKRNMGMIVINEGSLDGTRETLSRHCTTLGDALRKENDFALIIDGKTLKYALTFGVRQYLLDLALSCKAVICCR

SEQ ID NO: 22568 - protein, 1477 aa, Rattus norvegicus
MGDTPTAQEAPRRRMIHTGRSGKYRLRFGGPTSMDDAHLEEDLEDKDTEFTWEVKANDRAYHKQFRKKGFLCWRQKKYKSNAIHTAKYNVFSFLPLNLYEQFRRVSNLYFLFIIILQSIPEISTLPWFTLFAPLVCLLMIRAARDLVDDIGSLRAGNGAGAWQSATSVSFILLIQGRHRSDRIINNRPCQILKGKSFLWKKWKNLCVGDVVCLSKDNIVPADLLLLASTEPSSLCYLETADIDGETNLKFRQALMVTHHELTSPKKMASFQGIVTCEEPNSRMHHFVGSLEWNSRKYPLDIGNLLLRGCKIRNTDTCYGLVIYAGLDTKIMKNCGKIHLKRTKLDLMMNKLVILIFMSLVIASMFLTLGFAFMVKEFKAKHHYMSSMQGRTDAMDSFFIFWGFLILLSVMVPMAMFIIAEFIYLGNSIFINWDLSMYYEPLDIPAKARSTSLNDHLGQVQYIFSDKTGTLTQNIMTFKKCCINGCTYVRSPWGINAWTKNQTTSNVVLSLTILGVPWKPELGRNPYSWNPFADGKLQFYNKELESLVRGKQDRAVQEFWRLLAICHTVMVQEKDNQLLYQAASPDEEALVAAARNFGYVFLSRTQDTITLVELGEERVYQVLAMMDFNSVRKRMSVLVRNPEGSICLYTKGADTVILERLHHKGVMEATTEEVLAAFAEQTLRTLCLAYKDVAEDAYKEWEPEHQEAALLLQNRAQALHQVYNKLEQNLQLLGVTAIEDKLQDGVPETIRCLKKGNIKMWVLTGDKPGREIGRGWGRPQGTDQDSVVGGALGKSVGLQDLALTRSACNLAGFAETAVNIGFACQLLSENMSILEDKDIKGLLENYWDENEHQRAFQTMTHHNMALVINGEFLDQLLLSLRKEPRALVQNAVVDEATQEPGVSALDFLQARRISQMWRNFGTTMATSQSDASKTRESPEERRERAFVDLASKCQAVICCRVTPKQKALVVALVKKYQQVVTLAIGDGANDVNMIKTADIGVGLAGQEGMQAVQNSDYVLAQFCYLQRLLLVHGRWSYMRICKFLRYFFYKTVASMMAQIWFSLFNGFSAQSGEGSPLLQPLYEGWFLALFNLLYSTLPVLYIGLFEQDVTAEKSLKMPELYTAGQKDELFNYSIFVQAIAHGTITSLINFFVTILVSYDMTKTGSSPDYQSFGVLVAISSLLSITLEVILVVKYWTLLFVGTVVVSLSSYVIFTSLTESLLLFRISPKTFPFLFADYNVIREPSSLLVIVLNVTLNTLPMLAVRIIRRTVLKRHPKKEEEVPSEELTVEPAMRLRRGMPARRSSYAFSHHEGYANLITQGTILRRHTHVDEFYGDTACNSPNPSEEDVPWQHKESIFNPRKISILAKKRRQHYGKGSQGEVHPNASSQTTEKQTAINIDNHETKKLPTTTSAMSGQLQVSSSEDQAFYSALSQYSLASRPERMDVRSSSWKGPLLRDSASSRSSHLEVTTQLHSHTSS

SEQ ID NO: 22569 - protein, 1793 aa, Rattus norvegicus
MVALDIDAIRTQAHIVQTGFMYPGPAHKAVGKAPSEACDTSVILSSQSLGCVESSLDWQCGWHPIDPTFHCGHGLAVWMASCPPHPPLWPWTGSVDGILPTPPLHCGHGLAVWMASCPPHPCTVAMDWQCGRHPVHPTPALWPWTGSVDGILSTPPCTVAMRTECLTFVWIEDANLQLKAFEMLGAHSTHELLSVIEVEQYRTKQLYVPRVLHMATHAGAVTLSMTKVQIPQCASVAFVSECRPSLSSAFPWPVLVCYTGVCEKEEKCHCAEHVGSCQMSSSRPFGIAWAVFPEASPMAPLRFCLELNKWAWLLGFYAVPAFSFFLSEELEIQHLTCVWRLWLSIVTVGQSISMEDTCALWLVPPYDSAPRNVVGSLCPNPADTYVDPWSVALTCKDEAEKQASHSASGTDVGQELRSFRIHWDELDVVGKGILSCIPCPLWASSVIAAGIWFQGWSLFQSEGIVGKISTRSFKHTLMMLFYPQCAGEENWVDSRTIYVGHKEPPPGAEAYIPQRYPDNRIVSSKYTFWNFIPKNLFEQFRRIANFYFLIIFLVQLIIDTPTSPVTSGLPLFFVITVTAIKQGYEDWLRHKADSAMNQCPVHFIQHGKLVRKQSRKLRVGDIVMVKEDETFPCDLIFLSSNRADGTCHVTTASLDGESSHKEDYDGSDRMAQYPDRSETRGLVLFWAVSAAAVAASLGNAGVLLLCTPVKEMHPHVYLCTIPQTHYAVQDTKGFHTEADVDSLHATIECEQPQPDLYKFVGRINVYNDLNDPVVRESSAYADGLGCLQCVAIYTGMETKMALNYQSKSQKRSAVEKSMNTFLIVYLCILVSKALINTVLKYVWQSEPFRDEPWYNQKTESERQRNLFLRAFTDFLAFMVLFNYIIPVSMYVTVEMQKFLGSYFITWDEDMFDEEMGEGPLVNTSDLNEELGQVEYIFTDKTGTLTENNMAFKECCIEGHVYVPHVICNGQVLPDSSGIDMIDSSPGVSGREREELFFRAICLCHTVQVKDDHCGDDVDGPQKSPDAKSCVYISSSPDEVALVEGMQRLGFTYLRLKDNYMEILNRENDIERLLVRLCFLFLDHGEIYLFCKGADSSIFPRVIEGKVDQVRSRVERNAVIYLRCVKVTKPNQDRQHPSHCPGILRSILQLTREGLRTLCVAYKRLEPEQYEDACRLLQDAKVALQDREKKLAEAYEQIEKDLILLGATAVEDRLQEKAADTIEALQKAGIKVWVLTGDKMETASATCYACKLFRRSTQLLELTTKKLEEQSLHDVLFELSKTVLRCSGSLTRDSFSGYAAAHHMRPGSVAYECLHPCGSSGCCGLSTDMHDYGLIIDGAALSLIMKPREDGSSSGNYRELFLEICRNCSAVLCCRMAPLQKAQIVKLIKFSKEHPITLAIGDGANDVSMILEAHVGIGVIGKEGRQAARNSDYAIPKFKHLKKMLLVHGHFYYIRISELVQYFFYKTLYDTAYLTLYNISFTSLPILLYSLMEQHVGIDVLKRDPSLYRDIAKNALLRWRLFIYWTFLGVFDALVFFFGAYFMFENTTVTINGQIMTTNTSMACQQVCSIAEEASRVTPVLRAGHTDSHGYIQTQCSSSCPSAVGISVTRSRFPECVLEQTGRADLGDMMFGNWTFGTLVFTVMVSTVTLKLALDTHYWTWINHFVIWGSLLFYIVFSLLWGGIIWPFLSYQRMYYVFIYMLSSGPAWLGIILLVTVGLLPDVLKKVLCRQLWPTATERTQPSSNEPVQGRLFPSRGLCARCGQQSARLKALADATPNTDRPLLKDFLPQPRRV

SEQ ID NO: 22570 - protein, 1352 aa, Rattus norvegicus
MAMSLYEGPKTQLGLFIQLWKHQLTAVMHTVQRGKGVFKLVDSKAVSKLWGKRKNKPDMNYETMLQALRYTTKGEFLQRLKDRGLFKDMPQSIVVIDDDKSETCPEDLPSTCVSSSSSSKDSLCGNASPCGNDITGSKDFHCGSAVIKRPEVKSEAKKQEHDVKTLQLVEEKGADGNKTVTRVVVVSAPSAIALPVTMRTEGLATYTSVSVLLSFDIQARMNSPGYLIELDHLMKLYVNSDCTAKYSVLTFLPRFLYEQIRRAANAFFLFIALLQQIPDVSPTGRYTTLVPLVIILTIAGIKEIVEDFKRHKADNAVNKKKTIVLRNGMWHTIMWKEVAVGDIVKVLNGQYLPADMVLFSSSEPQGMCYVETANLDGETNLKIRQGLSHTADMQTREVLMKLSGRIECEGPNRHLYDFTGTLHLDGKSSVALGPDQILLRGTQLRNTQWVFGVVVYTGHDTKLMQIIYLRYIFRAQAKCNLYQNILIMSSMDKNSTKAPLKRSNVEKVTNVQILVLFGILLVMALVSSVGALFWNGSHGGKSWYIKKMDTTSDNFGYNLLTFIILYNNLIPISLLVTLEVVKYTQALFINWDTDMYYIENDTPAMARTSNLNEELGQVKYLFSDKTGTLTCNIMNFKKCSIAGVTYGHFPELAREQSSDDFWYPCPSQYLTSSQVPMSLTVPDIPYRYPCPSQYLTSSQVPMSLTVPDIITVPDIPYRYPCPSQYLTSSQVPMSLTVPDIPYRYPCPSQYLTSSQVPMSLTVPDIITVPDIITGTQCLSQYLTSSQVPMSLTVPDIITGTSSPLTVPDIITEVPMSLTVPDITQRYLMSLTVPDIITVPDIPQRYPCLSQYLTSLRGTSCPSQYLTSSQVPMSLTVPDIPHSRMTSCPSDSCDFNDPRLLKNIEDEHPTAPCIQEFLTLLAVCHTVVPEKDGDEIIYQASSPDEAALVKGAKKLGFVFTGRTPYSVIIEAMGQEQTFGILNVLEFSSDRKRMSVIVRMPSGQLRLYCKGALYTSTPNSEDSPNLKQFHSDNGYKAQSLNYGEDNVIFERLSKDSKYMEETLCHLEYFATEGLRTLCVAYADLSENEYEEWLKVYQEASIILKDRAQRLEECYEIIEKFLFEAWVLDMTELRSKSTGYSCRLVSQNMALILLKEDSLDIILSMRAVTVWFRNAVGELFIVRGLLFQLNTLRVQASHRKHPEPVFSKKIDPFSWTARPEIISFALDTSKLKTKSNKPKPVAGSTQFSVLTTQSAPQSPWLPHCNEQMDLTCFAKLIPSRLWLALFYASIKPVQNLPCVSPSTAVGFYMYHRPLLTKHNFSFSTSIYPHCLHSAARVGKRMGCPKVHALATCFKW

SEQ ID NO: 22571 - protein, 1613 aa, Rattus norvegicus
MREGRKRRKKKEDKKRVVVSNLPFEGWPYKENPNRHYQGNQVKTSKYTVLSFVPKNIFEQLHRFANLYFVGIVVLNFIPVLNAFQPEVSMVPVCVILTVTAIKDAWEDFRRYKSDKVINNRESLVYSRKEQSYMQKRWQDVRVGDFVQMRCNEIVPADILLLFSSDPSGVCHLETANLDGETNLKQRRVVKGFSQQEVQFQPEHFHSTIVCEKPNNHLSKFKGYMEHPDETRTGFGSESLLLRGCTIRNTEVAAGIVIYAGHETKAMLNNSGPRYKRSKIERRINTDIFFCIGLLFLMCLIGAVGHSLWNGTFKEHPPFDVPDADGNFLSPALGGFYMFLTMIILLQVLIPISLYVSIELVKLGQVFLLHNDLDLYDEETDLSIQCRALNITEDLGQIQYIFSDKTGTLTENKMVFRRCTIVGNEYCHQENDTAQPECNKDSFFTAKRLEMPKELDSDGEEWTQYQCLSFPPRWTQGPATIRSQGGAQPLRRCHSARVPIQSHSRQRSVGRWETSQPPVAFSSSIEKDVTPDKNLLSKVRDAALWLETLDTRPAKPSHSTTASIADFFLALTICNSVMVSTTTEPRKRVTTPPANKALGTSLEKIQHLFQRLKLLSLSQSFSSTAPSDTDLGESLGPNVPTIDADEKDDASVCSGDCSTDGGYRSSTWEQGDNLGSESGTSLEEGLEAPALSLDGPELCYEAESPDEAALVHAARAYSFTLVSRTPEQVTVRLPQGICLTFDLLFTLGFDSVRKRMSVVVRHPLTGEIVVYTKGADSVIMDLLEDPACVNQKDSRKLRVKLPEHLPMASWGNNNYLTGNDIDVEKKLKRIRARTQKHLDLYARDGLRTLCIAKKVVNEEDFQRWASFRREAEASLDNREELLMETAQHLENRLTLLGATGIEDRLQEGVPDTIAALREAGIQLWVLTGDKQETAVNVAHSCKLLDQADTVYSINTENQEAGMENEVRNVESECIPCQWSRDGIQQTWIKGAIYPWVSWKREPGNIVYTMGKEEQKGRRGCLLIRDYMTLQETCESILNCALEDVKRFHEPQQPARKLCGYCIPSKKPSVNLGAMAPEIGLVIDGKTLNAIFQGKLENKFLELTQYCRSVLCCRSTPLQKSMIVKLVRDKLSVMTLSIGDGANDVSMIQAADIGIGISGQEGMQAVMSSDFAIARFSHLKKLLLVHGHWCYSRLARMVVYYFYKNVCYVNLLFWYQFFCGFSGSTMIDYWQMIFFNLFFTSLPPIVFGILDKDVSAETLLALPELYKSGQNSEPCWLPNEVLQYIAYREREERREKREEQCYNLPTFWVSMADAFYQSLICFFIPYLTYRGSDIDVFTFGTPINTISLTTILLHQAMEMKTWGCRYLLRALKEHLHSNDSYTYSMTRVMQVNHSVLLFDVLRGFPNIQRHLRHLQQPYQSLLVDGKAALRPHVLPHLSPHSSRGSSTKPRSKFSTWKYGGGSISSSQENEGVSQARCPCHHFWFRPHYASGREVQLYRKTEASCNRISERHAKGRQLPLLHAAATVRPWGTHPCEGVKSLEKQAEWTVLGGVQKTGSLLERRTGRTAPWVTENKSSLRELKTTRVTFGNESSSIPTRFQNLSGAEFKSGFIIAG
